United States Patent Application Publication US 2004/0031072 A1 - sequence listing, part 29

SEQ ID NO: 133583 - DNA, 286 bp, Glycine max
  unsure (1)..(286): unsure at all n locations
  Clone ID: PAT_MRT3847_91630C.1
cccctcgttntncnntcccnccatgccccncccnncccnctntccccnccctccctgcccnnctnncncctntcgcgcgngccntcctcncntncntgcncncnngnngaatccgntcntccctcggnnttgcccnttccnctcttnccagcnncncgangnanttgttcnatntnattnnctnattncnactttccncctgccnagccccgnnntncctcngagtccccggggcttccattccncttttccggcccanggggncannntnnnccnnttngttnnc

SEQ ID NO: 133584 - DNA, 165 bp, Glycine max
  Clone ID: PAT_MRT3847_91631C.1
cgtccgcatgctcttccttttctcttttattattactaaaacatttcgccatggtgaatatattcaatgggtaaatagggatactatatgtattcaacacagcacgcacgcacaagagggttgtcagatttccaatttatgtctaaaggtttaccttatttaagc

SEQ ID NO: 133585 - DNA, 1478 bp, Glycine max
  Clone ID: PAT_MRT3847_91632C.1
ggctcgagctaggtgagtggtggaaatcagatgttgaagcaattctcaatcaggctgaaaattctggtctgccaccgaacatatcagatgctcataccatcaatggtcatacaggaccaattcccggttgcacttctcagggttacactctgcatgttgaaagtggcaagacctatcttctacgcataataaacgctgctttgaacgatgaactgttcttcaaaattgcggggcacaagttaacagtggttgaagcagatgcatcttacgttaagccttttgaaacagacacaattttcatgagcccaggccaaaccaccaatgtcctattaaccgctaaccaagttgttggcaaatacctaatagcagttactcctttcatggacgcccctataggctttgacaacgttacttcaattgctacacttcgctacaaaggcacaccaccttatcccaaaaacaacactaaccaccattcctgcactaaatgcaactcctttaacaagtgacttcattgattccctaagaagccttaactcaaaagaataccctgcaatagctcccttaaccgttgaccactctcttttcttttccataactgtaggccttaacccatgtcacacgtgtctcactggggccaggcttgtgtctgctattaataacatcacctttctaatgccaacaaccacatcacttcttgaagcacattactataacataaagggtgttttcactgatgatttcccttcattcccacctatagcttttaattacactggtactcaaccagctaatattcagacaaataatggcacaagactatacagattggatttcaattcaactgttcagattattctccagggcactgcaatgatagcaccagaaaatcacccttttcatttgcatgggtacaatttctttgttgttggccaggggctagggaactttgatccagagaaggacccattgagttttaatcttgttgatccagttgagagaaacaccattggggtaccaaatggtggatgggcagcaatcagattcagagcaaataacccaggtgtttggttcctgcattgccacttagaagtacacaccacatggggacttaagatggcattcatagtagacaacgggaacggtccccatgagtcctcgcttccaccacccaaagaccttccaatgtgctaaagtttctgatgaaatttggaatctgagagagacaatgagagtgtacattattatgctggagaggtgatgtcacggcctaaggggaagacatcaaattgtttgtgacagtttgtgaagttggatttgtagcagaaatcaataaaaacttgctgtagatagcaattcaaggcctttttattctattgtcaagtttaggatactaatgtaagttttgggttcataaaaatgtgatgtatgtgcttggtaaaatttcaatttgataaaaatggtcttttagaattcct

SEQ ID NO: 133586 - DNA, 1188 bp, Glycine max
  Clone ID: PAT_MRT3847_91633C.1
acggctgcgagaagacgacagaagggggacggagcagaggacaagatgggtagtgtgagttatagcaatctgaagaacgccatgatagcattcttggtccctctaccctccatcctattctacctctcattccaatcggccattagtactccttcttcttggtcttctctgtggacatggtgctatcaccaccctctgctattggccaatgtccttttcttcttcaatgtcaatttcctcttctggctcatcggcctaatccaatccagccactggatgattgacccgtattggacagtgatacctgtgatgcttgttcattactattcaactcaccctttggcacagtatcagtggtggaggtcgaggatcgtaacgttgttgacttgggcgtggagtgttaggctgatccacaactacttcaggcgagaaaagtggcagtggggtgccagggaggattggcgtttcactgatttgagccatcgctatggaaggcattggtggtgggcttctttcttcgccatctacgtccctcagcaggtgtttctgattggattgtctcttccgttctatgtcatccactcggtgaaccagcctctgagcatgtgggacttggtagccatagttgtgtgtgtatctggcattgtcacggcatacattgctgatactcagctttacaactttgtgagtagaaagaacaaggaggtccctattcttgacaaagggttgtggtattattctcggcatccaaattactttggagagcaggtgtggtggtggggaatggctgtgtttgcttggaacctgggacatggatgggctttcataggggcattagccaataccatgtgtttggcttatgtcactaagcttgtggaggaccgaatgttgaaacaagatagcagagcagaggcgtttaggctctatcagaagactacttccctatggattccttggttcaagtcatctcctttaggactcaaatctaaggatgcttgattttctttttccccttgttcgttagttgattgtaccaccatcttcttaattttgcctagtttgttcgattatgtaagagagccatgtgtgtgctccatgatttttgtataatatagcactttcctatagactatctcattttaatgccccaagctattaaaaccttcaatataaatatttatttatttt

SEQ ID NO: 133587 - DNA, 1216 bp, Glycine max
  Clone ID: PAT_MRT3847_91634C.1
tattcataactataacattaattataattatagttttatacctacttttatataactagttatataaacctacttattgttatagatatttttttcaaactagtttttttcagcatccctacttgttagtctgaatcccttggaaaacctgaatgcaaacagggccaacgacaggaaactctaccgaaatagttccggaaatgaccacattatgaaccttgcaaaaatgtcagactccagaaactcaatatgtgcagcacgcccaatgaaagagtttaaattcttgccgtaggaagtggcatcaaaaattatatcacaatagatgaaaactcgatgcttggagttatatacacggatttggtcctcaaaaccaatttaaaactcacatattataccttaaatgcaagttaagaagcgtgaataaaagtggcgtctaaaaatgctattaagagtcacaagacaagggaaaacctgaggggaagatagcaagataatatgcctaaaatgatccagagtcttctgcttacacagtttatagatgaatgtattttgaatatcctgatcatctgtgaaggtgagttgatgaatacactgtataccttttagtttcttcaaaagccacaatccagaattaaacaaagagtttgaactgtaaagataccccaattagcgaccaaataccgaaacatatgtatatagatatcttagaaatggctccatcatgctctctgctagtgctgttcttataataaggttaccaatagaatgtccaacgaaacttagcctaatatctcctaaattcccatatcttgaggccttgtccattttctttctaacaaaagaaattacttcctgagccagccgatgacccatttctctgaagtctcctgaagttttatcttcattagtctccgacattagaaattctaccttgggatctatcaaaagccattgatttcgaataagccgtagatccagatgatgcccctgtctcaagtatgaattgtcactgatagtccgacgtggtgcattcatcacacgttcagaaatgacaattggtatgcttgaaggatcaccaattatatgcatgtctggatttgccagttcgacctttctcaagtgttgcaatgctccgtcgatgaagttctgcggacgcgtgaaagacgcaggggcgatcctcgacccccggaccggggcccgcaggcggcacagcgtt

SEQ ID NO: 133588 - DNA, 256 bp, Glycine max
  Clone ID: PAT_MRT3847_91635C.1
gttcatttccaaggggaaaaggagttctggtaagagcatccattggatcatgttcgccttctgtctcaagagcaggataagctaagtgatgacctatccatctcctcctacgagatgaatgatgttgcacccaaaagggaacctcacacagggataagcagacactggatatgaactcccatcttactgatcacccaattgttggacaagataatccttatgcttcagctggtgggcaagagtcctataacgatgc

SEQ ID NO: 133589 - DNA, 966 bp, Glycine max
  Clone ID: PAT_MRT3847_91636C.1
ccacgcgtccgctcttactcccatgcatacttagaacaaacaaacactgatgtagtctctggacatggacacgccagagaggaatcagatcacctctactctctctaagtttgaggattcacctgttttcaactatatcaatagtttgtctcctataaagcccgttaagtctgttcccatcagtcagactttcaattcactgagcttttcgtcccctccatcggttttcacatcaccccatgtcagctgtctcaaggaatctagattcctccggagacataacccgttgggcacatcgaagcctaaggttccttctgaagatgtaattaaagttcactcaagtgaagagactcttgcagattctacacgtgcacaccataactcaagtaaattagaggaggaaaacactggtaaagggatttcagtaagagatgcttcaatcgagctatctagggagcacataaaattttcagatgagctaccgcaagcgttaaaatataattgtggtagccctggctatgatcctccaccttgtggtgatgaggccaactctcttttggaattgcctggtgaggcagcagaaaatgttggctatgttcaggaaggctgtaaaactgattctgttgagggtgaagtgcatcttcaggaagtatgtcagatggagccaaagagtgaaggtccagactgttattgggatagtttaattcctgatgcccctgatatgctaatttttaattccccaggtgaggcagaagcttttaagggtctaatgcacaaacccttggactcttctattcgactcagcaaatttatgtctatgcttccacattctaccatcaataatggtaggaaaatgcacattgttgattcagttgcttctggttctgcccatgaaattgaagataatcattctgagccgatgacagccacaggcacgagccaaactcaggataatctttgccgatg

SEQ ID NO: 133590 - DNA, 403 bp, Glycine max
  Clone ID: PAT_MRT3847_91637C.1
ccactacctgggcaactgttactggaacctgataacacactgtaatggtgtatcaaagacccttactaaagtcttgagttatgcccagaaaccttttatacaaacagagacatgctactcattgataaacagacggttctgactttttgacatgggtgccgatatgtgtccatatcaaccttgtgcgccaaaaaagcaaatgttgattacaccttggcagaactgacaacacgagtaactgtgataatcacaacgcttcattctatgtctccctcaaaacatagtgtgaaccgctggagactacttctcattaaaatactcaacataccagtgaatctatgatgggatgaatctggctgacagcactggctactcatggatgattgactgcatatctacctga

SEQ ID NO: 133591 - DNA, 309 bp, Glycine max
  Clone ID: PAT_MRT3847_91638C.1
acccccgactaaggataaaatttgaagatgcataaatcaagcaaaataagaacaagttccaagcgttagttccgaaacacatacaacaaattaatttatcaaaatttggaacaagttacgaaccagtgtcataaaattttgcttaacaaatgggagagtagcttttgaatttttggtgtagttacagcttaaaacttaccaacatggctattcctcccacacttggaccttcaattgccttaaagcaactaactgcttccccattggctgagctttcactaaacagatgtgaagaaaatattccatttt

SEQ ID NO: 133592 - DNA, 336 bp, Glycine max
  Clone ID: PAT_MRT3847_91639C.1
gtggggggtgggactctaaaattgaaattgaatagatcaattccgattacaccacgttcatagggcggattcctctggtccgcatggtgtacccgggctagtcgtgcgaaagaagagcccggaaagaaactaggtggtggtggcggttcttgttttccggtggggacatgaaccgacacccttgccacagttttgctcgtccttgggagggggcttcctgcggcggatcttgcgcctcggtgagcaccttccacagtcaccccctctggtcctatggtcgggggtgtggccgggcctttctgttcttccccggttcccttgggcgcgcttccgcga

SEQ ID NO: 133593 - DNA, 1604 bp, Glycine max
  Clone ID: PAT_MRT3847_9163C.1
ggctcgaggttttatttgcttggttactgtgatattgtgcattttctcgtctagttttcttcagcattcaacaaacttcttcaccctctctatcttccaatcctttttttccattccctactattccctatcatctttctttgctttctcatctttttccttttcccaagcaattgtactttttaggggcatacacgtaaagcagttggtttctggagtagttagagttacatgtgttttgcaggcacatggcaatatatgaaatggatcccgatgttgttcgctggggtcttcatctcctagatgtctgcacactttctcaccattattcccctagtattgtaactcaatatgatcctgatttaagtcaagttgaatatgttaccgaaggcttttgtcagcatcagtatgtggatagtgacgaggctgttgcacaagcttatcaagaagaattatcgcaacttgattccatgggagcttctgggatatccaattttgagaatgaaggaatgcaaggatctgtttatacacaagattggcctcaatcttcaaatggaaattataactttggcaatgaatcttgccagaactctgtagatgagtcctataatatgaaagaagtggggaattatggtccaactccaagtgaaagaaaaaatgacgtgcatgaaaatgatgtttgtggttcgtcttctggatcagtagaggtacctgctactgctactagtgatgacttctgggattcattggaaatatcggatgaatctcttgatggtgaagttggcaaaagattaaaccagatggttcccattatgttcctaaaaccaatgaaaaaataccatctgatgatgaagaaatatcagatcatcaaaggcttctagacagattgcagttatatgatctgattgaatgcaaggttcaaggagatggtaactgccagttccgttctttatcagatcaactctatcgttctccggaccaccacaaatttgtgcggcagcaaattgttcaacagctcaaatcttaccccgatctatatgctggttatgttcccatggcttatattgactatttgaaaaacatgagcaagagtggcgaatggggtgatcatgtcacgttgcaggctgctgcagattggtatggtgtcaaaatttttgttattacgtcttttaaggacacatgttacatcgagattcttccacagatacagaagtctggaagagtgatatttctgagcttttgggcagaagttcattacaactcaatttatccggaaggagaactgccctcatctcatacaaagaaaaagaagaaatggtggaatttcggtggctaggttcagtgtcagtcatatgggatggaactaatcactcatcagtccctgattatgatcgatccatcggctttgtgattattgagcctttaatgtttgagtgttgctaacactaactctgcctccattattttgtatatattaacattttctttttctgtatagtattcttttgtatatattattttatttatcctattttttacctgcctaattttcggtgtttctttttcctcttgttgaaaagggggtctaggcagatttaaaaaaa

SEQ ID NO: 133594 - DNA, 640 bp, Glycine max
  Clone ID: PAT_MRT3847_91640C.1
ggcctgccaataacccttcaattttttcatccaaacaataaaaggggggggtaaaaacaaaaactagatggagcaattgtaaaacgatgatctaaaaaaaaaattgggaacaaactaaaaatgaactgtaaaacttataaacttaagcagagagcacttttggtcaatgttgcattatcgaaaaggaccaaacaagtactttttttccaaaataaagatttagcaacaaaactagggatggtcctaatgaagtctcacccccaaaactttgtttatcaatgcatctcagtcattcctcaacttttatgtcccaatgtttgagcctgaaggttttggttgtcttctaagagtctatcatattcaagcagtagatctgcagcttgcttttggagggaagcaacatgtgcttcggcggtctcgactttcttatccttctcttcagattccgatttaatcttttccaaacttttggacagacatgaaagttcttcctttagctgtttaatctccttggatgctttctcatccttttctttaagttggacagtttcttttttaaggttttccaattcttcttttgaagctcccgcattactccttaaattaataagtttttgaagataatggtgggtacgatcaa

SEQ ID NO: 133595 - DNA, 147 bp, Glycine max
  Clone ID: PAT_MRT3847_91641C.1
gacataaaacacacttctagcatcaggggcgagggcccactattatggcaatgttgagaggcatactgatgactatggctagcctggttcatgccactactgtaatatatgtagctcactaaaagagttggtggctacaacgataac

SEQ ID NO: 133596 - DNA, 278 bp, Glycine max
  Clone ID: PAT_MRT3847_91642C.1
cttttataaaaggggaacaataattggtgtttttttactcaaatcccgatttttgggccccctccctgaagagccaaaaagaaaaaccggggtttttttttcccataatgtttcccctttaagttggaaaaaattttctagggttgtttaatgcctcatggcccattttattgtggggggccgggggggctttttaaactttaaaccctttgaaaccacgggtggtaaaccataaaaagggaattttttgccgattgtccttaaaaaaaaacaggttt

SEQ ID NO: 133597 - DNA, 323 bp, Glycine max
  Clone ID: PAT_MRT3847_91643C.1
atatcgaaaaatataatttctttattaactgaaatggccaaaacgaaaacaagaccctaggattcttttttttttctttctgggattcacatatcgctagcttcattttacatgaaattcaagcagcagtagctcgtgctgacactaggagggctacagatcatcttaaataagtctattctgaagcagaacgacttacataccgggcttttagggatgctgagaccgccactacccacagaaggactccaggcacaagaggggggatgaggaactcctggctccattctgagcagtgtaggaaatttgtaacctgcgattaa

SEQ ID NO: 133598 - DNA, 275 bp, Glycine max
  Clone ID: PAT_MRT3847_91644C.1
ccccccgccgccggcagagcggggagacacaaacagcgggccgcggacacgggaaaccccgagcggaaaacggaaggaccaggccgcgagcggcgcgcaggaagcacccacaaacccgaacgaggagcggagccaaaaagaccagggaaaaggggcgggcagggaggaacccgacaggccaaagcgtgaaccagcccaaaggagaaaaggggggggacacggaagaaagcccacaaacagcccgggaccagggaagagggaccgcgagaaaaccc

SEQ ID NO: 133599 - DNA, 568 bp, Glycine max
  Clone ID: PAT_MRT3847_91645C.1
gccagatgctttcagacttggatgtaaaagctgctacaagacaactgatttgttgtcaaattttgacagcagacaaaatagtttacaattctaaactttctcacaatttggcctttctactcttcaatttgagaacaagttttaacatggatattagacatcaaacctcaagtaatttataggatctaacttattatattctctgtgttcctcatttgaactaggtgcattcatcttgattttgttaagttacaaggttcaaatactcttaactttgattgccatttagtgaagtttattagttttctatttgttcatttatgttacttctaaaaagagttagcatttaatacctcttaaacacagagaaacacatgtttcatactcatggataaccatgccatatcccacacactgatttccgcctaaagcaagattagttgtcaatccttctttgataaaattactattattctagtgaataaagcttgatggaacttcttttaagttcaaaaatacaaccataacttatcaatgattagtcacaaatttgaaattagtagtagta

SEQ ID NO: 133600 - DNA, 520 bp, Glycine max
  unsure (1)..(520): unsure at all n locations
  Clone ID: PAT_MRT3847_91646C.1
ccacgcgtccggggagaagtgtttaaaatatgagcgaagaagaagaagaagaagaaggaagtgtgatggatggagttatggaagtaaccaagtgggcgcaggagaagaagacagaccctctgatatggtcgatccaggtcagctccgccctgaactcaggcggcgtctccctcccttccgtcgagctggcacagcggctggtctcccacatctgcttcgagaatcacgtgcccatcacgtggaagttcctcgagaaagccatgtccgtcagactcctccctcctctgctcgtgctctccctcctctccgcccgcgtngtgcctcagcgccgnctncacccttncgcctacgctctctacatggacctcctcaggcgccacgccttctcccctcacatncacttncccaattacctcaaagtcatgggctccatccatcactccctatctnttnccccctccaaccaccaccctcatnccggcggcggtctcggtcactttctcttctctatcgtctcgca

SEQ ID NO: 133601 - DNA, 1456 bp, Glycine max
  Clone ID: PAT_MRT3847_91647C.1
gttcagagagagcaagtcagacgatagacggttctatatattcacggccacaaagactctccatctgagaactgattcgaggaaggaccgtgtggcgtggatacaagctttggtttcaacccgtggattgtacccacttcgaccactcagtgaccatctctccctcgcgccaaatcatatatctgtgtcaaccgaggggcttaagaaacgcttgcttgaagagggtagcagtgagagccttgccaaggattgcgagcaaatcatgctcgcggagttctccgaattgcaagagcaacttcagatcctgtgtcaggaacgaatgaatttgcttgatacaataaggcagctggaggctgctaatattgaacctgaggccactgccttgcatgacagtgaataccaattaacaaagaatgaattttcaagtctaggacgtggaaaatatagtgaatgcagtactactgaatcatctgatgatattgagaagcaggagatggaggaagtgtcagatgaagatgaaatctcatattatgacactaaagagtattttacagaacatggttttaggtgtgggtcaacaggaggtttggatccaatgaacatgtctggggaagttaacacacaatgcatagatttggagaacagtcttgttgggcagacgatcaatgaatttaggtaccctctgatagcaaggcgaaagaagcttccccggaattcccgggtcgacccacgcgtccgctttggtcaattatcaaagacaatgtgggcaaagatctcacacgagtgtgccttcctgtatactttaatgagccaatatcatctcttcagaaatgttttgaggacttggagtactcttttcttctggatcgagcttatgagtatggaaaatcaggaaacagtctacttcgggcactgaatgttgctgcctttgcaatttctggatatgcatcatctgaaggtcgtcattgtaaaccctttaatccattgttaggggaaacttacgaagctgattttcctgacaaaggagttcgtttcttttctgagaaggtgagtcaccatccaactgtcgttgcctgccactgtcaaggtagaggttggaagttttgggctgacagtaacattcggtcaaagttttggggaaggtcaattcagcttgacccagtgggagttctgaccctagagtttgatgatggtgaaatatttcagtggagcaaggtcacgactacaatttataatcttatccttggcaaaatatattgtgatcatcatgggaacatggacgtccgtggtaatcgccaatattcgtgcagactcaagttcaaagaacaggcgattcttgatcgaaatcctcaccaggtgcatggctttgttgaagatgtaacgggaaaaaagttgccacattatttggcaagtgggatgacagcatttattatgttatgggcaagtgaatgtgaag

SEQ ID NO: 133602 - DNA, 436 bp, Glycine max
  Clone ID: PAT_MRT3847_91648C.1
tttttttttcttttttttcaattaaagtaatgcattcattgataatcaagttcgatccttttacacaaaattaatcctatgtcgaagattcaaagataaattagggtatgtttatttaattttgatacattgaaaaggatcgacaagacatcataagtcatttgtaacagcagcacaagataaccccaggaatgaatcctacgcatgagccccctttcccatggccactgctaacacatctttgaacgcactgtgtattacctccgcatgctcctcttaggcagattagtcccggaggattaaaatccacattcgcttgtcctgaacccaaaagcaaaacaatgcatagcaggcccaaaaggagagtttgattggtccgaaaagccatttagtaatgattttcacctcctgtgcttactttgtacggacgcgtggg

SEQ ID NO: 133603 - DNA, 364 bp, Glycine max
  Clone ID: PAT_MRT3847_91649C.1
aactactttatgggtgccgacgaatactgggactaggtgttctagctgggcctcatcggagactcccgcgtcggcaagtccaacctcttgtcccgattcacccgaaacgagttcagcttggagaccaaatccaccatcggcgtcgaattcgccactcgaagtgtccccgttgatagcaagctcgtcaaggcacaaatctgggacactgcaggccaagaaaggttacattttttttttccatcaatcgttatctttcgagatatgcatgtgtgattgagtgatctttttgttggatgtgacgttcttgctttgatcttgatgatcatgaagtcactgatcaagatacagatgatccatttattta

SEQ ID NO: 133604 - DNA, 339 bp, Glycine max
  Clone ID: PAT_MRT3847_9164C.1
cttggggggttttttttttttttttttttttttttttttttttttttttttacccctaagaattgaggactaaaatactttcctcccaatacaaactccccccaaaaattgcggaaaacttgaaaaaaaattaaagggggaaacttacttaccccgaaaattaatggggggtttcaaaactggggcaaacaagaccccctaaaaaaacttgccgatttgatcttgttttgacaaacattttctttggttgaaatttgggccaagaaaccccctgccccctttcttttataggagattgttaaagggaaattttggaatctttgaaacattttttttttt

SEQ ID NO: 133605 - DNA, 2164 bp, Glycine max
  Clone ID: PAT_MRT3847_91650C.1
tgtagttttttaatctggcttcatggtaatgaactaacaatattcatctttggggatgaatccttaattctacatgcagtcttcgttctcgctctcttattcctttctctcttgtcttctctccgaatccacgtcctagatctgttgttctcttcccacagttctcactgaatcaggatccattttgataccaagttgctgttgaatatcgagtttgctgtttagagatctgtttccttctagacaacggtctgtggtatctgttattttagttgaatcgaagctgcaacaaaatcttcctgatctttgctttgaggttatggcatcggcgggtgtagcacctgcttctggggtaagagatgtgaatgcaagttctgttgctgttgaaaggttgcctgatgagatgaatggcatgaaaattagggatgaaagggaaatggaagcaactgtggtagatggaaatgggactgaaacaggacatataattgttactaccattggtggtaaaaatggccagccaaagcagacaataagctacatggctgagcgagttgttggaaatggatcatttggtgtagttttccaggcaaagtgcttggagacaggggaaactgtggctataaagaaggttcttcaagacaagaggtacaagaaccgggaattgcaaaccatgcgtcttctggatcaccccaatgttgtaactttgaagcattgcttcttttcaacaactgaaaaagacgagctttatcttaatttggtacttgagtatgttcctgagactgtccaccgagttatcaggcattacaacaaaatgaatcaaagaatgcctttgatatacgtgaaactctatttttaccagatatgtagagcactagcttatattcacaactgcattggagtgtctcacagggacataaaacctcaaaatttactggtcaatcctcacactcaccagctaaagatttgtgactttgggagtgcaaaagtcttggtcaaaggcgaaccaaacatatcttatatctgttctaggtactatagagcacctgagcttatatttggtgcaactgagtacaccacggccattgatatctggtcagccggttgtgtacttggtgaactattgcttggccagcctctattccctggtgagagtggagtagatcagcttgttgaaattatcaaggttttaggaaccccgacaagggaagaaatcaagtgtatgaatcctaattacaccgagttcaaatttccacaaattaaagctcatccatggcataagatatttcacaagcgtttacctcctgaggctgtggatctcgtctcaaggctactgcaatactctccaaatcttcgatgcacagctctggaggccttggctcacccattctttgatgaactgcgtgatccaaatactcgcctaccaaatgggcgttaccttcccccactctttaacttcagagccaatgagcttaaaggagtgcctccagagatgctggtgaaactgattccatctcatgcaagaaagcagtgtgccttgtttgcgtcatagtgttgcctcgtgtaaatattatctactccgcctgtagaaatgtatgtagtctgttccaagttgttaatagtttctcccaccccgtgtcctttgttctgttaatttgtccccctcacctgaagaagaaaaagaaaaaccccaccttccaatttgatatatttcttgttgccttaagaaagctgtttgagaagaagcttcaacttgatttaattggtttcctcatcttcaaaattttaacagattgcattaagtattaatattaattagaagaaccattgtatactcaagtagtatactagaacactagtacgatgtgatccgggaggggatgttttaaagcttgtttgtatatccctgcctccccttaattatgagaaattttactttggatgattatcttgctttcaaggaattgttgttcatgttcccttattcaatgttatggtgggggctggtgagagaaaggagattagggttactacctcctaaggtgtgaatacatgctcataacttagttggtttataccatctcaattttggtttactttgaaaacctaagttatatttcagacttataactttttaagaaaagctacatcgataaatattcgttgt

SEQ ID NO: 133606 - DNA, 493 bp, Glycine max
  Clone ID: PAT_MRT3847_91651C.1
ggctcgagcggctcgagctcgagccgaatcggctcgaggtttactatatttcacaaacacacagattattgaagaatggagatcacaaaaagaagttccctcctgatattcttcctagtgtttgtctcaagcttgatccatgccaaggcatatcaaaacctatactgcggcagaggaacccgatgctatggaaagcacatcacatgtcctgctgaatgccccgacagtgaaacaaacaatcctaagactaaggtttgccaaatcgattgcaacaaacctatttgcaaggcagtctgcagaagtcgcaagccaaactgcaatgcaccaggatcaggatgctacgatccccgtttcattggtggggatggtacgagtcttctacttccacggaaaaaccaacgaacacttcaccttagtttccgattccaaccttcagatgaatgcgcgcttcatcggacacaggcctgaaggaagaagccgtgactaccatgga

SEQ ID NO: 133607 - DNA, 419 bp, Glycine max
  unsure (1)..(419): unsure at all n locations
  Clone ID: PAT_MRT3847_91652C.1
nnnnaaccacatgcgcgagatcacaactacctctctctactaattctncntgcgctcggtgatccatccncatgcnnncaggtacatggagttctcctacgagatcgaccggatcttctcctatatcactgtctacacggtcggcctgtgcctctacacgggccacctacattactcgggcatagaccctgatacttggctgcgcctccattctgctcgtctccactacttgcatttcaaggacatcgacgctgccttatatgacacgaaaatgatccatcacattttattcttcgccccttcctttctacacattatctaccctattctaaatggcgtactcgactacccttcaatcccgcactcactctaccacatctgctacgcctcctatatcactatctagcaagaactcaatc

SEQ ID NO: 133608 - DNA, 1717 bp, Glycine max
  Clone ID: PAT_MRT3847_91653C.1
ggctcgaggtgaatttcctcatatttctataagacacagaatatttaagaatggagttcaccaaaacaagttccctcctaatattcttgctagtgtttgtctcaagcttgatccatgctaaggcataccaaaatctatactgtggcagaggaaccagatgctatggaaagtacatcacatgtcctgctgaatgccctaacagtgaaacaaacaatcctaagactaaggtttgccaaatcgagtgcaacaaacctacttgcaaggcagtctgcagaagtcgcaagccaaactgcaatgcaccaggatcaggatgctatgatccccgtttcattggtggagatggtagagtcttctacttccacggaaagaccaacgaactctgtgaatttcctcagtgttctataagacgcagaatatttaagtgtggtgttcgccaatgctgggcccctcctcatagtcgtgctcgggtttctctcctgcctggtccctgctgaggcctgcctaactctcttcggtggccagggcaccagctgcgctgggtcccacaaagttgatggtgtacttggaaggacttataggttggattttgagaacccagcaaagcctggtgtggctatgcctgttgttggaggagaagacaagtacaggactaactcattgctctctcctgattgtgtttcttgtgtgttctcacaggaaagttctgctgagaaagagaccatggaacttcccccccttgaccgccccacgcttcccacttcaccttagtttccgattccaaccttcagatgaatgcgcgcttcatcggacacaggcctgaaggaagaagccgtgactacacatggatccaagcccttggaatcctcttcaactccaaaaccttctcacttgaggccaccaagacaccccaatggaatgatgaacttgaccacttcaaattcacatataacgggaaccaagtagccctagctgaaggttctctctccacttggtacactgaagaaagagacataaaggtggagagagtggcaagcaagaacagtgtcatggttacactgaaggatgtggctgaaatattggtcaatgttgtgccaataaccaaagaagatgacagaattcacaactaccaagtgccctctgatgactgttttgctcacttggaagttcagttcaggttttttgctttgtcccaaaaagttgatggtgtgcttggaaggacttatagattggattttgagaaccctgcaaaacctggtgtggctatgcctgttgttggtggagaagacaagtacagaactaactcattgctctctcctcattgtggttcttgtgtgttctcacagggaagttcaactgagaaagagaccactccccaacaagtgatggaatatggcacccttgattgcaccaagttttcatatgggttgggaattgtttgcaggaaatgagaactgttgtgtttttttttttatccttaatttatatatatgttgtgttgggtatgttaagaaacaataatctaatgcgtagttgaggtgaaaaatctgaaacctcgcctttgggaagtgcgattctatgcacactagttgaacttgtcgtatgctcagttgcacattgtaatgtaaactcttgtactaatgcagtacttaactgctatgaatttaaaaatgttgtgttttgtagtttaaaaaaaaaaaaaaaaaactcgagactagtt

SEQ ID NO: 133609 - DNA, 443 bp, Glycine max
  Clone ID: PAT_MRT3847_91654C.1
tccggatcaaaatccgggtccgcgagctcactcttactcggccgccgctctttcttttttttttttaaaacatatagtcaattaaatggcattaggattggaccataatttacagaaaaaatagtttaattaacaacaaacaaaattaactagctcgtgtatctcaacaatggtcggaatttattatatattaattaaatttcaaaagatatgcacgatctacaattagttttttttttttaaggtgagatgaggattcacattttggctaatattaaaagaaattgtggactcaaaaaattaaaaaaattggcaattcttttcggggggaacatgacttaattcattaactttcaccatattgttaatattctcaccactattaatactatcctttttttccaacaacaaatgtggtttgtttttttcttcatcataacctg

SEQ ID NO: 133610 - DNA, 307 bp, Glycine max
  Clone ID: PAT_MRT3847_91655C.1
ggtaaacaaaaggcttttaaaaagataagcaaaataggaaaaaagaaggataaaaagggacagaaataagaactggggagaaagccaagacccaacaaatggaagcaaaaacacaatgaaaagggcgacattgagaggaagaacaaataatacaaaaaggggggggggcttacgcacaaaaggaaaggacaagcaggtacaaaagaacatagtagggggtctggacaacaaaaaacctgggaggcgggccacaaacaaaaaagggggttatcacgggaaaaccaagggcatctgaaggcaccaaaaa

SEQ ID NO: 133611 - DNA, 259 bp, Glycine max
  Clone ID: PAT_MRT3847_91656C.1
cttcgccggggctcagaccagcctccctgccttctccccaggccggctcagccgtgggctttccgaacacaacgccctgctgcagagagaccccctcagccagcccctggcccctggctctcgaattggctctgacccttacctggggcagcgtctggacagtgaggcctctgtccacgccctgcctgaggacacgctcactttcgaggaggctgtggccaccaactcgggccgctcctccaggacttcctacgtgtcc

SEQ ID NO: 133612 - DNA, 614 bp, Glycine max
  Clone ID: PAT_MRT3847_91657C.1
agtacgatagacaatccctccaattaccttatcttcccaagttaggcaaccaaaactccaaagatttttgttgaatatcaaagatgaagttactaggctggatgcacaggaaacttcgccagaatagtagtgaaccattcaaggacttggtcattgggcaggcaccacttgatgatgaacaagtctatcagaaaccaaaccttgggatcagactttccaaacatgctcagaaaggtcacaacaaccttagaaactcttttgctggcctagaagcagcaagagtagatgaagactatgagggagaatacttccctggcttccttgcaattggaactcttggttcagaacgagtatctgacccctcaacaacaccatcatttcccatttctgttgagagcataactgaaaaagaagatgaagtcactgagaatgatctgaagctcatcaatgatgagctagagaaagttctaggagctgaaaccaaggatgatgttagcattgactcctcaaggaggactagccatgttagcactgggagaagcagccatgtcagcactgggagaagcagccatgtcagcataataacactcagtggaaagccaatagaaggcaca

SEQ ID NO: 133613 - DNA, 206 bp, Glycine max
  Clone ID: PAT_MRT3847_91659C.1
cagtgcttcaaacccctttttctcttctcatttcctttcatcactctcttgcttcttttcttcttctcgcaattttccattttcacacttttagcgtaaggtttagtatctcgcagttatgattctcgaacatttaccttttcatgtctgtattttagagattattgttgtgaattcatgttacatttcgtaattgtgttgaatct

SEQ ID NO: 133614 - DNA, 284 bp, Glycine max
  Clone ID: PAT_MRT3847_9165C.1
ggtgtaagggttgtctaagatatggcaacactgcggatgggtgatggggctgataaatacaagaaactctataacctcccgaatcagcctaaagagcctcgataacacacacttcccggtgcatctgacagagtcgcatgattcacagatacaagcaatgaactcgaatatgacgtccacagatctaaaggacggcatcgcctcagacaacgtgaccagctggccaccttggaaatcaggtgaggaacaatgatgccaatgtaaacacacctacatggcactag

SEQ ID NO: 133615 - DNA, 697 bp, Glycine max
  Clone ID: PAT_MRT3847_91660C.1
catcgaggatgaggatccaaagacatcatcacaccactttggcaccaaaggtggctgcttattataacagatcagtcttcataaccccaaggagagtagggacttagcttaccatccaatcggaccgaggccttaaccaaattgttccctactggagacagcgacgggagatgctagaagctactacctttacctacaagactccaggatgatgttcgagccacgttcgtgctcacaggagcagatttggagaattgaaggaaaggtgtcttgaccaaatgggacatcgatgaaagaggaacataatcataggcacctacgttgtcgccctttgctctcacatgtgcttatgcggtacctagcattggtaacgccattcatggagtggaaaaggataaagagaagtttgcttttgcattcaccgtggattgcagggccaggttggagcctccaatccctgagaactattgcggcaactgtgtgtggggtaatttggtggatgctgacccactagacttcataaaggaagaagctgttggtattgctgcagagagtattcatagtaaaataaaagagatgttctataaggcgatttttcatggagcggatagttcgttgtctaaatacgagtctatgagcaaggactaaagttgagtctttgcaattgctgggtctaatcgatttggagtttatggaa

SEQ ID NO: 133616 - DNA, 199 bp, Glycine max
  Clone ID: PAT_MRT3847_91661C.1
ttctagtttttgagaggtaaacgagaaccatactttatgcctcaatatacccaaggttattgattgtacagtggttaacaaatacctactggactaaattgtaaacaaacctcatgtttggataagccataatttccaaattattattaacaacccttaagtataatttacaacttattgacttcacctcaccttgtac

SEQ ID NO: 133617 - DNA, 261 bp, Glycine max
  Clone ID: PAT_MRT3847_91662C.1
cccggatcgacccacgcgtgcgatttcttggatgttactttctttatgcaatgactatgtgacagaaagctgcttgattaaagctttcgtactttgcgaaactcgcaaggtatagattgctaattcaggacagttttcaatcctgttcgcataaaaacatgatgtatcacgaagcaatacctgatccttacaacaataagatcctcagagactttccggatcatcctgatgaaccaagctcaaaccctaatccctaactcc

SEQ ID NO: 133618 - DNA, 313 bp, Glycine max
  Clone ID: PAT_MRT3847_91663C.1
gtaaagcctaacacggtcgtcttgtttagaccgaattcagaggcccccgaacggggaaaaacaagaaaagttttttaacgggtaaaccaatcaactggcccggcggggcttctcacctgtgataaccaagaggggggcagcactgctccgtaaatcatatccaccagatgtgcctggttcaagcaaggggggaccaatttttggttaaataaggaataagaagcaactgcgcgagcataaactcctaacagaagtcgtatgagggaggttaagattgaaaacccggcatgtgcctctgatgaagcaaaatact

SEQ ID NO: 133619 - DNA, 361 bp, Glycine max
  unsure (1)..(361): unsure at all n locations
  Clone ID: PAT_MRT3847_91664C.1
cccacacgtccgcggacgcatgggggcgctgtaagaaatgacatgtaaaacaactanaagcattctagatcaatggaaaagggagaaaaaaataaaaaaaaaaaaaaaaaaaaacaaaacaaaaaacaaaaaaaaatactataaaaataaaaggacgaaaagcagaccaattttgtttccattcagctaacaaaattcacttaccacctttggaatgacctgtcactgctaaataaaataaaatgtctaccattgcgtactttcatgtgaccaattcaatatcatgcacgtatacaatactgtctctactccttgccctcccgaatagaggtaaaaacaaatgcttgtaaacatttatccc

SEQ ID NO: 133620 - DNA, 309 bp, Glycine max
  Clone ID: PAT_MRT3847_91665C.1
ggcgactgcgcctttacatcttattgcgccacccatgcggactctgctccctatgctgcgagacagtgtgatcaaaataaagagacatggaccccacactcttccactctttgttggacggcaagtgccatgcgctctacactttacctattcatatgtacactctctataaggccccttcactccttgtatcatgatcgggttggaggcatgctattctaacacactatggccaatggttcaacaccattttttgagattgcgtaaaaggcacaagagcttttatacatggattacaacttagatcac

SEQ ID NO: 133621 - DNA, 602 bp, Glycine max
  Clone ID: PAT_MRT3847_91666C.1
ccttcctttccttttcccagccttccaatccacatccctgtaaaatgaaaaagcccacaggcaaagaatccttacgcattcacatgtaattaactagtgcaaaaaaccattttaatccaagaaaatcacaatcagaaaagaaaaaagtaatcattgtcgcaagtggtgtgccgttcccacaagcaccactgcccccaccatagtgttcatcccaacaaatcgtcacactctagcgtgtgtgtgttgtgttttggattgtctattggtgtttgtgcttgtgttgttgcagaagaaaggggaaaggggaaataggcgatggtggcggcgacggtgtgtaagaggaaacatgaaagggccaccattagaaatcgccaagacggaggactgtcggtgcagcggtaggagttaccgacgaggggagagcgcgtgaggaggagcgtcagtgtagatgtgggtggagtggatcccagatctggaaaataaatcatgttaagggcggagtcgtatctcgcgacggcggaatcgacgaagagaagatgaagtcgtcgtcggaagagaagacacaactgaagttactaatccagagagaatgaaagagaaag

SEQ ID NO: 133622 - DNA, 325 bp, Glycine max
  Clone ID: PAT_MRT3847_91667C.1
ctaagacagaaggttttatttttagtatcatgcaaggatctatggcagggctcataacgcaaatggggccgaagagctatatttgttagaggcaaatttttcttttgatattaaatctagctctagatcggaaaaagttatctctactaaatcccaacatgttggcggaaaaaccttaaactttgatgtatttgaggctggcccacattacaaaggagattctcttgaaattgataatcaagaacccccctatgagattgttaccatagtgcaacacataattgagacttggtaccactaggtttattctctccttgcatctaat

SEQ ID NO: 133623 - DNA, 522 bp, Glycine max
  Clone ID: PAT_MRT3847_91668C.1
atttcttttgatcagtaacggagaatcataattttttgtcctagggtggctaatattttcccttccaagcaaatgaaaacatgccggtgtcggccgaaacacaacatcggttgagctcgaacgaaaaaacctagccgacgtaaattctaaatttttacggcaacaccgaacaaaaacgctacctctcccgtaaaaaaatattatcggtcagcgtctgttaaaaaattgcgcaatgtcggctgaaaaatatcaattgcaactttacaattaccgatgtcggcaattgtaatttctattatatccctgaattttatttggatgatgtctattaggaaatgttcgaccggcgtcatccggtgacgcttcctttttaaacctcgatcggtcatctttcctgaccgacgtcggctagaatttttttagatcagtatcggtgaatcaaaattttttttcccgaggttcgctaacgttttcctttccaagcaaatgaaaacatgccggtgtcggccgaaacacaacttc

SEQ ID NO: 133624 - DNA, 180 bp, Glycine max
  unsure (1)..(180): unsure at all n locations
  Clone ID: PAT_MRT3847_91669C.1
aaaacccggcgcgacccacgcgtgcggaggctgaccaacaaagcatccttgattacttcaacaaacatgggcctggaatnaagcaggctcagattgcaccttcaactgagccagcagctgcaccagtagcacctgtggtacctagcccctctgctataggactcatagcgacgcgagagg

SEQ ID NO: 133625 - DNA, 642 bp, Glycine max
  Clone ID: PAT_MRT3847_9166C.1
ctcagtgcttccagtgaaggccttgacgcgattcaagtgcgtctctacctcttggaatttcctgttctgggactttgtggtcggtttgtgaatggcactatgaactttctgattatcgatggtatagtgttgttgtaactatcaatgagttagtaattttttcgtatgatctgaagaatgagacataccactatttgtcgttgcccggtggtttaaccgaggtccctcctgatgagcctgagctcggggtcttgaagggttgcctgtgcatttctcatgatcacaggagaacacattttgttgtttggataatgagggaatttggactcagttgctgaatgcaagttatgagcatcttcagattgccgaaccttatttgttgccttgattaagatgtcatcttgctggccaacaatgcaggtttaaaatttgttatctataaccagagagataatagagtagacagcaccgggaatttcgacgacaagtcaattgtgttctgctttgattatgtccaaaacttagttttgccgtattgagattgatctaccctgcatttggatgtatgaatttatgttaaatgtgtaagtggtttcagaaccgtcccatttaatgtatgaacagggaagaattcttagtacc

SEQ ID NO: 133626 - DNA, 1122 bp, Glycine max
  Clone ID: PAT_MRT3847_91670C.1
tacggctgcgagaagacgacagaagggggataaaagaaaggcatagcatagggcggttgactcaagtaaacagcgggccagcgccgtttcctcgctgtttcctttttcttcttccttcttcctttcttcgttgttgttgttgctgcgattctctagatcttgaacagtgttttcgtgttcggtgagatggaagaaaggaagcaatcgcgttatgtgaagttgactaaagatcagacacctctcgaagatattacccctggcgaactcaatcagccaattcaggttcctcagttggatgttcgtaagtgccctgaatgtagacagccgctacctgaaagctatgctcctcctgctgatgaaccttggatgactgggatctttggatgtgctgaagacagagaaagctgcttgaccggactgttttgtccttgtgtattattcgggcgcaatgtagaaagattgaaggaagacactccttggactggaccatgcatttgtcatgccatttgtattgaaggtggcatttctctggcaatagcaactgcagctgcaacttccatctttcctgctattaacctggggactgtatgtctcattggtgaggggtttattgttacatggtggatgtgtggaatttacactggtcaagttcgacaaaacttacagaagaagtatcacttggagaactcaccatgtgatccatgttgtgtgcactgctgcatgcactggtgtgccttgtgtcaagagcacagggagatgaaaggaaggctttctgacagctttttctctgagacaaccattgtaaatgctcctcccattcaagagatgaagtctactgatgacaaggaacactctgaaacctcttcttctgctaatagcaaggagcatactggtttggagttacaggttgtatagggcattacctttgtcaatattgaaaagaattgcatatatttcaagattttgcttgatagagaataactttcttcgacctgagttccctgtgttattacattggacatgtagatcaaacatagaaaattcttctgctttcaggtgccaacttaaattgaattgatatctatttttttagaataaaaagggttaccaaggctggccagt

SEQ ID NO: 133627 - DNA, 187 bp, Glycine max
  Clone ID: PAT_MRT3847_91671C.1
tgccaatgtattttccgatagagaaaattcgtttttcatggaaacatctgcttttgagtccttgtatgtagataatgccttaaccgaagtgctcactcaaatataccgcgtcgatagtaggaacactcttgacattggggataaccatgaagacttgcccaaggtgcagaccatcaatgttggcagt

SEQ ID NO: 133628 - DNA, 776 bp, Glycine max
  Clone ID: PAT_MRT3847_91672C.1
gaaaaataaaaataataatcctctttgaaattcaaacttagagagagagagaaaaaaaaaaagaaacttctctgtggaaaaaacctttgtgttcgttctcttcagcacttccacgttgacgcttttctgaagaatcacaaaggctcgagaaaagaaataactttgttacacaaagcatttttctctatctttcttcgaagttcagagagacttggcgatcactctgatttggctcctccgaggtgatcctcttcgcggaggcaggggtttggattcaagcttcgcgttgattcctcgcggttagatctgaactgtgctcgctgctcttgctcgattgagaagcttgagttttgaggattttgaattctttcggagtttggaagcatgatttgttgtagaagatagatagagagagtgtttgtttctgtgcttttgtggtttgagatgaagaggtccagagatgaagttctcacgagttgttctcaattgaaacggcctgtgttgtcttcacgaggagaagcgtctgggcaaccgcagatgatgaatggaggtgctcagaaactgacaactaatgatgcccttgcatatctcaaggcagtgaaggatatatttcaagataagagggacaagtatgatgactttttggaggttatgaaagatttcaaggctcaaagaattgatactgtggggtgtcattgcaagagtgaaggaactgtttaaaggccacagagatcttatattaggatttaacacctcttgccttaaggttacgaaat

SEQ ID NO: 133629 - DNA, 440 bp, Glycine max
  Clone ID: PAT_MRT3847_91673C.1
atgaatattgattctaccatgcagagctttggtcatttctctattgaccttctcggtggaggaatttcagcggacaatactggagattggatcacactcatacaaaatactccaattaccatctagtagacagttgctgctagaaagaaaggttgctcaatgatcaagatggtgatgtctgggaatgcagcactcaaaaggattgacttgggcctcaacggtacgagtgttgctaacgaacagcttcagctcagaacatcttgatgcatgtcactggacatgatcaaagccacattcctgagaatcaatgttgccactaaaggtatggggtcctaaaactggcttacatatgtggaggtctgattggacatatcacacttgatggcattggagtttgcttattgacaatcccatgcagtctacagtgactgataccctct

SEQ ID NO: 133630 - DNA, 1033 bp, Glycine max
  Clone ID: PAT_MRT3847_91674C.1
cggacgcgtgggcaacattatatacatcgacctggtaacttcaacaagtttgatattgatatagctatgagggagagatatgaaaatcaggaaaaatcatggtcaagacttaacgtttcctatatagttgctgatacactaggaggaagaaatccagatgctaaatgcttgtgctggaagatcattctatgctctcagatgaacagtagatatgaaatgggagcagcaagcacttggttgacctcaaagttgatgccttctagcgacaaagatgtggttatttcatctcctggcttggtagtatggaggaaatggatttctagtcaatctggcatcaatcctacgtgctacctctctgtagttagggatacagcatttggtagtctagatgaggtggtatctggggcaggtgcagttatgtttcttgtgtctgagagcatctcatgggaacttcagagatctcatcttcataatcttctgatgtcaattccctctggggcctgcttgcctctgctgatcttatgtggctcatacgatgaaaggttctcttctgctattattaatgagctgggccttcaaagcattgataaattgaagattagtagctttctgcttgtttttcttagtgaaaaccagcagcagatggaacacttgggtggatttttcagtgatacacgattaagggaagggctgcaatggctggcaggtgaatcacccttgcaacccaaccttggctgtgtgaaaatacgagaacttgttcacgcccatcttaattctttctcagagatgctggacattgccattaactccaacgtgggtcctaatgactatgtttcattgttcaatgaagccttagatcgttcaactaaagaaattattgctactgccaattcaaatcctactggttggccttgtccagaaattggtttacttgacaagttttgtgatgaagatagagtagtaaaaatgtgcttgccaactttggggtggagctcaagtgtgaaaaccgaaccaactatttgtgctttgcaaa

SEQ ID NO: 133631 - DNA, 3273 bp, Glycine max
  Clone ID: PAT_MRT3847_91675C.1
cagaggtatcagatatagcaattgcagttcttgaaggttctgatggaataatgttgtctggagaaacagctcatgggaagttgccactaaaagctgtgcaagtaatgcacacagtagcattgcggacagaagccactataccaggtggtaaaatgccacctaacattggtcaagtgttgaagaaccacatgagtgagatgtttgcataccatgcaaccatgatgtctaacacccttggaacctcaactgttgtcttcactagaacgggtttcatggctgtccttctgagtcactatcgtccttctgggaccatatttgcttttacagatgagaagagggtacaacagaggctggctttgtatcaaggagtctgtcccatatacatggaattctgtgatgattctgaggcaacttttagaagagccttggatttgctgcagaagcaagcaatggtgaaggaaggagaagaagtagcacttgtacaaagtggtaggcaacccatatggaggttccaatccacgcacaatatccaggttaggaaagtgtaaaccagaagaatggagagtggccacgaataatgtttcaagacacagtacgtttagcttcaaacacagtcttccaacaaacacgctttgtgtttcgagacgaacaaggcttccttctcagaacctccgccaaacttagcggcgatttttccaacttccatttcccccctcaccttcttcttatacccctcacactctcttcttcctcgtccaccccatttctctctctttctaacaatggctcaggtcgtggcttcacgatccattcaaagcaccccattgtgccccacttctggatctgcacgtgacagaacccaaaacctgttaaagcctccatcttttgcttccaaggtgttccctttgggagagaacaataacaaacgctccaaactcaggctcagaagccttcagatcagtgcaaggaaatctgccccttctgaagtcatccccatgtcacccgaagatgatccaaaaattgaggagcatttgcaacatttacgtggggtgcagccatttggtgagaactctgttggaatgtggtctaagccaacgtttaggcgcaagacgaagatagtgtgcaccattggaccttctaccaatacgagggaaatgatttggaagctggctgaggctggcatgaatgttgctcggttgaatatgtctcatggggaccatgcttctcatcagaaagttattgacttggttaaggagtataatgcttctcatgaagacaatgtgattgcaatcatgcttgacacaaagggtcctgaagttaggagtggggatttgccacaaccaatcaatttaacgcctgggcaggaattcacttttaccatccggaggggtgttggaactgcagattgtgttagtgtgaactatgacgatttcgtcaatgatgtggatgtgggggacatgcttcttgttgatggtggtatgatgtctttggtggttaagtctaagacagaggattctgtgaaatgtgaagttgttgatggaggagagctcaagtcaaggagacatttgaatgttagaggaaaaagtgcaacacttccttccatcactgagaaggattgggatgacatcaaatttggagtggataacaaagttgacttctatgctgtttcttttgttaaagatgcacaagtagttcatgaactggttattgaaaagctgtgctgatatacacgtcattgtaaattgaaagtgcagactctataccaaacttgcattcaattattacagcgtctgatggggccatggttgcaagaggagatcttggtgcagagctccctattgaagaggttccacttttgcaggaagagataataagcatatgccgtagcatgggaaaggctgttattgtggcaacaaatatgctggaaagcatgattgttcacccaacaccaaccagagccgaggtatccgatattgcaattgctgttcgagaaggttctgatgcaataatgctttctggggaaactgctcacggaaagttcccgctaaaagccgtgaaagtaatgcacaccgtagcattacggacagaagccaccatacctggtggtcaaatgccaccaaatattggtcaagtattcaagaaccacatgagtgagatgtttgcttaccatgcaaccatgatgtctaataccctcggaacctcaactgttgtcttcactagatcaggcttcatggctatccttttgagccactatcgaccttcaggcaccatatttgcttttacagatcaaaagaggatacaacagaggttggctttgtatcaaggagtctgtcctatttacatggaattctctgaagatgctgaagagactttcacaagggccttggatttgctgcagaagcaaggaatggtgaaatcaggagaagaagtagcactagtacaaagtggcaggcaacccatatggaggttccaatccactcacaatatccaggtccgaacagtgaaaacaaaataaaaaaaggtgaagatggccatgaaccaagtttcagcctttcaggacaatatatttaattttagaagagcatgttcccttttggtgggttgatgccaatttgctaagtccggcattttagttgtttgtttgttgcctaggtttttcattttttcttcatctattactttcttgttatcattatttttgggtgattgttctatattaatcacggacattagacatatgatagtaggtgacattgaaattttgattagaaattggaatgaaaaatgctttcagccacatcctggaccgagtcagacttaaccattgattgttatatttagtatccaaattagtaggtctgatatatgaccatcattaatataatgttaaaaggctcggctcgacggccctgatgcaatggtaaagttgtgccttgatgactaattagtcccgagttcaaatttgaaaagtctcattgcatatataaggaggttggtgctttttgcactcttactattcttgcatttcccattataaggaaaagtctattcctgattacattcttgaatgagctttccataatgcaatgggaaatgcagaaaccaatagtgggagtgtaggaacccatataaggataatgttgcttacaatgatccttttacatatttttgcatagcaaggaaacgtgtgttagttttatttaataagagcttatgtaaataaggtttattaacctaattttatttgatattttatttgataagtttgtgtgg

SEQ ID NO: 133632 - DNA, 2454 bp, Glycine max
  Clone ID: PAT_MRT3847_91676C.1
aattcggctcgagacggctgcgagaagacgacagaaggggttgaccaatatggatgataaatatgatgtctatagaggtgagaggggtggtttggcaggactgcagaacttggggaatacctgcttcatgaacagttctattcaatgtttagtccacactccaccactttctgaatatttcttacaagattacagtgatgaaatcaacatggacaatcctttaggaatgcgtggtgagttagcacttgcatttggtgacttgttgaggaaactgtggtcttcagggcgaactgctattgcgccccgtgcattcaagagcaaattggcccgatttgctccacaattcagtggctataaccagcatgattctcaggaattgcttgcttttttattggatggattgcatgaagatttgaatcgtgtcaaacaaaagccttacattgaaatgaaggactcggatggtaggccagatgaggaagttgcatctgagtgctggaaaaatcatatggctcgaaatgattcattgattgttgatgtatgccagggtcaatacaagtcaacattggtttgtccagtatgtggcaaaatttcaatcactttcgatccattcatgtacttatcattaccactgccttccactgtcactcgcacaatgacaataactgtcttttattctgatgggagtggtcttcccatgccatacactgtgacagttctgaagcatggtagctgtagagatctttgccaagcattaggcactgcatgctgcttgaagagtgatgaaatgcttttgcttgcagaggtttatgagcataagatttatcgatatctagagaatccgatggaaccattaaattcaataaaggatgatgaacatattgtggcctatcgaatcaaaagtggagccaggaaaacgaaagttgaaataatgcatcgatggctggataatatgaagggtggagacaggaagctctttgggaccccgttggttacttgtttggtagaagatcctcaatttggagccaacattgaggcatctgtacataaaatgttggcacctttaagaaaaacatattcttcgagtaagtctcatgatgggaaggaaaatggtttcatctcagctgacagtgatgagcaatcaaacatctccaatactgaatctgaatctctgagtctaacaactggcaacaaagaacaagagggaacatcctgtggggagtcatctttacaacttgttttaactaacgaaagctgtttgagttgtgaacccatcgagaaggcttctcttataaaacccaaccaagttgtaagagtctttcttgactggactgacaaagaacaggaattatatgattctagctacctgagggatctcccggaagttcacaaaactggattcactgtgaaaaaaacccggcaagaagctatttctttgttttcttgcttggaggcattcttgactgaagaacctcttggaccagatgacatgtggtactgccctagatgcaaggaacacagacaagctacaaagaagcttgacttgtggaaattgccggagattcttgtttttcacttaaaacgattctcatacagcagatacctgaaaaacaaacttgacacttttgtaaattttcccattcacaatctggatttaaccaaatatgtgaaaagcaaggatggagagtcttatgtttataacctttatgcaatcagcaaccattatggtggtctaggtggtgggcattacactgcgtattgtaagttgatcgatgacaataaatggtgccatttcgatgatagtcatgtctctcctgttactgaagccgaaattaaatcttcagctgcatatgtgttattttatcagagaaatagaagtaaaggccagatggaaggagagacatctcaggttcatacagtatagatcatgattggacattttgttgcttgatgcctactttatatgcttagcagttagcacaaagccaagcttatgtcttagatagttattttacctcgcagtgctagactgcaaggtaatatatgagacaaaatgttaccgtagtgaaagagcaattaaacaaaaatgtttaggtgaggctctagttagttttcagttcttaatcactacatgaatgatatcattttttgatagagaaattttggcagtctatgaacttaagatatttctgttatttcatttcattggaggttaaaacagatcatcatgaattcaccataattgctgtttgacagttgtatgtattggtgtcgtgctaatagggcgacgcttgtgtttgtgaaaggaatcgtgccctcctgttattatgttgttaggattccagtacccagtatcatgtggaaaagatgattagcacctgactatttgtttattttttaaaataatagactgcccactttctcttgtattgtctttacttcaaaaaaaagaaaatt

SEQ ID NO: 133633 - DNA, 1112 bp, Glycine max
  Clone ID: PAT_MRT3847_91677C.1
aagtaatgcacacagtagcattgcggacgaaagccactataccaggtggtaaaatgccacctaacattggtcaagtgttgaagaaccaccatgagtgagatgtttgcataccatgcaaccatgatgtctaacaccccttggaacctcaactgttgtcttcactagaacgggtttcatggctgtccttctgagtcactatcgtccttctggaaccatatttgcttttacagatgagaagagggtacaacagaggctggctttgtatcaaggagtttgtcccatatacatggaattctgtgatgattctgaggcaactttcagaagagccttggacttgctgcagaagcaagcaatggtgaaggaaggagaagaagtagcacttgtacaaagtggtaggcaacccatatggaggttccaatccacgcacaatatccaggttaggaaagtgtaaaccagaagaatggagagtggccacgaataatgtttcaagacacagtacgtttagcttcacaagagcatcatcttagtgttgcctcttagttggttgatgctagtcttttttttcttggcttgtttaggttccttgttctcttctaaatattttgtcacgtaaatgttattgaaattttggttaagaaattgagatcagaaatatgctttcagcatcgaggaatgacttgtttgtcacgctaagtatggagtatggataaatgacttactaatagtttgatggctcagctcggcgagccctgatgcaatggtaaagttgtgccttgatgactaattagtcatgagttcaaaattgaaaagtctcattgcatatataatgaggttggtgctttttgcactcttactattcttgcatttcccattataaggaaaagtttattcctgattacattcttgaatgagctttccataatgcaatgggaaatgctgaaaacaatagtgggagtgtaggaacccatataaggataatgttgcttacaatgatccttttacatatttttgcatagcaaggaaacgtgtgttagttttatttaataagagcttatgtaaataaggtttattaacctaattttatttgatattttatttgataagtttgtggg

SEQ ID NO: 133634 - DNA, 246 bp, Glycine max
  Clone ID: PAT_MRT3847_91678C.1
ttctcattcgttggggcttaaaatgatggtaagagattcctctgactgtgcacatgataaaggggattcgctgctcagccagactgttcctattaagagacgctggtcaccgatgacagtgtactcatgggcggcactgcgacacaccgacctacattctcatgaaatgaaacccatgatttgtcactatccatctaggtctcaaggaggaaccgctggggatgagcaattcaatgatcacatctg

SEQ ID NO: 133635 - DNA, 150 bp, Glycine max
  Clone ID: PAT_MRT3847_91679C.1
cgagctaccagcaggcatcaacaatcgaggaagtgagatacctatggattcgggatttaccatactgggtggacgaggggtactgaggccattgttcggcaacacgggagaggtaatatccatcaaaatcatccgcaccaagctcacggg

SEQ ID NO: 133636 - DNA, 252 bp, Glycine max
  Clone ID: PAT_MRT3847_9167C.1
gggaagcaagcatctaccatttatattatccgctttattctctccttaccaaggtcataaccccagaagcagcgaagtcgataagtctcgcccccagaacatgaaacgaaggctcccctcgccacacatagtgcttactactgttttccacaacgcagtaaggtcccctccttacctccccaggatgtaccttgggccaaaatgccccaccagtccttcacaccattttttcacaaataaacagggctaatt

SEQ ID NO: 133637 - DNA, 212 bp, Glycine max
  Clone ID: PAT_MRT3847_91680C.1
ttgggtggcctaagggggataggccattgccggcgcattcttttaagaagtactctggttcaagggcgcaaaaatggaagaagatggtatgctggtggcacctggtttaccacggaaaatatttttttcaccctctacattacactcttttgttgcgccattatcattattcaaagggaccccaccaccttctgggttaagtgacaacttga

SEQ ID NO: 133638 - DNA, 502 bp, Glycine max
  Clone ID: PAT_MRT3847_91681C.1
tttcttctctccaaatccagatttttttctctccaaatccaatggagatttttttaactcaaaaaagataatcttaagataaaataaaaaataggatccagatttcttctgttttttctctccaaatccaatggagaatttttcaactttgacttgggatttttctctcaaggttgaagtttcaaccttttcagtgcttttattgtcatcttgagctgaaattaaaggatccagatgcggcagtacctcctgttgataacacactcaagaaaattacagagcctgatcatgctgacttgcttttgcgaaagaaatctgcaatagactcattttgtagctcttttgagctaaaaggaaatcccttggtaagaatgtgtgtgttttgctcctttttgttacaaacaaacatcgattatgatctacaatacatttgaaatatcttgctgtagaaaaagtcaaggtgcttatttggatgaaagagatatttttcaaatgatcaaga

SEQ ID NO: 133639 - DNA, 234 bp, Glycine max
  Clone ID: PAT_MRT3847_91682C.1
ggctcgagcccaaaccctgcttgcctttctttatcccctccttgaaacgcaacatttgcgacgggatgtacggtgagcctgctggaacactaatattgcttgcgacatccataccttatccgactgctgagacgacgattactggacgctattttcttatgaaagtcctacactctccggttcacgcagaagaagaccctgcagtcgctggagacgacgatcgtcattgcctgc

SEQ ID NO: 133640 - DNA, 764 bp, Glycine max
  Clone ID: PAT_MRT3847_91683C.1
gcggccggcacgttccttttcaccaatccattttctgacttttctcactctgctcatggctttgcttttcttatcatcacctattctcttggaatcatagttagttatcttttgcaacgtaaataacaacaataattatagccaatggaggaggagagcgagtttcttttagaaatgaagctaattatcatctcgttatgcactgaaacactttctcttctctctgttcactcttcccaacctctgttttcatgcattgtcactttctgtttcttgattctcctttatttgcctcatctattttggaagatagttttctcacccgtgctgattctgtccggggttctcttgctcctcctcctccgtctcggtgcaattcagaggtctcaaaatgaagagaagaaaaactcggttgaaccagaacccattgcaaacgaagaaaacaggggaaacagagaagagaaacaggggaaccccattgaaccggtggaaaccgattctctcgatcatgtttacaggtgggtcacgagccaatctcaaaaaacgataaaatctcaaatgggttttcaatcaagttcgcgttttgacgagtctttcgtggagtggaatgtgaaagcgccgttggaggtcatatacgaaggtgaagaaacagagcagaatcaaaatgagaaacgtgacgagggtattttgaggcacccgtcgttgtcacggtactaccctgaaactgactccgatagctcgtcggagagtgggtttccggcgac

SEQ ID NO: 133641 - DNA, 436 bp, Glycine max
  unsure (1)..(436): unsure at all n locations
  Clone ID: PAT_MRT3847_91684C.1
accagacaaagcagcaacagaatgctaaggatatgctgctgttatcggaaatctgcgacaccaaaaggagccatggccacgattcctcctgtcagacacagagtatgtatgaaatgtgagaatagcactatgaaatgtgagaatagcactacttgaattttttttgtactaacacgtttttctaccaaaaacatttgattgtgaagttacaacgacatttggatagaaaaaatatagaatgcatggcagaagaaaataaattatctccacttacttgagctatgaagttctttgaagcctctcaaccattttcatgatctggttttccattcgtattggaggatgatgtctttgtatcattgctttttgactctntatggttgctaaagtctgactttnttctaaagccaaacctttttgggaaaatactccaact

SEQ ID NO: 133642 - DNA, 480 bp, Glycine max
  Clone ID: PAT_MRT3847_91685C.1
gttttaactttaagggccacgaactacttgaatttgctagagaatcagttgttgtctatttggatgatgaggatggagctacacgaaaagatgcagctctatgttgttgcagattgattgctagttctttctctggtatggcatgctcacattttggttctagcaggttgactcgatcaggggggaagcgccggcgccttgtcgaggagcttgtagagaagcttctcatttctgctgttgcagatgctgatgttactgttcggcattctatctttacttctctccatggagatagaggttttgatgagtatttggcccaggcggacaacctgagtgcagtatttgctgctttaaatgatgaggattttgatgttagagagtatgcaatttctgtggctggaaggctatcagagaaaaatcctgcatatgttcttccagctcttcgtcgccatcttatacagttgttaacttacttagagc

SEQ ID NO: 133643 - DNA, 258 bp, Glycine max
  Clone ID: PAT_MRT3847_91686C.1
tagtaacgggtcccacgcgtgctgcaactcgtccttatagataacccgcccttttatcaacaccctcaatcttattatacttaggctcgctagatcgtaccctataaataacatcacaactctgttaaagacatcatgaaaatgtaattctcttctaaatccctcctaccttacattaattatacgcatcaaaaatgtaattgattttatatctataacaaacacttgcatttttctttattaactaatctcatttat

SEQ ID NO: 133644 - DNA, 367 bp, Glycine max
  Clone ID: PAT_MRT3847_91687C.1
tgcttaattcctaaaaaggccacttttttttttttaaaaaaaaaaattaataccctttgtttctctgcagtttcaattccaccttcaatcaaaactcctctgtcttatctctctcttccattaccttccttcactcttacgactatcgctttcgcacttctctctcttcgattttgattttgggtttgtttttttaatttatattttcccccttttcaattttgttcatggtgttgagcgtgtcacggtaattggcgggaagtaaccgtcaattccgatagccctttggtgtaaagcttgaaatttgaggcgtttgaaggaaaaaaagggtttatcgtttcgtcgtggatggcgaacccatctggga

SEQ ID NO: 133645 - DNA, 275 bp, Glycine max
  Clone ID: PAT_MRT3847_91688C.1
cttgcgatcatttagttatgtggtgcagctaccaaagtccatgatgttgtaagcttagaagtatttcttttattcggggtctgtcaattgaagtattgatcgatgataggaaaaagaagtgctgctattatcagcggttcattgatatagctttcttcagtatggttggttactgtaaacagttgagagaattacagattcaagaatggataggatagtagatctctataagttaatgaagagaggagtctagcgatatgtagatcaaatggagg

SEQ ID NO: 133646 - DNA, 252 bp, Glycine max
  unsure (1)..(252): unsure at all n locations
  Clone ID: PAT_MRT3847_91689C.1
cccacacatccnaccacgcctacaattaatttataaccataaccttatccnaaatattctgccatttttaaaaacaacccttcccccataacaacaccaaatttcaaatcaactcttatcactcacattacatacaccaacatatcccccaaaatccataattatttccttaattaacccttcaaatcctaattcccttcttcctaaaaactccactttattctcctaaaaatagtccacccccaaaccaaa

SEQ ID NO: 133647 - DNA, 459 bp, Glycine max
  Clone ID: PAT_MRT3847_9168C.1
acggctgcgagaagacgacagaagggggtggaggataattataactcttcagcgacggcgcatggttccagttcctcctcttctcaccgcccaccgccgtcactttgagttattcttctcttctcttctcactcaccctttgcaatttctctctttccttcctgtatttgttgcaaccctcttcaaggtggatgtgaatccacaccactcatggattttagaggaaatcttaattgcaagagaagggctctcactgtggaaccggtgagtagtgatagtgataggaagtttctcattgacttcatcgtcactacttatttgggacctgatgtcaagtctcataatccaagatgttctgttattcaaagactaattgccggatccccactctatatcttgagtgatttgggaccttcatatgttagcgtttctttcttggagagattgtactattatctc

SEQ ID NO: 133648 - DNA, 422 bp, Glycine max
  unsure (1)..(422): unsure at all n locations
  Clone ID: PAT_MRT3847_91690C.1
ctaatgtgaggcttggnacatagcgcgtagtcctattcaatcattattggttactcactcacacattcaaccatttaagcacgtttgtnttccttcagaactcaaactcgctagctttttgtattgcaactgcaaaaggaaatggcattctcaacagccaccgtaaccactgctccttatggatcatggaagtcccccatcaccagcgacgatgtctccggcgccaccaaggacctcggaggcaccaccatcgatggtcgtggccgcctcatttggctcgaattccgtccaacagaatcagggcggggagttcttgttcttgagccggaaaacaatggaggtgaagctgtggatattactcctaaggagtttggagtgagaacattggctcaggaatatggaggtggtgctttcactgtttc

SEQ ID NO: 133649 - DNA, 253 bp, Glycine max
  unsure (1)..(253): unsure at all n locations
  Clone ID: PAT_MRT3847_91691C.1
gtaaatggtgcctatttcctcatattgatggtcctagtctttggagggacatgggcttgctgcgcatgcangaagaacatcatgatgaggttcggattaaaaacctggaaatggacttgcttaattttgatttacttacaatggaaaatcttgccaaaggtgggatcaagattgggatgatgattgggaccaccatggggcggtgaaatcaccggcagcgcatgccggaagcatctcggggaatggccttact

SEQ ID NO: 133650 - DNA, 247 bp, Glycine max
  Clone ID: PAT_MRT3847_91692C.1
atatcatgtgccatgatatttatcacaaatctctgattgtcaatgggccaactacaagtattggctcttacaaatatgggctatccagatagagctgcgttattggataaaatgatagttgcagaagtcagatctgcggtttgtacatcaaacagccatacacaagcttgtttatgcagcatcactgaattaatcaaaaaataaaacaaaaaagggggcccgccgaatattgacctcgtcaacccgg

SEQ ID NO: 133651 - DNA, 528 bp, Glycine max
  Clone ID: PAT_MRT3847_91693C.1
ctacaccctaaattgaagttactactgggggaggcggggggccaataaaacattcaccaaattgtccatcgacacctacctaagggttcatatgctgaaagaccattacctcgttacatatgaaaaatgaaagctcaccttccaagactgttatcagtgcaacatctcatgggagatatttgataagaggattgcgcgctcatttctttttgggcctaaaggtcctactgtatataaagaacaattcgaaatgtttatgattaggtggccggttgccattcattattgagctctgaacttgacctttcattacaagatatctagagccttttcactttaaaatgaactttttaaggctaactatttctaatatttgtacatcaaacaaaagaaataaattttcaaaaaataaatcaagaatattggaccaaaagcaaaggccccaaatttaatttaagtggacccctgtactcaaaattttgaggaagacggtccaattttaaaaatatagaagatcatttaaactta

SEQ ID NO: 133652 - DNA, 641 bp, Glycine max
  Clone ID: PAT_MRT3847_91694C.1
ggtaagaaagaaaaatgtatttagcaaaatatatatacagttataaagtgattttgtctgatcacgacttcataataatgaattggcaagcaattaaccaaactatgcagccccgaaaagtgaacattaataatttcagatggtagaggtggaaaccgagttccattcagttggaactcaagattgtgagttgcaagaggagtggcacgagcattggtgtacctgcagctcaaccacaacaacatcgtcccacacggcaacttgcggtcttccaacgaagacgacacagttcttgtttcagacttcggcctagcctccttgatagcacaaccgattgcagctcagcacatggttgtttacaagtcacccgaatgtttggagctacggttcgcttctgatagagcttctaactgggaaagtgtctgtgtgctcagctccacaagggagcagtgagggaagaatggactgctgagatatttgacaaagagatttgtggccaaaagagtgcacttgctgggatgctgatgctgttgcagattgcaatgcgttgcattgagaggtgatgagggaagtggagaaaatacaccaggcacccaacttgatctctcaagatgatgcatctgtcgataggtactgttgat

SEQ ID NO: 133653 - DNA, 330 bp, Glycine max
  unsure (1)..(330): unsure at all n locations
  Clone ID: PAT_MRT3847_91695C.1
tcgatgagatatattaggatgatgatgggaggttagatatagagcaaggtttatatatatatattaggagaatagccttttagagcttgtagttttagcaaccagtttcttttgacgccttctcgatgtatagtcttcaagaattggtggatatagtgtatgattaatagtctcttttcatgacagaggggatgccttttgcatctttcctctgtgagagttcttccnctttagtgagtcattntttttcttttaagttattctcttcagctgtcatctctgtactcaaaatatatttatggaaaatgttaaattttaattttaattaaa

SEQ ID NO: 133654 - DNA, 348 bp, Glycine max
  unsure (1)..(348): unsure at all n locations
  Clone ID: PAT_MRT3847_91696C.1
acacaatcagcctcaagaaacactataatgcctggagcatttacttctaggcttaacggattagtagaccatttcaagatggccttggattgcttctttgcagtttggtttgtagtaggaaatgtttggatctttggaggtcacacttctccttctgatgctccacaattgtacaggttttgtattgtgtttcttacctttagctgtatcggatatgcaatgccatttatactttgtgcaactatttgtcgctgcctcccttgtatttttggtttgtggggcattccanaggatttttttccaaatggagggccaacaaaaaaattcgccgccccctctaccaatttt

SEQ ID NO: 133655 - DNA, 1813 bp, Glycine max
  Clone ID: PAT_MRT3847_91697C.1
ttatattcctggggaaaaggggttttttatagctggtataaaggggcttaataatcattttccattttttctaacattctttttaaaccttggctttagaaaagaagaaaagaagagttataataattctcatgcgtgcaattgtgcaaggagtctatgtaagttatagatggaactaacctgccatttacatggattaaattggtgaggttggtcaaaaagtgcaggatccatatgtatagtatccacctccgaggtgggatagtactcttttcaatttaacaagaaacttgagcatattatgaaacttcaatcatgttgtaaaatggattacatgatctaatgatttgtcatttttctatggaaatatcaaaatttccaatacaaaaagaaaaagaaaaaaggtatctaaattaccaacccctattaacactttggaaggattgagcaagaaacacaaagaatcctataatggcctcataaaagtaatataattgttaccaaggtttaaggtctcccacaggtccagcagtccaattcaagatcttctcccctggtttcaagaacacggtgttgtcgtgaggcagcttacgtgcaagtccatttaaaacttgatggaacgcgtctccgggttgagcaggctgtgggaaaagcattgcttgcttcatggaagggttagcaagcaatctctgtttccttaatatgacttctggtgggatagatgtgagtattgtatccaacttgggaacatcctcctcatcaacaaacacccctatctcttcccatgggattgcatcagcgaatggaagaacaatgtcatctgcaataataacagggatgcaaccaaatatcacagcttctaccaatcttgggctccaaggggcccatccaagtgggcacagacaaaacacggctctttgcatgtcctcgtagtaagtggttggatgctcagtggagatgtcaaacagcagattgtccttaaagttctcccacactgctgctcttgcgcctcttgcatagtaaccaccttcagggtcattgccaacatcataaaagagtcctcggaagtatacaaaaatggacctgggagtcttgtcaggaattaggtgggtatgcattttctgtggtggagcatacggagggatggtaatcgagccctctttcaagcacacatgatttctctgtccaaatgtttgaaccaaggtagcacgccgtagtagtgtaagaatccctctttcaattgccttctcttcctggtaatggaaacatgccccaaagtcatgaggaaccacaaagaagtgatcagccccctctgtccggttccaataaggccagtttgaagaaataagctgtatagcacttctcatcattcgtggtgacttaaagggtaaagggaggccatttggtgtcaagtcacaagtggtgtatacaggggtataaaaccaatcagcttcttcaggattaagggttcggacagggctggataagagaaaccggtgcataaagatttcagcagcaaacatatggttgagacatcttggatccttttgcagaattttcttattatatttacttggaagttcataaacaaaaaccttcaaccttcccactggatcatcttccaatacatcaccagcactacctgaaattctttcagtgggttggttcctgcccagctccacagctccaactgcaaagagaaaatcagcaaaaagaagccccaaaaaacccaatttcgacacacccatctttgctccccccagaaaagaaatgatttttgattggagaatggggaaagggggagggggggtga

SEQ ID NO: 133656 - DNA, 130 bp, Glycine max
  Clone ID: PAT_MRT3847_91698C.1
attttacagcctcatcaaccgacatacaataccgagggctgttgggctagacaaaacgagggcaacattgaacttcaaacaggaaccacaccagaagattgctgaagaaaagactgaagccaaggtcgaa

SEQ ID NO: 133657 - DNA, 1937 bp, Glycine max
  unsure (1)..(1937): unsure at all n locations
  Clone ID: PAT_MRT3847_91699C.1
ccacgcgtccgcgaatctcattttcacactaacgtccgcgcgtcactagcaatcgctagtcggaaaaccgcaaggtcgctccgctcgcgtcgttgctcaacatgaagctgctcattgctctgcttctggtgttgtgcgcgccgttttcatcttcttccaaacccaaagacccgttcctcggaatctcccccgaagatgacaagtattacaaggcttccgatgtaataaggtgtaaagatggatccggaaaattcaccaaggcgcagctcaacgacgatttctgtgattgcgctgatggcaccgatgaacctggcacatcggcatgtccgggtggaaaattttattgtcggaatgcaggacattctcctgtttacttgttttcatctagagtgaacgatggaatttgtgattgctgtgatggaactgatgaatatgatggtcaagtaaagtgtccaaatacctgctgggaggctggtaaagttgctcgagatagactggaaaaaaagattgccacttatcaagagggcgtcaaattgcgaaagctagaaatggaacaagctaaagtagctatggagaaggatgaggcagaactttcaaaactgaaaaaggaagaaagtatacttaaagggattgtgaaacagctaaaggatcataaggaacaaatagagaaggcagaggagaaggagcgtttacagaaagaaaaagaagagaagcagaaaaaggagtctgaggagaaagctaatgaagcaaaagatgggacacaaatctgatgacgataggcataaaaatgaagctgaaaaggaagttgaagaggaatctgtataatataaccatgataaacaagaaaacctagagggctcatctgctcgtcaagatgcagaacaggaagcatcacaatgctcagtttctggtgttgtgcgcgccgatttcgtcttcttcaaaacccaaagacacgttcctgggaatctcccccaaaaaggacaagtattagaaggctaccgatatgataaggtgtaaactgaaaccgagacaaatctccaaggcggagaccaatgtccttttgtgcgaatcatctgcaaggaccgatgaacccagacccccggccttccagcaaaggagttttattcattctatgatcattgctttgagggtcaaggagaacaagtacacttacaaagtctgcccctataaacaggcttctcaggaggagggttattccaacacccgtttggggagctgggacaaatttgaggattcatacagagtaatggtgttttctaatggtgataaatgctggaatggtcctgataggagtttgaaggtcaagttaagatgcgggttgaaaaacgagattactgatgtagatgaaccaagccgttgcgaatatgtagctgtattatctaccccgaccctttgccaagaggaaaggctgaaggagttacaactcaaactagaccttttgaattcggaaataccagcaaaccatgacgagttgtgaacaaccgggacagattttaactggtagtatgatgatcatagagcaaatgaagaagtggtgccctaagttttgtatgctagagcttacacaaatatgatatcgggtgaggttagggagaggctagaagctgatttgacttggggttggtaatccttgtggttgtccaagtttgcaacattctaatatgactcatcccgcacatttttcctttattgaactcaattacgaaatggtctgtgtgcctctccttgaaattgtccattccataccaaaggatggatatttatactatgcaagatactggacagtcagaatttcttgagccaaaattatttgttggaatgagttcacgttattattgattcttacatggatttgtgccntanaaaaaaaataaaaaaaaaaaaaaataaaaattaaaaaataaatttaataatgg

SEQ ID NO: 133658 - DNA, 220 bp, Glycine max
  Clone ID: PAT_MRT3847_9169C.1
ttagtaaaaattaccttcaataaaaagaatagtatacctaaaataaccttcccacctacctcaatcaagccggaaaagaagcctggttttagcccctggccggtgatcctgaccaaagcctggccccttctggaaccctaaaccccccccaccggtgggggattcttcccccgatttttacccatcccacccggcaaagaaataaaccatgggaaatggt

SEQ ID NO: 133659 - DNA, 145 bp, Glycine max
  Clone ID: PAT_MRT3847_916C.1
aaacctttaaacaatataccctcatttttatcataacaacactttctctttcacttatccttttcaccatcaatatcatacccatacttcactctcttttcactcactaccacaaactctctttcaccctataacaaccgtattc

SEQ ID NO: 133660 - DNA, 1939 bp, Glycine max
  Clone ID: PAT_MRT3847_91700C.1
ccgcgtcgtaactcggttttggctcccacgcgtccgccgcaaggtcgctccgctcgcgtcgccgcataacacaacttccaattttcacaaccaccaccatttaacacttgatctaactactcattagctcactcattagtatcattattcccattttcaattttcaattcaccttcttcctctgccagagcatgaagctgctgcgtcttcgaatcctcctcattgctctgcttctcatgttgtgcgccccattttcatcttcttccaaacccaaagaccccttcctcggcgtcgcccccgaagatgacgactattacaagtcttccgatgtaataagttgtaaagatggatccggaaaattcaccaaggctcagttcaatgatgatttctgcgattgtgctgatggcaccgatgaacctggtacatcggcatgtcctggtggaaaataaccatgataaaatagaaaatctagagggttctcctgcggatcaggatgaagcaggggacaaattagcagatgtacttgatgatgatgatgatgatgatgatgatgaagccagtgatagtcatgggagtgaaggatctttgcataataaagtggaagagaatgcaaaagaagctgaggaagaacctattgttaaatctgaaactgatataaaggtcagaaacaaagagtcttctgatgaaatcatcaataaggggaatgatgcatctgaaaatactgagggattatcaagggaagaattgggccggcttgttgcttcacgttggacaggagaaaatactgataagccaagtgctgtacctgatacaacattagacaatgaagatcgggaagatccaaaggggagaaataatgaggaatatgaaggctatgcttctgaaactgatgatgacaacaacaaatatgatgatgacagccacaaatatgacgatgaagatgaagttgatgaagagtatcgagaggatgagcatgatgaccttacttcctcctacaaatctgattctgataatgaaccagacttgtcagataatccttcttggttagagaaaatacagagaactgtgcggaatatttttcaggctgttaatttattccaggctccagtgaaccagtcagatgctgctcgtgttcgcaaggaatatgatgaatcaagtgccaagttgtctaaaatacagtctagaatatcaagtctgaagcaaaagctaaaacatgattttggtccagcaaaggagttttattcattctatgatcattgctttgagggcaaggagaacaagtacacttacaaagtctgcccctataaacaggcttctcaggaggagggctattccaacacccgtttggggagctgggacaaatttgaggattcatacagagtaatggtgttttctaatggtgataaatgctggaatggtccagataggagtttgaaggtcaagctaagatgcgggttgaaaaacgagattactgatgtagatgaaccaagccgttgcgaatatgtagctgtattatctaccccgaccctttgccaagaggaaaggctgaaggagttacaactcaaactagaccttttgaattcggaaataccagcaaaccatgacgagttgtgaacaaccgggacagattttaactggtagtatgatgatcatagagcaaatgaagaagtggtgccctaagttttgtatgctagagcttacacaaatatgatatcgggtgaggttagggagaggctagaagctgatttgacttggggttggtaatccttgtggttgtccaagtttgcaacattctaatatgactcatcccgcacatttttcctttattgaactcaattacgaaatggtctgtgtgcctctccttgaaattgtccattccataccaaaggatggatatttatactatgcaagatactggacagtcagaatttcttgagcc

SEQ ID NO: 133661 - DNA, 401 bp, Glycine max
  Clone ID: PAT_MRT3847_91701C.1
tattctttaaagtcctactccattctatctacgggggctcgtacaagacgttccacaatcaagaaatctgaaagtggctataagaggatggaagaattccttgctttaagactaagggaaattatgactacaaattactgcgacttttttgtgtccaacgttgcagaaattgaggctaaaacgaatagtggttattacagtagccgtgggctgaattctgtgaaagaggacataagtagaatgtgccgtgatgcaataaaagtgaagaatcggagtgatgctagtgacatgaaccatatcatcacattgtttattcagctcgcaacacggctggaagagagttctagatctgtgcacgatagaaatgaactactgaaattatgggacaatgacttgcctgc

SEQ ID NO: 133662 - DNA, 282 bp, Glycine max
  Clone ID: PAT_MRT3847_91702C.1
atgggatgggattgttgactggtgttggaattgagagagagaacggaaggatggcaagaagaccaagatgaatgtgattcaacttgcgaatgaaagacaaaatccatattcagaattgcatgatatgcacaaagtcgatttttaattcacaatatgagctagccatggaactaacatagaggatgattgcaagtatggattcaccatcacaaggcttgacttagctgactgagtcaaccaaaatggatgcatccgaagaatttttgaaagccaaatgttaat

SEQ ID NO: 133663 - DNA, 593 bp, Glycine max
  Clone ID: PAT_MRT3847_91703C.1
gaaccatagagcatattaatgaaccaaaatttaactgggggaagtagtagtaaggactcttctaagtaagtagctaagttggtatagagaaatttctttccaattttttttctacctttttcacaaactgctttagtattgattatctgaaaacacacactaatatgttgtttggtcttttctacttctgcatttttttcacactgcttattattccatggctttaggttggtctccgagcagccccgatgccttccgggcgtgagctttccttagttgtcagcagcaaatgacgaggcctgcctgcttccattctgttgtgccttggagacgatggctgcactatgcctcgcctgccctgctgcctccatggccttgtgccatgttcttcttgctactggatcgccaccgggctgagccccatccttcggcgacgctttactcctctcctgacctgcctgcttacaatctgttgtaacttgtacacaatagcttaattcttcctcttctgctcatgagcaacagattccaagtggcacaattttgtaagtattgaagacaatttcgccaccatgcttattctcagcgaactg

SEQ ID NO: 133664 - DNA, 403 bp, Glycine max
  Clone ID: PAT_MRT3847_91704C.1
gtgaactagttttagattcttacctggtggtaattaatgggaaagactttctaattttgttataacttataaatcataaactgcatccttgtactcatttgagatcaatgttttaaatcccgaattaggctatatatgaatattttgaaatttattatatagtctattaaatataatttctcaaaaatgataaaaaaaaaaaactcatagttgatgatgttcataattaacaataaaaagttgtaggtgtcatgaacaaaacatacaagtaaatacctacaaaatttaaaacgtttcctagatagaatcatcagtcatcaatcatcgtcttttaattgcaagactttgtcattttcactactattactgctgaagatttcaattttggaaattgaaatcagaa

SEQ ID NO: 133665 - DNA, 208 bp, Glycine max
  unsure (1)..(208): unsure at all n locations
  Clone ID: PAT_MRT3847_91705C.1
gcatgcacaagcacggaaaacggctcgaggttaaatacacactgtgtattttatatcctatttgaaagagaatgacatttagttaaatgttgtggtttaaggggcacatattatgatatggtctagtatgatttttgncattgaattgtttactcctgaaatgcaatgacataataagaagtgttgtgtctgagaattgtgggtgttt

SEQ ID NO: 133666 - DNA, 247 bp, Glycine max
  unsure (1)..(247): unsure at all n locations
  Clone ID: PAT_MRT3847_91706C.1
gtgagaaacatggcttccttaagctccttagtgctgctccttgcagctctaattctatcccctcaagttcttgcaaactatgagantnccccagtgtacaagcctcccactgagaaaccaccagtntataagcccanagtngagaagccnccggtttncaagccnccagttgaaaancctccagtttanaagcnnccagtagngaagcnacnagtgtacaagcccccggtnggggaggntcggtntt

SEQ ID NO: 133667 - DNA, 279 bp, Glycine max
  Clone ID: PAT_MRT3847_91707C.1
ggaccccaacagcgaggagaacagcaacgatattgccctggtccacctctccagtcccctgcccctcacagaatacatccagcctgtgtgcctcccagctgccggccaggccctggtggatggcaagatctgtaccgtgacgggctggggcaacacgcagtactatggccaacaggccggggtactccaggaggctcgagtccccataatcagcaatgatgtctgcaatggcgctgacttctatggaaaccagatcaagcccaagatgttctgtgctgg

SEQ ID NO: 133668 - DNA, 696 bp, Glycine max
  Clone ID: PAT_MRT3847_91708C.1
cacgcgtccgggtgaaatcactttctgatatttcttagtaatgttcataatccattccatgaggactcactttacagatacatcacaatcacaatcacaattgcatgcttctcttctcttttactgcactggaaatttccaattggatgtatgcgtattcctattgccttgtaaaacatctaattctattcccttccacccacactcttaactccaccctttcttcttatcatccccacccaacttacatttacgctcacatttcctaaacccactaaggattttcagctttcatctatttttgacaactgggttctttgtcttccatgttctttcggttgccttcagtcaaagatctggccttttttaagatgtggggatctgggatttttgctgtgttgttgttgttgtgaatctcgctttacatagataggcaacaagggttctgagagatgggtgctgatcttaaagctgaattgtctgggaaaacttttgtttttggtcttaaggtttggcaaataattggaattgcggttggattgtttattgttgtcattctgtgagtgctcccattttgccttacttcaaggaagaaaactagaagagccaggaacagaattcctgctagtcatattcctcctgtctcaaaggaaatcacggaagtgcgggttgagcaagtgcccgcaaatggatttg

SEQ ID NO: 133669 - DNA, 803 bp, Glycine max
  Clone ID: PAT_MRT3847_91709C.1
ccgcgtactaactcgattggttccagaggactgccactatgaaccagaggatcttgtcaatttatttcttttgccttatgtaaagtgcattgggaggaaggcaagaaagctctcaggtgaatttgcagatgtatcaggagaacaatgcaataactatgaatcattcccttcctgggacaatggaagtgtttgtgatgatgatgttactgatgtacatagtgaaatggatgactctacctcacttatttctcagccacgtcagatcaataaagttgaagtccagtatgacaaaacattcaaacaagtcaatgttcaggctctgaaaataacactttgggaccatattcaagaatccgttcaagttccgattcagggtaaaaaagaagtggtatctttcaagcacatgttgaccaactttcctagtaaatgcaatgctgctgcaactattagtgacatatctccacatttgtgtttcatatgcctattgcatttggctaatgagaaaggattgaacatccaaagctgccccaacttggatgatcttggcatatgcctacctgatgatggtgccactattactggaacagtttagatctgcttcactcaattatatcttctcttgaggaaataggaaatattttgactagtctttatgtgcagttcgcttgcttgctctgatgcttttattgtttgcagaaaatactatattttctaccgcatattatcagaagattgtaaatagaaggttttggatgtgaaacactgatagggtgaaagactgataaaatgagtgaattcgaatt

SEQ ID NO: 133670 - DNA, 286 bp, Glycine max
  Clone ID: PAT_MRT3847_9170C.1
cgcgcgctattacccttgacctgcgatttaggtagtcagagagcaaattgtatggcagataggacagccgcacaacaatcttctagcctgaaggacgtatttaccacgtggaatgtgcaatggacgctattgacaacgctatgtaccgcaacagggatctcatcaaacgatggctgttgcgctggctgcagaaaaggaagccacatgcaaggtgattcaaactccagctcacaccgagaaagagcccaaaggtgtcgatcatgatgcatgtgctgtgggtgcggat

SEQ ID NO: 133671 - DNA, 704 bp, Glycine max
  Clone ID: PAT_MRT3847_91710C.1
gcatgcttctcttctctttaactgcactggaaatttccaattggatgtatgcgtattcctattgccttgtaaaacatctaattctattcccttccacccacactcttaactccaccctttcttcttatcatccccacccaacttacacgtccgctcacatttcctaaacccactaaggattttcagctttcatctatttttgacaactgggttctttgtcttccatgttctttcggttgccttcagtcaaagatctggccttttttaagatgtggggatctgggatttttgctgtgttgttgttgttgtgaatctcgctttacatagatagcttatctctttttctattacatatatatggtaggcaacaagggttctgagagatgggtgctgatcttaaagctgaattgtctgggaaaacttttgtttttggtcttaaggtttggcaaataattggaattgcggttggattgtttattgttgtcatcctctgtgtgctcccattttgccttacttcaaggaagaaaactagaagagccaggaacagaattcctgctagtcatattcctcctgtctcaaaggaaatcacggaagtgcgggttgagcaagtgcccgcaaatggatttgttcctcgtgaaggaatacttcttaccattcatgataagtccagtgacaaagaatcagacagggtatgcttcatttag

SEQ ID NO: 133672 - DNA, 394 bp, Glycine max
  Clone ID: PAT_MRT3847_91711C.1
aattcggctcgagagaagacgacagaagggcattgttttaattttttccgaagacatcacatcattgcgagcaaagcaaaataagaaaataagagcaaaaatttatcatggatgtaaagcctttaagtcattctttatagctgtttgaaataatgaatgagccttggatgatacttagatgagagaattttgtctcatctttcttatcttgatgctataaacatatgctggataagtatcactactatacttgggccttaatatcaatggcttcccaaaataataagttccccataaacattccattattccaatgaaaaatttggacctggatggattttcaatctaatcatccctttttataactacaatacaagcttaaatgactgtaatc

SEQ ID NO: 133673 - DNA, 476 bp, Glycine max
  Clone ID: PAT_MRT3847_91712C.1
gtcgtgcgtacggctgcgagaagaccacagaaggggagagaaaaatgagactgaaacaagaaagtaaatcacttgcagcagtttcagctcaaccttcaacaatgtcggagtcaatagctgctcggaaaatcatgaagaagccaccgctcgctccaagagtgccacttagaagaattactaacattttacctacaccaccagagagaaagccctcatgcagctcttccatggatgaacaggaaaacattgctagaacaacttcaattaacacacaagaccttgtgaaaccaagaaggggggtatccatagctgtaagacccccaaccacaccatcaacatcacggacccttcagcctagaaggaggcgtgtttctgtagctacactatgtcctgtcagaactccactccgttcccccactcagcaatcaccgagaaggccctcatgcagctcttccatggatggacaggaaaacatt

SEQ ID NO: 133674 - DNA, 1222 bp, Glycine max
  unsure (1)..(1222): unsure at all n locations
  Clone ID: PAT_MRT3847_91713C.1
agttctgacaggacacagagcagctacaganacacgcctccttctaggctgacgggcttgtgatgttgatggtgggggtgggggtcttacagctatggataccccccttcttcttggtttcataaggtcttgcgtgttaattgaggttgttttggcaacgctttcctgtccatccatggaagagctgcatgagggccttatcagtgattgccgagtgggggaacagagtggagttctgacaggacacagtgtagctacggaaacacgcctccttcttggctgaagggactgtgatgttgatggtgggggtgggggtcttaccgctatggataccccccttcttggtttcacaaggtcttgtgcgttaattgaagttgttctagcaacgttttcctgttcatccatagaagagctgtatgagggccttctctctggtggtggaggcaaaatgttagtaattcttctaagtggcagtcttggatcgagcggtggcttcttcatgattttctgatcagaagctattgactcccacattgttgaaggttgagctgaaactgctgcaagcaatatattttcgtgtttcagtctcatttttctctcccctgtcacctggttctcaagatcccgaaccttttcttgaagatttcggcacatgagttctcttgaagtaagtctcatttgcaatgactgcaagttatcttgtaattttctagtttccttctcatcatgtttgaccttttctaccatttgcttgtacttattcagttcagtaaggtctgtttgcttgcgggctgggccactctcaattcctcgtacacgtgcggcaaaattcagagaacaaagtgtctctgttaagtctgctgcacttggacttatctggacaaacattaaagttttgcaatcacctcctaaagagctctggagtatatgggtgagctttgagttcctgtaaggtatgtgggctgatttggatgcaagggcagaaataacatcaccaagtgctgatagatacttgtttatgaattgagattccttcagtctttctccttcagcttcagttttcaccacacgctcactgccagctaaatctactagccaaaggtgactcncttgtttctggccattgattaaattcttccctaaaacagtcactctcaacacacaatgagaacgactgctaagctcattagcactagtggatccaacagatctggcttggtta

SEQ ID NO: 133675 - DNA, 346 bp, Glycine max
  Clone ID: PAT_MRT3847_91714C.1
ggctcgagcgcgaatgaatggtgctgcggtcgtgggaggatctcgtggactgaaattggagcggcgtacgagcaagaaatggttttatgtcgtgaggaagaatgccaagctgggggaatatgtcatagagaagcatagggcgtggactcaacgtgatgaggcatgggatacgaagcacatcacagtggtgagccggaagctgcgcatatctgtcagcacgacaaagtcgcatgtggctccagatgtgctcgctacattatgtgaacctattcatcagggacattggtcaaatgtaccatagcaaacgcttctgcacataatccaccgggtctatgagagagcgaca

SEQ ID NO: 133676 - DNA, 224 bp, Glycine max
  Clone ID: PAT_MRT3847_91715C.1
ttttgcgtttgcgtgggcaaaaatgagcactaaagtgcatgacactcacattgacctcaggatcgccacgatgtgctctatgttggatgtgatcagccacagtacgacactgatgccatgctctggcctgaagacatgagccgaatacaacgcgaaaggcgcgactgtatacgaggacttccgggagaactccaacacgcattggactgactagaaggaccctc

SEQ ID NO: 133677 - DNA, 373 bp, Glycine max
  Clone ID: PAT_MRT3847_91716C.1
ctcctgaccccattttacaccatattgcttggaatcaaatgggatcaggcgtaacactattgaacgtcgaggctagcaagcagagcttttgtgagttttctattgacctcctcgttgtaggactctaagtggagacaaatgtagattgaatcacacttgtagacaaccttctgaattccaaccaacacgttagtgagctttaaggaacaatggctgaatacctaccccgacagggatgagcacgatcattgcttccgcgtcttgaagtccaacctcctgagagccaggctgcacgccaagcttgaccccttcggcgttcactgggtcaccaaatttttcgatctaactacggccgagttccggcgtcagtttc

SEQ ID NO: 133678 - DNA, 372 bp, Glycine max
  Clone ID: PAT_MRT3847_91717C.1
tcgctttcgcgtacggccttattattccataggttggtgagcacgaacgtgaactttgcactttgaacggatcgtaagagcaccataactcgaacagaagccgtagagaatctgcagtctaattcatctcttcttaatcttatcctctatttttgtacttatccccatcgccatgtctgaagaggaatcgcattattccgacgaagaggttgaggaggaaagcattgtcgcggatgaagtgagcgttgtaagtaccgggaccgcccaaagaagaggagccggtgccggaagccgaatcggaagtacccccggtggatgaaaatgaagaggaggaggacgatgagcccgggtcacccggaggggcaggtgatg

SEQ ID NO: 133679 - DNA, 235 bp, Glycine max
  Clone ID: PAT_MRT3847_91718C.1
tacgcaatattattcttaatgctctatatattgcatcatctatattgcatcatatacatcgtctttcagtgatcattaatcaaatcttgtggggttacctcattttgacaatctttctttggtttcacaccattattctattagtctcatcacaatataacagatcattagtgtcggtattatcatcatcatattactattggacttcctctgactacttctaggtttcgtttta

SEQ ID NO: 133680 - DNA, 308 bp, Glycine max
  Clone ID: PAT_MRT3847_91719C.1
cctcgtgccgtcggcacgagtagggttcgagggtgccactgcatcggcaatggatgacttttctatatattaatgcgagcgtggaatcaatgacgaagataggcttgtgctcttcgtcgtggctctcctttgcttcccccattgtaaggatccccacgaccctcagccaccacaacggtgatgttctgatgacggagcccggctgcgttcgagggcaagggattctgggtttttcctttgcttctttttctttttgttggattaattatcagtctaaattatactattgttttttagttgcaaaaaaa

SEQ ID NO: 133681 - DNA, 504 bp, Glycine max
  Clone ID: PAT_MRT3847_9171C.1
agattactaaaaaaaaaggtttgaggttttaaattatggtggacggtaataaagcaaaaaggtaaaaccaataaaaaaaaaaaacgcaaggggaaagaaattacaaagggggactaaggaaggaaacaaaaacagcctacaaaaaaaaaaacgaaaagggtggggatttttgcaggagaaccgaaaagggttctatagccgggggggccaaaaggggccgccacaacctccaaggggaggggagggggaaaaagaatacaaagggggggggcaaaatagggggcggcaaaatactcaggggcccgggggccccctttggtgaactcggaagggggggccaaatttgggactggaatccacgacaggggaaggaaacaaaaaaatataggactggcaagaaacagccccggggggcaccccgggaaaaacagagcgggaccggcaaaaaacaaaaccccgcctagggggcgggggaagagcttggggaaagacggagagaggagg

SEQ ID NO: 133682 - DNA, 529 bp, Glycine max
  unsure (1)..(529): unsure at all n locations
  Clone ID: PAT_MRT3847_91720C.1
tcgagccacagaatcacaattcttttcctcatcagaaataattttttgtcttgttttagtttttgccgactcgcttcactttcgttaactatttcattttattttaatccttttcattgaaagtctttgcggagtggttagaagagcgagatttcctttggaaatcttctgaagagccttccagtttgcgaattgaagaacccggcattgcttcaagaaggttcgttattttttcgtggcccatggtttatgcttaattgaaataaatttgcattgacttttnggtgtctctgggaaagtggaattaaagcattggnttgggtctanaaaaaatcagaaaaaccagggtcttctgaaaagatgaaatgtggcaagtaaccatcaaaaagcatgtgttgaattgatatgtaaatttcgaacaattggatatgctgctactcacctgtgatatgataatgncatgcaaaccttgatgcccactattcatcttncttctcacaaacagcacatgatgctgcacataatcaac

SEQ ID NO: 133683 - DNA, 409 bp, Glycine max
  Clone ID: PAT_MRT3847_91721C.1
attttaaaggataagtacgagaatgatccagaagtttggaagatggagatagagttgaaaaaagtgcgagaggaactagagacgtatcaaaatttctacgaattgggggagagagaagtgctgatggaagagatacaaagcttatgaagccaacttgaattttatgttgactctttattcacatcatcaaggaagcaatatccgttattgtaattgacttactctgctgaaccacagatgtgagcgaccctcactgtcattccagagttgacagaggagacagaagacacagatgaaacttgtgcatcatacaagaatgatactggagcacaatttgaacaagaaagaattaaattgacagatgcagaaagcacgttgattgctctttctgaagaactgaaagctgagc

SEQ ID NO: 133684 - DNA, 330 bp, Glycine max
  Clone ID: PAT_MRT3847_91722C.1
cacggacacacgttaagtttggagaacattttttgcatgcatcttacaagggttccgatggggatatggtggtagtagaggactctggtagctagaagcagagttcgactacaggacagggacaagctagtgatttgagtaaacaatcgccacaaggtagaagacttaaagcagtttctgcttctgggaatcgctagttaacattacgctgagacattgaatatagattatatgtacaaattgacacatccatattgtcaatttagcagtgtcaaatacaacatgatcaaaatatataatttaatgatttagcataggttgtgtcaaaaa

SEQ ID NO: 133685 - DNA, 320 bp, Glycine max
  Clone ID: PAT_MRT3847_91723C.1
cccgcgtggacaacagctgagagggggccactgaagggggatgtaggcaaatcgcgaagactagttttgatctgagagaatggctcctcggactagcagcaagggcgcccaagacctgctccgcgctctatggtcggcttatgcggcagcccgcactaatataaagatcattgatctgtatgacacatatgccgtgttcaccgctttaattcctgcagcttacatggatatggttggagcatctccatatgactacttactatcaggagtactttttagggtcagaacagctgtcctcgctgacatgccaaagatccaag

SEQ ID NO: 133686 - DNA, 328 bp, Glycine max
  Clone ID: PAT_MRT3847_91724C.1
tcttttcacaaatttctattattttcggggttcaagtgacaccattttggctaacttatttccttttccttacgattttgcaatcttttctaaaaaaagaaccacctaacgaaagttcaccacaaaaaccgttgcttgtgcgtgccaatgcatgaaaccaaaacttaacttacaacccttccttacatttttaggcaaaaatgtcaccgccttctttttcaagggaagttgaattttacaccacaaacctcctttgcctacaaaatcccactcatgaaatttgtttaaaagcttattcttttctataccaaattgaaacaactttatc

SEQ ID NO: 133687 - DNA, 479 bp, Glycine max
  Clone ID: PAT_MRT3847_91725C.1
tccacgcgtccgacggctgcgagaagacgacagaaggggaggggacaaggcagatctatagactatagtagtagaccagaaggaaagggaaggtttcctgcgctgcgtgtgttcccttccctaagcacaccacatggaacatttggagcaatggaaacaacaatttctccggtggtggcgcgtcgcagtccacaccgtccccccaattcagctctacgccgtcgccgccgtccttatcctcaccaccgttctccttctctcaattcgcttcttgaagcgcgcaaagtccaacaccattgttctcactggcctctccggcgccggcaaaactgtcctcttctaccaacttagggatggttctatccacgagggtaccgttacgtccatggaacctaacgaggacactttccttcttcattctgaaacagtcccgaagcgcaaggtgaaacctgtttgtgttgttgatgttccgggacatt

SEQ ID NO: 133688 - DNA, 589 bp, Glycine max
  Clone ID: PAT_MRT3847_91726C.1
ctcacgcgtctgcccacgcgtcccctctgatggggcatcgtatatgattggtcggtcatagcagcgcttgctcatccactccacccttgaaaggaaacaaaattcacacacagaagaatagaagggtagttaagcttgcttaagcaacgcagagagaaacaaaaggagcttttgtttatccaggccaaattgtaattaatcaaactttctgggatcttcttctttctcttgccatggccgcgtcgccgtcgtcttccgccgcggcaaacatcatgctggcgatcttcgagaagaaaacgaacagcgtagatctctaccgccctctccgcaactacgtggccttccactactccgagcgcgaggcgcagaaccttgaggacgatctccaaaccctgaagcaactccgctccgacgtggagcgccactccgatccgtcgctcccgacgcgccgtgaccttctccaaacctactacaaatccctctgtctcgtggagacgcggttccctatctccttcgacccgaccacgtaaacgccctacctttgtctggttcgaccgcctttaaagcccagcagaatgccttgcaacaa

SEQ ID NO: 133689 - DNA, 505 bp, Glycine max
  Clone ID: PAT_MRT3847_91727C.1
gggggatcatttctggtcggatgttttaacaacaaaaagactaccaattttctcctctatataatggggtgatgaaaaacccccaccacaccccctgtgaaaaatgggggggggccccccatgacttactaatagtgacaacccaccgctggttatgactacgtggatcaaccaccaccacttctttttcttttcttttttttcggggcgacatttttaaaaaaacggtcatcaactcctttgtctgcggggcacttgggtaactaccggtcagtgttttatgaaaaatagctgaggaacatttgtggccccgtagaccatgaaaacaaattcttccgcaacatgtgacattgacaaaaaacttctccccacaagaggaactagaccccctctacaattttgataccaccccccttgtcccaatcttgtggagaaacaacatgtgtcataaccttttgctgagccccccaaagaattttattgatggccccaaacttcttacccc

SEQ ID NO: 133690 - DNA, 1009 bp, Glycine max
  Clone ID: PAT_MRT3847_91728C.1
ggggagaaacaatggggtctctaatggcctctgccacattgactcttgtattggcaatagtgtctctaagcttgccgtctcaaatttcagctcataactacttgtactcatcacctccaccacccaagaagtacccaccggtgtcttctccataccactatccttcaccacctccaccaccaaagaagccatattattctggtgccgaattcggcacgagcaaggctgttgggaaaagtcctccctgctttgaatggaaaattgactggtatggcattccgtgttcccaccgtggatgtctctgttgttgacctcacagtgaggctggagaaagaagcttcctacgatgaaattaaaaatgctatcaaggaggaatcagagggcaagttgaagggaattcttggttacactgaagatgatgtggtctccactgactttatcggcgatagcagatcaagtatttttgatgcaaaggctggaattgcattgaataagaactttgtgaagcttgtttcttggtacgacaacgagtggggatacagctcacgtgtcattgatcttcttgtattcgttgccaagaagtctctttaaggggtgttttacttcaaagtagcttgtcttcacattattaccgtatgtttatgtttagctgcgatttagtgtcttgctcgagcaaaaaatgagaggtctgaataaatcggtttctgaaaccagtggtgttacttgttggaggagcattagctcttttttggacttttgatgttttctcttgtggagggggatcgagtttttggatttttatatactcgctgatgtacttggcttgaatacttgctaatgtacttgttattgattgttatagtagatatttgtccgtcctttttttcatttgtggttctcgtatatttgatcctgtttgctttgaatcttggattcgtggtttaaacatttttctgtgcttattttagtccgtatttaaattaacatttttggcttttaattttttttt

SEQ ID NO: 133691 - DNA, 1116 bp, Glycine max
  Clone ID: PAT_MRT3847_91729C.1
ggaaagtcctccctgctttgaatggaaaattgactggtatggcattccgtgttcccaccgtggatgtctctgttgttgacctcacagtgaggctggagaaagaagcttcctacgatgaaattaaaaatgctatcaagtaatgactgaattatttgattctcctctaatgatattgtgtattattggatcttatgcaaaatttcattacttttattcaaaaatgcctactccatttttgtattggtccttctcaatttgtcttatatgatgtatttctcagggaggaatcagagggcaagttgaagggaattcttggttacactgaagatgatgtggtctccactgactttatcggcgatagcaggtataaattatggtaaaagctgaaaatttattttaacacaattgttgcctttttatgttgacaacctgacattattattcatttacctgttaaccattttttgtttaaaaaaatcattgttccagatcaagtatttttgatgcaaaggctggaattgcattgaataagaactttgtgaagcttgtttcttggtacgacaacgagtggggatacaggtaaatgcacctttaacaatttcttgtatgtgatagtgggttagtgcgtcaataagttgttaatttggccaaaaatctaatcacccgaattttagatgctttattattattaattcagctggttctaataccttctttgtccccggttctgcagctcacgtgtcattgatcttcttgtattcgttgccaagaagtctctttaaggtgttacttcaaagtagcttgtcttcacattattaccgtatgtttatgtttagctgcgatttagtgtcttgctcgagcaaaaaatgagaggtctgaataaatcggtttctgaaaccagtggtgttacttgttggaggagcattagctcttttttggacttttgatgttttctcttgtggagggggatcgagtttttggatttttatatactcgctgatgtacttggcttgaatacttgctaatgtacttgttattgattcgccataccagatatttgtccgtcctttttttcaaaaaaaaaaaaaaggacgacggccgaccactgagcagttc

SEQ ID NO: 133692 - DNA, 1677 bp, Glycine max
  Clone ID: PAT_MRT3847_9172C.1
atgccggtggcgaggcgagagacgtgcgatggaagagtgattgctcatgtagacatggattgcttctatgttcaaggtaacataacccttccattctgctttaatttgagaagtgaatttagtgatatattatacgatgttgtttgtgtttgtgtagtggaacagagaaagcaaccaaatttaagaggcttgccctctgcagtcatacagtacaactcctacaaaggtggagccctcattgctgttagctatgaggctcgccgatgtggcgtcaaacgttcaatgcgaggggatgaagccaaggaggcatgcccgcaaattcaactggtccaagtcccggtggcgcgtggtaaggctgatctcaactcgtacaggaatgcgggttcagaggttgtttcggttctttcacagaagggccgttgcgaaagggcttcgattgatgaggtatatcttgatctaacccatgctgctgaaaccatgttgatggaaactcctctggatagcatgcaagactttgaggatgaagttctcaagtcacatgttttgggtttggaaattaaggatggaagtgacgccaaagatgaagttaggaagtggctttgcaggagtgatgctagttaccaagataagctattagcttgtggggctctcattgtgtgtgacctcaggatgaaggtgctgaaagagacagaattcacatgctctgctggtattgctcataataagatgctggctaaacttgcaagtgctatgaacaaacctgcacaacaaacagttgtgccacaatcatctgttgaagggttgcttgcttctttgccaataaagaaaatgaaacaccttgggggaaagctggggagttccttacaaagtgatcttggtgtcaacactgttggtgatctgcttcagttttcagaggagaagttacaacagtggtatgggatcaatactggtacttggttgtggaatattgctagaggaatcagtggggaagaagttgaggggcgactacttccaaagagccatggttctggcaagacatttcctgggcctcaggctttgaagaccgttgattctgttcaacactggcttaatcaattgtgtgaagagctgaacgaacgccttcactctgaccttgatcaaaacaaacggattgcacagacactgactctacatgctagagcatataaggtgacaggggattcagattctcatagaaagtttccttctaaatcttgtcctttaaggtatgggactagaaagattcaagaggatgccctaattctatttcaagctgggttacgtgattttttgggcttctacaactgtaaggctcatggaaacgaaaataacaactggggagtaacatcactttctgtttctgcaagatctcactctgctgataatagtcattcaacttgtattcaagttgagatgcctgctgagcaccctcatgaagagtttgatacaaacaagagtcgatgtagcgtaggtaatatgccacaaggaaggcaagattggagttataacatcaatgagattgacccctctatcatcaatgaattaccaccagaaattcagcaagagtttcaaatctggcttaggccgcataagcggcctaatgtggctaaacgaggttctagtattactcactatttctcacctgacaaaagtagataa

SEQ ID NO: 133693 - DNA, 149 bp, Glycine max
  Clone ID: PAT_MRT3847_91730C.1
cagattgacagaagcaaaaacatcatgattgctggcctacatgagacagcgacagggggtttgcctacccccatgccgttatcgttagaagacaccaatggatcctgttccacagatgggctctgacagtaacaactggcaaattcttc

SEQ ID NO: 133694 - DNA, 315 bp, Glycine max
  Clone ID: PAT_MRT3847_91731C.1
catagaaaagatacctaaagtgataaagcgccatatatagctcatgctaagaggtagggagaggaaaacacgtgacaacatctacttcttatacaccaaagtatctgatcataccaggtcgcatatacacggtgccaacaccaagatacattctacggtttcgaccttttaagcggggttcactaagcaatgcttggaccggtatgcaccgagccaacttagtccccagggtacaccgccgaataaagccactcacttgttccggtgggctgatcgcatatagctcatcctatgctaacccatgcttccatgtat

SEQ ID NO: 133695 - DNA, 363 bp, Glycine max
  Clone ID: PAT_MRT3847_91732C.1
cgagggaacacgcgtcttggaggtgcaatgtttttgtagattgctaaaagtacccattactaaagtgcaatttgttagaggaaagacgtgcctatcagaggcaaaaggcgctttctgacattttcaataacaaataccagagagcgaatagcaccagacatgaatacagagtgatacctgatggggacaaatactaaaggctaaatacaacgaggaaaaggcttagatggggacaaagttgatgaaataggttctggatgatgttggaactcctgaaggactcatagctgcatctgtaagaatctgaattgaaaatagcacttcccaaaaacacagaatgtggaaccaggctgcgtagcgatc

SEQ ID NO: 133696 - DNA, 292 bp, Glycine max
  unsure (1)..(292): unsure at all n locations
  Clone ID: PAT_MRT3847_91733C.1
ccacgcgtccggttctagatcgcgagcggctgtgctttgtttcttctttttccgatggcgtaacattctcgctccaggcattgtttctgtctctccgcatttgttcttcgatgtgctttttcgaagatgccngattttttttttttaattcggtttttgtgatttgctgcgaatggagttgagtatgtgtgggatgtaagtaggtcatttgtttgatctgaatgtggttttcattgttattgtgagactgttggtttttgagaatttgaatttggatcgttgaattggctta

SEQ ID NO: 133697 - DNA, 243 bp, Glycine max
  Clone ID: PAT_MRT3847_91734C.1
tgagtttttcaaatttttaatttcttctacatatttggtacaacatttacatgaatttactttttcattagtcatagtagaaacatgaactttatcactagatttagagattgaaacttcagttttaagaagatctatttctgtttaattttgaaatttctttctctaaaccctaaatttttttcttagatgaagaaacaagttttgccagtttaatagattctctatgtaattcaacaaaca

SEQ ID NO: 133698 - DNA, 739 bp, Glycine max
  Clone ID: PAT_MRT3847_91735C.1
gatctagcggctagggtaagagctttggcgagggaaaaaaaaagacgagaaattcacaagactacataccgaaaaaccctatttattgattcagagagggcagagcggacgccgatagagaggagctgccaacagagagcattgaggttccgcacaccacagcgagcgattgaccttcactgcttcaattttacaccctctctctgtttggtgatggattttgaatcaaattatgatattgctgcctctgccaacttcattcacactcacaacttcatcaaagttgctttacaatttccagataatctcctaaaacattcaactagagtggtcactgctctgcgcaacacacttcaatccacggaggtaggattgtttgtgatggccgacacggcctatggcagttgctgtattgatgaagttggagcatcacacattaatgctgattgtgtcatacattatggtcatacttgttttagtccgacaacaactctaccagccttttgtgtttttgggaaggcttccatttgcatagctgattgtgttgaaagtatgtcaaagtatgcactgacaaatagtaagcctatcatggtcctttttgggctggagtacgcacactcaatgcaacggattaaagaagcactgctagaatcatcaatgtcatgcagatttgaccctaagtcagaagttcactttgctgatgttccatcttcagttatgtttccatcaaaagatatta

SEQ ID NO: 133699 - DNA, 286 bp, Glycine max
  Clone ID: PAT_MRT3847_91736C.1
aacttctcactgctctagccacactcaccctccgattctaacaccaataccctaattccgctattctccaactgtttttcttcttcttcttcttcattcgttctatctttttattttattttatttatgaagcctcctccttggctgtgatttttacttattactattatttttcagctcggtatgtcgttttgcttctaaaccctaatcctaatcctaatcctgcagattttactttaatttgttttggtgaaagttctggattgatgaaactgctgtatctttt

SEQ ID NO: 133700 - DNA, 619 bp, Glycine max
  Clone ID: PAT_MRT3847_91737C.1
tggacgcctcacgcgtccgcgcctcttccggtctccataacgtccgctctctctctctctctctctctctctctttttttttttttttttttccaacccttttcccctccctctcactttctctctctaaaccccactctttctctctctaaaaccctacactgtactctccttccttcggatccttctcccgtttccctccaatttccccccaattccgctggccccacctccgccccttttcccgcttcctcatgtccagcgccgccggagttcccgaccgcctcgcttcgcagccgcggggggctgccggcgcccctgccctcccgccgctcaagcgccaccttgccttcgtcacgaaaccgcccttcgccccgcccgatgagtaccacagcttctccagtgccgactcccgccgcgccgcggatgaagcccgtcgtcgttagatctccgtacatgaagcggaagaggggaatgactgacagtgaaggggagtcacaagcacaaaagtggagtaacagcccaggatacactaatgttagtaatgtaacgaataatagtcccttcaaaactcctgtgtctgcaaaagggggaagggcacagaaggcaaaggcttcca

SEQ ID NO: 133701 - DNA, 290 bp, Glycine max
  Clone ID: PAT_MRT3847_91738C.1
gacccacgcgtccacccacgcgtccgcccacgcgtccgcccacgcgtccgcccacgcgtccgcccacgcgtccgcccacgcgtccgcccacgcgtccgcggacgcgtgggcggacgcgtgggcggacgcaagatcagacgagggggaggtagaggatgaagccgcggaggagggagacggagagaagtagaggattgagacgcatattcacggagatgatggatgtgggcctcagtgcgaagaggatggtttgacgctctgttgtaaagatgcgaatcagtgaggtggag

SEQ ID NO: 133702 - DNA, 567 bp, Glycine max
  unsure (1)..(567): unsure at all n locations
  Clone ID: PAT_MRT3847_91739C.1
gtagccagtgcagagataaaattcaggcatggtctccccctggagatggagttctatactatnctggtgaggtgttttcaacttctcatcagccaggggtttctcttagactagagcgcatacttaatggcttgcaggacattgagtacctgagactatatgcttcaagatacggtagggacgagagtattgcgcttttggaaagaatgggagtgtactccggtcctgagcgttacacatttgagcacatgccaattgatgcaatgagaggacaaatatttaatgcctgccgttcatgaattgatatgttatagatgctgtgcattttggtcgagtggttcatttgttgacagctaaaaaaattcaggcttcagcatctaactttcaaagatgcgacaattgacagtaatcgagtgagatccgtggaatatcacccaaatgctgcacaatttgaactgtgtagatatggaatgtgacagtgtatatatatatatatatagtatctgaaccgtagttagatgagaaaaaaaaaaaaaaaaaaaaaaaaaaaaaaaaaaagggcggccg

SEQ ID NO: 133703 - DNA, 2739 bp, Glycine max
  Clone ID: PAT_MRT3847_9173C.1
cgtcgtcatcttgtcttcaagatacttcaagggagaatacaagttactgtatggtcattctaggctgacatccaaagcagtgcataacaggctaagcttcctacatatcggtcttgaattgtaaaagcaataacattatggaaatcttcaattacttccttcctcggttaagcctctgcagttgataattgatactcccccaagactttctgttctttttactctgagcatcaatacagacattcaatagctccttctgacgagcacaggcttcggtgtcactatggtttgcagccatacaactgagaaacaatgccatttccttcatgcaaggtttttgaagattaccgaatctcttggggttgataaaaagcgtaccagctttccgacccattatccttaaacaacttgaacgtggtggagaagagctccggacgcggcggagaagagctctggtcgcggtggttggttgaagaagacgcagtgatgattccaccgaagggtgttttcctcgattcgcagtggaaaaaggggaaaaacagatttggagggaaaagaagagaagaggagatgccggtggcgaggcgagagacgtgcgatggaagagtgattgctcatgtagacatggattgcttctatgttcaagtggaacagagaaagcaaccaaatttaagaggcttgccctctgcagtcatacagtacaactcctacaaaggtggagccctcattgctgttagctatgaggctcgccgatgtggcgtcaaacggttattatcaacactcccacattaccacgctgttcattttatagattcaatgcgaggggatgaagccaaggaggcatgcccgcaaattcaactggtccaagtcccggtggcgcgtggtaaggctgatctcaactcgtacaggaatgcgggttcagaggttgtttcggttctttcacagaagggccgttgcgaaagggcttcgattgatgaggtatatcttgatctaacccatgctgctgaaaccatgttgatggaaactcctctggatagcatgcaagactttgaggatgaagttctcaagtcacatgttttgggtttggaaattaaggatggaagtgacgccaaagatgaagttaggaagtggctttgcaggagtgatgctagttaccaagataagctattagcttgtggggctctcattgtgtgtgacctcaggatgaaggtgctgaaagagacagaattcacatgctctgctggtattgctcataataagatgctggctaaacttgcaagtgctatgaacaaacctgcacaacaaacagttgtgccacaatcatctgttgaagggttgcttgcttctttgccaataaagaaaatgaaacaccttgggggaaagctggggagttccttacaaagtgatcttggtgtcaacactgttggtgatctgcttcagttttcagaggagaagttacaacagtggtatgggatcaatactggtacttggttgtggaatattgctagaggaatcagtggggaagaagttgaggggcgactacttccaaagagccatggttctggcaagacatttcctgggcctcaggctttgaagaccgttgattctgttcaacactggcttaatcaattgtgtgaagagctgaacgaacgccttcactctgaccttgatcaaaacaaacggattgcacagacactgactctacatgctagagcatataagacaggggattcagattctcatagaaagtttccttctaaatcttgtcctttaaggtatgggactagaaagattcaagaggatgccctaattctatttcaagctgggttacgtgattttttgggcttctacaactgtaaggctcatggaaacgaaaataacaactggggagtaacatcactttctgtttctgcaagtaaacttgtgtccataccatctgggacacattcaattgttaaatactttggagggtcatttccatccagttctacatcaaatcaatcgctggatgttgtgattgatgaagctgctccatcctcgccttcaggaagtggaaattgttcaggattggttcccaatgaatttgagcttgaatatcctgaagacacaggaatgaaagattcaaaggcttgtttggatcaacaggatccgttgtgtcatttatcctgtaaagcagatggcttgactgaagaatcctccctcgtgtcaccctcaggaagcgaagacagaatcctgcacaatgagccacatagagatttacctgcaacagatcttaggcgtgtttcgaatatctctagtttgaaagcagttgggaagaaaaagacagcaggaaagaagcttcaagggaattgttcaattgtacatttcttcaataattaccataattcccagtcttcattggagcagaagaatgtcaaaatatcatcatcacttggatctcactctgctgataatagtcattcaacttgtattcaagttgagatgcctgctgagcaccctcatgaagagtttgatacaaacaagagtcgatgtagcgtaggtaatatgccacaaggaaggcaagattggagttataacatcaatgagattgacccctctatcatcaatgaattaccaccagaaattcagcaagagtttcaaatctggcttaggccgcataagcggcctaatgtggctaaacgaggttctagtattactcactatttctcacctgacaaaagtagataaggttttttcccg

SEQ ID NO: 133704 - DNA, 3334 bp, Glycine max
  Clone ID: PAT_MRT3847_91740C.1
caaatacaaagtagtaatagatccaaaatagttattactaacattcttacaacctacttttaactttaaaagttgcttatgataataaaaaaattagatctaagaacctaatttgtaattttgaatgttgtaattttcaacttcaatttgtgtttcttctattgttcccttcctatgtctcttgacgggggttttgctacaaaaaaaaggtcctaagtaaccaagtaaacaaatcacaaaatattaactaaaaaataatcctaagggataaattatatgattctcttaagatataatattgatttattaaatatttcaacatgtttttattaactaaatagctcagacaaattaggtattcacactgcctagcaaagcctggagagatttgagttatttagttgagtatgaactcccatttttgttggttcttaacagtcactatgattacattgatacaatttcaacattttccctctttatagactttgttttgctaaagagggtgatattcatcagcaatggatttaaatcttaaatcattataattgggtgtacttattgctgaaatagtcagtctgttgttccacggaatatttattcagtatttctctttagaaaagattctgagagctgaatagaagaaatgtttgatgtttgtgtgcataatggaatatcctagagcagaagaatacgagttatgtatgttaccatgcatattaatgttgcgctggtgcatatactcttatttgctcattatgagcacgcaggttttgctacccacgcgtccgctcaaaaaatcgttactctcaaacaaaacaaaacgcgatcatttctccgccgtagcagaagaacaaactccacgactccgttatggacaactccggaaatcctcaagatgtggttgtgccacctgttgaaggtgttgctggaggcggtacagcttatgggtggaatgatggaggcacacatggcttgaatgtcaagggaccaattgaccccacagaaattcctactaaggatttagtgcatgtatggtgcatgccaaacacagcaaatgttggacctcaagatatgcccagacatttggagcctataaacctgctggctgctagaaatgagagggagagtgtgcaaatagctatccgaccaaaggtttcatggggtggttctagtgttgcagggactgtgcagattcagtgtagtgacctatgttccacatctggagacagactgattgttgggcaatcactgctgttgcggcgagtggtgccaattttaggtgtacctgatgctcttgttcccgttgatcttccagtcagtcaaataaatctatttcctggggagacgactgctctttggatatccattgatgttccaagttctcaacctccaggacaatatgaaggagagattgccattactgctataaaagcagatgcagaatctcctgttcaaattttaagcaaggttgagaaacatcagttgtatagacctaaagggatgtcttgacattgttgagcccattgatggaaaaccattagatgaagtggttgaaagggtgaaatctgcaactacatctttaagaagaattcttctgtctccatcattttctgaattcttttcagataatggaccagtagatgtaatggatgaggatgccatttcaagtctctctatacggatgaagttaaacctgactgtttgggaatttgtacttcctgaaactccttcactccctgctgtatttggtatatctgatactgtaatcgaggatcgctttggtgttcaacaagggacagctgagtggtatgaggcattggatcaacatttcaaatggcttcttcaatatagaatcagcccttatttttgtaaatgggctgatggtatgcgtgttttgacatacacatctccatggccagcggaccatccaaagtcagatgaatatttttcagatccacggttggcagcatatgctgtaccatacaaacaagtagtttccggtaatgatgcggcgaaggattacttgcagaaacaagttgagatattgagaaccaagactcactggaggaaagcttacttttacttgtgggatgagccactgaatttggaacaatatgattctgttcgaaatatggccagtgagattcatgcttatgctccagatgctcgtattttaactacttactattgtggaccaaatgatgcacctcttgcacctactccattcgaggctttcgtaaaagttccaagttttctgcgtcctcataatcaaatttattgtacaagtgaatgggttctgggaaatcgagaggacctggttaaggatattattactgaattacaaccagagaatggtgaggagtggtggacatatgtctgtatgggaccatcagatcctcatccaaattggcatcttggaatgcgaggtacccaacaccgcgcagtcatgtggcgtgtctggaaagagggtggcacaggatttttgtactggggagccaactgctatgagaaggcaactgtagccagtgcagagataaaattcaggcatggtcttccccctggagatggagttctatactatcctggtgaggtgttctcaacttctcatcagccagtggcttctcttagactagagcgcatacttaatggcttgcaggacattgagtacctgagactctatgcttcaagatacggtagggacgagagtattgcgcttttggagagaacaggagtgtacttcggtcctgagcgttacacatttgagcacatgccaattgatgccatgagaggacaaatatttaatgcctgccgttcatgaattggtatgttacagaatatggatgctgcttggtcgagtggttcatttgtcaacagcttaaaaattcaggtttcagcatctaagtttcaaagatgcgacaattgacagtgatcgagtgagatccgtggaatatcacccaaatgctgcacaatttgaaccttgtaaatgtggaatgtgacagtgatatggaatctgaaccgtagttagatgagaaatctgttgttcattgctgaaatgtgcccttcaaccgaacataggatcataatcaagtagagttaatgttgcagtgtgagaacatgcttgatacgcgagaggagttaaacaagacatttaattaatactgtaaactagttaaactacgagaaattttaataattaacttacagtattcctagatgagcatagtgtgggtcgcattaaatcagggaaagcttaagttatttaatggatcttcatagaactcatcaatgatagagtactagtaatattgaagagaagaaaaaaaaaagaaaa

SEQ ID NO: 133705 - DNA, 237 bp, Glycine max
  Clone ID: PAT_MRT3847_91741C.1
cctgcttctttctcactttgtttacaatagataaacattgatccatattttttgcttgagccccacgaaaagctcaatattatgcaaagagatctagtgcggatttgatctactgaaatgtctagatggaaccatccagaacctcccctcatgaaatgaactagagtttcgactttcttaaacagaaataatagaggtcctaagtttctccgcggcatcctatactactcacgtctc

SEQ ID NO: 133706 - DNA, 495 bp, Glycine max
  Clone ID: PAT_MRT3847_91742C.1
atgacgactaacaataagcctgaagagagttcttccacgccagcacgtgcttggcgcatatgcagcttgctaagcgaggcgattgtctcgtctgtgctaagcgcaatattagcactaagccaaatatcacttacttgcgctaagcgcgagaatggcgctaagtgcgccttcgagggctttagcattgaaagatgtattgtctccttagaacttgatagagcaggattaggttaccgtatgtctggacacggaatgcgatcttctgcaagtgaattggttccattggatttagaaattgaagccacctttagaagaaacaacgtagagcgaaaaagaaagcttttgcatgatataacagtagcattaatccttaaagaggctctcttttttgagtcatcatcttctcaaacagcagaatttgaagccgaagtaatggctgaagagaaacctcgacgagtaaccttggaagattactcaagtactttggtgccgtaa

SEQ ID NO: 133707 - DNA, 426 bp, Glycine max
  Clone ID: PAT_MRT3847_91743C.1
gagagcttatgcagggtgatggcctaactaacgatcaagggaagagccatacacaaaaataccgtgttcatacacggacagatgctgctgcatgttctaatcacacagttgtgagttcttggaggttagtggatgtcatcaggagcatgacacagactactatctaagttagcatgtcaaggccatggtctcctcaaagacctcttcatctgactgcagggtccccgggagggacatttgctactgaaggtgacagactacaagatgatcaaaatgcaatatccgagagttatagttggtaaagccatatgaacaaaccaggaacatgtgatgtataggatactactcttcaccatgaattttgaaaataaaagattacatgggaggagttttaccactacgtaagaatactactacatgatgcat

SEQ ID NO: 133708 - DNA, 269 bp, Glycine max
  unsure (1)..(269): unsure at all n locations
  Clone ID: PAT_MRT3847_91744C.1
ggaagngttgagagnggtgtnttgaagngtggaatggtggtgantttgnaanaaatggangganaantgaagtnaagtntgtggagatgaanantgaangnnttanagaggtanatgatggtganaatgtgggattnaatgttaagaatgttgntgttaaggatttgaagngtggttatgttgagtaaaanttaaaggatgatantggaaaggatggtggtaanttnagagttaaagtgataatgatgaataanggtggtgagattgga

SEQ ID NO: 133709 - DNA, 257 bp, Glycine max
  Clone ID: PAT_MRT3847_91745C.1
actttttattttttggggaagaaccgaagcttgcttgggcgaaagagggccgtgccaatctgactcatagacctacaccaccgagattagaaaggcccgagagaaggaaactgcccgcttccgttcacaccaggagcgccaccgcatttgcacactgggggaaaggttgagggagaacaaggcgcattaactcacgttctgctgatggatcccaacacaggcagtgtcgtacaaggtgtaccggaatctgtggctca

SEQ ID NO: 133710 - DNA, 446 bp, Glycine max
  Clone ID: PAT_MRT3847_91746C.1
atcatagtaagttgcaaagcggaaccatattaagccaaggagcagggggggggggaccgcggtgcatagcgaaggcccaaaaccataacagtttacgaggaaaggatacaacacgatcaaaggaccatagacctctgacgcgatcgaccggcacagcggattaactctggacgataacaacatgagacttgaatcgaggatacactgtgagcgcagccgacgcgggggcaagcacgcctgtggaaaaccataaccggtacaacgagaacgctagaggtcgggcactctgacaccatagaacccgtgaaagctaagatccaggacacggaaggcatttcaccaaaccaggaatgcttgaaattcatgggaaaacagctcgcagacggaagaactcttgacggttacaatattcggaaggaatcgacggttcaactggtgctttgact

SEQ ID NO: 133711 - DNA, 192 bp, Glycine max
  Clone ID: PAT_MRT3847_91747C.1
ccggtcctccgcgtccgggcatcaccttttgttatttgggtatctgcagcaatgaatgagctacgtccatgtgcccaataagtctaaaacatgccttgccaaatgattaaggttacgctgttcgatctccccgccttcctttggccccctcgccccctggggggggaccttcgcctccctccccctcccctc

SEQ ID NO: 133712 - DNA, 465 bp, Glycine max
  Clone ID: PAT_MRT3847_91748C.1
ctcgacccgaatcagcactgcactagtcctacaccgcctgcgctatacctgatcaacgtctggtgtgtcgctcctgaaggactgatacgtgattttaatgaaatcctcagcgccctggaacttaatattgacagacttcaaagggcaagcctgccactgatggaagggtgttagacgtgttctatatcactgtcgggatggtactgctgtacactaagaagaggccagatgatggatgtgaatacgccatcgacgcttatggagcaatgtgcattgacggactacttcaggtgtctggtcctgaatacggacatgtgcaaggcttatactcgcttgcaccatattatgctgatgagtaatctaagtctgaactgccagacgagtagtctgcgcatcctgatagtctagatgtgacagctctgaagacacctactaggactgtgagcaactgactgcgcccatatc

SEQ ID NO: 133713 - DNA, 490 bp, Glycine max
  unsure (1)..(490): unsure at all n locations
  Clone ID: PAT_MRT3847_91749C.1
gcattggaaaagttttccataccattttctaggccaagccaaaacttggagactctcatttgattcaaagttaaggtgccagttttatctgtgcaaataactgttgctgaccccatagtttcacaagcagaaagtttcctcaccattgcttgatcagccatcattcttttcatggagtatgcaagtgtgagggtaacagccaaaggcagaccctcagggattgccacaaccacaatagtgacagcagcagcaacaattcgcacaactgcgttgaaaacatcgtttacatcggttttactcccctggaactcctgattccctttatcatcctccgagtttccagtgaaataacgaattaacaagactatgagcacaagaaaagcgactgcgaggcctacctttccaatanaagaggttagcttgtcaaggcgagcctgcaatggtgtcctttccttggtgtctcgcgatatcgagctcatcatttcacccc

SEQ ID NO: 133714 - DNA, 749 bp, Glycine max
  Clone ID: PAT_MRT3847_9174C.1
ggtcaactactatcattttcatcaattataaaagaattttatcatacagagggggaagggcaaccaacatcaaaggggtgggggcataaatgaaatgtagcatggtaaagcttaaaatggttcagaaaccaagttacattggtattctccaatattattccaccctctcattcaacttaattaaatgatttaaacaaaccaaaagtagaaattttatcatcaagatacttcaagggagaatacaagttagtgtatggtcattctaggttgacaaccaaagcagtgcataacaggctaagcttcccttgaattgcaaaaacaatacacgtatgaaaaatcttgagttacttccttcctcggttaagcctctgcagttgataattgatactcccccaagactttctgttctttttactctgagcatcaatacagacattcaatagctccttctgacgagcacaggcttcggtgtcactatggtttgcagccatacaactgagaaacaatgccatttccttcatgcaaggtttttgaagattaccgaatctcttggggttgataaaaagcgtaccagctttccgacccattatccttaaccaacttgaacgtggtggagaagagctccggacgcggcggagaagagctctggtcgcggtggttggttgaagaagacgcagtgatgattccaccgaagggtccccttctgtcgtcttctcgcagccgtacggacgcgtgggcggacgcgtggg

SEQ ID NO: 133715 - DNA, 285 bp, Glycine max
  unsure (1)..(285): unsure at all n locations
  Clone ID: PAT_MRT3847_91750C.1
cttcgatcatacacttagttgcttccaattaagatggttctgctananaagctctgggatgntgttgtggctggccctcaacctgagcgtggccttggcnagctcannaaactcaccaccctcaaaactagtacgtacccttcttntntgtatctntntngattanttccnnattaactatnatacncatatagctattcnnnnttantgttnttaganttttgattnagnaattagaaagnnaatttttttttttgttggaatggacaaaatttngntgtntnt

SEQ ID NO: 133716 - DNA, 1853 bp, Glycine max
  Clone ID: PAT_MRT3847_91751C.1
cccacgcgtccgcccacgcgtccgcaaaaccctcttttttctctctcttgcaaaacctaattttcatttcttccctcaaatttcaaaatgcgtgagatccttcacatccagggtggccaatgcggcaaccagatcggcgccaagttctgggaggtggtttgcgcggagcacgggatcgaccctaccggaaggtacggtggggactcggagttgcagctcgagaggatcaatgtctactacaacgaggccagttgcggtcggttcgtgccgcgcgcggttctcatggacctcgaaccgggcaccatggacagcgtccggtccgggccgtacgggcagatcttcaggcccgacaactttgtgtttgggcagtccggggcagggaacaactgggccaaggggcattacactgagggtgcggaattgattgattccgttctcgatgttgtgcgcaaggaggctgagaactgcgattgcttgcaaggttttcaagtgtgccattccctggggggaggaactggatcaggaatgggaaccttgttgatttctaagatcagggaagagtacccagatagaatgatgcttactttctctgttttcccatctccaaaggtttcagacactgttgtggaaccctacaatgctactctctctgttcaccagcttgttgaaaatgcagacgagtgcatggtgcttgacaatgaagctttgtatgacatctgcttccgtaccctcaagctaaccacccctagctttggtgacttgaaccatttgatctcagcgacaatgtctggtgtcacttgttgtttgaggttccctggtcagttaaactctgatctgcgaaagcttgcagtgaacctcattcccttcccgcggctccactttttcatggtgggatttgctcctttgacatctcgtggctctcagcaatacagagccttgagtgttccagagctcacccagcaaatgtgggattccaagaacatgatgtgtgctgctgaccctcgacacggccgctacctcactgcctcagccatgtttagaggaaagatgagcaccaaggaggtcgatgaacaaatgatcaatgtgcagaacaagaactcctcatactttgtggaatggattccccacaatgtgaaatccacagtctgtgacattcccccaaccggcttgaagatggcttcaacattcattggcaactctacctccattcaggagatgttccgtagagtgagtgagcaattcactgctatgttcaggaggaaggccttcttgcattggtataccggggaaggcatggacgagatggagttcactgaggctgagagcaacatgaacgatcttgtgtcagagtatcaacagtaccaggatgccactgctgatgaggatgagtatgaggaggaagaggaggaggaggagtatggccaacatgatatgtgattttgaacttggtaatgtattgcggtggcttgaagatgtataacatgccgcaacttcctgttgccggttgattgtctcttttgaggggatggttctgttccggctagatctagtttccattactgttctataaaactggttctgtttgtttccgtttttatgtaacctgttgtttgtagggaagacaatataaaactgctattattttaaagctctaaatgttcaatccaactaaatgcccgatgattggtgtttcttttttaaaaaaaaaaaaaaaaaaaaaaaaaaaaaaaaaaaaaaagtaaaaaaaaacaaaaaaaaaagggggggggcccccaaaaaggagccctccccggcgggatatatcgcgggggggggtagggaggggggcacatttttcccaagaaggggccctt

SEQ ID NO: 133717 - DNA, 507 bp, Glycine max
  Clone ID: PAT_MRT3847_91752C.1
gcacgagtggaggttcacttttagttttgatgcttcaattatatggtaaaaatctttgtattttatagacctttcatatggtacagttgcctcagttgagtattgcagcataaataaatgatataatttgttagttccatctttccttttatggttgttctacagcatgcttattgcctgatacaatttcagaactggtactgatattactgcagagtgcgtgaaaaacagatatcatatcaaattccagagtttcctcaactttttgaggagaggattttatgcattggttccaacagtaagagacctgttctgaaatgggagaataatatggcatagcctggcaaacttactcttactgataaagcaatctattttgagttgtacattgaaggatatatccaagccatgcgggattcactttatagacaagaataccttagagtcagagttattgacaatcatgaaatagttgagctaagtgcacataagttggtcatgggtagc

SEQ ID NO: 133718 - DNA, 2094 bp, Glycine max
  Clone ID: PAT_MRT3847_91753C.1
gacccacacgtcagcccacgcgtccgcaaaaaaaaaccctctctttctctctcttccaaaacctaattttcattttttctcttcaaacaaattttcaaaatgcgtgagatccttcacatccagggtggccaatgcggcaaccagatcggcgccaagttctgggaggtggtttgcgcggagcacgggatcgaccccactggaaggtacggtggggactcagagcttcagctcgagaggatcaatgtctactacaacgaagccagctgcggccggttcgtgccgcgcgcggttctcatggacctcgaaccgggcaccatggacagcgtccggtccgggccgtacgggcagatcttcaggcccgacaactttgtgttcgggcagtccggggcaggaaacaactgggccaaggggcactacactgagggtgctgaactcattgattctgttctcgatgtggtgcgcaaggaggctgagaactgcgattgcttgcaaggttttcaagtgtgccattctctgggaggaggaactggatcaggaatgggtaccttgttgatttctaagatcagggaagagtacccagataggatgatgcttactttctctgtttttccttctccaaaggtttcggacactgttgtggaaccctacaatgctactctctctgttcaccagcttgttgaaaacgcagacgagtgcatggtgcttgacaatgaagctttgtatgacatttgcttccgtaccctcaagctaaccaccccaagctttggtgacttgaaccatctgatctcagctacaatgtctggtgtcacttgttgtttgaggttccctggtcaacttaactctgatctgcgaaagcttgcagtgaaccttattcccttccctcgcctccacttcttcatggttggatttgctcctttgacatctcgtggctctcagcaatacagggccttgagtgttccagagctgacacagcaaatgtgggattcaaagaacatgatgtgtgctgctgaccctcgacatggccgctacctcactgcctcagccatgtttagaggcaagatgagcaccaaggaagtcgacgaacagatgatcaatgtgcagaacaagaactcctcctactttgttgagtggattcctcacaacgtgaaatccacagtctgtgacattcccccaactggcttgaagatggcttcaacattcattggtaactctacctccattcaggaaatgttccgtagagtgagtgagcaattcactgctatgtttaggaggaaggctttcttgcattggtataccggggaaggcatggacgagatggagttcacagaggctgagagcaacatgaacgatctcgtgtcggagtatcagcagtaccaggatgccactgctgatgaggatgagtatgaagaggaagaggaggaggaggagtttgcccaacatgatatgtgaatttgaacttgggtgtggtgtattgcggtggctttagacaagaagatggataacaagctgcaacttcctgttgccggttgatgattgtctcttttgaggggatggttttgttccggctagatctagtttctattactgttctataaaactgattctggtttgtttccgtttttatgtataacctgttggtagggaagacaatataaaactgctattatttgaaaaaaaaaaaaaaaaaaaaaaaaaaaaaaaaaaaaaaaaaaaaaaaaaaaaaaaaaaaaaaaaaaaaaaaaaaaaaaaaaaaaaaaaaaaaaaaaaaaaaaaaaaaaataaaaaaaaaaaaaaaaaaaaaaaaaaaaaaggggccgcctttttaaaaaaccaaattttgggaaccccctgtcgaaacccaaattttttttttttggggcacctaaatttaattccaggggccgtattttaaaaaaggcccaaagggaaaacccttgccaacaccaaattaaactgattggaaaaaaaacccctttctgaaagggggcataaaacaaaaaggcccgaaacggtacgcctttccaaaacttttccacttgaaaaggccatagggcccccccctttaactgcctttaaaacctcgggggggggggg

SEQ ID NO: 133719 - DNA, 958 bp, Glycine max
  Clone ID: PAT_MRT3847_91754C.1
gtaagctcggaattcggctttaggtcacaagcgacaaccatggaccgtcacataggaaaaacatttcaaatgcccgcggcatcaatgaccgttttcttaattggaacaattctcctaactgtccccttctacgaccgtttcattgttcccgtggcaaagaaagtgctcaagaatccacatggtttcacccctttgcaacgcattggagtcggtttagtactctcagtggtttccatggtggtaggagcactgatagaaataaagagactaagatatgcccaatcacatggtttggtagataagccagaagcaaagatccctatgaccgtgttttggttgataccacagaacttgtttgtgggggcaggggaggcatttatgtacatggggcagttggactttttccttagagagtgtcccaaagggatgaaaacaatgagcacgggattgttcttgagcacactctctttggggtttttctttagcaccttgttagtgtctatagtgaacaaaatgacagcacatggtaggccatggctcgcagataatcttaaccaagggaggctctatgacttttactggctcttggctatattgagtgctataaatgtggtgttatacttggtttgtgctaagtggtacgtctacaaggagaagaggcttgctgatgagggcattgtattggaagaaacagatgatgctgctttccatggccattgaatcttctcctacaaaccttttctctttttttcttttcaaaatcctcctgcttgtatcaaaattttaatcaagtatttccacacgaaaaagaaatgcctagcatctggttaccataaataagtttgtaagatgtaaccattttctatgtgcttatactgtgaaaaagaaaaggcaaataagttgaatttttttacccatataagaattaggcttgtttgcaatatttgatggccactta

SEQ ID NO: 133720 - DNA, 624 bp, Glycine max
  Clone ID: PAT_MRT3847_91755C.1
ggggcaggggaggcatttatgtacatggggcagttggactttttccttagagagtgtcccaaagggatgaaaacaatgagcacgggattgttcttgagcacactctctttggggtttttctttagcaccttgttagtgtctatagtgaacaaaatgacagcacatggtaggccatggctcgcagataatcttaaccaagggaggctctatgacttttactggctcttggctatattgagtgctataaatgtggtcttatacttggtttgtgctaagtggtacgtctacaaggagaagaggcttgctgaagagtgcattgaattggaagaagcagatgctgctgctttccatggccattgaatcttctcccgccaaccttttctcttgtttctctcttttttcttttcttttttttaaaatttttttcaaaatcccccctgcttgtatcaaaatgttaaacaagtatttccacacgaaaaaaagaaatgcctagcatctggttacccataattataaataagcttgtaagatgtaaccattttctatgtgtttatactgtgaaaaagaaaaagaggcaaataaattgaattgtttgccccataattaaaagctctaatttagttt

SEQ ID NO: 133721 - DNA, 446 bp, Glycine max
  Clone ID: PAT_MRT3847_91756C.1
attctaaccctcaattttgtgtcctttttttttagattcttacataactgattctaatcgggtataataataataataataatttcatagcttttgtttgcattgtattgtatgaaaattttattcttaaattttagtgtgtgattgatttcacttgcataattgattttaagaaatttttcatatgtttaattttacaatggaaaataatttatatttgattttgagattaaataactttaagtatcttctctgatagaaaacaaaattatactaaattttacttcaaaatcaattttctcaacactcatttaaacacacacttaatataccaaaagggttggtggtgaactccattcttaattttgcacacaaaaatgtgcgtatatcataacatccttaattatgtttttgatatggtatgacattcagtttttcagttatct

SEQ ID NO: 133722 - DNA, 341 bp, Glycine max
  Clone ID: PAT_MRT3847_91757C.1
tcggtttttatatatcatcgaaaaatatatactttttgttgcacgggtcctgtgagaatgattgcttgagcgaacatgtgctaatacatagcggagaaaagacattattattgggaagcagctgcactagcaggggagaacatggagatgtctttgcgactgaactgcgaaacgacattcgtcaatagaagttctctgtttggggcaggagctggattgatcttccctaccactagccaatgtcaccgactagctggttggcgctttattttcataaatgccagcgcagatttttcaagtagaagacagaataggatctttactgcgaggaccaatggtca

SEQ ID NO: 133723 - DNA, 391 bp, Glycine max
  Clone ID: PAT_MRT3847_91758C.1
acaaatggttcatctacagtgatttgaaaataaatacagttagtgagttataagtctaattcctccaaaatctgccaaatcatgagggaacttttctccaggggaactgataaacataaaattctttggaacagctaatatctctgacaatttatctaccaagtcaggattgaattctcctttcaccaaaatcaaatcaattttagtctttggatagattctatccaacaatttaacatcttgagctaattgtggaggtgggatatctttgtacacatgaactatcttcatccaattggttaattcgttgtctcttgcataaaggactgccttgttgagtacagcaatatcatcattctttgtgaagtagatcaattgttgtccccaaatc

SEQ ID NO: 133724 - DNA, 488 bp, Glycine max
  Clone ID: PAT_MRT3847_91759C.1
tcaagattcagcaagtgcgttttggaagcagagaccgaaatacttcgaggttagtgatctttttttccgcttttggaaaaaattcgaatattagattctgcttcttgttcgttctgtagaagaattgcttggcgttttcgtttccttaaggttcaaaactcgtcttaagtttctttctttgattgctttgatatagggtttgtaacatgattaaatcgatttttacttccatgatcttctatttcgcagtattagtttattttattaagttatttgccgtgtactatgattaaaatctatatccctctgttggatgttttgaaatagggttttatagagtttcagggcctttatttcgccatttaatcgattagtgtatacatgatgcgttcttcaagtgtgagataaaaattaagtttataagtattttgattttgattcccaaattatcattatttgaattctcctatagttttttttttttttgt

SEQ ID NO: 133725 - DNA, 486 bp, Glycine max
  Clone ID: PAT_MRT3847_9175C.1
agaacaggatgtacatattgtattggtaccggaatagaagtctgtctggcttctagaccaaattaagtggtggtattctctgaaagtgcttacctcaataccggttcccactgatcagtcaaactcagacaaaacgtggaatttccaatgtccccagttctttataagggccataaggttaatatggtcctagcctcaaagggggcaagatcccaatcgatatccttccttgtatttttttcccattcttggagaatgttcactcaaatttgattggcaatggactgtcttcagcttctctctataccgtgagataattctaagttaggggccaatttttgtccaggctctttatcatttgtcagctgcttttgaataattcatttcacactctttaaattttcttgaaagtaattgaaacttaaggaaagtgtatttaaatcacataatgttattggaatgtaatgattttggcatcatatgatg

SEQ ID NO: 133726 - DNA, 1097 bp, Glycine max
  Clone ID: PAT_MRT3847_91760C.1
aagaaacagtgactcagattctaacatcaactttaaaccttgtcctttcatcatacacacatttcactaacatcaatcccctcaatctgaaatgacaacctttgcattcacttccttgctcccacttacagtctcatcaccatcttcatcttccaaattctcagcttttcatgctatcagagcctcattagattctgagtatgttgcctcccgacacacccttagaagggaattcttgaagggtgttgctttgatgcctctgccacttgttgtgatgagagaaccacccccttcacatgctagagaagttgaggttggctccttccttccaccctctccctctgacccttctttcgttctcttcaaggccactcccaaggacactccagcccttcgagcaggaaatgtgcagccatacaagtttatcctccccccgacttggaaacaggctcgtgtagcaaatatattatctggaaattactgccagcctaaatgtgcagagccctgggtggaggttaagtttgaagatgaaaaacaaggaaaagttcaggttgttgcttcgcctttgatacgccttaccaacaaaccgaatgcatcaattgaggacatcgggagcccagaaaaactgattgcttctcttgggccatttgtcactggaaacactttggatccagatgagctccttgagacttctgttgaaaagattggcgatcagacatactacaaatacgtgctcgaaacaccatatgctctcacaggaacacacaatcttgcaaaagcaacagcaaagggaaacactgttgttttgtttgtggttagtgccaatgacaagcagtggcaaacttctgaggagactctaaaggccgtgcttaattcctttgaagtttagttttctctcaaaggtaaataagagaagtttaccttcagtcaaaggtaaatctagtttttgtttatacaaaattactcagcaagagctgcattggcacccatttcaattttgtgttccgtagttaacctttaacttcaacagtctggcctttttcttctttgtatatatatacctgattgagtaaatgacatatgtattgattatcttt

SEQ ID NO: 133727 - DNA, 311 bp, Glycine max
  Clone ID: PAT_MRT3847_91761C.1
ttttgattttgtctttttttttatttcctattaaaggaaaaggcctgatattttttaacccttatcctggttcccaccctcaacggtatttataaaagccggctgattaacaaaaatgtgcttacaacaaaattctaaagaaataattatctttaaggagggggggcagcaaacttttttgataccccctttaaccaaatgcatggtggaccctcgttgtttttcctagggaacatccttgggatttattttaaaagaccccttttgcccctaaaaaaaaactaacccaaaaaagtgttggaatatcggga

SEQ ID NO: 133728 - DNA, 524 bp, Glycine max
  Clone ID: PAT_MRT3847_91762C.1
ggctcgaggtccttcatattacacacatttcaccaacattaattcccccaatctgaaatgtcaacctttgcattcacttctttattccaaatcacagtctcatcttcatcttcatctttgcatgctatcagagcctcagcttctgagtatgttcccctcccaacacacccttagaagggaattcttgaagggtgttgctgctttgatgcctcttccacttgttgtgctgatagagccacccccttcagatgctagagaagttgaggttggctccttccttccaccttcaccctctgacccttctttcgttctcttcaaggcctctgccaaggacactccagcccttcgtgcaggaaatgtgcagccatacaagtttatcctccccccgacgtggaaacaggctcgtgtagcaaatatactatctggaaattactgccagcctaaatgtgcagagccctgggtggaggttaagtttgaagatgaaaaacaaggaatagttcatgtagtggcttcgcccttgatac

SEQ ID NO: 133729 - DNA, 511 bp, Glycine max
  Clone ID: PAT_MRT3847_91763C.1
cttaccaacaaaccaaatgcaacaattgaggacattgggagcccagaaaaactgattgcttctcttggaccatttgtcactggaaacacttttgatccagaagagctccttgagacttcagttaaaaagcttggtgatcagacatactacaaatacgtgctcgaaacaccatatgctctcacaggcacacacaatcttgcaaaagcaacagcaaagggaaacactgttgttttgtttgtggttagtgccaatgacaagcagtggcaaacttctgaggagactctaaaagccgtgcttaattcctttgaagtttagttttctgtcaaaggtaaataagagaagtttatttctttctagtttttgtttatacaaaattactcagaaagaattgcattggccaccatttcaattttttgtgttccgaggttaaactttaacttttaacagtctggcatttttcttcttagtatatacctaattgagtgaatgacatatgtatttgatatttttt

SEQ ID NO: 133730 - DNA, 288 bp, Glycine max
  unsure (1)..(288): unsure at all n locations
  Clone ID: PAT_MRT3847_91764C.1
ctgcaacacactcagcaatgtcctaacaaactcaacaacaancctcattctagaacctacctcctgagtcatcatctatattatcaattatcagtaaaagacnaataaggnncattaatactaggaataggcctancagtagacacagcttattaatactctnttggacctaacaataggacttgggtcataacaattcctaaattagctgaatttgaaatctgcatttagccttatgtgggtacttccttgaaaaatgtnnntttctcattcacatcatatatgant

SEQ ID NO: 133731 - DNA, 2851 bp, Glycine max
  Clone ID: PAT_MRT3847_91765C.1
tttcttagtagtaagcaactgtcatcaaacacgcacgcacgcaaactcttcaacgcaacggtggtgaaactctttcaaagttcaaacccagattttgaaaaaaagaaagacaaaacaagcagagcataagccattacttagctccactttgcttgtgggttatattctatataaggggaagctcaagttcttcctctttgttgcagctgttataatacatacgtagatgggttcgacaccagaagtgttggctcagagaagttgtggcaagctcattgggactcgattgctacagtacttaaatggaggtcctctctccttcaaaacccaccaagccatcgttctgattgtgacattttttgcttatgctagttaccatgccactagaaaaaccacaagtattgtaaagagtgtccttgatccccaatcagcagctacaggcttgaccttctttccatttaggccaaccaatttcactgagtcaaatggatcaaagagactttcttccaaccttggagatggttgggcaccctttaatggatcagatgggacatcccttcttggtcaattggatgttgcttttcttgcagtctatgcttttggaatgtacttttctggacattttggtgataggtgtaatttgaggatctttctaacggtggggatgctaggaactggcttgtttacttcactgtttggggtagggtactggggaaacatccacaacttctactattatttagtagttcaaatgattgctggattgtttcaatccactggatggccgtccgtagttgctgttgtgggtaactggtttgggaagagcaagagagggttgatcatgggaatttggaatgctcacacttcaattgggaacattgctggttctttgattgcttctgccatgttgagctatggatggggttggtcctttgtggtgccgggactaataactgctttcatcggtttggcggttttccttatattgccggtcacacccgagtcagtaggagcaagagaggaagatgaattcagtggtcctattaaaagtggagaagaagcggcagagcctctgttaaggcaagagactccagttgaggagaaagaagcagttgggttcatagaagcatggaaaattccgggggttgctccctttgctctctgtctgttttttgccaaattggtcgcatataggtttctctattggatcccattctatggtagccacaccgcttgtgatgggtaatatctatctagtgagacatcaggaactctatccactttatttgatgttggaggggtgctgggtggaattctagccggccacatttctgatcgggacatcaggaactctatccactttatttgatgttggaggggtgctcggtggaattctagctggccacatttctgatcacttagaggctagagccattactgcagcaagtttcatgtactgtgcaatccccgctctcttcttctatcgaagttatgggcacgtttctttgattgtaaatggagcattgatgtttgtcactggcacgtttgagaccttgcagggtgatcttataactccagcagtttcagctgcaatcattgacggaaccggttttattggggctgcagttggacctttaacaacaggttacatatctgcaaagagctggagtgctgttttcgcaatgttgatggcagcagctttaattgcagggctgcttttgaccaggctagtagtttctgaggtggccacaaagattgaagagtcgaggtctaatagagcacaagactgttcacttaatgtataagaataaccttgaagggtcacagcgatcttatgttgctgtatgtgtagtgtaggagtgcctataaagtctcattcacagcttcacttcgttaaattaaagaggagcatgcccaacagtgtttgtacattgtgtgatatacccaattaccaactctagcatagtatcatccctacacacaagctattcaagaattccttgtagccttttaattttggaaattgaccacattgtttggaggtcaagaatgaaacttgtctagtgagtttacaaattagcatttttcaatggcttaatgggtgcaccaaactgcaaatacaaatagctggtaaagataagctccatgcttttgtagattttgctccaagcccctcagttggacttctttgagtttgaggatgccctttgcttcttattctttgaacttggacttttcactcaatactgatatcagaagacaataggtcaactcccttgaagctttcctcagaaactaacactattagcttattaaatacatatatatgcgcttttcaccattgccaaaaatatggcttgggatcttatgtagttgtggtgataagttgccgttgtattctgagcgaataatcatgaactctgcccagaagttttcagtaaggtggcttcaaaagtttacaatacaattctttcattttttgaagattactttctttcggagctggagcttgttgcacgtacttctcaaataatggttcaagtacaatggttggaaaatggaaagcaattatcattttcggtatctgtctagaagcattgtttctcctcttacagcttgcaattttcccttctatttattggtcaagtaattagttgcatatcaatagtttggtgtggaagttgaaagtctgtggactttcgacaaagcatgacatttttgaagaaaattgacgtgcaaagcacacaacttctcgtaagaataaaggacacaattggcatgtcaagttgattgcgttgtatattaagattggtttaaggctgtaattagaaataatttatggtccaaaatt

SEQ ID NO: 133732 - DNA, 487 bp, Glycine max
  Clone ID: PAT_MRT3847_91766C.1
gcacgaggtaaggccatcttttctcatattatacatttcttggaattgaattaatttttacttgtatatgcctttctgattaaaatgttaaatacaggtgcggtcagtcattgcctctatcatatttctaaagggggttggaggaattctattcgtgcttggcagtacatttggatcttatcttctggtaagggcttgctctcctaggtttgaaatgaataaaagttgtcattcttaaatttacttttccagttttgatctttgttttggtcctaaagaattataaccctgattacttttttttcctctagctcttgtatctggggctttctactccaattctatatgatttttacaactatagatctaataaccctgaatactatttactgctgaatgatttcattcatgtatgtgaaaactattgttatttcatgtgtttctatctaatgattttacctgtgtaacttaatataatgtgttcact

SEQ ID NO: 133733 - DNA, 1072 bp, Glycine max
  unsure (1)..(1072): unsure at all n locations
  Clone ID: PAT_MRT3847_91767C.1
gaaatatctatctagtgggacatcaggaactctatccactttatttgatgttggaggggtgctcggtggaattctagctggccacatttctgatcacttagaggctagagccattactgcagcaagtttcatgtactgtgcaatccccgctctcttcttctatcgaagttatgggcacgtttctttgattgtaaatggagcattgatgtttgtcactggcatgtttgtgaacggaccttatgctcttataactactgcagtttcagctgacctgggaacacataaatcattgaagggtaattcacgagctcttgcaactgtcacagcaatcattgacggaaccggttctataggggctgcagttggacctttactaacaggttacatatctgcaaagagctggagtgctgttttcacaatgttgatggcagcagctttaattgcagggctgcttttgaccaggctagtagtgtctgaggtggccacaaagattgaagagtcaaggtataatagagcacaagactgttcattcaatgtataagaataaacctaaagggtcacagtaatgttatgttgctgtatgggtagtgtaggagtgcctataaattctcattcacagcttcacttcattaaattaaagagaagcatgcccaacagtgtttatatggagagggcatcttcaacttttatccttcataatattagtgagcagattgagatgttgtctgtttgtacattgtgtgatatacccaattaccaaattaccaattctagcatagtatcatccctacacacaagctattcaagaattccttgtagcctttgaattttggaaattgaccacattgtttggaggtcaagaatgaagcttatctagtgagtttacaaattaaaaattgtagcaattttcaaaggctttaatgggtgccccaaactgcaaatacaaataacatgataaagataggcttaatgcttttgtggactgcactccaagcccctcaaatggacttctttgagtttgaggatggcctttgtttcnnaatctntgagcttggaantggantgtnnactc

SEQ ID NO: 133734 - DNA, 292 bp, Glycine max
  Clone ID: PAT_MRT3847_91768C.1
gtaatggacatgctcctgtaatatatatgtttgtgaaacggacaagttgcttgataagccaggtatcttaacacaatacatatacccataacacttaagtgaaaaaatgagttatcgtatctgaatatcgccccttcccgttgtctagggcgaccttctattatttacaatagcaaacatggactccgttttacttacctagcgtcttatctttcctattaacccccccattttgtataagtatatttatatactaacgttgctcaatagaccaaaagccatttttcatcca

SEQ ID NO: 133735 - DNA, 428 bp, Glycine max
  Clone ID: PAT_MRT3847_91769C.1
atgcacgcgcccgtcagctggtaattctgctcgagctcgagccaattcggctcgagtttttttaaagcgacggtcctacacctttttatgagggataaaaaatgaccaaacaattaatgaattcctttaaaaaaaataattaacgtattctatgctgccaacggagttacaatcactttgattatggtccctacacctaatacaaaatatgaatttgtactggaatatataagatagccacaaaatttatagaccgatcttgtcaggagactaaattttattacttctttactctaatacacctaatagggatacctataaagatgcaatagttaactttctcctttaaccaggaaattaatatatagtagttactaatgttattcataattaatttccataggggaacctgttttcgttttctttag

SEQ ID NO: 133736 - DNA, 722 bp, Glycine max
  unsure (1)..(722): unsure at all n locations
  Clone ID: PAT_MRT3847_9176C.1
gggtgggggtaggggcggagccagaaatttggcttgagggtgccaacataatttaataaataaattttaattctcttgcatacataacatataaaaaaagtttaatattatatatatatatatatatatatatctaatttttttataaataaaataaatattactataccgatacaaaaataatactattttttattcttcatataaaaaacgataaataaatttctcttgttctaattatagactcatttccaaatgtgttttttacagcaaaaaatatgttaattatatattttcttaaattgcgatttgcgaataatgttattaaatacaattactacttaattatttttattagttttgataaattagttatttatttcatgtgtgtgtgaataaaggtaataatataagaagaaataagttagacagataaaataattttgggtaattatatgtagatctcaacatcaaagttgtctactaaaacttataattctctttatctttctttttctatcacatcaagttacttatgatacttacactttgctttcttctcccttttatctttctaaatcaatgtcaactaatataataaattcatatattaattttcaataanttttataaatgttaaaggagccataaaaacctttgggggccatggcctctgccagtccccctcccttcactatagtgaaagggggggttgtgtaaaa

SEQ ID NO: 133737 - DNA, 646 bp, Glycine max
  Clone ID: PAT_MRT3847_91770C.1
cccacgcgtccgtacggctgcgagaagacgacagaagggggcgtcgcaacacaagaagagaagagagcgttttccttttctttttaattttttctttggttaagcttaagcaacaaccgtcaccaagcacacgcgcagacgcaagctctttaaacggtggagaacgtgaactgaaccacttcaaagttcaaacccagattttgcaacaaaataagcacgccacaactcacctccactttgcttgagggttatattctattctatataaggggaagctcaacttcttcctccttgtcgcatacatagatacatgggttcggcaccagaagtgttggctcagagaagttgtggaaagctcattgggactcggttcctacagtacttgaatggaggtcctctctccttcaaaacccaccaagccatcgttctgattgtaacattttttgcttatgctagttaccatgccaccagaaaaaccacaagtattgtaaagagtgtccttgatccccaatcatcagctataggcttgaccttctttccgtttaggccaaccaatttcaccgagtcaaatggatccaagacactttcttccaaccttggagatggttggcgccctttatgaatcagatgtggacatccttttttg

SEQ ID NO: 133738 - DNA, 449 bp, Glycine max
  Clone ID: PAT_MRT3847_91771C.1
atggttaatatgttttttttttttttggacaccactttaagaggttttgcccggacgcccacaaaaaagatttaaaattagtttaagaacataaattcaagacaagaccgttggccactaaacattgtaaaaaaactttaaaacaaaatcatgggaatgataaacaaaagcagggggggtgaaggagaatgcaagaggcgggggggctccagaaatggaaaaaggggctcaacaacataagctctaaaattcaccgaaaaataaattctgtagcttatgcggggaaaaaagttcaaacaaagctgcacttaaatggctcaaacatcatttaaaatgccgtggattaagatgatattcaaaaggctaagtgaagaaaataacaaaaaaagttaagtgccaaaccatcctggaaaggaaaaaaccccaccgccatcgggaaaaaaaaaata

SEQ ID NO: 133739 - DNA, 220 bp, Glycine max
  Clone ID: PAT_MRT3847_91772C.1
gatagaaatttgatattcgtgagttttataaaatggctgaataatattttacggaagttacctgttttaaattacaaacagacttaattaaaaacttatggtcggcatgggcagacggattaatttcatcagagcacattttaacggagaagcacgcgaaaagaagagcgtaagagaatagaagtgaaaccagactcatgaagaaagtttgggtcgtaaa

SEQ ID NO: 133740 - DNA, 169 bp, Glycine max
  Clone ID: PAT_MRT3847_91773C.1
tgtaacaacactaatcttcctctcaaaatagactcttcaaatgagaatactgccacaaaatcagacccaatctcggttatatcgtaacacaataatatttttaactccagcccaacccatgaatattacctaatgaataatcacatattaacctcccatatattaattt

SEQ ID NO: 133741 - DNA, 240 bp, Glycine max
  Clone ID: PAT_MRT3847_91774C.1
gcttggtcgcgtgggcggacgcctgggcggacccgtgggctgacgcttgcacggacgcttgtgccgaagaccatcgggcagattgaaccatacatgaattacagggtgcagctggtgagcaccactaccaatggggatggtggtcaaggaaaagatctcgcaatggttgaagttaatgtagcatgtgctgctgttggcttgacataaagccacactacaactacattgaaggaatttggt

SEQ ID NO: 133742 - DNA, 302 bp, Glycine max
  Clone ID: PAT_MRT3847_91775C.1
ggtttgcgttcggatccaggttgcgacgtcttgcacccgaccgaaggcacatgtcttacgctgttgagggtgccattagatagattacgactatttactgtccgatagctttttgtagagcaactcctttgcttaacttgcgcgagacatatatagtgatttttaaaataacagaggcgcttttggctgaacaccctcatctttgagcgcacgtatttggggttgacttaaacgcaaagggcgttttgataccacacatcttggaactgcctgtgaaacagagcagaaagcttgtcttattg

SEQ ID NO: 133743 - DNA, 187 bp, Glycine max
  Clone ID: PAT_MRT3847_91776C.1
tccttacgtacggaaatgggcgacctactgagggagtgcatatttgataagccaaacactgaattgcatgacactgcccaacactcgtagatgtggactgattctctccattctgaaaacaggttaacgaggaattcttggaaaggtcaaccagaatgtgctggtagcctcttgtgaactgcctaat

SEQ ID NO: 133744 - DNA, 319 bp, Glycine max
  Clone ID: PAT_MRT3847_91777C.1
tgcttgcatgatggtgttcacattaattgcattccttgtattacatcacatgagaaaccatctgcggccagttacgcctattgtaccattattagaacatcaagcactctaacattatcaacgatgcctacttagacaacggtaatatcatctggactctttttgtaatatgacacagaaactgactaaggttactacacttgctactatggacaataccttgacacagtagacgccatcgatattttcagaggctatgcagatatacataagtgctcatcaacgcctggaaaagtactacatccttataaaagagcta

SEQ ID NO: 133745 - DNA, 112 bp, Glycine max
  Clone ID: PAT_MRT3847_91778C.1
gtaaaaagcaagaactgctgacaattgttggtgcagtgtgttagttctacatttgagtattgaatttgaggattggtcgttgtaccaagacagaaagagggcaacttaggta

SEQ ID NO: 133746 - DNA, 271 bp, Glycine max
  unsure (1)..(271): unsure at all n locations
  Clone ID: PAT_MRT3847_91779C.1
aatatatgcagcaanttgtatttttaattaaatcaaggtgctcatgagctaagtcaattgtnaggtatgcactatgatgtgaaccgggttaangtaaaaatagantcaaaggaatcaaaccataactcattttcacacatacaaattctcngatgaactgaacctttggtttgagtgncagaagaacncnacagaagattggcaaatcaagtccagtcagcacgaaagancatacgctagttacaatgnggattatatatgctcaacnagg

SEQ ID NO: 133747 - DNA, 145 bp, Glycine max
  Clone ID: PAT_MRT3847_9177C.1
taaatcgacatcttaaaaaccaccccctataaactaacgttctttttgacacaccttgcaaggttaattctcacctcatcaccaatgtctgcacctatgctctctcttcaaacaagtattattatttcatccatcttatgggacg

SEQ ID NO: 133748 - DNA, 266 bp, Glycine max
  unsure (1)..(266): unsure at all n locations
  Clone ID: PAT_MRT3847_91780C.1
cttcttnattttgtntcttcactgtctcgttatggtcnatagttaccgcatagtanataacactgaactgangctatctntatagcagcaagtgtcgatntaantacttactntanacaatnattntattaattacacnaanntannagcnctntntctatcnatctagcnagggganatnngaatgtctagcaganggtccaggcagcaatctgcatccannaggatntccgntgaccacatcatcgacctcgttcaaagttgcg

SEQ ID NO: 133749 - DNA, 183 bp, Glycine max
  Clone ID: PAT_MRT3847_91781C.1
ggggggaaaaaccccctttttttggctggttccccaccccggtcccaattcccctgggggggggtagagccgcttttttggccctcaacccccggggcgttggaggggggctttttattaaacctccctggaacccccagttcttggtaaggggggcagttatttttatcccccccctgggaa

SEQ ID NO: 133750 - DNA, 177 bp, Glycine max
  Clone ID: PAT_MRT3847_91782C.1
ttttacagagagaattgttgctgatgatcagctcgaggaggctagcacacaagatattctttgatggaaattttccagtgcattctggggtacctatttttgtgaatagcctttatcctgtaaggcggttcccttcagaagctggcgctgtaaatgtcacatgagacctggacgatg

SEQ ID NO: 133751 - DNA, 488 bp, Glycine max
  Clone ID: PAT_MRT3847_91783C.1
ccaacccaaacggggaaaatctctcatattcccaacccagggggcaaaaaaaagggagagtaaaaatgcccaaaaaaccagggggggaaaaatttaaagggggaaaatggaaaccccaaaaaggtccccttccccctaagcccaaaaccaaaatggttaatccaacaactatttgcctgggggggcgcgccgagaaatattcccaaaaaaaaaaaggggggcgaaacccccccaggagggggaacctgagaaatttggaaacagtgaaaaaacccgggcccaaaaaagataaaaaaaaacaccccccaccccctaaaaaaataagcccccatcggaaaagaaccggagaacaaaaaaaaaacaaaaaagaagcccggggggcgaaaaaaaaaacaaccccccccctgaacccacaagccccggcctttttaaaccccttcttttaaaaaaaaaaccgggcccccgagagaaaccaagagaaagggcgg

SEQ ID NO: 133752 - DNA, 156 bp, Glycine max
  Clone ID: PAT_MRT3847_91784C.1
ctggtctaaagtctcactatacacaactaatccaggtgaataaattagaaatgtaacaaaactctactgtcatactagaatgtaacttttgctacatttctaatttattcacctggtctaaaggagaaatgtaacaaaattacttccctctgacct

SEQ ID NO: 133753 - DNA, 417 bp, Glycine max
  Clone ID: PAT_MRT3847_91785C.1
cgaatttattcccggggctgccagctcggcggccgcccttttttttttttttttttattgtcattcattttcttttatgaatgataagaatgcacactgagatgctatctgactacgtacgcgtaagccaccgacggaaaggagaaccaatcgattgcaaaaactgacgcagccggagcgaggtaccacatcatagcgcagggacaaactggataggccattgccactgttcatgacatggcgtcatgaatgcgcctgattccgcgtgtaaattgtccctaactacggtgccctgctagaggtaggtataccagacctaaagacatcctagatcactgctggcaaccacaaaaggctgtggacaatgaccaaatcaatgccgggggcgcatttagaaatgcggtctgtcaagaggcc

SEQ ID NO: 133754 - DNA, 273 bp, Glycine max
  Clone ID: PAT_MRT3847_91786C.1
aaaaatttaaatttattaaaaaaaaaaaaaaaaaaaaaaaaaaaaaaaaaaaaaaaaaaaaaaaaaaaaaaaaaaaaaaaaaaaaataaaaaaaaaaaaaataaaacggcggtttacttaaaaaaaaactaaattaaacttcggggcctcgccactttaatttttcttgtttaagattacctaatttcaatgtggtgaaatttctattatacccaatgaaatagacattcccaacatttgctctatttaaatgggggaaagaacaaatccctt

SEQ ID NO: 133755 - DNA, 229 bp, Glycine max
  Clone ID: PAT_MRT3847_91787C.1
acgcctacgcgtgcttccacgcgtccacccacgcgttcggcgactcgaacgatttaagaatatctagatagaattcagctcaggggaaggcccaagttataagtacatatgcctttgttgtattggattgctacatatgtactactaactgaggtatgacaggtaaccatcatgaatatgaaggcgcatgtttgagtaagaactattgaagagcgtagcatgattgatc

SEQ ID NO: 133756 - DNA, 310 bp, Glycine max
  Clone ID: PAT_MRT3847_91788C.1
ggctcgagcactgtcgtgcatgtggcatacagattgtctatttcggatctcgatgtggtcccctctcccatccggcgaaacctgatgacgcaatggatcgcctatcaaccggccagtttggcaagctaatgccttcttgacggcttcgtcttcttgcccggccatgacctgaactggtgcgacacgttgagctctaacaacaagcccttgattccggacacaacttcttgctccgctgatcaggagagggggcttgagggcctgttgcgcaaacagagtgttgtctattctccaggctggagttctttgc

SEQ ID NO: 133757 - DNA, 941 bp, Glycine max
  unsure (1)..(941): unsure at all n locations
  Clone ID: PAT_MRT3847_91789C.1
ccacgcgtccgaaagaattaattcctcacacatttactttctcactgttttcttttctccgcaacttgctcagcactatacactcccatttcagcttccatgactgaaccacacaaacgtagcaatctaaagcttcaacttcaacccttttcagcaagagagagttcttagtaagaattagctggaaaaaagcatattctcactccttctagggttttgttttgcattgaaattgaaatcccactattcaaaatccccgaccttctctctagaaaaagaaatagtttttttttgtgtgtgtgtgggaagggtttaaattttgaatttggaattcggcattgacctgagctaagagtgagtttgagaagaaggttctagagtgcagggtttgcaatgtcgggcccacccagagttcgatccatgaacgtggccgtcgccgatgccgacgcgcgcccggtgctcgtccccgccggcaacaaggtccgacccgtcgtcgaaggacggaagccggtgaagaaatcgtcgacggagacggagaaaaagccggtggcgcattcgccgcaatgcgtctccgttccggcggtggcgatttcgcggcagcaggagcaccaccaggcagtgctgaaaagcatgtcgtcgatgaacgcctcgttctcctccgacacgtcatcgacggattcctccactcacagcagcggcgcgtcgtcgagcgggaaggtgacgcgtcgggttagtgtggcgttgaggaagaagcaggttggtcctaagacggagaaggcgagttgtgacaatgtggctggttctgatgatgctgatttgagtgatagcttggagggcaagaaaagatgtgcttgggttacaccaaatacagagccatgttatattgcttttcatgacgaagaaatgggagttcctgttcatgatgacaggnaaactgttga

SEQ ID NO: 133758 - DNA, 326 bp, Glycine max
  Clone ID: PAT_MRT3847_9178C.1
ccgagattcttagtcttgtcaatctaaaatctgagttacaacacctgtatctgtacactcccgaggaagctcgacaactgagaaagactgctctctctcgtatggaatggctgcataaagattatgtgcctaccataacacacattagtagagttccattcagtgcatacgatgagcaatgctgcgtgttcaaatgtacatatcgagctactgttgagcattgatttgttgggggtacaaggagcaggtaaagcttttacaaacaagatcgttttggctgatcaacgcgtgttggctcacacacaccgattattttatggaaattg

SEQ ID NO: 133759 - DNA, 210 bp, Glycine max
  Clone ID: PAT_MRT3847_91790C.1
ttgagattccaatacactcacattagggataacgatagcatcatcttactaatctatttctctcactctaatccactttcaactcgctcttgtctttcttatggccactctaaatgctccaaacttatatttccatacctatctgatcaattatcgtctatagtgttagttacgatcgactaattgactgtctttgtacaaggtttgatc

SEQ ID NO: 133760 - DNA, 242 bp, Glycine max
  unsure (1)..(242): unsure at all n locations
  Clone ID: PAT_MRT3847_91791C.1
cngaaaggtttttaaaaatttcagagtccacattagcctgcgggctttctaggatatctctatactctacatcctactttcttgaacttcccaatataattttcccatatatataactcccaatttcttttccactcataagaattactagtcatatcaagaaacgtttgtaatacaccacaatttacaccatttccatattttataaaaccttcaactacctctcttaacgctttcatttt

SEQ ID NO: 133761 - DNA, 756 bp, Glycine max
  Clone ID: PAT_MRT3847_91792C.1
tctcgagccgattcggctcgagtacggctgcgagaagacgacagaagagggtcgtgaggacaaaagaagaagtatcactcatataatactctgtatcatttcatttcgataatcatccatagctactgaagaaaatggcaaccatctctgctgctatcacaaccccatcgatctcccgcgcaactcttgtgcaaaagcgggtctcatctcccgttcttggtttgccagcaatgggtaaggtgggaagagtgagttgctccatggaggaaaaaccttattctgtgaaggaaagcagctctagcatgttggggatgggggcatctctgatggcagctgccagcgctgcagccatgtcaggcccagccatggccttggtagatgagagactgagcactgaaggaaccggacttccctttggcctcagcaacaatcttcttggttggatccttttcggcgtctttggtcttatctggactctctattttgtctacacttccactcttgaagaggatgaagagtcaggactgtccctttaaatatcctgggttgtagggtgggtgatgatgaatgatggattgtataaattgcaatgagtccccctcatcttctgtgttgttaaaacaaatttctgtgcttgatttcctcttctttctttctttctttgcttctcactagtttcggttgtttgtttaattcgtaacactaagtcactaacacgcacatatgaataagatcataactcagaagataaccaga

SEQ ID NO: 133762 - DNA, 307 bp, Glycine max
  Clone ID: PAT_MRT3847_91793C.1
aataaactccacttttattttacaaaagatgcgttataaataaattaaagcacacccattcacacactttcattacaaaacaggagaaacacaacccttttattattaaattaacgccgacaaaacaaaaaacgggaatttaaatataatcagtggtcacttagttcaaacaaacactatcattaaaaatctctacaaaaaaagacattcatccattcatgcatccaataatttatgggcacttacattttcttccctgagtcatcatttaaatttaacacctgtcacacatctttttattatccta

SEQ ID NO: 133763 - DNA, 284 bp, Glycine max
  unsure (1)..(284): unsure at all n locations
  Clone ID: PAT_MRT3847_91794C.1
gtttaaggtantggttngtancctctgatgctgctagttctatgtccgttcttgctccgttcctcgtcnaatccaaatggtanggcacccttnanccaagagncctaacaaataccttagaaaattcaagagatggccacactcccctacaagacctcatggcaccacaacttcggngaagannagccatganngatctcananaagcnaccctagnnntggatncttcncaacacccccaaagnnccnaccttccgtgccctnttctccnctccactctccnt

SEQ ID NO: 133764 - DNA, 385 bp, Glycine max
  Clone ID: PAT_MRT3847_91795C.1
ggtttgcattgccacaaacggagagagtggcagggggtgattggtacatggggatggagcagacaggacctggacagcgggtaccactgcaggtgaggggaccaacaaggctaccacatgaacgggagaagagcgtccctacataggtgggcggtgctagcaccggggatgaaaagcggactcgcgacaggacaaatgacactccatggactcggtgcttcactattgtcaatacggagcagaatacagtggtccacaagatgttgggaaattccgaagagttcataatggctagaagggccatgatgccaggtcaagctggaacacacgctaccgccatggcatggactgatgcggccaactcggcacgagccgagggcagcga

SEQ ID NO: 133765 - DNA, 243 bp, Glycine max
  unsure (1)..(243): unsure at all n locations
  Clone ID: PAT_MRT3847_91796C.1
gggncaaaggagcgggggggagagcgagaagggggcggcgtttttaggagcagaccgaatagcgaacagcgtgcgagtagagagcgaaagagggacctctgcgactgaacgaggagcgtcgcggcggaaccctagctacaacggaggcgcgacaaagggtgagtgagagagaaagggtgtgtgagagagaaagcgagagagagaaagacagtgacgaaaagtgggaagggcagaggcaaggcg

SEQ ID NO: 133766 - DNA, 706 bp, Glycine max
  unsure (1)..(706): unsure at all n locations
  Clone ID: PAT_MRT3847_91797C.1
ccgagcgtccggcgctttcagcgagttacttcggctccaaccaccctccaccggtccatcctaaacataatagcgtagaacaaaaaaagcatcacaaaaatggaagctagcaattcatagctgttctgtttttgtgaactcccaccatcaaaaaaaaatattagcgtctcattaatattattattattatccactcgcgaccttcgtttttctcttttgccttctcggagttaattcaggaggttgcagcgacagcgatggcgcaaggcatggcgagtaaccgaaaccggaacccttgcgcgcaagaagcgcgcaaggtgatggtggtggcggacccgacgcgggaatcggcgggcgcgttgcagtacgcgcttgcgcatgcggtgatcgaacaggacgagctgattctgctgcacgttgagaaccctagctcgtggcgaaacaccatatcgacgttcctgaagatgccttcgttgggaagcagcaccactgcgtcgctggacctcggaggaggtggaggagggggagcagccgcggcgccggacggagaagggttggattttctggaggagatgaagcatgcatgtagcgtttctcagccgaaaatgaaggtgcgtgtggtgaaggtggagatggatggaagagacaaggctagcattgttctctcgcaagacaaaacgcatggggttgacgtcgtnattatagg

SEQ ID NO: 133767 - DNA, 493 bp, Glycine max
  Clone ID: PAT_MRT3847_91798C.1
cgaccgacgcgtccgcccacgcgtccggtgcactgtttgaaagggctgttagtctgagcctcccaccgaaaaagatgaagttcttattcaaaaagtatctttattatgagaagtcccaaggtgatgaagaacggattgaatctgtgaagaggaaagcaatggaatatgtcgagagtactagggcttgatataaattcaccactgctttagttttgaattcttcaacttgcagccactctggagtctaagctggatatcttaagaccaagctttgtgttagataaggcatgacaactaaacagtacatgttttcccaaatcacctggagacagtatttgatcttggttgcctctgtaaatggagtggttctaacactacctaatagtgtgctgctaagtgctaatgtgctttgtgcagcatagggtgagttgtgaatgcatcaaatgagcacgagaaaacctttgagatgaaatataggtctttgtattgtctt

SEQ ID NO: 133768 - DNA, 375 bp, Glycine max
  Clone ID: PAT_MRT3847_91799C.1
gagagacaatagtggtatgtaacattataggcagagaggcataattgaaattgccgcagactttatcccgaagcgaccggggacgaaccattaaaaagacaaacaggaagcggccatgtgctgagcacgccaatgacacgtacaaaacacttgaacttgctgaaaggcaggacacgaccacattattcaagggatggggggtgaacacagaacaccagagtggacgagaacgatcacagacctcgtacagaggcttttagcttcacaatgaggaggtaagggtattcctgactaagggctctcgtggattgaagctggatatgccaacacggcaattccaattgagggggttgcaggagcagatagtgccacatt

SEQ ID NO: 133769 - DNA, 103 bp, Glycine max
  Clone ID: PAT_MRT3847_9179C.1
gtgaagggtcgtgtctactgtgacccttgccgtgctggttattgcaaacctcagactaccacctaacattagctggtagctgcgaattaatgttagcacatgc

SEQ ID NO: 133770 - DNA, 225 bp, Glycine max
  Clone ID: PAT_MRT3847_917C.1
cttcaataaggtgtaaactacaatcggcgggattcggagatcatggcttctgggagagattgcgagttttaaaaactatgttctatggggaacttccctgtgttgagaatttatgtctttagaataccccttatattatcctgtggtatatatatatgtgctgacatgggatgatttggatactaatagtctcacctttaatgtgtcggccgattatttggatgg

SEQ ID NO: 133771 - DNA, 450 bp, Glycine max
  Clone ID: PAT_MRT3847_91800C.1
ccggctaaaatctatcaaactaaaatacactaacatttgtaactaaaatatatcaagatttataacaacatcaaaccttctaaattaaatatcgaagtcttcgcatgtcttatgcgggctagccacggatttagcctgcaaagtccacaggcttcacggaccgggcccaaatttgcctataattatgcgggttctaaaaaaaagaggcccgttatttgcacggtccgcaaacttagggtccgtccatttgaagagaaagagggaggaaatgggaagaaataaacagtaaattgatgtgagacccacacttttacactctactttaattcaaaactttcatctcaattcactttctttccactctactgaacagacacttaatggaccggtccgcagaccttggtccaatggtccatatacccacccctaaatacagtacatggaacagga

SEQ ID NO: 133772 - DNA, 768 bp, Glycine max
  Clone ID: PAT_MRT3847_91801C.1
ccacgcgtccggaatacctcgccctccccgacaacaatcaaattctagagagagagaaaggaaaaaagaaagacccagtcagaaagtgagaaacaaaacgaaaccattctgcattggcggggttttagggttttgtgatcactgcacagtgcacagcgcctccatggaaatgcctgccagaagatccggcaactacaccctcctcagtcaaactcctgacgacaacttaacggcgccgttgttcggttgctcctccggcgacggtcaaatcaacagcagcaagttcgagagagtctccgattgggactccggcgtcgaacaccgacaggggaatcggatcgggaatttgcactcctcgttcgggatgcagcggcagtccagcgagggcagtttcggcgagagctctctctccggcgagttctacgcgccgactctgtcggctatcgcggcgaatgagatcgacggattcagaggcacgtttgcgggaaattcggcggcgaggagcggaggttcctccggcaagagctgggcgcagcagacggaggagagttaccaattacagttggcactggctcttcggctttcctcggaggccacgtgtgctgatgatcccaattttctggatcccgtgcccgacgaatccgcgttgaggtctttatcctcgttttccgcagaggcagtgtcgcataagttttgggtgaagggatgcctattatacttcgacaaaatcctggatggcttttatctaattcatgggatggatcccta

SEQ ID NO: 133773 - DNA, 379 bp, Glycine max
  Clone ID: PAT_MRT3847_91802C.1
gttgttcctattttttttttccttcctttcccccccaggaatttttttttttttttttttttttttttttaaaaaaccttttgggaacctggcccccaagcttggttttccatttccagcttaggggaactaggtcccttccctggttcccttttactcggggttaataaaaaggagccccctttttccttttaaaaggtcctttatttaaaatttagggttcgaaaagacccttcaaaattgggcccccccaaaacttaaagttttccaatggcccgaacaagaattcctctttttgcccaacagggacaacagggcccttgtacaaaaattgggggggttggaaaaaattcccccttgcttggaggggccccgcccc

SEQ ID NO: 133774 - DNA, 154 bp, Glycine max
  Clone ID: PAT_MRT3847_91803C.1
cggctgtcgagcaagactgacagaagcgggaaggtgcacagagtttgattgtgcagctatactgctagtcttatcgtgcaggagacatatcgaagttgctttgcttttctcttgttgctgcaggtagtttgtggtaccatgcgccatgcgcatg

SEQ ID NO: 133775 - DNA, 892 bp, Glycine max
  Clone ID: PAT_MRT3847_91804C.1
ggcttcccccccccctgtccgaggcttttagtgctcagctccatttcttctttcccatcttttcttgtttttaaaaccaacgaatctgactcaccaatattccaacacgctcgctcattccacattgcataatggccaaggaaccttctctatgcctcttgttcctctcttttctcattttctgctcttcagggacttctgtatcttcttcttcatcgtccgttggtacaacattcttccaaaaaagcaagatctccaaatctgagattcgattttctgtatcagattgcaagattttgagcactctgaccaacaccaacctgtcagttgatttcttcttaaacgaaagcctggttgaaaattttgtttcttcaaaatcaaaatcatctctagtttcatggctagaaactcatctcatgaacattattccccaagttgacatcagaagcatcgttgttagatgtggcagtgagtgcttaggccaatatgagatgccttcactcatacctattctcaaatcaattcattcatttctcagcaatcttcaactgagaagggaaataaaagtctccgtggcctttcctctttcattcttagagaatttgaatgcattgtatggaaatgatctccttaggattgttatgtttttgaagaaaatagattcatttatcatgatagaagacatcattggtggagaattgagtactgttcagtctgttatcgaaagagccacccttgctgctgctattcttccctgcaaagatgttcctgtggttctcacaatcaagagccatgatattccaagttcaatggaattatctcaattcactgaggcagtatccaagtatcttgaagcagtttctcattttacaaagagaatagttgcattcta

SEQ ID NO: 133776 - DNA, 932 bp, Glycine max
  unsure (1)..(932): unsure at all n locations
  Clone ID: PAT_MRT3847_91805C.1
gatgaagtttaaaaaaatatcatcttcaagatgacgtctaggatgaactaccaacataagtggtccactatgcacaaaaaattacaaccattagattaatttgtgtgcaaaagcttattgtatacatgaccctatcaaatccacactttggcatatctcacctctcaccttgacgacgcttctctttgttgtgtgctatcaccgaaggaactcctcgttgttgccgatgacctccctcactgacattgttcttcatcatgcttccaccatttatagtgaaaactacttctctttctaattctaattattcacctaacaatcaaactcaacaatttagcgagacacttcgattgtgttcgtgatcgtatggcttctcacagctacatctctgtgtttgcaaactgcagctttagattcaatattcgatcactaccactacgcccaaattcattgtgctaagatcccgctcttgacgatctatacaacattaatatgatttttaaggagtgaagagaagagagtatggaactgagaagaggaaggagtttcttgagagtttggagagcgggaaggagtcatgacgacacgggagttgtggcaacggaatcgtggtggtggagatctggtattacaagtagcaacaacgagtcacaagtagccaggcccaacacgaataacaacaaggagctagcagcaggaaggcccaagaggcaaggccacacctctagttatctgaaggattacatgctagcgacataagcgttcacgtgtgcatgcaagtacataaggatggcgtaggtatcttcaagaagcttangaggaataagggatattagctgttagcatttctgttangatgttgagaacataatgtatataaaatgtaagaaagcgctcgtgaatataacagaaaagcattctctttagttccc

SEQ ID NO: 133777 - DNA, 630 bp, Glycine max
  unsure (1)..(630): unsure at all n locations
  Clone ID: PAT_MRT3847_91806C.1
cccacgcgtccgcccacgcgtccgtacggctgcgagaagacgacagaaggggacatttgaagaaaaagaaaaagcagtagcagatcgaagataacaatgtctttatttgctagaagtgtttccacactactggtgcttatattgttattaccaacgttgaacaatactatggcagagaaggcacttattggggttacaaataatttgggaagtcgaaacttaactgtttcctgcaagattgataatcatccacaccttctcggccccactgattactatgagtggaagttttctcctgaatataatgacgaatttggaacggaaccattattcagtaattgttcctttcaatgggaaggtgcccatcactcatttgatctctacgtacttgttagggatggtgattgcaacaattgctcatggcatattaaactagacgctgcatgtaggtatacgggtaatttaaggtttgcttgctatcaatggaaaacttaaatgtacgatgtttcagatccaaaaatcaagttgtagctggatattttatcctctcttatctattttaaataaagagtgatttagcatcaaaaaaaaaaaaaaaaaaaaaaaaaaaaaaaaaaaaannnnnnnggg

SEQ ID NO: 133778 - DNA, 1121 bp, Glycine max
  Clone ID: PAT_MRT3847_91807C.1
gggggattggtttttgtactagatcgttaattttgctgttgcgtcttcacacttggcaacaagttaacctgaatagaacacattcgtcttgtttcaaaacggtgcgcttttgaaagaatcgttgttcttctctctttctcctcttcagtgaaaaagtggattcatttgatcatttaaagggttgcaataccctagatcaaatgatggagactggagacattaatcagcctgaaccactgaaacaggtgtggtgtgagaaaaaaacaggctgccgttcatgaagaaatgaatagaatgaaccaactgcctgcaaacagtgcatatgctacacatcgtatgaaggttctaaataaaattttgcaactcatgtcagttcagagaactgtatcacaagagcaggaattggagttgctttttgctggcctttctttgtgaaagtattattactggcgatggtatgttgtggggaatcaatagtaggtttataactatttgcaatgtggtttgtgattgtgcatatgagctctacatgcatgttattttggctttaaatattgctcctgactgtcataattgcagttgtcttttcatcaatttaatttgggtatttttaagttttaaaaccagctgatcctggcgtctgtaatttttctctcttgcccctgacaatagtggatctgcatcttgaagtccaaaagataaacaacaaggcttgtttacagtatgtatgtattggcattttagtcatgcaatattggtcagagtcagttagggttttactcataacttgactgagcttaagcagcaatgtctatactcttctttagctacttttgatatcatagtaatgcatcatattgcaagttgaaaccttgctgcctctgtccaactttccttcgtttcattcatggatcttgccggaggaactttctttcataatccggtcatggatcatatatgttggttttgacacactatgtaacggctctggaaatgacctggaaaaaaaatacagaaccagaaagcacaatatattgtcaatgtctttggatttcttactagaacaaaattatgggggatacaggcatacaggtattaaatattctcattatttctgtaaa

SEQ ID NO: 133779 - DNA, 522 bp, Glycine max
  Clone ID: PAT_MRT3847_91808C.1
ccacgcgtccgaatttatgaggagttgcgcccattcatttcctagtttttaatagtgctgcacacttcttctttaggtaagtttataaataaagcttcattttcatgcaatttatgattttatgagattttcccatacacttgcacgttcccatgaaagattcctctcacaaaaaaaacttaaatttcatttaatgtgtaactctctaactcctttcttacatccattgagttatattgcaggttgctagatctattacattttcagacgacgacgacactaggtaagtatatttccattaacattctattcaactcactattatatgcttctattatatactcctatttaataacatttattttttgttaataaaccagtagaaaaaacaattcaaagacgaatgttgaagcgtcacatgaggtataatttataaccttaacagaacaagcttatattcagttatacttaactgttaaaataaacctcatcgtatggtacaaatgttttaccacccaacac

SEQ ID NO: 133780 - DNA, 282 bp, Glycine max
  unsure (1)..(282): unsure at all n locations
  Clone ID: PAT_MRT3847_91809C.1
ccttcactatctctcaattctacttaagcaaatattcactcttttctttacccccattgatttttatatgaattccccgcttanttcatcactggcaattttacacaatcattatgtgaccaacaaaaacaactaccccaatttctccctcttattcactcctacttatattacaaaaaatttcctctccaaccactaaaaactactaccaaaatcactactaactttttatctaatatccctctccaacttattaactttatccatccatacaactccttc

SEQ ID NO: 133781 - DNA, 343 bp, Glycine max
  unsure (1)..(343): unsure at all n locations
  Clone ID: PAT_MRT3847_9180C.1
cggctcgtgttgacagtggcagtgggaggagacatgtggaaggcccatgtagccgtggcgtttgttcagctattcaatggaggttaccatgtcatcaccaaagtggcccttaatgttggcatcaaccagttagttttctgtgtcttccgngatctccttgccctttccatcctcgcacccctcgcttatgtccgtgaaaatacagaaagagtgaacttactcagatatgatggtctggcaaaagttggaggaactattatctgtgtctctggtgccatatttatggttttgtatcgtggtccagctttgataggatatgccgaactcggtcatgtaacacaaa

SEQ ID NO: 133782 - DNA, 375 bp, Glycine max
  Clone ID: PAT_MRT3847_91810C.1
caaaaccagggaaaacttttatttcttaaccccaataaaatttaaccaaacctcccaatttaaaaaaaaaacagagccctcaaattttttaatttttaaggccggaaaaaaaaaaaaccaaataagggggaaaaggcaccctataattaaaaaggttgacaaaaacgggggcccacccgtattcgcgttttttccctgtatgggcgcccactgggaatctttctttcccaacccggaaaaaaaggggcccacaaactctttaaagttccccccaaaaatttcctgtttaacaaaaaaaaaaaaaagggggggggcttttgggcaaaaaaacttggcgctgcttgaaaaaaaacacaagttgttttttggcgggga

SEQ ID NO: 133783 - DNA, 193 bp, Glycine max
  Clone ID: PAT_MRT3847_91811C.1
gaagctcgaattcgctcgaggcgggtatatcgctcagagcacgaactccaaacggaaatcgttttatttctcctaaacatcatacgtgcccgctcgagggcaacatcagcgagtccggggacaacacttgttcccacccaaagcattaattgttctaattaacatcctaagcaccctgcaaactgctcaccct

SEQ ID NO: 133784 - DNA, 468 bp, Glycine max
  unsure (1)..(468): unsure at all n locations
  Clone ID: PAT_MRT3847_91812C.1
aagctcngaattnngnntnaagtaagcttcaatcacatacttnntctcctaaatctagaacttgttgtgaactgaacaacatatatattctaagctctttgaacttatccttcactgatcagattcagagaaatggaaaacatcaaagatccatcaatttaccgcaatccagtcatattgcagagcgaggacttaaccaagtatattctggaaactgctgtttaccctagagaacctgcgcctctaaaagagctgagggaagccactaataatcacccttggggcttcattgctactttacctgaagcgggtcagctaatgaccttacttttgaagctgttgaatcccaaaaagaccattgaagtgggagtgtttactggttattcccttctcctcaccgcctcaacattcctcatgatgggaagattacagccatagatattaacaggaaagcttctgacggtggtt

SEQ ID NO: 133785 - DNA, 972 bp, Glycine max
  Clone ID: PAT_MRT3847_91813C.1
ttaagcttcaatcacattctcgatcttctcctaaatctagaacttgttgtgaactgaacaacatatatattctaagctctttgaacttatccttcactgatcagattcaggatcttttgtctcttaccctttgaaggaccctgccccttatagtgttgttgatttagaaatggaaaacatcaaagatccatcaatttaccgcaatccaatcatattgcagagcgaggacttaaccaagtatattctggaaacctgctgtttacccttaaaagaaccctgcgcctctaaaagagctgaaggaagccactaataatcacccttggggcttcattgctactttacctgaagcgggtcagctaatgaccttacttttgaagctgttgaatcccaaaaagaccattgaagtgggaagtgtttactggttattcccttctcctcaccgcactcaacattcctcatgatggaaagattacagccatagatattaacaggaaaacttatgaggttggtttaccagtcatcaaaaaggctggagttgagcacaagattgatttcatagagtctccagctctaccaattttagataagctacttgaagatcctgcaaatgaaggatcttttgactttgccttcattgatgctgacaaggagaactatgtgaactaccatgagaggcttataaagctggtcaagattggggggttgcttgtgtatgacaacacactgtggggtggacgtgtttgctggcctgaagacaaagttccaccacacgctagatcagggagggacgctgcaattgaatttaacaaaacaatcacaaacgattctcgtgttgaatttgctcttacttccgtaggggatgggctcaatatttgtaggcgcgttgcttgacttttgtgttaatgctctgctattgtataatttgtatttctagtagccacctgaataaacattgcattttgtgttcctaat

SEQ ID NO: 133786 - DNA, 676 bp, Glycine max
  Clone ID: PAT_MRT3847_91814C.1
tcggaattcgctcgagaattcttccaccaattatgggtttccttgtgttgcttcttttctccctcttaggtctctcttctagttccagcatatcaactcatcgttccatattggaccttgacccaaccaagtttaccacacaaaaacagtgtcttcactgttccaaccttggaagagtgagcatggacgtgtctaccttaaccccgaagaagaggcaaagagacttgagattttcaagaataacttgaaccttatcagggacctgaattccaaccgaaaatccccccattcttcttcgtttaagggattgaaccaagatttgcttgacattcacctccctcaaagaagttcagcaaaaaagtaccttgcaagcctcccaggattgtgtcgcaacaaatcaaaatggccaacaagaaaatgaagaaggacctttttcttgtgaacctccacctgcatcttgggattggaggaaaaaggtgtcatccccaataagaccaggggctggaaacggtgggcgttttctgccacgggagccattaaagcagcacatgccatagcaacaggaaacccttgttagccttttcttgaactagaaactcgtagaactggtgtggaaaaaagcgaaaggttgttacaatggatggcactatcaatcgttcgaatggggttttaaaac

SEQ ID NO: 133787 - DNA, 429 bp, Glycine max
  Clone ID: PAT_MRT3847_91815C.1
gcacgcacctcttctgccagccactgctcactgccgccagccactgctcgccaccgctgtcctctgcttgccaccgcaccatcggacacaagagcacgattcaaggtcagcgacagcaggttcattttcttttctcgcaatttcccaaagatctgcggaattttgaatcactactgccggccactgctcgcaaccgtcgtcctctgcctgccactgcaccatcggacacgggcacgattcaagaccaacgacaacagaaaaggacgggtatttggtctaggttcagagattggaaaatacaaaccttcctcatccatattgtttgatggtttctcatcacatgtatacgagaaaatgaaatctcaactttccaatttgacaaaagaaaataagaacatgaaagaggtgtttcttgcatcacaagaagag

SEQ ID NO: 133788 - DNA, 497 bp, Glycine max
  unsure (1)..(497): unsure at all n locations
  Clone ID: PAT_MRT3847_91816C.1
agcccggaattccgctcgcagatcacataccctagagaaaacaaaagccccgaatccaaagaagagttcctttttgagagagattgggatggcctccaccaagaagatccacccgaagagttccgaccgcgaggccctccaggtggaggcggccgcggccgcgccgccccccccctccccccccggggggccccnccgcccccccgcccccccccccccccccccccccccctgccccccgcccccccccccccccccgcccccccccgcccccccttcccccccccccccctcccccccccccccccgccccccccctgccccccccccccccccccccccccccccccccccccccccccccccccgccccccccccccccccccctccccctccccccccccccccccccccccccccccccccccccccccccccccccccccctgcccccccccccccccccccccccccctcccccccccccccccccccc

SEQ ID NO: 133789 - DNA, 246 bp, Glycine max
  Clone ID: PAT_MRT3847_91817C.1
agtacacaagcagagcttcatacttgataacgcaaggaagatgcccagattctcctgtgtccgatgctatcagtcccattaacacattgaatttacgaaggtggttgctacatatgggctaacttagggctctaaggcacctaggtaaaaagaagcatgaatacctttcacaggcacactgagagttcctgtacccgcagactatagacggatgcaatcacggctcctatactcgggcaaccttgc

SEQ ID NO: 133790 - DNA, 117 bp, Glycine max
  Clone ID: PAT_MRT3847_91818C.1
tgttgccgaagattttgtgatcccatgatgacatgacaatggaggtcatgccagtgctataacctttaccataacgtggactccttctactaccgtagactaaatagtctacataag

SEQ ID NO: 133791 - DNA, 164 bp, Glycine max
  Clone ID: PAT_MRT3847_91819C.1
ctcattgtctctcattctgaggctcacagacataggcactcacacgactatgcttgaaggttggtcggaaccacatgtgcacgaagggtcttagcggaattatcatgacaccatctatggtgttcggtgtaagcttccgcagagctttcacagtggcggcggtg

SEQ ID NO: 133792 - DNA, 461 bp, Glycine max
  Clone ID: PAT_MRT3847_9181C.1
gtcatgtcatcctgaacatttacaatcatcatcaagagcgcagaaggtttcttggggattgtggggagaccagcaaaatcttacatacgaggattcaatgatatgcaggatttgtgaggttgaaataccaattgtacatgtggaggagcattctagaatatgcacaattgctgatagatgtgatttgaaaggcttaaatgtaaatgaacggcttgaaagagtttctgaaaccattgaaaaaatactggaatcctggacaccaaaaagcacaccaaaaagcactgatactcctggagaaagcttcgagcttgctgcagtgtcaacatcaagtgtgcatgaggagttcaatgatttatctctagagagaaataacctgacttgtagatgctctgaagacatgcttgactctactgcggagcatgacaatacttttgtcatggaggatctgaacctttcacccg

SEQ ID NO: 133793 - DNA, 328 bp, Glycine max
  Clone ID: PAT_MRT3847_91820C.1
ggagagatgtgtggtgagcgaatttacggtggtgcccttcccatggtgttttcctatcctctcttgaacatactgactttagccatgtgagatttgatttggtttcttggccaagtttcttttgccaattagttcgagtaataggagtaatccagttagtagatggctaacaattagctagataggtgcttcttcttgacttgtgtatctcttgtgtacatttttctttattttttttattttttattttacagagatttgtaactttgtaatgcatttttggccctttgaattgtcttttgccacagtaaaaaaaaaaaaaaaaaaa

SEQ ID NO: 133794 - DNA, 649 bp, Glycine max
  Clone ID: PAT_MRT3847_91821C.1
tttttggtatgctatagggaaaatagggttccccatacgtattcattgtagaaaccatgagtatctcccggaggaatacaaataagacttgttatagggtctagcttgaccacttacaagagtttcatttatttatctaatgcatcactaaaaagacattacacccatctttgtttatctgttaacctccatgtgcagttcctattctgtactaacagggggagattggaagataacaaagaaacaaaggaaatctcttgactgtgcttattggtacgtaacagaacttgcactggacacttaacacaggtaaaactacattcatgtttctacccagtatcagatccttgttccacttaaataacaaagtgaaggaatggagtctctctgccttgttcattttcaaatgttcagccagtaatcttaaaactaagaacataatgcagttcacctccataacataactcccggatatcttcatgccgttccaaataaatctaccatgttttaaggatggacaaaacttaaatgcagttgcttagatactgttggtgttgttcttcaatcaaaattagagttcacattagtagcagaccaccgacgtgaaactttaattttgattgaaaatcagcaataagaaactgaattt

SEQ ID NO: 133795 - DNA, 545 bp, Glycine max
  Clone ID: PAT_MRT3847_91822C.1
gtcacgctttagcagggggaacctggtgaaggctagtaagctaagtgagagctggccacccatggccgccgcacaaaaaacggcagttgacaagataacaaataatgggtagataatagatggggccgccttcgtggtaagttaaccggaacgcgggcaaggcgaagtagcaagtacaaaccgagcacaataggagccattgcattggccacagaggcccggcccggcacgtatgccaacagctctgcatgtacgggatggttttgcaacagggccagccacacaagagcgatacagcgccaaccgctatagtagagcggtcactgacaaactaatgcactagatagcaactgttgaatagtggcatgagacggtgcaacacagggtaacaaccaacagagcccaaaaggaataacgctagaatggggttgcaaagctgccagagcaggttgggtagcattcccatcccgcagaggttattatgggatacgtgggagctgcgcagcgctattgcgatatatgaaacgtagtgggtgtgccatatg

SEQ ID NO: 133796 - DNA, 721 bp, Glycine max
  unsure (1)..(721): unsure at all n locations
  Clone ID: PAT_MRT3847_91823C.1
gcaagtttctttggaagcacaaagtgtcagagtaagacaaaacagaactcaaattcttctgaacgaaaagctcctttaaaaacatcagcatcaaatgttggcaaacccatttccaatagcctcaagtccttcaccttcaatgatctaagagaggccactaagaacttcaggcaagaaaacttaattggagaaggagggtttggatttgtctacaagggatggatagatgagaacacatgcactccaacaaaaccagggactggaattgtagtggccatcaagaaacttaaaccagaaagctttcaaggccacagagaatggctggcagaagtcaattatctaggccagcttcaccacgaaaatatggtgaaacttattggttactgcacagatggtaaaaacaggcttctagtttatgagtttatgcagaaaggaagtttggaaaatcatttattcagaaaaggggttcaacctattccatggattacacggatcaacattgcagttgctgttgcaagaggattaacatttttacataccctcgatacaaatgttatatatcgtgacttgaaggcttccaacatcctacttgattcggatttcaatgctaagctttcggattttggcttagcaagagatggtcctactggagataacactcatgtttcaacaagagntattggtactcatgggtatgctgcacctgagtatgtagctacag

SEQ ID NO: 133797 - DNA, 484 bp, Glycine max
  unsure (1)..(484): unsure at all n locations
  Clone ID: PAT_MRT3847_91824C.1
tcgaactgtccaaggtcctgtcacgggatgatagtggtccaggttgtgggggccgtggtagtagttgtaggcgtatggcgctgcaaagaattcgggcgctgtggtgatggttactgcgctacgcaccgaggatggcgccgccgcctccgtcgattggattgtgccggttgggctatgcgattgtgagtgggagctaatgggtgatggtggtattaactggcaaagtataaacggccgagtcgtcagaggggatgggcccgatagcgtggagcgtcgtggacgtaggggggcgccgaattccgattaggccaggggacgtacgtggggccggtatgacgtgtagtgatgttgccngtaaaaggcaggacagagagtacgcactcagggcccttaagtgatgagagatggtggaaaccggcaacaaacgggcgcgaaccaggggcagaggaacggatgagtagcggtaaagcgaattgaggtgaga

SEQ ID NO: 133798 - DNA, 250 bp, Glycine max
  Clone ID: PAT_MRT3847_91825C.1
acggctgcgagaagacgacagaagggggctgctagtaatatcagaactgaacttcatcaagaaaccaaaaacgagacaacattttatatagaccaaaataatttcagtttcaggctgttggtaatattcttatggtagttttctgggttcccactcacactcagatgttgggtggtgcacttttaacccaacaactcaaagcctcaagggcacaaggaacattgcaatgctatatccaactcctagatta

SEQ ID NO: 133799 - DNA, 454 bp, Glycine max
  unsure (1)..(454): unsure at all n locations
  Clone ID: PAT_MRT3847_91826C.1
naaaaaaagncctnacannaatacaaacnancnnanaaacngtaaaaaanacgacccgnagnaaagatcncaannnanaccgaangcanacagngantntaaaannagaagnanccagannnagaaaaagagagnanaaagananaananaagagcgngagaccanagnanangananagngnatgaanantnaaagtgnagannggtnnnngannnagaagnannagaaaaagangngngtaggtgaggagagaggagngatanaanntgnaagaangagaggataagaagaaagaacnnagaaagnagnagacganagaaaangagtagaagcaacanaancaanntnagagnaaannaaannnnaagaagantagganagagnangaagnnagaaaaaaaaaaanagaganannggtaaaagaggaannanngganacaggaaaananaag

SEQ ID NO: 133800 - DNA, 237 bp, Glycine max
  Clone ID: PAT_MRT3847_91827C.1
tccaaaagggtgcactcgtcactctgctgctcgcgatatctagtaacagtgtgatgcgaatgaaaggccttgttctcatcgttgatactcttttggtagcatggcaatgccatgcgtacgacatgtaccctcccccgatgaatgctggctgaagtgcccgtacaccagaggtgacatgcgcaagttggaagcgtgctgttgtagcacacaacatctttggctttgagaccattcctg

SEQ ID NO: 133801 - DNA, 285 bp, Glycine max
  Clone ID: PAT_MRT3847_91828C.1
ccacctcctattcaaatcagttctttcaacaaatcattctactactaggctgtacttcttacccatactctaatcctcccttctctatcccctcaccatcttcttcttcttcttccacttatccctcatttaaaacaacatataatctcatttctcaacaaccaaacactactacataatataccattcaaaaccttcttttcacttccctctatcctattcttcatcttatataaatcgattccatctttcaccttgcttctcactacctcaccatatctaccc

SEQ ID NO: 133802 - DNA, 692 bp, Glycine max
  Clone ID: PAT_MRT3847_91829C.1
tgcagcatcataattcaaactcttggacttgagagagtgagagcgagagtgatcatctgcctcatcatcagcggaagaagacggaaacatcaaaatagcatcttcttcttcttgtccttgtgcatcgatttccctgagaaaaaaggcttcccctgtatgatcaagatgcatttggaagtcagcttgaaccccattgacacagatatcaacaaccttttcccttgccttcaaaaccccttggaatttgccgaatcgaacgtaccaaggagaggacttgaaagtaccatctttctgttccaccaccacaatatcaacggcgccaccaaacggatgaaacggccctgaaaacctgaccacgccctgactaattattctacccaccgcttgcatcctccctaattattcttcttctattccctctcataaattcaatctcgatttcgtaacgctcaatctaagaaaaaataaaacgtggataaataattcaattcagaaagaatcgtagggcgtggactttggggaagtgtggatcgcggaattattgaaaaaggatattctaataaattgtgaatggatattgatttgaaagaggcgatcctgtagtgtaagctgaagaagaagcgattgaattttgcgattggggagggacgagaaggagaggttgtcggacgcgtgggcggacgcgtagtaga

SEQ ID NO: 133803 - DNA, 205 bp, Glycine max
  Clone ID: PAT_MRT3847_9182C.1
tcggaccaaacaaaccggtcctaaatcccccagaagaaaagctcccaagaagcaacttgcaacccaaggtgcccctaagtctgcacccactactgggggggtgaaaaaaccccccctccattgtcccggaaccagtgcttttccggaaacttgtaaatcccaaaacaattcccaacccttaaacccttttctccccctcccacgg

SEQ ID NO: 133804 - DNA, 370 bp, Glycine max
  Clone ID: PAT_MRT3847_91830C.1
caaactacatgtttatttattattaaaagggtaacaatcttttaaacatcatgaataagccatcctattcttaaccaggttgggtcacaacccataacatatgtgatggtcagatgcctcatccaatatgatccgttggcatttcacagtatgaagaagggacctatcggtacacacaggtgcatctaaagaatattcatccatccacatttcctcttcctttttcgagtcagaactctatgatatcttactgggggatctcttggggttcccctcggaaacttatctgttctgtctcttagctcgctttgatagttggtatgctctaacagcatcaggaccacaaaaataaatctgatgatacataaac

SEQ ID NO: 133805 - DNA, 404 bp, Glycine max
  Clone ID: PAT_MRT3847_91831C.1
tttttcaatttttcaatggacagaataatctctatttttcacgttagtaaataatatactcaggccaatggttacagattttccattcagctcaacatggctacacagttcaacaaagaactaacaaataataatccttgcttgtataacgtgcacaagctgtggatgaaatcattatcccatgcacccttttggtaagcattcttgtagtgacttaacaatctatggcaatgcaggtctcggcgatggtttcactgtcaactgtgttcacgaatggatttattttgacccacacaagagagaagacagaggccaacaacactgaccagagaacaacattggtcggcgtgcggttttggcgacccatgagacctttgaggaatggatagagatgaaaaatcacc

SEQ ID NO: 133806 - DNA, 572 bp, Glycine max
  Clone ID: PAT_MRT3847_91832C.1
aaccccaaaaccttaaaataaaaaaaaaacttgggaggggggcaaaaaaacccccccaaaaaaaaacaaccaaccccttaaaaggtaaatccccaaacaaaaagaataattttaagggggaagcccgggaatttaaacaaaaatggggggaaaaaaaaaaaaaggggggggaatttcaaaaaattcaacagcagttaggaaaagcccaggaagaacgtttccaaaaaaaaccaaaggggggggaagccccaaggatccaaaagccaaaggggggggttttggccctaaaaaaaaatgggcccaaaggggggacccatcctgggggcaccataaatttaaaaaacttccatcccagaaaaaaagaggccgggcaaaacccccctagggggcttaaaaaggggacccccggccttggtaaaggaaaggggtttaatcccggggaaaaaaaaaaaaaacccaagggtttggggccctttacccccaggggggccaaaggggccattagggccaaaaaaactaaccacccccttagcccccatcacatgggggcccaagcaggattggggggcagg

SEQ ID NO: 133807 - DNA, 435 bp, Glycine max
  unsure (1)..(435): unsure at all n locations
  Clone ID: PAT_MRT3847_91833C.1
gacccacgcggccgcaaancnnnaagaagaagagggaggcgnnaccaagaggcaggngcgggaaagaaacaggagcgggcggacanngccacccngaaannnggaaggcgancacggagcagagcaaacaccngcagcaagcgacaaccagagaggcaacaccanacaagaggggacaaggcggaggcagaggcagcaaaaaggcgcnggaaaccaaaaggaggagggaggggggaaagacgggnncagaagcaaacgagaaagcaaagaagaaggcccggngagagacagggangcgcggaaagagnaaaaagagaaaggcaaagcagggggggagggcnagaacacgagggcggacagcacggaacgaggggaaagacccaaggccagagggccaagagcagcaagccaggaagacagaaccagaacagggga

SEQ ID NO: 133808 - DNA, 411 bp, Glycine max
  Clone ID: PAT_MRT3847_91834C.1
tttcttgttcctcaccaccacccttttttgtgggacccaaaatttctaatatttctattccaacaggcataattgggttctccacaagtgctcctaccttaaaaggccttaatggaaaaaatgaaccccctcttttatgaccaaaaaccctacattatatgctaaacgaaaaaagatggagcagctctaacgtgggacccacacccaatgatctcctaaaaggggatacaaacttctcccccaatgacttgttcaccatctcatattctgccgaaggagccggaaccccacccttagaaccaccacttgaggaaccgccgctagaaccaccggacatgtgctcttcaatcttggacacagctttgtttgcagcatgaagcgatgacttgattttatcaacaatatcccctg

SEQ ID NO: 133809 - DNA, 639 bp, Glycine max
  Clone ID: PAT_MRT3847_91835C.1
gtccgggttgtcagcgctggtgagaagagcagtgacgaagctcagtctccaattccaaaccccttcttctctgtctctctctccttcttccctctccatttccaaaacaccaacaccaccctctctcttctctttccgccaccctctttcccattcaacccacgcttccaaaaccaccaccagccctcctccttccttcgaattccagctattcatccctccggggattgaacccgacgaggtcgatgactccacggtccttcccggctccaacatcgccgtcggaccctacgccggccattcccacatcaaggacgtccagttcgtaaagagtagcgcccggttcgtaaagagtagcgcccgcgccagggattgcccaaaagacaaccgacctgaattcgccgttcttggtcgctccaacgtcggaaaatcctccctcatcaattccctcgtccgcaagaaagagattgctctcacttctaagaaaccagggaagacgcagctcatcaatcacttcctggtcaacaaaagctggtaccttgttgacttgcctggttacggctttgctaaagcacctgaagctgctaaaacggattgggcctcattcacaaaacggtactttttggacaaaagtgctct

SEQ ID NO: 133810 - DNA, 536 bp, Glycine max
  Clone ID: PAT_MRT3847_91836C.1
gtttaattctgagtttggcaatcgtctccctccccccttccatttcggtcagccttcgaagaggggtcctcttgcctggggcggccgcgcagcctgtgacgctgagctactagtcttcggccctgccaactcctctggctccgtcatgagccggtctgtgtccccggcctctgccgtttgggctgcagtgatccgcctggggcttgcactatgtgggggccttagttcggagtctcgctttcggctctctcttttgcttgatttctgacttgctgggcccctgggaccactctccatgggtggacctgttcccgcagtccgcgagccaccctgcatccgccttggcttttcctctcgctccgctatccgccgtgttgtctcacctgcttcggccttttctgcgccggagatcccctggggagtcccagaatatgtctgccgggttggtgttcactctttgagctctcagttatgtaagattaatgatttggaattcccgtcgtatcagtcgctctccatttcctaacaaaggaaat

SEQ ID NO: 133811 - DNA, 347 bp, Glycine max
  unsure (1)..(347): unsure at all n locations
  Clone ID: PAT_MRT3847_91837C.1
tgcctangtaaaaaaaaaaaaaacttagaaaggagaggggggaaggggagaaagggaaaggaccatgaagggggaaaataactggttactgggattaccattcccttgattaaaactttggttcgctttttcttttcattggttttcttccttttctacccctttgatcttatgcaatcttcccttatggatccctttgatttgattcgcaaagggggttaattggttgagatcttgtaaagggtttggctttcctaatggaagggtttggctgaagctatttggaatatttgctggtacatttttggagggccatctatggtttaagcattttggccatattcttg

SEQ ID NO: 133812 - DNA, 163 bp, Glycine max
  Clone ID: PAT_MRT3847_91838C.1
tggcgcctgcgataagaagaccaggccagtggatccagtggttaatccagatgcagctgacgacagcaatcccaagtgggagcagcaagttgataagtgctgcggagaaagccccacccaacaaaatgtgtgcgcgagcgatgaaagcagtgtgtatgggaga

SEQ ID NO: 133813 - DNA, 202 bp, Glycine max
  Clone ID: PAT_MRT3847_91839C.1
gaccaaccgggagaccatggaattgtcaaaagtacaaactgacagtgtgtatatttaatttaaagacttatttaaaaactcacaagctctcacctagactttggagagcagtctgttttctgtaatgtctgatactagaaactaatttgcttatttaagtggtatccaagatttgaggatgtattttatagacaggtctgtt

SEQ ID NO: 133814 - DNA, 728 bp, Glycine max
  Clone ID: PAT_MRT3847_9183C.1
cggacgcttgggcgtttcgcgtgggctagggaggggaattgtggattttcacggggagatggttttgttagagaactatactgcactcaactacacaggtctagtgaagataataaagaaatatgataagcgaactggtgcactgcttcgcttgccatttatccaagaggtgctgaaccagcccttctttaaaattgatgtgcttaacaagcttgtaaaggagtgtgaggtgatactgagtattcttttcaacaatgactggccttcaattagtggggattttgaggaagatgaatatggctccacgactggaaatgaaagcaaagcgacgctgatgcatgttccaaaagaacttgctgaaattgaaaacatggagaacacgttcaccaaactaactttatcagcactgcgtagcttggaagaaattaggggtagaagctcaactgttagcattttctcattgcctcctttgcataactaggctttgcaactgcaagaggattggaaaataaaatgactgcactagcgactgcaaccaaataggtcctcaggataacatagatcttctcgtgtttatcttcacatctatcttaatgtttattagaaaagaaatagacacagaatttagacatgatttgtcatttatacaagaggatccatttccctgtctcaatggtagattttcatatgaaacaaaagaaggaaattaatgcatactactctatatt

SEQ ID NO: 133815 - DNA, 556 bp, Glycine max
  Clone ID: PAT_MRT3847_91840C.1
aagatttggtggagggaaattatcgctttgctattaagatctacctctagattggaaaaagtttcctctacaaaagcacaatttgatagtggaaaaaccttcatatatgatatagtcggtgctggttcacattcttcagaagattttgctgatgaggaagattaagaaaaacccaaaaagattgatgccagattgagacaaagaatacattcttattataatgaggaccaggctcagatggaaacaaatttgtgtaaattgcctattgatgaggttgaaactactaaagggtccatgttggatcttaaaatttctcaatctaaaattgcacttcccaaaaacacagggggaggaaccattctgcgtattgatctattggcctattttttgacctagggcagatttggagcaagagttgatttgcagcgcactcattgtataaaggaatgattaaatggtggccacagttggtattcctgagaatacatgtatagcattgcactgtgctatgaatagttcttttagggggcgtgccagttctgattttacactatct

SEQ ID NO: 133816 - DNA, 1981 bp, Glycine max
  Clone ID: PAT_MRT3847_91841C.1
cccacgcgtccgtctatctctcctctatccttcgtgcccacagtcaataatgtctcttccaactccatcgctcccccttctccgttgcatccattttcacgattccaatccattaaaaatagaaagccaaaaccccatcacattcctagaatcacatgcagtggaaaccaaaacaatccaacaccaaaccctaattcccagggagaacctccacatattgtaggacataggaggaacgttctacttggcctaggagggctttgtggtgctgttactcttaacaacaacaacccttttgcctttgcagctccaatatctcctcctgacctaaacacgtgcggtccaccagacctacccgcaggtgtaaaacccaccaattgttgccccccatcttccaaaatcacagatttcaagttctctccctctaaccaacccttgagggtaagaccagccgcacatttggtcaacgatgagtatctagccaaatacaaaaaagcccttgacctcatgaaaaaactcccctctgatgacccgcgtaatttcacccaacaagccaacgttcattgtgcttattgtgatggtgcatatcaccaagttgggttccctgacctcgatctccaagtccacaactcctggctcttcttccctttccatcgttggtatctttatttctatgaaaggatcttggggagcttgatcaatgatccaacctttgcccttccattttggaactgggatgctcctaagggcatgcaacttccttccatttacgcagaccctaaatcacccctttatgacactctccgcaatgccaatcatcaacccccaacactcgtagacctcgacttcaatctcgaggatcctatttccaatggcaaaatttccaacaacctcaccataatgtataggcaagttgtgtctaacgggaagactcctacattgttccttggaaatccttaccgtgctggggatgagcctgacccgggttttggatcagtagagaatgttccacatggccctgttcatctttggaccggtgatatcaaccaacctaacattgagaacatgggaactttctattcagctgcaagagaccccattttttattctcatcattcaaacattgataggatgtggtccatatggaaaacacttggtgggaaaagaagggattttactgattcagattggttagaatctgcgtttctcttctacgatgagaacaagaaccttgtgcgtgtgaaggtcaaggattctcttgacactagaaaactagggtatgtttaccaagatgttgacattccatggttaaattctaagcccacgccgcgtaggtcaagggttcagaaggtagcattagcacaaaattttggtgttggtgcagcacatgctgctgagacttcaaggaatgtgaagttcccactagtgttggattcagttgtgagcacaatggttaaaaggccaaacaagtcgaggagcaagaaggagaaggaagaggaggaagaggttttggtgattgaagggattgagtttgagagaaacacacctgtgaaatttgatgtgtttatcaatgatgaagatgataagcagattcgaccagataatacagaatttgcaggaagctttgtgagtgtgcctcattcacatatgcacaaaaacaaggacatcattacttgtttgaggctgggacttacggatttgttggaagaattggaagcggaagatgatgacagtgttagggtgacgctggttccgagatatgggaaagggcgtgtcaaaatcagaggcatcaaaatagagcttctttcggattgaaaattatctatatgcttcaactacttatatatgtgtgtgtggtaatacatatatggttactagtttccaataaagtgtgtaactcataaagagatattatgtatttcctatcatatgctgattcatttaatacttgataaataaaataaaagattaatgggtatgg

SEQ ID NO: 133817 - DNA, 451 bp, Glycine max
  Clone ID: PAT_MRT3847_91842C.1
agagagacctgatattcggcacgcagaatgtctggggaatgatatggtgggagagacgtgcaatttgcattaaccattatggggaagccctacattaccacgctgaaacgactgatgaaggaactgtatgttaacacacaacatatctgagggtccgcaattagtttacttgccactcaatgcttgttttcaagcacgacttttcatttagggggcggtcctatcataagctggcgggccatcatcccgtaccccactgccaacagatgatcaccgatgtttctttactcttgtggcaccctagctgaccttatatacaaagtgaggtcaatggccattctgggtattaaagcatacacgattgagagacggcatccatagacggctaaagaagagtagcccgattgcaacttgccaatctaagggaggtgtacaaaaagaaatatatgac

SEQ ID NO: 133818 - DNA, 437 bp, Glycine max
  Clone ID: PAT_MRT3847_91843C.1
cggctgcgagaagacgacagaaggggaataagaatataaagaagattgttcaaaagatgacagtgtcatacaaagattggcatgagatgttgtctttcaccctacatggatacagaaccttggtgcgaacttctactggggcaatgtcgtattccttggtttatgagatggaggtagtactcccatttgaggtagaggttccttctcagaggataatggcggagtcaggcctagaaaagtcagagtgggctcaagcgcgctatgaccaacttaaccttattgaaagtaaacgtttgggcgccatgagccatgggcgtttgtatcaacgaaagataaagaacgcattcgacaagaaggtgcgcccgcgcaagttcaacgaggggggcctcgtgctgaagaagatgtcccaccctgttaaaataatcgagggagggggg

SEQ ID NO: 133819 - DNA, 251 bp, Glycine max
  Clone ID: PAT_MRT3847_91844C.1
ggcagattccaacaaacatcaaataatgcaggtatgaactatcaaggtcccggaacaagagatgcattcaggtcaccactgccgaattggaatcagacaaggcatgcgccggtaaatgctaacgttaatccaagaatagaaaacaacaggcaagcttttacacttcctggatcaagacactcaatgccttcccatgagaatatccggagtcctcctcctaatgctcctaatactcctagacctggttatgg

SEQ ID NO: 133820 - DNA, 509 bp, Glycine max
  Clone ID: PAT_MRT3847_91845C.1
catggtctagctatctcgatcgaactgtccaaggtcctgtcaccggcggcctaccagttcaactacggtacaacggtacagcgttaagaggggcgccgacagcttaggcaggtgtaatagcacgtttcgcggttggcaggaaagggttgtaaccgatgtcaagtgttaataaccgagcagccgatggggcccagaaggcacccgaggtggttcaataaggcgggcttagcgtggcgagtgattaggttggtgcggcacaacacaacagtaataacggtgacgttgttgaagctaccaacaacttgataataaaatgggttgggaaagccaaacaaccatagcccaacgtgatgtgaggggttgtaacacgtggtgataacattaagctgccggtgaacgcttggggcgttaagcacaacaaaagctgcagcggccgtataaaggcagctactatgggaaacggtcaccacgaaggagggtaccgataacaaaaccatggcgtgtgagga

SEQ ID NO: 133821 - DNA, 262 bp, Glycine max
  Clone ID: PAT_MRT3847_91846C.1
gatccccagtcacatacaaaagttagggttcataactttcccattccctctcgcatgccaatctcaatacaataatcaagtctttcgtacatttttcatcaatctcgtctagatcacaacatcacgctgaccacttctgttagcaaggccttcaatgtcacagaagtcctcgcactagcatctcataccatgtctgacatgatcgcagtgcagcgcaccaatggcgcgatcccggtcccgaacatcactagcagcatgatgg

SEQ ID NO: 133822 - DNA, 764 bp, Glycine max
  unsure (1)..(764): unsure at all n locations
  Clone ID: PAT_MRT3847_91847C.1
cccacgcgtccgcaaagaaaaagaaaaagaaatactcctccatggctatatatcgagactcatcccctatggcttagaactgggagtcacacacacactctctctctctctcttgaccaaaaaaatcaacaacataccaagctagctaacatgcaggaggacaagaagatgaaggtgaagaaaggattcctcgctgttcaagtgggtttagaagacgacgacgaaggtggctcttcccctcaaagattcgtgattcctatctcatacctttatcaccctctcttcaagcgccttctggacaaggctcgtgaggtttacggctaccacaccgatggcccactcaagctcccgtgctccgtcgacgatttcctccatctccggtggcgaatccagaaagagtccactcctaaccaaaaccaccataaccagagccaccatcgccttccacacgctctgcacttccactcttgttaggggctgtgacccttctttttctttctctcttcttttcagtgtgtgtttgtgtgtcgatagtagtgctaattagggaattgacgccgctctgtgttttaatgtccagagggaaatttataacaacggagagaatcaatttctctctgcttccaaattacaaatcttcttctgcaggatttacttgtctagctttttttttctttttctgattaaactgtngaaaatactcgactctatagnntgtacaatttaagaattggtcttacatgagggaattgtgaattaattct

SEQ ID NO: 133823 - DNA, 313 bp, Glycine max
  Clone ID: PAT_MRT3847_91848C.1
ttgtgaacagaccttgaccctaaaagggggctttttagagcacttccgtgtctctgccgaacaacgattgatgtgagtcccagacattctaaaagcgcaagatcctagataattaggcactcacactattattttaaacaaagatacaaacttcgcatcctgttcggaccaatccactggaatcataataaagagccatcgagaaagacccaagcacagcgtgaatgacagacgcatctgcgccacttggcacattagaattggcacgccttaaaagccaccgcattgagggtccgttgaacccaccacgaac

SEQ ID NO: 133824 - DNA, 264 bp, Glycine max
  Clone ID: PAT_MRT3847_91849C.1
gtaatcctagtgaacacttatcaggactcggaacccgatgcctagagagcggctgatacgttcaccatgataccaattgtgccgctgaatattccctctgctatactggaccgttaagatcccgcagatacttgcaatggcggagatctcttgtatgcttactatgatgacgatgaacgggtgtactcacactctgagttatctgccgatgatgggtcattcgctaccctatctgtgttagctgattgacagatgaatgagctt

SEQ ID NO: 133825 - DNA, 266 bp, Glycine max
  Clone ID: PAT_MRT3847_9184C.1
gtagacggccgcgagaagacgacagaagggggggcagatggagaaaagttgcccctgattccccacaacaggagacaagggagaggtccggtcaggccagacgggggcagcaacaaaaaaccgaagcggaaaagcccaggcaggcgcggttaaaggcgccagaagcctaacaaggaccaagcgcagaggaacagaaaagcacaaacacatatcccgctatgaatgatcacaggaaccaggcaaagggtaagcaacaaccacgaggc

SEQ ID NO: 133826 - DNA, 283 bp, Glycine max
  unsure (1)..(283): unsure at all n locations
  Clone ID: PAT_MRT3847_91850C.1
ggcggaaaaacgaaaggaatgaatctgtcatcaagggaaaacctgcgttgatcctggacaagcttggttaacatttcaaaatttccctcccaaacacttaaanaggaaaacaattttaggttttggaatgggaatttgggtggagattttttatttaaccccccattcctcggggcaagggcttttgggtttaaaaaccttccccctttcggttacccttcccttaaaagggttgaaaaaagggccatttattttgggaaaaaaaatttttttttttgggttt

SEQ ID NO: 133827 - DNA, 642 bp, Glycine max
  unsure (1)..(642): unsure at all n locations
  Clone ID: PAT_MRT3847_91851C.1
gtcaaatctactcttgtgccagggtgtggtctccacccccgtctgtcccaatgggcgctggcaactgccaggtatcccttcgagacctgtttgaccgggcagtcatggtgtcccactacatccatgacctctcctcggaaatgttcaacgaatttgataaacggtatgcccagggcaaagggttcattaccatggccctcaacagctgccatacctcctcccttcctacccctgaagataaaggtcgggcccaacagacccaccatgaagtccttatgagcttgattcttgggttgctgcgctcctggaatgaccctctctatcacctagtcaccgaggtgcggggtatgaaaggagccccagatgctatcctatcgagggccatagagattgaggaagaaaacaaacgacttctggaaggcatggagatgatatttggccaggttattcctggagccaaagagactgagccctaccctgtgtggtcaggactcccgtccctgcaaactaaggatgaagatgcacgttattccgctttttaatacctgctccactgcctgcgcagggattcaagcaagattgacacttaccttaagctcctgaatngcagaatcatctacaacaacaactgctaaacccaca

SEQ ID NO: 133828 - DNA, 395 bp, Glycine max
  Clone ID: PAT_MRT3847_91853C.1
gaaagtcggcccagcagatgaggaagtggcaggcaggcaggctggccccggggacttctctctggccctgctccctccgagcgctccgccgttgcccgcctggcccctacggagtccttagccaggatggaggctgttgtgaacttgtaccaagaggtgatgaagcacgcagcccttccagctccgtggcttcatgattgtctacaacttctcactggtggcactctccctctacattgtctatgagttcctgatgtcgggctggctgagcacctatacctggcgctgtgaccctgtggactattccaacagccctgaggcacttaggatggttcgggtggcctggctcttcctcttctccaagttcattgagctgatggacacagtgatcttta

SEQ ID NO: 133829 - DNA, 289 bp, Glycine max
  unsure (1)..(289): unsure at all n locations
  Clone ID: PAT_MRT3847_91854C.1
ctcccttggtgaccaccacactgaccaaatcgatgtcattacctacgtgagatacattaccttgctttctcgcgtgattgcccgatctactggtaccactatgtatctagggctattttacaggcttgcatgtgatgctcttatgtaccttgcaccagtattgctggatcaaggtgatggtgatccagaacaggcgtatccatgatatacatttgatgattacatgacgctgtatgctacactcttgattacagctaatgagcccagattcgaaacactcaangccata

SEQ ID NO: 133830 - DNA, 475 bp, Glycine max
  unsure (1)..(475): unsure at all n locations
  Clone ID: PAT_MRT3847_91855C.1
tcgctttcattgngccactcccctaacaactcctttcttcctctttttcacgatctcgatctaccctcttcttccgtcccatcgttgtactgtcgctcttcctctccctctggtgcggcgatctgcccttactccgctgtgtcgccactcttccttcgttttgccaccacactccatctccctctagtatggtgttctcatttgttcaaatcctgatctccatctgttgcatcgcttgtcgctctttctccctctcgtaagtgtttctttctccctctctgcctcttcattttgttgaagtttggttttgatgtggcttcgatcactacctttgttgaatctcaaagtgttgcctccaatcttgggttttccctacaatcttgggttttccctattggactttcattaggtgttatttagagttgtgagtgagtcttttttcttatttcctgaatatttgcttgctaaaatatat

SEQ ID NO: 133831 - DNA, 479 bp, Glycine max
  Clone ID: PAT_MRT3847_91856C.1
cccatgctttcgctccatttggaataggcaattccatccttaggaatgatcacaaccgaaggttcagatgaattgagaggccacttatcaagtcccctttgcatcatgatcatggaattggcattgtggggcacgctctgcacttgccagataaacaactgagacgctagagagagacgagttagtctgtctcggtgcgtggcgctggccagaaccacggagcttcctactagagtatgtgtaagcgaagcctaacttagactctttattcactaacagacctagtaggacctagtagtcctgaacatggaggagatgctgggataagttcattaaactacaatatcttattagaacccgcccgagacaagactctattgacagtgaagtgatagtgtgctacttatgtgtcaacaaaacagacagattctctacactaccattaaacaccttaaccagattaaatcaacattcagtta

SEQ ID NO: 133832 - DNA, 269 bp, Glycine max
  unsure (1)..(269): unsure at all n locations
  Clone ID: PAT_MRT3847_91857C.1
ggtttgcattgcctcccttgcctgtttgttcaatttattttggcccnctctgtttgagaactcctttcatctctttcctttaccactcatatcggcgcatgaacactcttgtncttccaccagaacttgataatgctgtgttttcatanctttcttcancctacccggggccgtccccttttttcactttcctccatctctgangattttcttcnctctcnccgttttttgtcacctcctcctcctctaattgttcccgttggacctct

SEQ ID NO: 133833 - DNA, 431 bp, Glycine max
  Clone ID: PAT_MRT3847_91858C.1
caagaatcaagatctcctaatccgactgcgatggttcccatgttttttttcttgtaccatgccctttcagtctcacccacaattcactgatcaaagtcccttatttaatcaacttactaatctcgcaccaaaccaaaccactcatttggatccatggcaatgttttctttctagacagtgacactgtcacatcacattcttttcattcatactcaccaaccaccagatctcaataccttaaatatttatttacactcttgatttttccacgttcgcattcatggaacgtgcacggaggctagcaaacagggcgattctgaagaggctaatttctacggcgggggataattcccattcccttttaagacccaaaccagagaactcgatcttaggaagcaacaaaaaactcttacactatgtcccatctcgat

SEQ ID NO: 133834 - DNA, 136 bp, Glycine max
  Clone ID: PAT_MRT3847_91859C.1
gcgcatttctagagggagaaacaaagccagaatcgattttagagagagaaacagcggagggcgcatgcgcgatggttcagatcgcgaggaggaatacgggacggccgtcgaaggcggatctggcgcgccgtctccg

SEQ ID NO: 133835 - DNA, 276 bp, Glycine max
  unsure (1)..(276): unsure at all n locations
  Clone ID: PAT_MRT3847_9185C.1
tnaganncctcaattttccgggaaaaccntacncanaatggtttcccgggagcanaccanttggctcttcgattacggattgatcgangatattcccgttccggangnnacattcggngtcaannccctcngacttcanatgtganattaacgccttgaacgcttcctgccagtgtcggagttgacattgatngctgcgttgagggatnntnanagtgtcgaanantctggctcanacataaagggtaggtcnanagncatgngcngctttangag

SEQ ID NO: 133836 - DNA, 155 bp, Glycine max
  Clone ID: PAT_MRT3847_91860C.1
gtagagtatggctgtgaatggtgcgagcgtgatgcggcggtgcagcgtggctgcgaggtatgacataacctcgcacacccttcttccaggttcttcttacttatcttcctccaattccaagcccactactatattatcatcatttatgggaaccc

SEQ ID NO: 133837 - DNA, 937 bp, Glycine max
  Clone ID: PAT_MRT3847_91861C.1
tgcgcatctcggcagtcgattgtctctctggcccattacttccccccgtcgccgtcttccctctctccccctctctccttccacccttcctctcgcctggtcctcgtcatgtcactctcttctaccccatttcttcctttcatctgcgttccactcacctcccaccttgttttcgcctagctactgctgctagaatgagagacacaaaactacctgaagtagtattcttgctactcttcaccttaattcttgcatctaaatttacgcaaggaattagaacagaagaatcggtatctcaatcccctcaaccccaaagagaaccaagtttggaggatggcaatgaggcatggaaaatgaggaattctaggagactaatgattggatccactgcaccaacttgtacgtacaatgaatgtagaggttgtaagtataaatgcagagctgagcaagtgcctgtagagggaaatgacccaattaatagcccataccactacagatgtgtttgtcatagatgatatatgatagtccataatgaattctatagcataatgtaacttttgagttctagtagacatgagtttatctcctgtaagtcactgccaagagaactttcaattccttattctagctagcagttgtgagtgcctgtgctaaaaggtgcaaaaattttgcatttgctatgttgtcattcaattaataataagaagaagcctatttgctgtgtttcaaaaaaaaaaaaaaaaaaaaaaaaaaaaaaaaaaaaaaaaaaaaaaaaaaaaaaaaaaaaaaaaaaaaaaaaaaaaaaaaaagaaaaaaaaaaaaaaaaaaaaaaaaaaaaaaggggggggcccttttaaaggatccaattttacttccccgggcttgcaacgttttagtttttttttggggcccccaaatttaatttcacggcccgggg

SEQ ID NO: 133838 - DNA, 166 bp, Glycine max
  Clone ID: PAT_MRT3847_91862C.1
ctccactactaatcactctaactctctactacctactcatcattcccctttacactatctcgcactccaaactcattttcacttacccactacccatatcaaatattctcctcttcaccattcctataaattccaatccttctacataccccattaatcccctatc

SEQ ID NO: 133839 - DNA, 783 bp, Glycine max
  Clone ID: PAT_MRT3847_91863C.1
attgcaacacaaaagtggaaagaatgagagacacaaaactacctgaagtagtattcttgctactcttcaccttaattcttgcatctaaatttacgcaaggtcatcgtcatgtcacactcttctacatgaattcttcatttcatatgagttccattcaattctcaccttattttcacctagtttcttctactctctctccttttatgattttggatcttcttctcatactaaagaatcctactttcacttctatgtcattgtggagcttcttcaattaatggttttcttcatattgagtattcacaggattttaaagaaaatcacttttctaattttgccaggtgctaccattcatttgtattttttattaaactttgtagaggaacaatctaggctcagtttccctatgttgatgaattttatttccattagtttcttgagattgcattttttgtgtatcctaaatttgccactctattgttgcaggaattagaacagaagaatcggtatctcaatcccctcaaccccaaagagaaccaagtttggaggatggcaatgaggcatggaaaatgaggaattctaggagactaatgattggatccactgcaccaacttgtacgtacaatgaatgtagaggttgtaagtataaatgcagagctgagcaagtgcctgtagagggaaatgacccaattaatagcccataccactacagatgtgtttgtcatagatgatatatgatagtccataatgaattctatagcataatgtaacttttgagttcta

SEQ ID NO: 133840 - DNA, 194 bp, Glycine max
  Clone ID: PAT_MRT3847_91864C.1
atcggctcggcatagctagaaccgtacgctcatcgtacgatgggattcagaagcaaccgtctagtacaaagccttaaaggctagtcactcaataggaaatacagggctgctgacatattctccccctacggtgtgaatcatgacccttgcacctgatttaataatgaacatcttgtgacgatgtcacgaaagat

SEQ ID NO: 133841 - DNA, 340 bp, Glycine max
  Clone ID: PAT_MRT3847_91865C.1
ggtcaagcgttctgatatcactccagcgactacgacctggtggtgttcgaattcaatctcaggatcagtggtgtcctcgctcgctgcgagcacagcgtcatcctagctgtctcccattgggctacctgagagcttctctctctgtcactcctgtcctcttgtgacatgtattagttagtcgtcagcgcgatggttcacttctctgggcaaggtacaatgtgctatctgcatcttgcgtagaggctacaggactcccttgtgattgaacagttcgctgatcatctgcaagattacattatgattcttgttgtctcgaatgttcatcacttgggttcacgga

SEQ ID NO: 133842 - DNA, 449 bp, Glycine max
  Clone ID: PAT_MRT3847_91866C.1
gctagagctgcgagaagacgacagaaggggatttgggaaatgtacagctcatttctatatcgagtgatgccaaaaatttagttacatcagattttgagggtaaacatcttcaagtttggaagtgtgatttaaattcaggaaatgtgggtagaggtcctacacttcccataaggcatcctccattaattttagactgccacagtggttgcaataaagaagatgtagttgttttggcagttactggtagaggttctgcctatatatggaatttgaatgcttcctccgaagatcagatacagccaactaaattgaacacgaagaccaaaatagttgaaacggagaaggaaaatggtgtatgttcaaagaaaaggcatgcttcgattattgcatccagattacaacctgtagaggaagataaacagattaaagctcttgtgacttatggatct

SEQ ID NO: 133843 - DNA, 352 bp, Glycine max
  Clone ID: PAT_MRT3847_91867C.1
atgacatattattttttcttcaaaaaagggggaaaaaaagccccggatcataacaactcaatggagccaaagagcacccccttttgagcccccctcataaaaaacgggatccccaaggcccaggagtaatacatactgtccctagccccctgtatatgctataccccccaataacgggaggaacccggacactggtaaccccccccaacacgaggttttccaaaccggggggaaagttatatcccacatgggtccattaggcggggcccaccacccggcatggttaacccaccaaggccaaaaaaaagaacaccggaggcccaaaatctgggcaccccacccgaaggagtta

SEQ ID NO: 133844 - DNA, 250 bp, Glycine max
  Clone ID: PAT_MRT3847_91868C.1
gtgaagcgagagaccgaccatggcggctcgagtgtggcacctaatgacgatcctcattaagggaagtgtggctggaggagcagtctaccttgtgtatgaccaggagctgctggggcctattgacaagagcgatgctgatctgcggaaggccgacgaagctgtgccaccaggaatgtaccagctcatccaatatgtgtgccaccatacgggtctggagatgtcacagatcccagcccctgcaaagattaac

SEQ ID NO: 133845 - DNA, 224 bp, Glycine max
  unsure (1)..(224): unsure at all n locations
  Clone ID: PAT_MRT3847_91869C.1
tttaaatttattaatttattaatataatttacccanaaaaaattctcatcggggttatttgtgtataatcttttatcattgttatcacttgctttctctaaccaaaacaccttgagagctcgaatttccgagcattaccttacgcatgcaaaacaaaagaaatgggcttttctatagaagccacccccccccaattccactggccgtgggggcccaacaacaaa

SEQ ID NO: 133846 - DNA, 238 bp, Glycine max
  Clone ID: PAT_MRT3847_9186C.1
ctcctttcaatatgagtttacttcactcacaagtcccctgaggttgaaaatgattgtgattttaaagtgcatctgttcttttcatcattcgagttgcttgaaaagcttcatgaaaaatggagtacagtggagaaacctccatacccagctatgtattctagtatttatggaggtatcatacttgatccagcattgttggtattccccattgatgatcacatggtttacagatggcatg

SEQ ID NO: 133847 - DNA, 412 bp, Glycine max
  Clone ID: PAT_MRT3847_91870C.1
aaaggtattcctcttaagcttgttaccgagtttccacactgcataccttacgtcttcccaattcgaagttaatttgcaagatggctaaggaaaaggatcagatcaacattgagcgcggttggtcatgtgcaccctgaggacgccaccaccattaacgagctgaacaatcctgttgtggacaaagaagctccagggcatgccacatgacggcatgcacgtacggcctcggaggggaaccagaaaattatgttaaccaaacaatctggaactctaatgcattactgtcatcatcagtgtgctacttaacctacctttgctatggttacgttctttgagatgacagtcttgatgaacactacccttctgatgcattgcctttccttgaaagttaatgcatgcttcttatcttctg

SEQ ID NO: 133848 - DNA, 270 bp, Glycine max
  Clone ID: PAT_MRT3847_91871C.1
gaagatggctacattgtcttgcatacagcaggtctggggcgaggagctgaatactatcctctgtgcgttggatcactggctattcacttgtttgctggttgcggtatcaacacgagctgatctagtgctcttgaagatacctcagaatagggccctatcttggtctagcatgattttggtttgagtgatacatcatcgtgtattagaggcccttgatcatggcgaatgctatactcagtgatggtgttaaaatatatgcagttaggcctg

SEQ ID NO: 133849 - DNA, 317 bp, Glycine max
  unsure (1)..(317): unsure at all n locations
  Clone ID: PAT_MRT3847_91872C.1
agtacttttttggnaaggagaacaaagcacacgagcaggaaaggcaggaagagaccgccgaagcaaacacaccacacgccaaggcggaggccgccagggggaacaccagcccgagcagagaaagaacgcaggggcgccaccaaccgccaagaaccacaaaacgggagaaagggagccagccacgcggacaccacaaagggagaaacggccaaagaccccgcacaggaacaggaccgagggcaaagagggaaccgaaggacgcaccaagacgctcaagggggccaggacataaagaaaccgacgacaagcacacacct

SEQ ID NO: 133850 - DNA, 530 bp, Glycine max
  Clone ID: PAT_MRT3847_91873C.1
atataattaattagtagatatatatttaacaaatcatgtacatatttaagaaatcataacatgaaagagtgattttaactttgatcattaggaggatttcttacggcaatatatattctaggaaatcatcacccttataattcgtataatatattcattcactctacgtctctctctattattaaattggagagaaaaaagactcatcaacttcaaccacattaattaattttcccacttagcaatggatcctcttacgacactagtagagatggtaattgagtccgcaaaagcctttatgcgccgcattgcaacttctaacgtgtcttcagacatgttggcaaagcataccctgaaccaacctggttcacagcagtggcaagaagagccaggagatatgttcaacccaactttgcaaagaatgttcatccaaagctccttctctgcctcaaagtagtggcagagcccaataagtgtctcatgtcaacccaacagaacaacccagcattgcttttcaaacacctaatccc

SEQ ID NO: 133851 - DNA, 343 bp, Glycine max
  Clone ID: PAT_MRT3847_91874C.1
ggcattacacgctcatcacaattcgaactaaggttagattgctgctgcagagtttcatatatcagttcatccctttagatgtcgtaactaatgagtgggtggtgtattctttgagaagggatccagtcgccacctgggtggatatccatgaggaaggggtttgaaacttacactccctttgattctcgcattttaacgtcctcagaccaaacaccactcaacctgatggtacgctatactaacttcacgtaactctcactgcctcccttcacctcgtacatggcttattaacttcatcattctcacaatgcacaaattccttcaaactcaacaacacacacac

SEQ ID NO: 133852 - DNA, 422 bp, Glycine max
  unsure (1)..(422): unsure at all n locations
  Clone ID: PAT_MRT3847_91875C.1
tacggctgcgagaagacgacagaagggggaagaaaaaaattgattctaaaaatcagtctcaacagagataaacaaatggcaaaagcttcattgttgtttccttacttgatagttataattctcatagcatttggaacaggttttgcaaatgcatgtaacttcccgtgtcattctcggaacggttgtggtaatctacactgccctggttgcttaaagcaatgcgtcaacttttgttgcctttgtgattgtagtccaccacccaatggaaatgtttcataaacaaagaatcataataattaaataaacttgagatttcattgctcaaattatgatgtatgaactccctgcctttgcatttgtaataagagaagatgaaataatcaacaacattggcatctctctaaaaaaaaaaannnnaaaaa

SEQ ID NO: 133853 - DNA, 667 bp, Glycine max
  unsure (1)..(667): unsure at all n locations
  Clone ID: PAT_MRT3847_91876C.1
cccgcgtccgcccaaatttcgtccaatcctatggcaactgaattggcttttgctaaacatcatacaagatcttcatcaattctcccaacggatcctctccagcaactatattgcacctttcaacaggtccaaccgatttcggcacatgattgtgtgaatactatatggttgttgaaaataacaattatagtaatattatgaaacaagtattaacaatgtcaatttgaatgaaaacaagcagagggaaaatcaatctacttacatcagatacatgtttgacaagatgtgttggccatccaatgaatgtgttagcgaccttctcacatactgaatctttgaagtcagaaaagggatcggagcgtcagcgtcgtaaactgttacaacactgacccaaaccacatcatctgcgtaagggacattgtgtaatggtggtggcactatcaaagacttttcccaaggcccactagccgtgtacgctgctcaccaactatgtacaagcccattagtgttgaaatcaatagtagnaaggatcttcaactaaaggatttgtaatagcttcagcacaacttcccttagtggtgacacgtgtagctattacgcgtgtatccgatgtctncaatgggggttgagtgttgcgaggccatttgggataactcaatttttatcg

SEQ ID NO: 133854 - DNA, 273 bp, Glycine max
  Clone ID: PAT_MRT3847_91877C.1
tacggctgcgagaagacgacataagggggattacacagagtatttagggcgtgagctacaattaaagccaaagagggacttttatgcacacagagggagggaattatattagctataaaaattccggccaccttagggttcaggtcaccagaataacacaaatacagaagcaaactaccctaaaggcttacttatagtcttcaaactaaagagcatttctgatcaatgtcctttcgatcaaaataacatttgatcagctagccaatgacacta

SEQ ID NO: 133855 - DNA, 373 bp, Glycine max
  Clone ID: PAT_MRT3847_91878C.1
cgcatgccgcgttcgtttcccgtattcgggccgagggttttttttctttttgacctaaaagatggggtggcttttcaccaacctttttacccgcttttttgttagaaagagagacgcgtttctcagggggggtcttgacgctgctggagacactcccattttgcacacgctcacgctgagagattttgtcacacccttccccacttttggtttcagtggggacactggggaatataagaatattctcttcactgtgtgggatgggggtgcccaatataagacccgccctttatggacactcttcttacaaaacactcgggggcttatctttgttgtggatagcaatgatcgtcaccgtgtttttgaggctaga

SEQ ID NO: 133856 - DNA, 398 bp, Glycine max
  Clone ID: PAT_MRT3847_91879C.1
tttttggaaaaaattaatattataaccataaatgaaataattatgtggcacaaatgtttattatctcatagcatacaagttggattcggcttatacaagttgtacatgtgtactgtattccaaagtttagaggaatagatctggtctacgtatccgtctccgtctgctaaattgcttatctcatgtcacctttcaactatcataattcttcattctatatcatgaaagtttctgtacgacttcgtaactgcaactgctattcgctgcaactactgcaagtaatgatatatgagtcctgtcggttaacttcataaccatcgatcatcatcaagcagaatccgcagcttatacaacatgcataggcgaagaatatatgaaaattcactcttcaaacccat

SEQ ID NO: 133857 - DNA, 751 bp, Glycine max
  Clone ID: PAT_MRT3847_9187C.1
aattaaaatacgttattattcactcttttatctccttcttcttctctaacatgatcaaccacaccaaaacctcactgtacaaacaaaatctgactttaaacaattctccagaagaacacaactcaaaaaatttgttcaattacctgggttaaattaaatgtcatcattgccaacccatagtagtcttatctggttcgaccaaaattgtctccggcagacgataactatagtttcggacaaaaaagaggaaactagtagcagcacatggggcagcggattagtccattttcattgcaatcagggcaacgctggaatccatactcacccacctcaccatcataatcttcttcttcatcaccttcatagtagattttacaacttccataacaagtttcacaaggcataaacctcacatccccacatgcctcgcatagtccatcgccatcaataccatcttcaatctttccacaacaatcaagcaatttctcaagtttcccctcctcatgcagttgctgaatttcctcagctccaccaatgtagttcctcccaacaaacacccttggtaatcctaaccctcccttaccatatccatggcctaatagctccttgagctcctccttgaaccctgaatgcattgacacatccctctcatccaccctcacccccaagcccttcagaattagcctcacatggcagcaatcctcataagtctttctcacgccacgcaagctagtgaaatacaacaccacct

SEQ ID NO: 133858 - DNA, 268 bp, Glycine max
  Clone ID: PAT_MRT3847_91880C.1
gggaagagtttaatatttttgtgctttcctttgcttgctgctatgagaggatgatgatgacaataattgttgcaaaatggtgttagtctacatatgatgacgctgctaatattttccatgctcgaatttccatattcccaaccaatctacatattttctaacactccaatcacccttatctaaccaattttacacaacaattatcatagacaacagagaataagattccagtatctatcataaaaatggagaagagcacaaccaacat

SEQ ID NO: 133859 - DNA, 763 bp, Glycine max
  unsure (1)..(763): unsure at all n locations
  Clone ID: PAT_MRT3847_91881C.1
ccacgcgtccgcggacgcgtgggtaaacccagtccgctgtgctacaataatatattattaacctttgctgataaacaccggagaaaattgaaaaagaaagggatagagacaaagaagacgatggagatcggaattgaaactgaacacgttacacatgctgacacagtggtcattatatggaccattaggatataggcttctcgccccattcatgtaaacccataaccttcttttatggccccagttattagtcttaattattctcaaagccttcaatgagttctcgaataatgtcaacttaacagaggtggcccattgccagatcttccatatatatatctttgattccatctaagatgtgttgttcgagtagtctagaaatatcatattgtcccaaggtttaaaacaatttaaaataactcacgcattttatttattgaactgagttagacattcaatatatctaaaactatcacattttatctgtattttgactcattttcaagtttttaatttaggagaaaaaataattatatgtgatgtgaagatttgtgagaatataataatttttcatttctaatactatacataactaagttcttggtacagaaataaaacaaacacgtcggccaaagatcaaatagcaaagggggtgtgagttgggatcacccatcgttgaatgaaaggatttacatcaacnatgaattatcggtggtcgcaaaaagctttcccctctctttatggcgcttaagggttttttttt

SEQ ID NO: 133860 - DNA, 1302 bp, Glycine max
  Clone ID: PAT_MRT3847_91882C.1
gaacacactaaaagcggctcctacaacctcgcgtcaaattacccataggcctaggaaaaagagtagttgtgaccatggtacttctgatagctatggccgttgagttccgagtatctacaagcagatagttcaaaatcgttaatgtgatgaagtgaactacaatggacttaacaatcctatggttaagaatctttggtctcctacacttaggaaaaatatgatgtaggcggatggttcaggtgagataatcccagaaatacctgctgtttggaaaatcttatatatgactgtttgggagggcacaccagataaactggtcgatatatcggttgatagactatcatacacgtagcacatacgcagattgcatctacaaatggattaccccaaatttggaaagttttcgtccttgaaactcgagacatgttcagccggattgaagagcttggatgatttgttgttgtgaacaagcatcttcttcatgacttgactgaaatgggactgtggtctcctacattaaagaataagattatctatgaagatggctcagttcagaaaattccagaaatacctgctgacctgaagaatatatacaaaactgtttgggagattaaacaaaggacattggtagatatggctgctgatcgaggatgctacatagatcagagccaaagcttaaatattcacatggatcaacccaactttggaaaactgacttccttgcatttttatgcatggtccaagggtctaaaaactggaatgtattatcttcgatcacgtgctgcagctgatgctattaagttcaccgttgacacctctgctctcagagaaaaatccaatgtggaggatgatgataatacaaaaatggcacagatggtgtgctctttaacaaaccgtgacgagtgcttagcttgtgggagttgaaatgtttcaaaagtaatgctttcattagaggcgacaaagataaatcacgtgttaatctatagctttttcaaagctttgaacatagttgtcatcaatatcatttgtattcttgcatatccttgtatcagatttatttactcagtagtataaataccaagtcagttagaatatgttcatacggaaatttgttctagtttaatgatataaggttcaactcatacatgataattttaagcattctaaattatctttagagctttgtatagtacttatggtgttaatttcatttgtacctgtttatgtattgtatgttaaatagttgaaagatgtcattgttggtagcaaaacccctgtcccgccatattctttttttcttaa

SEQ ID NO: 133861 - DNA, 269 bp, Glycine max
  Clone ID: PAT_MRT3847_91883C.1
cacacttaacacatcatatcgggggttgggggaagtgcacaaatattgatatcacacactacatactttattatgaaggcttattttattttcctatttttgttatgcacacaccaacatatcaaatttaaacaccaattccaattcatgcataggattcagcatttacaaaaaaaatattagaaatctttcgtacaaaaaaaatcatcataacaaaattatctcctattaaaaaatcttataaattttcctatgacaatatcaacaat

SEQ ID NO: 133862 - DNA, 546 bp, Glycine max
  Clone ID: PAT_MRT3847_91884C.1
gaagaagccaaaataaaaatggcaaagacataccaaatagtgctagcagggagttcttggggagttagaaacacctttcattctcttgtagccatcttaaccactcttgtagttatcactaccatttatctaagacaggatggaggacatgtatctccaaaaataaatgcctctagtagtaattcgtcatcatcatcaaagtgtgacttgttctctggtaagtgggtttttgataacgaatcttatccattatacaaagagaaggagtgcacgttcatgtcagatcaattggcttgtgagaagtttggaaggaaggacctgagttaccagaactggaggtggcagcctcaccactgtaatcttcccaggttcaatgccacagcgttgcttgaaaggctaaggaacaggaggcttgtgttcgtgggggattcactcaacagaggccaatgggcttccatggtttgcctagttgactctatactgcccaaaaccctcaaatccatgcattccactgccaatggttctctaaacattttcaaggccaaa

SEQ ID NO: 133863 - DNA, 282 bp, Glycine max
  Clone ID: PAT_MRT3847_91885C.1
aaatttttaaatatatataccaccaaatataatatggtcctggtcctttcatacggcatgcctttatttcatagataacatcatttcataatcatactcacctaactcctccatttcttctattccctctactttctctctaaccaaatcataatagtccataatcaatctttaccactctctgttcattatcaaactatacaactattatataaatctaaaccttctatttaatatattaacatctttaaccataactcctctaacaattcaattcacata

SEQ ID NO: 133864 - DNA, 392 bp, Glycine max
  Clone ID: PAT_MRT3847_91886C.1
gtaaaggaggaacatctgtgaagaccaaacatgtcggacaagaaccttgttataagagacatttatatgcattatggctataggaataaaccgtcatttgaatgctaacatatcacattgggtttatgcagggtatgggttaggacaaattgcaattagaggttgtgattactgaagctatgataagaagcgcgtgtattacaactttatgtatcaacacagaaggttatacgtattgcaatgacatgtgtattatatggactgacactgtgccatgcaaactttgtaactactagatgagttggcaagtaccaatatctattccggagtcgagcaatgactatatctacgagtatgacgatcatggagacttgtaggcagagtggctgctc

SEQ ID NO: 133865 - DNA, 296 bp, Glycine max
  Clone ID: PAT_MRT3847_91887C.1
gctgactcttgtacacatatacacattttctataattaagtgcatgctaagttcttcaagtaaggagcatgaatcacatattatagacaaatcaacattacaatgctgatgaagagagtgcaaatcttgacctcacttccactggacttacagagcactcacgctatcttcggatcaactatctgttaacctatacacagcacttatattacactcaaagtgctaaacctggtatcctgatcctgatatatataagacttggagtcatagtacgactatctttcctttcagtgatc

SEQ ID NO: 133866 - DNA, 304 bp, Glycine max
  Clone ID: PAT_MRT3847_91888C.1
aaattatcccaaccggaaatggcttttttattaatcccaccaggtatggttattccttcttccggcattcaaaatccaaaaaaaggggaacccaaaggtcccagaaccttaaccttctttagaccttgaactaaaccaaaccttttaaaacactggcaattaaccgggggggaggcttccggattaggattaccgggaaggcaaattccagccaaagaactaagggattttaaaacccagaatggtattggaaagaaagggaagctagtggaccagctgggttagttggctgtggaccaacatt

SEQ ID NO: 133867 - DNA, 412 bp, Glycine max
  Clone ID: PAT_MRT3847_91889C.1
gatgtaataataatttattaaataaacatttaattaaattattttctcatgcgtatttttattcaagtttcgataccaatacttacaacaggttattaaaatgtaattgacttttgcttctcttcctcatgtgagtaaacaaattcaaatttgtctctaatcagcgtgtgtgcagtcttccaattttaggttcaatttgattaaaaccaaagcggataaaaggaaggatagaaacgtacgcgcagaccatagaagtgacatttcaacaacattagccattgattgtacagaggaatattaaaagaaaagaaaagtagtatttacaaatgaaatcatttgagcatcataatccttgcaaattcttcaaaactaacttgaccatccccatccaaatctgcctccataatcattt

SEQ ID NO: 133868 - DNA, 267 bp, Glycine max
  Clone ID: PAT_MRT3847_9188C.1
gttataactagtatgctgagggatactctatcctatatgagctatttcttttctaatactggcagtgaagtgcattcttatgacccccaagcaatattagttgaacatattaactaataagtagtttaccaagtgttcttatgattcattctaatttctgatgcaagttctgattttcttttttaatttaaactgtaaatttatggaagtgattgtggtatgaccagaattaatgtttactcaggtgctttaacggctaagccatat

SEQ ID NO: 133869 - DNA, 192 bp, Glycine max
  Clone ID: PAT_MRT3847_91890C.1
cgacagtgaaccttaccgtgcgcattccaacaccatggctgaatacggcctgaacgggattaacaatttgaactaaatccacatctagatcgactacagaaataacgtgcccatggactttaatgcaacctaggatgggggcacacgtggcataagctgcgctgcggacattaactgacagagccctagtga

SEQ ID NO: 133870 - DNA, 439 bp, Glycine max
  Clone ID: PAT_MRT3847_91891C.1
cggggggaaaaattggaccttaaggggattacaatgggacaaaaaatggacatttttttgggcaaaaaacttccaccccccctttttttgtttaacagaaaaaaaaaacaaaaacttttcctgttttatgtcaaaagcctctttttttggcccacccaattttcccaccggctaatttatttcaaaccggcaattccccataaacaaaaaaatcttaaaagggggtttccaattcccccttggtccttccccccagggaacccacccccccctttttttcacccttcggaaaaaccccaacccaaggggtccaaactaaacttaatattggaactgggccctttcctaaggaaaaaaaggttttcgggccctttttttttttaaaaaaaaaaatatccttttttttccccccaattaaaaggaaaagaaaattccaaac

SEQ ID NO: 133871 - DNA, 209 bp, Glycine max
  Clone ID: PAT_MRT3847_91892C.1
gttgtgcagaacatccacatgattctcaattacaactatgaatacacaattattggtgcaagaatgtgatggcagccctaggtattctacatgtgagaagccacgtaggattccaatatatggtcatggcttggatcgcgcctctctatagctaacagtacaacttgaataatcagatacatgcgcccatgactaataatgtgcctact

SEQ ID NO: 133872 - DNA, 245 bp, Glycine max
  Clone ID: PAT_MRT3847_91893C.1
tttaataagttaaccactctatcattgacatatattgtcaactaattcccactgaaatcccatcttacattaataatacagccccaaatataaaaaaacaccacctcactgggaaccttttattaaagcgcaaagtatttctctccaacaatataatatcacaatttcagaacagacaccttctctgaggacaataaacttatctaacaacataatgtcaccctataaattatatctttcattac

SEQ ID NO: 133873 - DNA, 204 bp, Glycine max
  Clone ID: PAT_MRT3847_91894C.1
ctggattattatcttgtgaaatgttagatattatgttgtgaaattgaaaattgtttgtactgaactctcaaacaacccaaccatcatttgtatagtgggtaataatccagtatacaaatgatggttgggttgattgagagttcagttcacacccttttcaatttcacatcttactatccatcatttcacatgacaataacccag

SEQ ID NO: 133874 - DNA, 331 bp, Glycine max
  unsure (1)..(331): unsure at all n locations
  Clone ID: PAT_MRT3847_91895C.1
gnancnagccgccnnaatcgcatgcacacgnacgtcaagcncggaattcnncncgaggnnngcccacnnccncanngagcncanganntncanatnnnaganatgnncncnananccantnnnannacnaangagaganaccncnaaanngcggatcccnangcnancangnannnnccangncaatcatnnacacngngtcnaggctccnaagcnccannactgccnagannagnatnaccgangctcaagccaaggtcgnnacngnncgtggncntgcctacggcaccntgctcnnaggtagcggngcctacnngaanggnggcgctag

SEQ ID NO: 133875 - DNA, 435 bp, Glycine max
  unsure (1)..(435): unsure at all n locations
  Clone ID: PAT_MRT3847_91896C.1
tttaagagccaagagatgagtttcactatcgatcggagtcagcgtagcagcgggaaataccactgctggcagtgcatttcagcatctctccaaaagaccagggacagggaaacagcattagacgcaggtttatatattacatggcgcaaattctacgcggcgaggcagatcaatcgcttggagacaccacttcctcctcctcaacctcataatcttcgtcatcgtcgncgtcatcgtcgtcgtggtgtctcgcagattgacgcctttcaacatgctgtttgtctgattcgtcctgatgttttgactggtcctgttgaacatctcctccagctgcccaagacccaggggcatgctcatgatcaacacctaacaatggcgcaccacgcacactttgctccagggatttaaacttctcctcccaggattgatttaaac

SEQ ID NO: 133876 - DNA, 249 bp, Glycine max
  Clone ID: PAT_MRT3847_91897C.1
aaacaacgaatgtgcgagggacaattggcatctttgtccagagacaataagctaaacccgttgtgaccccttcaatactcagtagctccacaagacttttagttgctagtttttttttattattagtgggaatttgaattcgtgatttctccatatcttatcacatatttaatcatcaattcaatcttatatttttaactttccctagtcaacggaaactcgatctcgatcccaatcaaaatggatttt

SEQ ID NO: 133877 - DNA, 466 bp, Glycine max
  Clone ID: PAT_MRT3847_91898C.1
tttccttgttttggaccttgaatctcacacgatgcaagctaccactgacgcatatgcagaacttgcacctgctactgctgagctgaatgtatcttgatgacacctactctgctgacatccctgctgaggcgtacaagaccctcacatctctgaatggcggcactgcatatgggtaagaatcgccccgtgccacccatactctagagttgatcaagggtgtattgcccagaggaaaatacctcattgctggagtgaatgatggaccgaacatctgcgccaatgaccttgctgcttgtctccctacattgcagggtcttgaaggcattgggtgcaaagattaactagatgagtccacctgctcctaccttcttcacactgctgttgatcttgttaccgagaccaagctggatgacgatatcaagtgctgtgtaccacatgctgcacctgaaaatggtgctacttacgc

SEQ ID NO: 133878 - DNA, 198 bp, Glycine max
  unsure (1)..(198): unsure at all n locations
  Clone ID: PAT_MRT3847_91899C.1
tcattcccgatcaaaaataactgaaaaaaacattaaactggcccgaaccaatagtcntgaaatgacctttcctagcctgcccccatgtgatcaagacacttataaacaatcctattggtagttgcatcatggcacatgtatcagccaaggcaggcaaggccaccagcaccatgaccatatgagctagtgtcccacaac

SEQ ID NO: 133879 - DNA, 467 bp, Glycine max
  Clone ID: PAT_MRT3847_9189C.1
tttttcttttttttttttttttttttttttttttttttcaagggaaaaattggccacccccacatttttttatggccaaaaaggacttttggcaaaaaaaaaaaaaaaaaaaaattaccggtttttcattaaatcccccaaccggaaaacggaagtttaaaagggaaccccacttttttttttgataaaactttgttaaaagggaacccttggccaaaaaaggacgttggggggcacctaaccatgaggcccaccggagttggataacccaaaaccatatggaaaaagccccaacgttgaaccaaacaggcccggagtctatcccttaaaacttttggggccagaaaaaggccgaggagaaccattgttgcagggttaaactgggggtaaacctctacggaagaccatttatttggaccaccctttttttagggacggggaaccaaaaaaaaactttttcaaacagg

SEQ ID NO: 133880 - DNA, 415 bp, Glycine max
  unsure (1)..(415): unsure at all n locations
  Clone ID: PAT_MRT3847_918C.1
ggttagatggatgccctccatctccgtctacatgtacatcgctcagcattgtttcccactctgtcatgagttgaaagctctaacctctgctacaaataactcatacttcatttacaacccgcacgataatgctgctaattcctttgtcaaattcggtttatccatgaaacagcaggcgtcaattttttctgcttgtccctccttttgccaaccttttattccaaaatacagacaaatgttaggtaaatcagtataatatttatttcttactttttttgtttagttttagatttggccttacaggttctactatatagacaatggaattatttttatgtaatttactcgtcgtatatttatttaacattatatgtgagtttttttaacaaaaaaaaaagaanggcttacangnatg

SEQ ID NO: 133881 - DNA, 357 bp, Glycine max
  Clone ID: PAT_MRT3847_91900C.1
caccagcgtgagaggctgcccagcacgcaaacacgtggagcgtgctgtggacgattccaacatgctcgttgtcacctacgaaggagaacataatcactcgcaaatcgcttctgaggtggcaaatgttatccttgaatcatcttagtcaaccttaagactagtgcatgccaatgctttacttcatttatatgatttcttaattctattggtctttgtctttttttctttctttcttgaagtatttattttaaaattcattgaaatattaaattaattagatacaagagtattggttggtctttgtaagacttattattatatagaaaatgtaaagaaattaaacagcataataaaaat

SEQ ID NO: 133882 - DNA, 429 bp, Glycine max
  Clone ID: PAT_MRT3847_91901C.1
ttggggggggggggggggggggggggggtaggtgaaagtggaaaataatgtaaatgaaggaatggtaggtggttaagtatccaagatgtaagccagtataaatcgtaaccaatggacgctaggagcaactataaggaagtaatgcgagacgagctaaacaaataacagcgtcgtaatgagagagggtaaaatcaaaaggtgaattaggggtaaaaccaaaaagagtaaaggtgaacctgttatgcggcgtattgcggcttaggttttagaaatgctggttggttataagcgtataggcggcggtttagtacttatacttaagagcgggttgcgtaagcattagcacatttgttaaataccccgcggcaaagtaggtaaaattggcttgggttatgcagtttttgtgggtcttatccgttagagaagtat

SEQ ID NO: 133883 - DNA, 1943 bp, Glycine max
  Clone ID: PAT_MRT3847_91902C.1
ccacgcgtccgcctcatcttgcaaaattctctcagctaattcgctattttcttgtagtaaacaaagcaagcaagcatatccatttcaacatggccctcaaaactggttcagttgaaatgttcttcttccccttcgtaggaggaggacatcagattccaatgatagacacagcaagagtgttcgcatctcacggagccaaatcaaccattctagtcacaccctccaacgctctaaacttccaaaactcaatcaagcgcgaccaacaatccggtcttcccatcgccattcacaccttctccgccgacatacccgacacagacatgtctgccggtcccttcatcgacacctcggccctcctcgaacctcttcggcagctcctcatccaacgccccccggattgcattgttgtcgacatgttccatcgctgggccggcgatgtcgtttacgagctcgggatcccaagaatagtcttcaccggcaatgggtgcttcgcacgctgcgtccacgacaacgtaagacatgttgcccttgagagtctcggttcagactcagagccttttgttgtccccaatctacccgacaggatcgaaatgacgaggtctcagcttccggtttttctgagaactccttctcagtttcctgatagggtgaggcagctagaggagaagagtttcggaacttttgtcaacagcttccatgacttggaacctgcttatgctgagcaagtgaaaaacaagtgggggaagaaggcgtggattataggaccagtgtcccctttgcaacagaactgcagaagataaaaccgagagagggaagctacccactattgatgaggaaaaatgcttgaattggttgaattctaagaaaccaaattcagttctttatgtaagctttggaagcctgcttcggttaccctctgaacagttaaaggaaattgcttgtggtcttgaagcttctgaacaatcgttcatttgggtggtgaggaatatccataacaacccatcagaaaacaaagaaaatgggaacggaaactttcttccggaagggtttgagcagaggatgaaggaaacgggtaaagggttggttcttagaggttgggctcctcagttgttgattttggagcatgttgcaatcaaagggtttatgacccattgtggatggaactccactttggaaagtgtgtgtgcgggagtgcctatgattacgtggcctctctcggccgagcaattttcgaatgagaagttgataactgaggttttgaagattggtgttcaagtgggaagcagagagtggttgtcgtggaattcagaatggaaagatttggtgggaagagagaaggtggaatccgcagtgaggaagttgatggtggagagtgaagaggcagaggaaatgacaacaagagtcaaagacattgcagagaaagctaaaagagccgtggaagaaggtggaacatcttacgctgatgctgaggcgttgattgaggagcttaaagctcgcagattggcaagacaagattagatttttacataatagaagaaagaattcagtttctaaagtacgcataaaaacacaagaaaagaagcttgttactttcctgcaccacttgaaagttctaaattgcagtcagcaaccacaattttggtcgcaatattgttgttgcggaaccgtctaccgtaacagcccacaattgcaatgcgaatttcaatcccatgaaatactcaacgtagccgaaacagaatatcagtattgctctacacttctattccactcttttttttttgtttgtttgttaaaagacaagtttagatttcaatattctattatagcttctaagtgtcaatgataaaaaagggtgtgaccgtatgagatgttaggagatactaaatttaaatgaatgaaaaattatactatcttataaataaaagatacatcaatattaggat

SEQ ID NO: 133884 - DNA, 427 bp, Glycine max
  Clone ID: PAT_MRT3847_91903C.1
cttgttttaaaggtttacaaaaataatgaaagatttacgtactcacttaagatcccaggatgtttatatgtgtgtgatttatttatttaatcaaaaaatttgtgtttaatttttattgagtacaaattttcttggtcaattgcaatcagaaaaatttatgtttgaaagctaaaatcagctcttacaacaccactaacaaaactgggaacaaaatcaaaaacatgaaagctaaaatcctcttccatcgcatattataattaaaggagataacttcattttattttttacaatttttttttattttacctctaatcaatacatatacactcaagtaactacttgtgacaaaaaaaataaaattatccataggcataaactgatattaaagtagggtcgtaaggatgttcataacttaatcaaaatttca

SEQ ID NO: 133885 - DNA, 724 bp, Glycine max
  Clone ID: PAT_MRT3847_91904C.1
cggccgctcaggcggctggcgggttttcatttctattttttttaaaggcctggttactccacgaatacgaatcaatgaagtatcaaagaatatcgatatcggatatggtatacgtgaaccaaattgaagttcagtgcttcataggttgtcttctattcaagagttatgaaattataatggcaaaaggaaaattgatgaaaagttttggagaagctagtgaacataagatgctagttaggatatgaggtagtctcttgagctctcatatcttttgcaccttactctctctttgtggcactctttcctttcaatgagttccttcaaattgatctcttttaagtaaacatttatgattgtttgagggataattcaaatgttcaaatctgtgtgagctgttcaaacacaattgggagtttgcttttcttttaaagtcttgtgcaacatctccatgtgtcttctcttattttctctccactgttgacaacttccacaattcaaatttatttgattgtaaccgttggttctttgttgactagtcttagtggatcctcatgacatcttcttgagagagtcataggatgtcttctgaagattattctacaagatgtcttctgattctgattttgacaattgcagtgctcaagctttaatcttcatgcttctagttccttaggttggatgaggacttgatgtcttgcgccaattctatgcttatgaattgctt

SEQ ID NO: 133886 - DNA, 697 bp, Glycine max
  Clone ID: PAT_MRT3847_91905C.1
ctatattctatcatggtgaaactcaaactctcttgcctcacctcatatgtagaataagtgaatagggctttaactccattgcttcattacttcaacctccactcaatttttcaaaaccctagctaaaaaacactaccagttttcgagtaataataattaaaagaggagaatattttttggttttttttttttctattgttttagggagggaaagtggagagcgatatggaattcgacgagcaagaggagcatgaggaggaggaaatggtgatgccggagccggcggcggtatcggcgccgccgagttacgactcgctcgggaactccggggcgatgtcgaaacttggcggcggcgaggggcggaagaccgcgctcggcgccgcggcggcggcggtgcggtaccgagaatgccagaagaaccacgccgtgagcttcggcggccacgccgtcgacggctgctgcgagttcatggcggccggagaggacggcacgctggaggccgtcatctgcgctgcctgcaactgcccaccggaatttccaccgcaaggagatcgacggcgaaattaccctcttccactaccgtgcacagccttccccgccgccgatgcaccaccaccaccaattcttcccgtactaccaccaccgcgttccgcagcaccccgccgtcgcttgcttcctccaccaccaccttacaccc

SEQ ID NO: 133887 - DNA, 333 bp, Glycine max
  unsure (1)..(333): unsure at all n locations
  Clone ID: PAT_MRT3847_91906C.1
agngangangcgtacgtaagctcggaattcggnncgagcggctcgagcggctcgaggngcaaattggttncttttgcngtcactgttggcgnatccctnantnntcttagtccngaggaacantnaattnnntttcnnctannggncagtnaagcagcngcattctgcnaaatccagnnacccttttgcgtgtncntncctccaantttttcnngtccnggcaaaggggaantnnntgccatcaattnncagttntcaatgtaangtgcngntggctnctggtcccnaanntaangcaatnatggttgtaaaagncggccngnnaccttgttn

SEQ ID NO: 133888 - DNA, 551 bp, Glycine max
  Clone ID: PAT_MRT3847_91907C.1
gaaatttaagtgaggagctaaacaatgatgatgaagtctgctatgtgtgcagcggtggcagtagcacttattattctgtcggaggtggggcccatggctgaagctgtgacatgcaccccaacagagttgaatccctgtgtttcaacgatcactttcggtgctaaacctttcaatgcttgttgcacgaagctgaaccagcaaaaaccctgcttatgtggctacctcaaaaacgctagcttgaaacagtatgttaactctcctaatgccccaaaaaacgtttcttattgtgagattccctttccaacttgttaattaattaagggcttcttataaattaagggcgggagatctatatttatgtagataaacaggttaatttattcacagtttgattctacaaagcattttgacacaagcattcaataggaaatcaccactttatcgcaacattttaacaagatgcggctataaaaaaaattcttggtgaatatttctataacgatgttgtatactcatatgttgtgtggctaaaataaacttatatttattaa

SEQ ID NO: 133889 - DNA, 1125 bp, Glycine max
  Clone ID: PAT_MRT3847_91908C.1
tttgaacatggcagccacattcttctctcacttgtcccttcttcaatccaataacaacaacagcccttctctctctcccacaccctctcgcatttctcactctctcaccaaccgtgtcaaaccctccctctgtggggtttccgttggaaaaagggcaagtgggttggtgccaaaggccactttgaatgccgtggaggccatttcggctaataagaagtccaacaacaaccccattgttgttattgacaactatgacagcttcacctataatctctgccagtatatgggggagttagggtttcactttgaggtctaccgcaatgatgagttgacagtggaggagttgaaaaggaaaaatcccagaggagtgctgatatcacccgggccaggagcacctcaagattcgggcatatctttgcaaacagttttggagcttggaccaactgtgccattgtttggtgtgtgcatgggtttgcagtgcattggagaggcttttggagggaagattgttcgtgctcctcatggtgtcatgcatggaaaaagctcaatggtttactatgatgagaaaggagaagatggagtacttgctggactatcaaatcctttcttggctggtagatatcacagccttgtaattgagaaaggtagctttcctgatgatgaacttgaggttacagcctggacagaagatggtcttataatggctgctcgtcataagaaatataagcatctacagggagttcagtttcatcccgagagcattataacccctgaaggcaagacaattgtccataattttgtcaagcttattgagagaagtgaggctgttggttcttgaaacaatgtttgctgtgtatagttaaaattgtggtttgacacaacaaactaaaataaagaaaggtataatgacgccttttgtcagccccagtttagaatatcagagaaaatcttggtagggaagaaccttggcatgatattgatccattatttgatttccgtaagatctataaaagcgaatcttcagtatataataaaaaaaaaaaaaaaaaaaaaaaaaaaaaaaaaaaaaaaaaaaaaaaaaaaaaaaaaaaaaaaaaaaaaaaaaaaaaaaaaaaattttttttt

SEQ ID NO: 133890 - DNA, 1295 bp, Glycine max
  Clone ID: PAT_MRT3847_91909C.1
tacggctgcgagaagacgacagaagggggtttgagcgaagagaaacattttgaacatggctgccacattcttctctcacttgtcgcttcttcaatccaacaacaacccttctctctctcacacaccctctcgcttccctcattctctcaccaaccgtgtcaaaccctccctcggtgtggtatctgtggccaaaagggtaagtggagtggtgccaaaggccaatttgaatgccttggaggccaattcgggtttccccatttcggctaagaagtccaacaacaaccccattgttgttattgacaactatgacagtttcacctataatctttgccagtatatgggggagttagggtttcactttgaggtctaccgcaatgatgagttgacagtggaggagttaagaaggaaaaatcccagaggagtgctgatatcacctgggccaggagaacctcaagattcaggcatatctttgcaaacggttttggaacttggaccaactgtgccattgtttggtgtgtgcatgggtttgcaatgcattggagaggcttttggagggaagattgttcgttctcctcatggtgttatgcatggaaaaagctctatggtttactatgatgagaaaggagaagatggattacttgctggactatcaaatcctttcttggctggtagatatcacagccttgtaattgaaaaagagagctttcctcatgatgaacttgaggcaacagcatggacagaagatggtcttataatggctgctcgtcataagaaatataagcatctacagggtgttcagtttcatccagagagcatcataaccccagaaggcaagacaattgtccgtaattttgtcaagcttatcgagaaaagggaggctggtggctcttgaaacaatgtttgatgtgtatagttaaaattgtggattgacgcagcatactagaaaataaagaaaaggtataatagcacctttgtcagccacaatttagaatatcatagaaaatcttggtagggaagaacctttagcctgatagatctattatttgatttccctaagatatataaaagtttggttttagtttctccttggattccctgtgtctagcttctcttgtgtgggaaatattcaagtacttctagtagtttacagaatttttgtaatgtaatttttttaatacactgcaaaaattggtttccctaatataaaaaaatatattagagaaactagttttgtaatatatgaaaaatataatacagaaaataattcctgttatattaatttatacgttacaaaa

SEQ ID NO: 133891 - DNA, 1904 bp, Glycine max
  Clone ID: PAT_MRT3847_9190C.1
ctgaactcttgttcttctttaccgattcaacaacagctcagcagtggtagtacccatgagcctgcagaatctgcactttttttgccttggcttctattctctcctcactttgaatcggaagatatcctttccattcaaggcagcaagcagaagtttcaacgaaagtctcctctcccacacagctactatcttctcaacactattggaatcaccatcatctgaataattcccttttttctttctctttctctcacacacccccatgatgtcaaaagttgttattttctctttattcctatcatcagtcccgaccatgtcttaacagctctttttcttctttaccgattcaacaacagctcaggattctctctccctctcaccctcttatttccaaaccattcccctatttgggttcattttgtcttacatttgaataagaaacgcaatttggaagacagtatcctatgcaaacacacagtgcatagcaccgtcaccaagaaactcatctcccccaaaaaatcatcccaaaccaattcatcgacagagcgcacaatagtgcggatttcatacactgatccagacgcaaccgactcctccagcgacgaggaaggtttccccttggttcgccaaagaatgaagcgctatgttaaccagattgaaatagaaaccgctttcgccgaaaaagttgttcggaaaaggcccgccggtgagccttgccgccgaccggcgaagcttcactccgggaagaagttccgcggcgtccggcagcgaccgtgggggaaatgggcggcggagattcgagatccggcgagaagagtgcgtctctggttgggaacctacgacaccgccgaagaagctgccatggtctacgacaatgccgctattcgtcttcgtggccctgacgcgttaacaaacttcgtaacgccacctcaaagagattctccgtctccgtctccaccgccggcggcggcggagactccggcggaggtttgcgacatgaaggttgtggtcaccgaagaagcctccggctccggctacgactccagcgaggatcattgccaccacaacctctcctctccgacttcggttctccagttccgaagcaactcgagcgaagaaaattccgagtctcagcagaaagcagaacaagtgttgagagaatgcgagggtgagacagaaacgagtttgttcgaggaaacgggtgagtttttggcgctggataacatgcctttgcctgcctgggatgacgtgttcaatttcgaaacgccagagtaccctcctcttctgtttcaagaggaggagaatctgaatctacttcatcagtcccagatgttgggcgaaacggtgcagttttcctcggaggaagggttcagtgatgaaagcagtatcatgctggccgactcgctcatagatttcgacagagcctgcccttcaccatcctccttgtgccaagtggacgatttcttccaagacattttgtttgcttctgatcctctcgttctgctctgaacactcttaaaacttactaaactgtcattcgttaatcgtcaatcgtccacttcacggcttgcccaatattcatggcagatttttgcttccggtggtaaaaaaaaaatgcctagtttctatttaattaaaatactatatatatatatatatatatatatatatatatatatatatatatatagttttatttgcgtatttatttagatgttttagatgctccgttacaaatagctaacggggggatgagttgagaacttgtgagcgaagttttgtttaaattttagttatatttgtaatctttttgcttaataagtaggatcgtacgttgagacttgagaatgtaatgtatatttgtccagatgttaatctaagtgtaatggcgttcttttctttac

SEQ ID NO: 133892 - DNA, 1239 bp, Glycine max
  unsure (1)..(1239): unsure at all n locations
  Clone ID: PAT_MRT3847_91910C.1
ttcagcttcactcaataaaccattttaaaaaaaataatagtattgtataaaaaataaacgcaaacaaaaaataaaactcaaatttgcacttggctgctccaatcattgtctattttattttctctcttcgaaaatgtgattgtttggggggcaaaaaagaagaagagaagcgcgtgatggagtgggtgaagatgaaggggtacgcgagagagttcatggttggagtggcggagatgacggtggagttcggaaaaggttgcagagacatagttaaacagagtctggtcaacgacgactcctacatcgtcaaaaacttcggaagagactcctacattggaaaaacagtgacagaacctttcgctaatcttttccagaaattgagtttcttcaacgagtacttgcccgaggataaagatcctcttcacgcttggtccgttattttcttcgttacgacccacgcgtccggcgaattttgaatgtgatccgtacgccgccgcggcgccggtgaagcaagtgttcgtgcatcctcctagtgccactcgcgtagtgcttcctgatggaaggtacatggcgtataaggagcaaggcgtttcttctcacaaagctaggttttcggtgattgctcctcatagttttctttcttcaaggcttgcagggattcctggagtgaaagattctttgctgcaagagtttggtattcgtttgttgacgtatgatcttcctggttttggtgagagtgatcctcatcccaaccggaatctggaatcctcggcaacggatatggcgtttttagcgaatgctcttggtgtggacaagttttgggtggttggttactcaagtggcagcatgcatgcttgggctgcacttagatacattccggataggcttgctggtgcagccatgtttgctcccatggtgaacccgtatgatcctataatgacaaaggaagagagacgaagaacttggaacaaatggacacgaagaagaaaattcatgtacttcttagctcggaggtttcctagacttctcgctttcttttatcagcaaagctttttgtcaggaaagcatggtcagattgataggtggctgtcattatctctgggaaatagggataaagcactgatggaagatccaatgtatgaggaattctggcaaagggatgtggaagaatcaatcagacaaagaaatgtgaaacccttcatggaggnanctgcttgcngtcgcaaatggggttcagcc

SEQ ID NO: 133893 - DNA, 590 bp, Glycine max
  Clone ID: PAT_MRT3847_91911C.1
ctagagacaaaagtatataattaatattatttgagtaacaaaaattcatccattcttcaaaatccaaaataataattgataggaataagacatcaagacaagaatccaaaataataattgataggaataagacatcaagacgaagtggtagaggaggtccattttttttttaactttttataaaactggttgggttgaattggttcaatcgagattggtacctaactgaccgggtcaattgtataatcaattcaatagtgaaactggatcgattaggtcaccggatcccggtcggaccgatccgacaggccaggccgaatcagattctgcgaaaagcggtccatccattcctcaacacgcactttctcttctaacatgctcttggactcaagctctccagccaatttcttgagcgtgctgggtttcggagtgaattccccgcagaccatttcctccaaaaacgagtaagcatccttaactttttcacttttacgtagagcatttaccaaaagcgagttaagtggccaaatcagggcttatattggtttttgacatgtgatcccacaaaaacttgaccccctttttttttt

SEQ ID NO: 133894 - DNA, 486 bp, Glycine max
  Clone ID: PAT_MRT3847_91912C.1
ccgtcgtcaataccgcaaccatgggtaaaggaaagccaagaggtctcaacgccgcccgcaagctccgcaaccatcgccgcgagggacgatgggcggacctccactacaagaagcgtcttctcggaaccgccttcaagtcctcccccttcggtggatcttcccacgccaagggcatagtcctcgagaaggtcggtgttgaggccaagcagcccaactccgctatccgaaagtgtgtccgtgtgcaattgatcaagaacggaaagaaggtcaccgctttcgttcccaacgacggttgcttgaactttgtcgatgagaacgacgaggtcctccttgctggtttcggtcgtaagggcaaggccaagggtgatattcccggtgtgcgtttcaaggtcgtcaaggtttccggtgtcggtctgtccgcactgtggaaggagaagaaggagaagcccaggtcatagaggactcgtctgcaaggagtcaaggaag

SEQ ID NO: 133895 - DNA, 420 bp, Glycine max
  Clone ID: PAT_MRT3847_91913C.1
ttgcttgatgcccctagatgaagaaattttttgtaaggttgcacaagacatgggtgcggaatggactgattgcgttgatgaggaggctacctctgcggaaggttctttcagtgcagcccttaatggtgatgggggcttgcactctatggaaagaaatactcttgccacatctcagggatgttctcatgtgctttcacacaaaaatggtgaaaaaggcccaaggagatttgtccatgttgatggagcatagatgacactgattccacgcaccagtgtatgagaggcttactacaagctaactgctgcacttgagaaaagcgttcctacattgactgggattgactgctccaaggattagaaactttctcgtcacaaaatttttgacgaacctaagacgcgctgctatactattctccccat

SEQ ID NO: 133896 - DNA, 601 bp, Glycine max
  Clone ID: PAT_MRT3847_91914C.1
ggctcgaggacgaatgcattcgtcaaagtttagctctactgactcatgtgaccttctcatatgtgatgaggctcacagactgaaaaatgatcagacgataacaaaccgggcgtttgcaggggagagctgccaatgcccggtttgttatcgtctgcaaacgtagaattttgttgtcaggaactcccttgcaaaatgacttagaagaattctttgcaatggttaactttactaatcctggaatattgggtgatattgcacattttcgacgttactatgaggcaccaattatttgtggaagagaacctgctgccactgcggaagagaagaagctaggtgctgaacagtctgctgaattaagtgtcaatgttaaccggttcatattaagaaggactaatgcattgttatcaaatcacttaccacctaagatagttgaagttgtttgctgcaagttgactccactgcagtcagaactatataaacattttatacaatccaaaaatgttaagcgggcaattactgtagaactgaagcaatcaaagattttggtctacataacagctctcaaaagttgtgcaatcattccaagcttattctttgatac

SEQ ID NO: 133897 - DNA, 383 bp, Glycine max
  Clone ID: PAT_MRT3847_91915C.1
tcctccgtttgctaattcaagatcacaagtgggggggggtttaaacccattacagagagcccacctcccttgatttcacaaacatgtaaatatcttcctacttttttgggacctataccttaagggaaagaaaataactctttgtgctggccacagacttagtgaatgattctcttttccacttttagtttattatctgaacactctcctattcgatataggacttcgggtcacaattaaactccttctgaatctttctcaattctctgatgaatttcaaattcaagtctagagaaaaattagattacaaataccactctcctatatggaataggatttcttgggtagacttttctatttctatcctttaattcactctcttc

SEQ ID NO: 133898 - DNA, 275 bp, Glycine max
  Clone ID: PAT_MRT3847_91916C.1
caccttggttgggtacctccccaaggcccaaaggaaagcccttgttaacctaaaaaggctggttcaaaaaccgctcaacacccatgagcttaactgctcccaaaccagaaccagagaaaaagaaaacggaactcaaagcacttggagaagaaagaggaagaagtctcttgagagaagaaggaagttgaagtgacggaagagaagaaggaagcagaagtgacggaggaagaagaaggaagcagaaagtgacggaagtagaaagaagggaagttgaa

SEQ ID NO: 133899 - DNA, 822 bp, Glycine max
  unsure (1)..(822): unsure at all n locations
  Clone ID: PAT_MRT3847_91917C.1
tgtnaaaggagtcgaactgtgtggaactttgnaaaaatgttgtggccatagcggcaggttttgtggatggcctggagatgggaaataatacaaaagctgcaatcatgagacttggtcttagagaaatgaaggcattttcaaagttgttgtttccatctgttaaggacagcaccttttttgagagctgtggtgtagctgaccttatcacaacatgcttgggtggaagaaataggaaagttgctgaggcttatgcaaggaatggagggaagaggtcttttgatgagcttgaagcagaaatgctacaaggccagaaattgcagggtgtctcaactgcgagtgaggtttatgaggttctaagccatcgtgggtggctagagttgttccctctcttctcaacagtgcatgagataagcactggcctacttccaccatcggccatagttgaatacagtgagaagctacccaggtccttctaattcaaagcatatttgttgtataagaaaatataaattatagtgacagtatcaaggatatacaaaatgcatgctttagctgtatcaacagtggaaagcattggtggctaggctgctttttctttccaaaagatcatgccaacaaggagcttgtttccatatggttgaggttctctgaaggccaaggaagttgactttttgtatgaagttcttatcaagttgtattattccactgcaaacaattaatacatgcagcaagcttacatagtttacatatacaataaagtagtaattgaactgtgtattgaaaaaaaaaaaaagaaagaaggccgaccagtgaccagttagc

SEQ ID NO: 133900 - DNA, 263 bp, Glycine max
  Clone ID: PAT_MRT3847_91918C.1
ggacggcagccgcggccggaccgaaacgcccgggttgcaacccgaaccaaatattcaaaaaggaggagcgggatagcagaaccaaagagcaagggaaccaacacgcgaaacaagggggaggaagaagaaaaaagggcgaccaagcgcaggcgaagcagatccacaagaacgcgtaggaggaaatcaaaaacggagcaaaaggaccagaagaacccgaagaacaaggagggcgagacgcagcactacaccggacaacaacggca

SEQ ID NO: 133901 - DNA, 959 bp, Glycine max
  unsure (1)..(959): unsure at all n locations
  Clone ID: PAT_MRT3847_91919C.1
ctcctattcacaaactagaaagaggagaaaaggcataacaagagagagatggattctctgaagatgttgaaaggttatggtaaagtagaacaccacctcgaagatcatcgtaaccccaaacccaaacctaaattctcaaaacccttcatcgccgcaatttccgtcttcgcaatcctcttccttactctcaccttcgcattcgccctagcatccatgctccaccacagtcaccacaccgagtcacaacaacaacttctcaactcggccgagtcgatccgagtcgtctgcaacgtcactcgcttccctggcgcgtgcctcgccgccatcccgccctccgccaacgccacaaacccccaagcgatcctctccctctccctccgcgcgtcgctccacgcgctccagagcctcaattcctcgctaggaacgaagaattcacgcgcgctcgccgactgcagggaccagctggacgacgcgctgggtcgactcaacgacgcgctgtcggccgcggcggcgctgacggaggcgaagatctccgacgttcagacgtgggtgagcgcggcgatcaccgaccaacaaacgtgcctcgacggattggaagaggtcggtgacgtggcagcgatggaagagatgaagaaaatgatgaagaggtcgaacgagtacaccagtaacagtttggctattgtcgctaatattcgcaacttgttacaacggttccacatggcgctacattgaagttgaagttgaagattttcaattcgttacatttttttttgtggttttatatatatatatatatatatatggattttgtgtattgggtgggtgaatatgtgatgcttaattagtcatttaattgtataatatgtatgtggctatacgaaaaatgttgtattaacacttttaattaatttctcttgatttattacattgtgtgatgacaatggacagaaaanggaaat

SEQ ID NO: 133902 - DNA, 299 bp, Glycine max
  Clone ID: PAT_MRT3847_9191C.1
ctcagatctaaagaagcacataggatacatggtctgactctgcaaatgatccactaccatgcataatggctctgaccagaattctttgtgggatggcatactgtcatttacatataaagcctcatcgagacttaaaacaacacaattttgagatagatcggatcactgatccactcaaacgtgcaaagtctggatctgccccggctatgataattcctatcatgacattcacacatatcgtaaccacactgaaccacatatctccttgaatcttgctcggataccggaagtataccacc

SEQ ID NO: 133903 - DNA, 479 bp, Glycine max
  Clone ID: PAT_MRT3847_91920C.1
agtataagggagaattttatgaaatatgaacaccctcaagtggtgaaaaaataatccacgtctcaacggaataatttccaaaagcaaaatgctacttattcattgaaacattgatagataagtgatttactcgctaaccagtaaatgctaaactattctcatgtacaggatctaaaactgttactaacttattcgcacaaaaacaaatgctattacctccaaacgtcacctagtagctggtctctaatcttagtgactttcctatcttcaactgcttttatccaaccaaaggaaatacgaaaaaaagagtaactgaatccaaaaaagaaatcatctctggtttgagctgttggctgacaaagatattaggctcaatccatatgatagacggaaaatagtttacaatttatctggtcattatgctccaaaatgcttctcatgtacattcctccatcacttaggcataacatctttctagc

SEQ ID NO: 133904 - DNA, 1224 bp, Glycine max
  Clone ID: PAT_MRT3847_91921C.1
cccacgcgtccgcccacgcgtccgcccattgatccggaaaaattattttcccttataacgagtatctctatctatcctttgaaacgattacctataatttcagagctagctagttcacagcttcagttcgtttttgttgatcctgtgaacttatggctgacggggtggttctgttggatacatgggccagcatgtttgggatgagggttaggattgcattagctgaaaagggtgttgagtatgaatacaaggaagaaaatctcaggaacaagagtcctttgcttttgcaaatgaacccaattcacaagaaaattccagttctgatccataatggcaaaccaatttgtgaatctgcaattatagtgcagtacattgatgaggtctggaatgataaagctccaatcttgccctctgacccttatgagagagctcaagccagattctgggtagattacattgacaaaaaggtgtatgacacttggaggaaaatgtggctttctaaaggagaggagcatgaggcagggaagaaggagtttatctctatctttaagcagctagaagagacactgagtgacaaagcttattatggaagtgacacctttgggttccttgatattggtttgatccctttctacagttggttttatacctttgagacatatggtaacttcaaaatggaagaagagtgtcctaaactcgttgcttgggctaagagatgcatgcaaagagaggctgtgtccaaatctcttcctgatgagaagaaggtgtatgactatgttgtggccgtaacaaaagtacttgagtcaaactagagagacttcttgaataaattcacgtaaggtcttgtgtaatttttatcttatgtttgcttgggagttacttatagcttcctagacacttgagtgtgtctagtgtctgcaggatttgtaactttatcttatgtttgctagccttcagttacttatgattgctagacccttgagtgtgtctacaggatttggagctgaggaaggatggatgttgtaatgtttgttttaagttgtgtgtttatgatcaataaatcactcattttataaggacaaaaaaaaaaaaaaaaaaactaacgttacagcggccgatctagaggacccaagcttacgtactcgtgcatgcgacgacatagctattgtatagtgccacctaaactcaattaactggccgccgtctgacatcgtaatgactggc

SEQ ID NO: 133905 - DNA, 553 bp, Glycine max
  Clone ID: PAT_MRT3847_91922C.1
gggggggggggtttttttttttttttttttttttttttttttttttttttttttttttttttttttaaaaaaaataaccggcttacccccccccagggaaaaaaacacaaaggcccccaaggggggtggggtgatttttttaccccaaaaaaaaattttggggggggggggaacaaaccagggggaaacccagctaaccgaatcttctaaaagacgggggggaaagcaaacaagggggaaaactgggggccaaaagttgcccccgttaaggcaacccaaaaaaacggaccctcaactaaaaaaagttaaaacccccaaataaagagggccccaagggaaaaaaaattctaaaaaaaaattatttgcccgggcccttttttttttataggcttttaaaatttagggtaagggggaaggggcctcacttggccaacatgactttgacaaaccccccaaagggggaggggccaaaaccatagacgggggccccggggataatttaatcaaccttctaatggggcagcttctccccaaaatttttcatgacaggggg

SEQ ID NO: 133906 - DNA, 443 bp, Glycine max
  unsure (1)..(443): unsure at all n locations
  Clone ID: PAT_MRT3847_91923C.1
attcccgggtcgacccacgcctccgggaacaagcttcantgattgcagcagtcaacagtcaattgcctttcacacantccattgctctaacggtgtttgcagcgacgccaccgggtccagacaatgtgttaaccaaggggtgccagggggggaccaagggagggggagaaaattaagtctagggttgcgtcctaagaaataattaatactaatgtgggatgtgggtntaatgtgtctctcattgtgcttacttcttacaccttcctctcttgggcttgggcttggggctttacaattcatgtgtgtggggaactcataaattcaaagagttggaatgagagtgttaaaaaaaaaaaaaaaaggggggggggaaaaaaaaaaaaaaaaaaaagggggcgggcggtctaaaggggccaagcttactgaccggtgcgtgcgacgtg

SEQ ID NO: 133907 - DNA, 265 bp, Glycine max
  Clone ID: PAT_MRT3847_91924C.1
cccacacttacaaccactctttctttaataaatatggaagcaataataattgtcatgctgctgcatttattcacacaaaaaatctcatcctaacaagaccaaaccatacttttttttttttttttaataacattataccatcattttattaccaatttcaacctaaattttcatattctataagttaattattctaatatcataaccatacctttaatattatctatatcaattattcctcatataatacattatttcttttatt

SEQ ID NO: 133908 - DNA, 152 bp, Glycine max
  Clone ID: PAT_MRT3847_91925C.1
ttgaacttggtgataattttcccaaagcatcttaccttctgcttatctactacgttatacgtttttataaataataaatacacaagtcataagtgaataaaatccttcatatatctgttaacagataacaaactaacattttctgataaaaa

SEQ ID NO: 133909 - DNA, 320 bp, Glycine max
  unsure (1)..(320): unsure at all n locations
  Clone ID: PAT_MRT3847_91926C.1
agttctcctgttatcagctggcaaaaagaataaggtgctggtgagaatagcttgagagtattattggataggatattctttggagactatcatttgatctggttttgttgtattcttaagaaacttttgattttcttgctacacggaagcttcgaagttacctatggattnccaccgtttggctnacaatccctgatgactatccatgcattcttagggncaanattagtgcattcttaaggtctccatggnatanattctctcgnaattatgacttcngcaacttattcaagataccaggaaattatcgccnagacact

SEQ ID NO: 133910 - DNA, 261 bp, Glycine max
  Clone ID: PAT_MRT3847_91927C.1
gttagaaaaggagaaatattagccgcttttttacgtaaaaatacgcaacagtttatcagaacctgaacattgacccgttccatgggacatgtacgagcacaggattcacaactatttagcattttctaagaagagcgttgggagacaccgacattcccttaattggagcaacatgaaagccttgcctatcatagtctctgccctgattgtccggaagagacatgttcctgtgacaccatggaccatgaagccgagcagcac

SEQ ID NO: 133911 - DNA, 1704 bp, Glycine max
  unsure (1)..(1704): unsure at all n locations
  Clone ID: PAT_MRT3847_91928C.1
acgtccgaagcacgggtaccctaaaagcggccgcccttatggtctttcttaaaatttttttaatgttttattaatnaagtcaaatacaaacataaaataacagccacaattggattggcctagtggtagagatatttagatagtatacaactattgtaaataaaaaaaaagaaaaaatacaaacatatataaaatacttggtttaacaagtaaacgtaaactctgtcttctggatatagagggtcaaacttcctatttaaatggaacatatcaaagctgttgtcaactttgaaaatgttctataacattattgcttacaccacacgtgcgtaagggaaaattaagcccattttgccattagagacatgccaccagcacccaaaaacacagctacgtaagattttaattgaagcttaatgctaccctgcaaccttgggctcatgaagtcagcagagagaaggtcaaccaaagccatgtagattaaaagcccagcagatgatgcattaagcaaacccacggtgattagggcacttgggctgttctctttgtaggtcgtggacattgcaattcctaaggcaattccaaatggggttgtgatggagaaaaagaccaccatgatggccttctttaaaaacttgtactcagcctgtagaatgcacccaccaagacccattccttcaaacatttgatggaagcacatggcggctataagacctcttattgtgcacgtgttatttgaggctcccatgccaagtcctatcaccactgaatgaacaataattccaagttctaataccatggcaacaacacgataacgtagaagctgcgactctttgccatccatcttagtctcatgatgagcatggtggtgaccatggaaatgccctaagttaacagcacccatctctaaattttcctcaccaccttcaaggctgctctcaccaggaacaacctcactagtagtcctacacttcttggtgtaaacactagtggccaaggaatcaaccatcatcgtgattatggcggagaacattgcgacgaggcccgaaaagggaaactcgtgccacggcttctccttcaagcaatccgaccagagcatggcgaaggaatccgggagcacatgcatgaaccccgtgccgaggatgattccggcggcgaagcacttcacgattatgaagaggtcgttttccgggcttagggcagggactgaacgtgtcactaagggtagggttatgccaattatgcttgaggctaagatggtaaatatggctatgatttttagaggtagggctttctctttgttgttgcaactgtttttggattcggcttcacaatcagccgtggcttggtgtgtgaggagagtgaagatgatgaagaaaacaaaggttgttttgaatagggttagtgaagtggccattgtttgtagttgtttctttcacaaactaaaggacacttctcacttgtacttgtatattttgcttttgatagagcttctttatatagactttacaattgccttgtttgttttcattcaagaattaatagtggccggcaaactattaatttactcctgattaatcttgaaacgcgaatatgttacgttagaatccatgtgtaatggtgaacttggtgggtttcctctttcatgaactagctctagttgcttcttcgtgtctttggttgctggttgaggcagagaaaaat

SEQ ID NO: 133912 - DNA, 847 bp, Glycine max
  unsure (1)..(847): unsure at all n locations
  Clone ID: PAT_MRT3847_91929C.1
ttttctatcttggcaacagtattcggtttctacgtggtttcccggcatcgaggacgcaaagcaaaacctcagcaacaaaacaatggcgcttaaaaccctatccactttcttctcacctctttctcttcccaacaccaaattcctcacctccaagccttgcctcattctcttcgaattcccgcgctctcagaaatcgcgcttgcccgtcgcctatgctgaaagcaccggcgctgccgctccttcgcccggcgagaagttcctcgaacgccaacagtccttcgaagatgctaagctcattctcaaagagaacaacaagaataagaagaaaaagaagaaagataatgctataaaagcttctagagccgtcgcttcttgctacggctgcggcgctccgttacacacttccgatgccgatgcccctggctacgtcgatcccgaaacctatgaattgaagaagaaacaccaccagcttcgaaccggtctgtgtangcngtgccngcttttgggctcatggcaagatgataactggcggtgganggacacngtggataccctggcggnaaaatattcggttctgctgaaaagcttcgagnaaaaattggctcaactggggtacgaggaaagctctaattggtnaaatgggttgacaattggtgactttcaatggcaggttttttggctcgggtgccaaaacttgcttgggtctaaatccaataggaattggggggggactaaaggtggacctcctttcaagagaaactgnncttnaacgggntngggggaattgggtttaaagggttctttttggaaaaaaacctaaagggntttaaagggccattttgacccg

SEQ ID NO: 133913 - DNA, 532 bp, Glycine max
  Clone ID: PAT_MRT3847_9192C.1
acgatcagataccatcttaatctcaactataaataatgctattcatcatttagtggatgttatttttaaaactccacttgcacccgagtatatccaaacttataatttttaatatagatttccaaaaaaaattgcgggttaaagaactacaaaaaaaccaccacaaattttttatccctttcttcatattcttcaaatcccattaaaccataagcccaacaaatcccagaaataatcacaaccaccttcctcatccctgtcatcgccaccttcatcgttatgaggtcacaaacccacacccaaacagcaacccccctcactattgtgcgtgccatcaccaccatagccccgaccattgcgacaccaatcaccctactccatcttctccgcatcgcacacaggcaccggcacctgaaccacctccttcaacctgcatgtgtcgcaccaactagcaccatcaccatgtgcaggagccaccctccatgttgtaaccgcgtgctgacaccccgaccacacccctgagcacgcgtgt

SEQ ID NO: 133914 - DNA, 1239 bp, Glycine max
  Clone ID: PAT_MRT3847_91930C.1
caggtgtggaacccgggtcaacagtagctatttttgggttgggatctattggattagctgttgcagagggagctagactttgtggagcaactaggattataggaaagaagtttggagtcacagactttgtcaatgctggagaatgtgggggcaaacctgttggccaggttatcatagagataactgatgggggagcggattattgctttgaatgtgttggtatggcatcattggtgcatgaagcatatgcttcttgtagaaagggttggggaaaaacaattgttttaggagtggacaagcccggagctaggataaacctcagttcttacgaggtccttcatgatggaaagagcctcatgggatccttatttggaggtctcaaacccaagtctcatgtacccattctccttaaacgttacatggacaaggaattgcagttggataaatttgtcactcatgaggtggagtttaaggacatcaataaagcttttgatttattgagtaaaggagagtgtcttcgatgtgtgatttggatggataaatgagtacattgttatgtattcctagtccttgaatcatgatttgcaacatgaaaatgttgaagtgtgctttttccctttcgtatttgattaaaacttattcaataaagcagagctgctatcgtattgcactgcaaatgcacttgaagccagtaaagtaattaataggggagataatagtggtccttgttgctccaaagtgttttagtctgtataatccagaaacagcatcatttggtatttcccattctatggtagctaaaccatgcaaggaactattatctactttccacctgaaaaacaagcttaaatcatcatcatcgtatacagaaatccatctttcctcttgaagcctctccaccactgcaaatgagccttctgtcagaaggtcatatcttggattggaactccagaatgtaccttggtgtatctccctttgtaaaatagcctctttttggtaaggctttgtcttacttgagtaagaagctgatttgtacagatgagagatcaagtggagaaggacctttttatagtgatgttctctcctttagccattgcctgtgctagtttcttgaattcttggatgtatgctgataatgtgaggaccttaccgtgttgaaacagcctgcaatcatattattacttattaggaataatttagatataggtttgtctcggaaggtaaagcctaaaagctttg

SEQ ID NO: 133915 - DNA, 1249 bp, Glycine max
  Clone ID: PAT_MRT3847_91931C.1
agcagggcaagaatcttccagtaccgttgcaggtggccaacgtcacgagtgcccccggcgggacgtcacctacgatgcccccgcgggaccgcaaagccacccagggctccccgactcttccgtctactattgttgcggttgatggtgacggcttcatagctcgttacataacattcgagaacatctcgggacaccaaaagcaccaagcggtggctgtccgttccggcgccgaccactcggtgttctaccggtgcagctttaggggttaccaagacaccttatacgtttacgccaaccgtcaattctaccgtgactgtgacatatacggaacaatagacttcattttcggtgacgccgtgacggtgcttcaaaactgcaacatctatgtgaggaaaccgatgagcaaccagcagaacacggtaacggcacaaggaagaaccgatcctaatgagaacacagggatcatcatccataactgtcgtataactgcagctggggacttgaaagcagtgcagggctctttcagaacctttctaggtcgcccatggcaaaaatactcacggactgtcgtcatgaagagtgcccttgatggcttgattagccccgcaggttggtttccgtggagtggaaactttgctctaagcaccctctattacgcagaacatgcgaatacaggagcaggtgctagcacaggagggagggttgattgggcagggtttcgagtgatctccagtactgaggctgtgaaattcaccgttggaaatttcttggctgggggatcgtggattccggggagtggcgtgccctttgatgaaggtttatgaatactctaaagaaagaaggtgtctgaaacggatgtgtggggaggaattgtggtttcttggttgtttccaaaacgggataacaggttgttgataaaagatagcgaaattaaattgtcatgttgggtgtttccttgaacagagggtacacaagttgctgtactttcctcttcctttgtccactgtctgcattccttttgtccagggatccaacttcgaaggagctggatccgatcgatgattcgatgatagatggtagataggatcgaaggaatattgattggatatcctctactttctttctttttttaggacgcgaagaatatcctgtatagctttaaataattgtttgtttgtacaaaaaaataattatttgttgtaaaatggcaccaaaatgtacgtgtaattaaaagtctttgattcaactt

SEQ ID NO: 133916 - DNA, 434 bp, Glycine max
  Clone ID: PAT_MRT3847_91932C.1
atttccattttttctcgaataccctctgctttcaccatgtggacacttcgtcgagcttctttgggtctcagtacgaggcgaggagttaacgcgggagctagccgtgcttctgctgttaaattagtggcaaccactagtgaggaaaatgaggctggtatccctcagtctcgtcaaatcacttatggtagatttctgtcggctggcatgggtcgtgtgtccctgaaatttgctgtgggcaggcacgaactttcctcgcaagccggtgctagcagcacgaaagacgatgatgatgatttggagatacacggaagtaatgatgaatctgacgctgatctgtctgacggggatgaggatggcgaaaaaccacatgatgagctggagttatcagatgctgagattgatccaaccaagaaaaaatcacaagctagatggac

SEQ ID NO: 133917 - DNA, 446 bp, Glycine max
  Clone ID: PAT_MRT3847_91933C.1
taaattaacacacccttcacacatcattacgacaagttaaaagaggagtggaacttttcaaataggcagagcatactcaacatgagggacatgcctattttcctttattgaattaaacaaacgaacaagcgaaagaaaacacgagttcaagatcatgcagaggattgcgcatttacagaagatccgtccttaccctgggccacacacacagctgacctacgagtgttaccagaacttccaaaatcgcgagagatgcccaacacaatatcaaaaactgtatactcgtggggagttgtcctaacagaaactaagatgccgtgaagtctgattcgcccactcataactgcacatttcaaaaccattattaggaccacatacctctattgggaagattaatccccaggaatggggagctgatttgggccacttacatgcctcaaaatgct

SEQ ID NO: 133918 - DNA, 363 bp, Glycine max
  Clone ID: PAT_MRT3847_91934C.1
gctggttttcgttttcaatttcattcatagagaatgaatgactcccactctcctcctcctccatcatccaccctgtcaacacacatcaacaacaaccataattgattacccaaaccagaaacccttttctattttatcccccttcccttctttctcgattccctcccatagttgactactactactactgctgctgctgctgctgctgctgctgctgtctactaccaccagcaccaagtatccccagatacttttttcactcccttttcaaccccacaccacaccttctaatcttccatgtaccatcctatccctcctcccaccttttcccaatcaattctctttccgtccttccccacctca

SEQ ID NO: 133919 - DNA, 482 bp, Glycine max
  Clone ID: PAT_MRT3847_91935C.1
gcaccagggagagaagagtacaaagaaggtttctgttgaaggtggaaaaagcaagaagaagaagaagaagaagaagggtgatgccgctgctcaggattctagtgacaaggaaaatgtggcttgtgagaatggtgggaattcaaacgatgggagtgtggtgctgttgaatgaaactgtgattgctaacctgcaaaggcaatttgagaaggttgctgaggaggcgggtttggatgatggagttgcgagcgcgtgtgattcacctcaggctgcatctgctacaggaggaactgtgtctaagaagaggaagaggacaaagagtttgaaagggaaggcgtctcaggattctgctgatttggatggtgaggagagtgcagtggccaagagtggagagaagaaattaaaatcacgtgctgcatgaatgttttgatttttccgcaccttgttatgggtttgtgtttccatgacttgtttgtcatacgatt

SEQ ID NO: 133920 - DNA, 1032 bp, Glycine max
  unsure (1)..(1032): unsure at all n locations
  Clone ID: PAT_MRT3847_91936C.1
ccggcctgttttgtgatgagctgtgcccggttgtggtgcggggtggcgcccctgtgatgaagctggagcctcaagggttattgccttgcactcctgcgtggtgtctgtggtctaagtggcggcttagcttgcttccgtttgcgcagctcggggtgcgacctagatatgctcggatttggtctctgatgatctctcctttattgaagaaattagttatggaatctggttttgggaagctccctatttttgaagttgaagctacaattgatattgccttggactgcatggcatctttattgaagaaagttgaggctaatcaagcttcattctgctcagctagttgggtgactatgatattcccttttctggtgtctgatgtacatcattaagtgttcctcaggatcttgtcatgtcttataattgaagatacctcacaggctcatcctgaagaattaggcatgttggttgaagttttgaaaagtggaatggttaccagtgcttcaggatcccaatatcgactttcccttgatgcaaaatgtgattatgggaatattggtggatcctgggagttaataattctgctcagaaggttttatgtgaagccaccagtttttctcttttgcttacaacacttcatgggttccaaagtgatggtggggacttggaccaatcttcattcaatgtttacattaaggggagacatgaaagcagtcaaaattctcttccattggttcacagttttagcaacacctgctatctgtcatggagagacactgaacataagatctgtgaaaccaaatacagttttacagccaggaatctttaagaacttcaatgtcctaaaccaactaagatgtaagtttaatttttcatattgtgtctgaattctgaaatgtatccagtgaatttgagaaagtctccctacaacagtcacatcacaatcctttcagggagtacttgaggcactaaggcttagttgtgctggatatcccccaaaaaaaaaaaggtaaaaaaaaaaaaaaccccccnnnn

SEQ ID NO: 133921 - DNA, 2068 bp, Glycine max
  Clone ID: PAT_MRT3847_91937C.1
gggaaatgggaacaggccccccctaaagttttctattttatttattttttgttttttaattaagcatttaaaagtaattccatcacatgatagaaagaagtaggcatggacacatagttgattaaactacaagtcaatttgcttttcaattgttgcaaagatgaattatcacaataaaactttgaaaaatttcacaataataactaaaatcgtatgacaaacaagtcatggaaacacaaacccataacaaggtgcggaaaaatcaaaacattcatgcagcacgtgattttaatttcttcaggcgtttgacaggagcaacacccttaattgccttcctggccctcttcagttttggctttttggtaggaagaggcatctccctgataggacctggaggcacaccctttttgagtgcacttcctctgggtgttgcagagggaggcaacctcaaactctgaggaggtaaaggattgtgtggcttccacaccaagttatttatcatcgaaaatcttaccttctttgtactcttctctccactcttggccactgcactctcctcaccatccaaatcagcagaatcctgagacgccttccctttcaaactctttgtcctcttcctcttcttagacacagttcctcctgtagcagatgcagcctgaggtgaatcacacgcgctcgcaactccatcatccaaacccgcctcctcagcaaccttctcaaattgcctttgcaggttagcaatcacagtttcattcaacagcaccacactcccatcgtttgaattcccaccattctcacaagccacattttccttgtcactagaatcctgagcagcggcatcacccttcttcttcttcttcttcttcttgctttttccaccttcaacagaaaccttcttatccttcttgcacttcttcaacacctcaccattaccagcaacctcagcaggccccagcggaaccaattccggcacttcctcctcctcctcatcaacaacaaagtcaggaatcacaaactcgaaccccgaattcacggactccttctccagcttcaaaaactcggaatgcagcgcaaacagcaccttcctattcccctgaatgcactcagcagaagaacccacttcataaagcctcccagaaaaccccatcaccaatgcaaccgttccaattagaacaacctcgtcacgagaatcaacttcaacctcgaccccactcttcttaacctccaacaacctctttcccatcttaagcaacaaatcaaacaccccagacctaatcttccccaccaagaccttatcatgcaccctccccatagccgaaacaaacggcttaagcagcacctcgagaacctgctgcttgagcgggagaaaagggcgaagctcctcgagaaaaacagtggcaatgtggtaattaacaccgttcccatgagacttgttatcctgagcggagagagtcccctcgtcgaaaacattcattaagcgctgcacaaggaggagatcccaggaattggttttcatgagggagaagagcttggagacgaacctgcggattagaaggtagaacttgtcaaggcgcagcgcgtcgatgccggaccactcgcggcgcatggtgaggaggaaggtggacaagtactgtagggagacggagaggtggagggataataggagagaggagaggcgatcgacgaggtcggattggacgaggggcttgtcggagtgccacatgcagtagaagaggcccttccaaagcttcttggcatcgtcgtcggagaggggctgggactgcgacgggagccatgatttcaggaggaggcggagggatttgtctcgagtggttttcttgcagcatgccagctgcttcaccagggagcggccgatctgggacgcctgctcctccattgggaaaccctaactgttactgatgccttcaccaccaccgtcccaaccgctttgggaattgcagttcttttttaacaaactaaaaccctaacggatcactactcagtgcgggttataacccccttctggcgtcttctcgcagccgtacggacgcgtgggcggacgcgtggg

SEQ ID NO: 133922 - DNA, 263 bp, Glycine max
  Clone ID: PAT_MRT3847_91938C.1
cggctcgagctggagacgacgtgcagaaatggcacctcgaaaggggaaggaaaagaaggaagaacaggtcatcagtctcggacctcaggtggctgaaggagagaatgtatttggtgtctgccatatctttgcatccttcaatgacacttttgtacatgtcactgatctttctggcaaggaaaccatctgccgtgtgactggtgggatgaaggtaaaggcagaccgagatgaatcctcaccatatgctgctatgttggctgccc

SEQ ID NO: 133923 - DNA, 428 bp, Glycine max
  Clone ID: PAT_MRT3847_91939C.1
aaaaaaaggggggccggggggaaaaccttttccaaaaaaaaaaacaggggcccggcaaataaaaaaatttgggtaaaaacccaagtttaacctttgggaagggccgccaaatttttttgggcaaaattaaccccggaccggcctaaaaaaatccccccacgggaaggttttttttaaaaaaagccccttttttgggaaaaagccttcggaaaaaacccatttttttccaaagctaataaaggggcccccccggaacccccggggggggtttttggcccaattccttggggcccgggacattccccccacccaaaagggggccccccacccaagttttttcccaactttcttgggaaaggcaaaacccccaggcccatcccccgggttttggggccaaaattttacgggaattttttggccaaaaccct

SEQ ID NO: 133924 - DNA, 371 bp, Glycine max
  Clone ID: PAT_MRT3847_9193C.1
ctcggtgtgtcaaggtgcctctatgcattgcacatgctttggctgcaccaacagaaatattactaatcaaggacccctgtccactaccatgtgcctgagatattaaatatggataggatccacgctttgactacagataccgttgatttagaaaatgcttggaatttcaacgatcttggaataggtacttacaagctgaaacgataccctattgagtatattatctcatatacgaaaggaggctcacaattcggttctactatcaaggatagggtcactctatattcatgcacgtaagattcttcggatgtttgatactgaatcatctttctgtgttgctcgtactaccaccatctaatttcactatttaa

SEQ ID NO: 133925 - DNA, 750 bp, Glycine max
  Clone ID: PAT_MRT3847_91940C.1
gctacgcgaggagggaggaatgcgcgctcactcctccgcaaattcaaactacaattctctctctttccctctttcttcttctcgcaccaccctctctcactagatccaactccctcaaaccctaacgctccaaaacaaaaaaaaacccctcgctcttaaatttcatcttccgacactcatcaaacaccatctatacctttgactcaaccacatgaacgaggattgcaattccagaacagcgtcgctgttgttgtcctcatcctcctccccttcgaattccaagaatttgagttgtttcagatcgtgggagataagcgtggaagctctcacgcgggtcacggcgctcggaaacgggttaagatgaaagatcttgacgccgttgttcactctgtggaaacgaatagccgttattcgggattcaaaaacgacaaagaaaacactgtgcagtggtcgttgggagctacggatggttctcaacaagcgaaaacgggaaggaaagcgatgtcagaagagtttaattttgcggctaggcctctggatctcaacactgatgtgtgcaaaagtggagggtgtgagaagcaagaaaaaggacatgctaatttagtagtctcgaggggaattaatgtggatctgaatgtagaagatgttaccagccctgtgaatttggaagccgcgaattcctctaaagggcacaatccttttaagtcgaaggatgtgtccgagagtgggagctgtgttggacctttgggg

SEQ ID NO: 133926 - DNA, 510 bp, Glycine max
  Clone ID: PAT_MRT3847_91941C.1
ccttctctttattttcaattttcatccaaaagattcttatgatagttacagcataggtgtagaagaagctggggaatatcaaattattctaaacacagatgaaataaagtatggaggtcaagggatccttaaagaagaacagtattttctaaaaactatcagcagaagagttgatggccttcgaaactgcttagaggtgtcactacccagcagaacttctcaggtttacaagttaaggcggattttgagaatataaggcacactgcatctatggaagtaactttcaaccagaatttcatgacattttaccactgaatgcttttctttggtatgtctaccaatgtaagaaaaggataagattaaatatgatccacagcatacatgtaaatctacatgaaggagcagatgttaattgaacgggttgatggaaagccactttctaagttgtgggttattctaaaatccctgtgaaagctttcagagcaatgaatcctaatcctaaatttatac

SEQ ID NO: 133927 - DNA, 269 bp, Glycine max
  Clone ID: PAT_MRT3847_91942C.1
ggtttgaaactgcaatgggaaacttgcatgctaaaaagcgtgacactcaattttgcagatacgttgttgaatgccgagagaactatcactaacacaaaatcttgttttcaataacggttctggaacactgtctaccaaaagaacatctactaccatcagctatgactttaaataccgagaacaggatactgtttcctaaagaaaagtatgctcagaatcatgatatcttgaccactgtattaattgtaacaattgccttgaataaagta

SEQ ID NO: 133928 - DNA, 293 bp, Glycine max
  Clone ID: PAT_MRT3847_91943C.1
gcgccgactcttgtgctttttaactgattccggaatgaattaattaattttcttccctaaaaggaataaaagtaacccatcaccattggcagaagaactaatctagctttctcagaacttctttccaccattgattgtaaacatttactaacaacttttaacacttacatgtactactacaagtgctcaacacatatttgcttacaacaaaatcctagtacacaataacttaatattaaatacttgcatgtgcaacaacacttattatatccccaaacatttaatatcacctt

SEQ ID NO: 133929 - DNA, 300 bp, Glycine max
  unsure (1)..(300): unsure at all n locations
  Clone ID: PAT_MRT3847_91944C.1
gaatgacaggagagacagtgaacccccaagcttacccctttggccggtggccccacntcctcattnaccctncntanatccttgttcaacaagtggccaattgnaagnagttcnaaanaaggtgnaatggaggccattnaaaccctgaaaagagggntntcgggattgtnntnaaggtgctgatactggacccttggaattttcttccaattcctcnnatcggcgggggttanaangtgcccnncgngttntccctcannaanaagnacttggggtgcatgttggggnaccagnccangt

SEQ ID NO: 133930 - DNA, 347 bp, Glycine max
  Clone ID: PAT_MRT3847_91945C.1
taaaaacccagattgtcaattttgttctttttaattttgaatacatatttttatccaaaaaacaattgttgttattatgtttttgctgtctcattagtggaagttatatagttcactagagatagcatctggatgctacagttgcggttgactgccatgtcaaatgacaacagttattggtttccaagaattgataataactgctgatggagaaacagattactgagtttcaataccaaaataccaatgttgcaaatcaatttaaacaacaacgacccttactaacttgcagtcatttttcttttaccatacagattctaaccatgtatttaagatgaaactttaaa

SEQ ID NO: 133931 - DNA, 223 bp, Glycine max
  Clone ID: PAT_MRT3847_91946C.1
ccatcatgttttttttaatatccgcctccgaacgagacggctttgaccactaacccttcgatactcgctatgtcagacattcgctgtccaggcctacgacggtgtaggttccacaccagacggaggcggtttacaggatccctccctagctgttgctgctggttcggagcctaatggccgactcctccgccacctccgccgccggagtgaccggccaaggacc

SEQ ID NO: 133932 - DNA, 813 bp, Glycine max
  unsure (1)..(813): unsure at all n locations
  Clone ID: PAT_MRT3847_91947C.1
cggttgcgccacgcgtccgctctctctctcactccaaaatcccaaaaccgaattcacattcacaaccacacctccgcaataaaataaaaaaaggtaacctccctcagtccctcgctcatggaagagctctccgcggggcctctcgtccccgccgtcgtcaaaccggaagcgtccaaaggcgccgccgtcgccgccgacacctccgaaggccgcggcctccggcggcacgttcccggcctccacgtcggagccggacaaggacttcctctgcccgatttgcatgcagatcatcaaggacgcgttcctcaccgcgtgcggccacagcttctgctacatgtgcatcatcacgcacctccgcaacaagagcgattgcccttgctgcggccactacctcaccaacaccaacctcttccctaacttcttgctcgacaagctactgaagaagacttctgcgcgtcaaatatcaaaaaccgcttcacctgtggaacatttccggcaggcattgcaaaagggttgtgatgtgtcaattaaggagctagacacccttttgtcacttcttgccgagaagaaaagaaaaatggaacaagaagaagctgagagaaatatgcaaatattgttagacttcttgcattgcttacgcaagcaaaaagttgatgagttgaatgaggtacaaactgatctccagtttataaaagaggacattaatgctgtggagaaacatagaatggaattgtatcgtgcacggnacaggtactctgtaaattacggatgcttgatgactctggtggaagaaaatcatggcattcatcaatg

SEQ ID NO: 133933 - DNA, 2331 bp, Glycine max
  Clone ID: PAT_MRT3847_91948C.1
accccaattccgaagcaaaaactaccttcacatccacaaaccacacctccgccataaataaaagtaacctccctcatggaagagctctcagcggggcctctcgtccccgccgtcgtcaaacctgaaccgtccaaaggcgcctccgccgctgcctccggcggcacgttcccggcctccacgtcggagccggacaaggacttcctctgtccgatttgcatgcagatcatcaaggacccgttcctcaccgcgtgcggccacagcttctgctacatgtgcatcatcacgcacctccgcaacaagagcgattgcccttgctgcggcgactacctcaccaacaccaacctcttccctaacttgttgctcgacaagcttattgttatacggtttctgtaccacatttgtagctactgaagaagacttctgcgcgtcaaatatcaaaaaccgcttcacctgtcgaacattttcggcaggtattgcaaaagggttctgatgtgtcaattaaggagctagacacccttttgtcacttcttgccgagaagaaaagaaaaatggaacaagaagaagctgagagaaatatgcaaatattgttagacttcttgcattgcttacgcaagcaaaaagttgatgagttgaaggaggtacaaactgatctccactttataaaagaggacataaatgctgtggagaaacatagaatggaattgtatcgtgcacgggacaggtactctgtaaaattgcagatgcttgacggttctgggggaagaaaatcatggcattcatcaatggacaagaacagcagtggcctcggctgcgagaagacgacagaagggggagggttgtcatcagggagccatactaagaaaaatgatggaaagtctcatattagctctcatgggcatggaattcagagaaggaatgtcatcactggatccgattcacaatatataaatcaatcgggtcttgctctagttagaaagaagagggtgcatacacagttcaatgatctacaagaatgttacctacaaaagcgacggcatgcagctgataggtcccatagccaacaagaaagagatataagtctcataagtcgagaaggttatactgctggtcttgaagattttcaatcagacataatttctttcacatgcaacagccgattgagagatattgtcggaacttagacatggggatatatttcatttagcaaaaataatttcaagcatagtgtacttccgcgatgatgatttgtttgcttctgcttgagtttcgcggcgaatcaaagttgttcattattctgcttttatgattgaacctagagaggctcattattctgatttggagaagtctacacattcaaaacgtagttgcttttgtaggaataaatttggaaagaatcaaatagcttgtaattgttatgatcgatttgtatctgattaggatgtaatcattcagaaaagtttaatagattataaagagcattaaaagggtgtatggattttagtcagttcatgaacggatccctctatgcttgtaactggtcgtattgacagtaacgtcaaaatatgtttcactaatcaggaagctagtgttctaaatatagacatgaaagcaaacatatgttgtgtcaaatataatcctggatctggcaattatattgcagttgggtcagcagaccatcatatccattattatgatttgagaaatattagccgtccagtccatgttttcagtgggcacaggaaggctgtttcatacgtgaaatttctgtctaatgatgaacttgcttctgcatcaacagatagtacactgcgattatgggatgtgaaggaaaacttaccagttcgtactttcaaaggccatgcaaatgagaaaaactttgttggtcttacagtaagcagtgaatatattgcgtgtggcagtgaaacaaatgaagtctttgtttaccacaaggaaatctcgagacctttgacttcgcacagatttgggtcccctgatatggatgacgctgaagatgaggctggatcatatttcatcagcgctgtttgctggaagagtgatcgccccactattctaacagcaaatagtcaaggcaccatcaaagtgctggtgcttgcagcttgaacacgagaaaaaaaatgaaatagaatgtggaattggtattatcttttcccatatgctatgattgattgtatcatttattaaattgtacatagtattcgagtgtatatggcaggcgttagggatcttaatgaaatattagtcgagtgcttaaacctttatcaataaaccaattaagggactcaacttcaatttttgtcaattgaggacctc

SEQ ID NO: 133934 - DNA, 453 bp, Glycine max
  Clone ID: PAT_MRT3847_91949C.1
cctgcatgctcctccaagccaccaccaaccgctacctatagtttctagtatatatacacaaaacaacacaccccacaaacatcacagacacagacacacaaaagtcaaaagggtcgcgatggagcaaggagtcgaagaaggaggtggcatgaataagatacctcgggattcaagagtgaaggagataagacaaggtgatgcacaaattcaggttcaggctcctcagcaaccccaaaagtgtcctcgatgcgactctctcaacaccaaattttgctattacaacaactatagcctctcacagcctcgttacttttgcaaaacatgcaggaggtactggactcaaggtggaaccttgaggaacgttcctgttggtggcggttgccgcaaggggaagcgcgccaagagttctaactcatcttcttcggagaatatgaattcttcttccagatcact

SEQ ID NO: 133935 - DNA, 289 bp, Glycine max
  Clone ID: PAT_MRT3847_9194C.1
aattcggctcgagaataacaaagaagtccttcccgttaacaataagaaaaatgtcacaaccatattacagttagtacagattacattagcctgcaatggctgcaactgtaacttgtatggctgccaatgtcaaattccactcccaccagagccatgacaataaaacaaaagagcatcccacaaattacaattgcaggatactcttgcataatcaacaacacacccaaggtaatccaaaatataaaaaaaaaaaaaaaaaaacgatattcatatacagacacagtcggtt

SEQ ID NO: 133936 - DNA, 406 bp, Glycine max
  Clone ID: PAT_MRT3847_91950C.1
ggaaacgtatttcactatcacgcatacatggtggagcacctaagcacactggagtcctccctagctcagtccattcaccgccgtacgctctgagatcatccgtcgtctacgcgaactccgcagcgatcctttcgatctgtcatagcaaatgggcaagagagttcactgtcctaccacctattcaggcctcattgctatgactgcaggtgaagatactgttgatggctctctgtaggttggcattggagatgttgacaaacgtaagaggacttattatctcaatgcggattcagcaggatctggcaaatcaagtgatgaggcattcatcgaatgtacaatagcggaggcagttgcaattgtgctgtattaacaatatgttgcaaatatgataaggcttttgggtgat

SEQ ID NO: 133937 - DNA, 646 bp, Glycine max
  unsure (1)..(646): unsure at all n locations
  Clone ID: PAT_MRT3847_91951C.1
ccacgcgtccgctttagaatatgctctctctcttgagtctcttcactccgacattgctcgccttcacacccccacaaacacaacacgttctgagacgtatttatagttatccccattgtcgttattttctttcttactccctctcaattaaacggtgttagggttagaagtaggattagggttagggttcctctttacccgcgtaattctaccttccttccaacaataacaacaataatgttcggctccatcaaccagatcgtctccgccgaagacaccgacggccccgtctccgaccaccacatccattacagttcccacaccatcgaagacgacggcgccgcctccgatcaccacatccattacagttcccacaccatcgaagaagacggcgccgcctccgaccaccacatccattacagttcccacaccatcgaagacgatggtgccgctgtcgaagacgtttccgccgttccgggccctgaaatctctatcgacaattctagccagctcacgctctcgtttcgcggccaagtctatgtcttcgatgctgttacacctgataaggttcaagcagtgttgttgctgctgggaggaaatgaactaacttcnggttcgcaatgtgcggagctatcatctcgaaatc

SEQ ID NO: 133938 - DNA, 369 bp, Glycine max
  Clone ID: PAT_MRT3847_91952C.1
ggctcgccaaatgcggatttcttcctctttcaagattcatatctgaagtaaatgctatcaaaaggagaataacccgatttgaaatgcaccaaactctgaaattgcttcaaggagagatatcgcaactaagtgagtacaatccacttgatctgttctctggatccaaggaaagaattctgaaagctattaaaggtctccttacaactcctcaaaacaattttcgtgtatttttgaatggctctctcatacttggaggactgggaggtgttgcaaaaaatacagatgtttgtattgctaaagcatttgaagatgaacttaagtcaatcattcgagctgatgatgatctatgtacaaataacttatctactc

SEQ ID NO: 133939 - DNA, 373 bp, Glycine max
  Clone ID: PAT_MRT3847_91953C.1
caaggaagcgtcattggggaaaactcattggaccgaaccaaaaaaagaccaccccaaaaaagactttttggccggttttaatcagggaaaaagccaaaggggaccaaagaaaaacctccagttttaacaaacagtttcccagggtcggtttatttagggaaaacaaaaacccctccgacggaaatataccttcccggaaaaaaactcccgctcactttttatccgtttggcaaacttcctaaagttaataaggcccccccttttcctgggggtctcccccagcttccgtttttgattcaacatgggagtcttggccagtttaataagaattttccttttcctaataagaataaaagtcaacggggccaccctt

SEQ ID NO: 133940 - DNA, 432 bp, Glycine max
  Clone ID: PAT_MRT3847_91954C.1
aaaattgggggatgttgcttcattaaaaaaaaatttctacaaacaaactaataattactaaactaaattgttctaccagagagaacaaacaataaaattattaaatttgaaccccaatctttatagtttatataaaaactgctaaaagtgtcctcacttaaattttatcacttaaagaaaatttcaaaattatttaaaattatcaaattgagcatcaaagctatttcaattaaatttataccacccactagtttcaagcttaattctgtccttccaagaaaactataaatcttcatattcaaacttattttaaaaatccattggttaaaaatttcccttatataaactgtatattacctaatatttttttcggtgaaacacaattgccaggggcacatacttttcaataattttttgatcggaattaccatt

SEQ ID NO: 133941 - DNA, 1101 bp, Glycine max
  Clone ID: PAT_MRT3847_91955C.1
caagaactaaccgtgcaacacaagctggatactggaaagctacagggaaagataggccagtgcactctcaaaagaagcaagttggcatgaagaagacattggtgtactatagaggtagagcaccacatgggattagaaccaactgggttatgcatgaataccgtttaattgaatcagttcctggtactgctctctcatctttgaaggattcctattcgctgtgtcgcattttcaagaagacgattcaaattccagccaaacctaataataacgaagaagaacaacctgagattgcaaataagaaggaatcaatgtggatctcagaagaacaaatgttaggggaagactcaagtggcactgagatttctagagaaatggaaaatgtggatgaaaaaattctcaatcatgaacaccctaaatttccttgtgatgcttcttcctctgatctcactcaaggagcatgtacacccacagataccggcatagcagaagattttcaaccacaatttgcatgtgatgaagcaaacagtgcagctaattcatatacaatgggaataggatactccacaaatatatttcaggatgtagaaatgcctagctatgctgacatgcattatcaactcccatacacacctttggtgatggaagatttcccacaaataaatttaccagagacaaagacaacgaagccagaagtcaccgatgactgcatgttatatgacagatacagggactgcatgaatggaacactagaagagatcatctctttgtgttgcactcaagataattccgtcccttttcctatgctagaatgattacactaaccaagatgactcaaactatagcatcaaaatattcattagacacagagaaacttgtgttggctaaaataacgacacaaatgggggattgtttttccagccacatagaaaaggctacacatataatgtactaaacatatagtagaatatgctgagccaaggggggctcgcatacaattggttttcaatttttttttgttttatcttttttcattctgtgttcttcgttttttgtaggggttgttcttcctacttttataggagttcttccttcttttaa

SEQ ID NO: 133942 - DNA, 1583 bp, Glycine max
  Clone ID: PAT_MRT3847_91956C.1
ccagatcttgccaaggctgctgaatatacagaaaaacagcttcttataaatgtatctgcacagctcagtcttactggaaaaggttatagtaatttttctgtgctttttctggagggtctttatgatccacatgtgggaaagttgtatctaattggttgcagagatgttcgagcaccatggaaggtcttatatcagagctatgaccttgaggctggaatggactgtttgattcaggtggttgtggcttatcctcctaccacaactcggtggctagtcgatcccagagctacaatttcgatagaaagtcaaaggactgatgatgatgcccttcgattcgatccaataaagctcaaaacatttccactcatatacaggaaacaacgtgaggatgttctctcacgtagaggtgttgaagggattctccgaatcttgacgctttcatttgccattgggtgcattttaagccaactgttttatatacaaaaaaatgtggattcacttccatatatatctcttgtggtgctaggtgttcaagctcttgggtatagcattcctctggtcacaggtgcagaagctctttttaagaaaatggtttctgaatcttatgatgtgtcgcctagtgaattggagagcagtgagtggctccatgtcattgattacactgtgaaactgctattgattgtatcattgctagtaactctgcgactttttcaaaaggtatggaagtctcgcatcagattgcaaatgcgtacccctcttgagccacatggtgtccccagagataaattgatatttctttgtaccttcaccatacatgtgatagggtatgtaattgttctaataattcatggcacgaagaccagccagaaggctcttatagcaaagacatacttggttgatggaggaaattctcattccttgccgggttgggaaacagaattggaagaatatgtaggtcttgttgaagactttttcttgcttcctcaaattattgggaacttaatctggcatatcaattgcaaaccactcagaaaactatattttattggaatcactctggtcagacttcttcctcacatatatgactacattcgagctccagtttcaaatccttacttttatgaggaatctgaatttgtcaatcctaatttggatttttactcaaaatttggggatattgccattcctgtgactgctatcgttcttgcaattgtggtctatattcaacaaaggtggggctatgagaagttgagtcagtttctgacatttgggcggtataagattcttccaactttcagataccaaaggttgtcttctagggctggtgaatctgaactagttcctggtatcaatggtgctgctgctgcaaaagagaatgagcaagttgatgtagaatgatgtacactttagaattactgacaacagcttttgtacacccataatatgaaaagtaggcaagagtttgggtggatgtactattatgtatgaggttgctcacatattcaataatcaagtgaattttgttgtggttttaaaactcttcaacttctgattctttattctccaattattgctgcttaggt

SEQ ID NO: 133943 - DNA, 440 bp, Glycine max
  Clone ID: PAT_MRT3847_91957C.1
aaacccgtgaggtcattattaatgtccaagaccgtgttgggcccccagtgggcctcggtgtccggagtcatgggcaactttcttggtgtctggtctaatgcacgagctgattttctactacgtcacacgtgttagtcccacgtgggaggtcacgtgcttctttttgctccatggggtgtgtgccgttgcggagtttggtgcggtgaagtggttgggcgctaaatggagactgcattgggccttgtgtgggcccattacggtggcgtttgtgatagtcaccgccgcgtggctcttctttccaccgttgatgcatgatggcacagatgagagaaccatcaaggagttcaacgatgtagttgagtgtgtgatgggaaaattttactagtcccatttcattgaacattatatgtttcccttatgtcaaattttccattattcac

SEQ ID NO: 133944 - DNA, 835 bp, Glycine max
  Clone ID: PAT_MRT3847_91958C.1
gtattttttttttttttttttttttttttttttttttttttttttttttttttttttttttttttttttttaatattgttttttaaaattataaaaaattattttaaattaatttgaaaaaaaaaaattttaaaaaaattttaaaaaaaaaaaaacatattttaaacttgaaaaaaaaaacaaaacacccttttaaagaaattaaaaaaattgtcaacaaaatttggaaagtaaattgttggggctttgaaaatgaaaaaacaaaaaaaaagcctaggggaaccctaggaaatacaaaggaaatttgaatataatgccaaaaaaacttaaaaataagatttcttaaaacaaaaaaaaaaagttttttaaaaaaaaaaatgggcttgtgcgagtaaaaaaatgtggaggagaacattggggtatttgtattaaaaaaaatcggaggttaaaaacacaccaggggagaaaaaaaaagagaaaaaattaccggaaaaaaattaccccggaagggtggggccccagaagagagtgcacccaaaaaaaataaatcccaaaagaagaaaaaatcgtgggggaaaaaaaacaagggttccccaaaaagagagaaaaaaggggtataaaaaattgtattgttcaaattaaaaaaataaccagaacaaataatatccccaaataaaaaaaaaaaataccggggggtaaaaaaaaatgggggggagagaaaataaagaggggcgaccataaaaagtgattaataaagaaaataaaaaggtggggggtgttttccacagaagggggataaataaaacacataataaaaaaaaatgtgggggaaaaa

SEQ ID NO: 133945 - DNA, 711 bp, Glycine max
  unsure (1)..(711): unsure at all n locations
  Clone ID: PAT_MRT3847_91959C.1
atncaacantaantaanannattnaacaaaangaaaaccanctagnntggnnaaannnntntnannntannntatnannnnnnnannnnattttcaggctttaagaaccaccgngttntgnttnaataacagnacttngnnatgaagatgccctnaaactngagtggttacaaaangngnnnnggatatatnatgcatatnatnaacagaaaannaannaaannnngaanaacaaaaaannacaangggaccaaaaaacaaaaagaaaaatnnnnnanatnnnngntngntaantaannaangnnnnnnntnaaggnnnnaannnnngangnnnnncaaacccaaaaccttaatcccatctcttccttggaaaatgggggggagggggccaagcccccgggnataaagcttttaaaagatacatncctgaaaacaaatngaacctttaaacacctttggaatgccgggaccccggggggggggaaacccccaggaatttgggggaccccgggaccctggggaagcggaacccaaggtttttncccttataagggaaggtgggnaatgagaagagcttgggggggaatnnaagggggaataaggngggtnccctngggggggaagaaatggtnancccagttgcacaaanncccacccaaaannaangaaagcccggaaagaanaaaaaagggaaaaagcgcgggggggggg

SEQ ID NO: 133946 - DNA, 930 bp, Glycine max
  unsure (1)..(930): unsure at all n locations
  Clone ID: PAT_MRT3847_9195C.1
gtgctggggtaacagattcaactccagtgcatgtagctggggatgacattgtgtttgccaatnntgtcttgcctacaagaaatactgcgcatgagacaacanaaatcgaagaggaggtgtgcggctcatcgattcgagaatgcttagattttctgatgaggttgttttacaaggttgttccatggaagactgaacctgtggaaactaactctgacccatatcattttgaaccagttgaagcaacatcgcaccactttaggatggaagatggagtcatacatgtgtatgcaagtaaaagtgacactgaagagaatccccctgttgagagctcaacgagattttttaccgntntgctttatattctaaaagttatgtctattgggaatgttcgcacttcatgctaccacaggctacgatttcttgaggaaatagggagtttctggctcagaagggtgcaccccaccgagatttttacattntcagaaaagttgatactcatattcatcattccgcttgcatgaatcagaagcatcttgtgcgcttcatcaagtccaaattaagaaaagaatctgatgaggttgttatctttagagatggaaaatatatgacccttaaggaggtttttgagagtttggatttgactggatatgatctgaatgttgatttgttggacgtccatgcagataagagcacattccatagatttgacaaattcaacctttagtataatccttgtggacagagcagactatagagaaatatttttaaagcaggataatcttatccagagaaggtttctggctgaagtaacaaaggaagttntgacagatcttgaagcangcanatatcagatggctgagtacaggatctctgtttatggaagaanacagagtgagtggggtcagctggctagttggtttgtaaacatgc

SEQ ID NO: 133947 - DNA, 507 bp, Glycine max
  Clone ID: PAT_MRT3847_91960C.1
gggggggaattttaaattgaaaaattaaaattggcataagcaatacagcaacaggggaccccaccttaattttggacaatttaattcctaacaaaattttgtcaataaaaaccaacaagtagcgggggggggaaatcaaaaaccctttttagaagaaattaaaaggggcgggggaaaaaataaaaagaaataacttgccttgggggaagggcccatgacatgaggcccccgttaattagcttggtgggccttttttttttttaaatttccccccaaaaatattggactatttcaccttataattgggcaaggacctttaaaaatacccttcaattacaaaaaaccttcgggggggcccccggggggaaagcacgggggggctccttattaaacccccccttccacttttttttccttggggccgggttaatttggttctccctacaccccaaaatggaaaaagccggggcccccctatacatataaatatctcggccaggggccaaa

SEQ ID NO: 133948 - DNA, 438 bp, Glycine max
  Clone ID: PAT_MRT3847_91961C.1
ggctctgaaaagcttcggcttttctgatcgagaccggacgaaagacttcggcggtacacgttttaaaggaaacaccatcgttgccagcgatgtgaatcgcaggcagctcgtcgatttcggtcgatgaaaaatggtgggacctcgtcaaacgttgtgatcagccggttcaaagttcaagtccaacttgagagtttgatcctggctcaaagcgaacgctggcggcaggcttaacacatgcaagtcgagcgggcgtagcaatacgtcagcggcagacgggtgagtaacgcgtgggaacgtaccttttggttcggaacaacacagggaaacttgtgctaataccggataagcccttacggggaaagatttatcgccgaaagatcggcccgcgtctgattagctagttggtagggtaacggcctaccaaggcgacgatcagta

SEQ ID NO: 133949 - DNA, 336 bp, Glycine max
  unsure (1)..(336): unsure at all n locations
  Clone ID: PAT_MRT3847_91962C.1
tcctcttaccaaccttttctttcttttcattnanncnnnntntncgggtacatggaaacttatcataaaccctgatccccntcnncacancctcnnataacaagattattgtctgcttcgtcgtcgtcgttcaccataacaatccgctgtacatacaaatcttcactgatgccgatgattctctcaagctccaccacatcttccattgctctctcgatgtggtcgactagcgagttaacaatcctaaaaagtcttggcctattcttaatgagacctttttttgactgctttatcctatttaaaactacaaagtatttggatatcttactaatacta

SEQ ID NO: 133950 - DNA, 377 bp, Glycine max
  Clone ID: PAT_MRT3847_91963C.1
ctaaggcaatttccgatcattgctcaaatgggataagctctcactaccaattttctgatgcttggtgctctaaaaagaagatctgaccacatcttctactgctgaatataccgccttttttaccctcgctttctttggggggtggctgcagaacacgggtaacaaacatattcctatgatatctgtttgggagccggcctcacgagataaccttgtgcataccgagtgttgcaaaggactgacggttattggggggagccgccttagcttccacttcactgactgcagtaggagcaatttccgctgttgccaactcctggactgcaatcctagggctgagcctgagttcactgagcagaagcatgtgcacatgctca

SEQ ID NO: 133951 - DNA, 501 bp, Glycine max
  Clone ID: PAT_MRT3847_91964C.1
ctcgagccgtgttttttttcttccttcctaaagaacagaaatgaaaccgtccgtttccgtattgaacgtagccccccaaaaatgccgtccaagttccgattcctaaaactcttcactcaccgtctctctcctagaaccgccgccgccaatggctcgcaccgcttcctatacggcaaccctctctgcaccatggcggagtccccggagctccctccgtggctcaagttctccgacaccccgacccctccagacgctgactcagacgacaacttcgttatcccttcactcgctcactgggtcgacacccacatgctcactaccaagcccaaagtcctcacgcaatcacccaagcaagacaacctcgacgaactcgaagcagtaaccaaagttctccaaaaacgctacccttctcccgagttagcctctttagcactcgatggacttagttttcagccatcaagcggtttggtttcgcaggttctcaacagattcagcaacgac

SEQ ID NO: 133952 - DNA, 2027 bp, Glycine max
  Clone ID: PAT_MRT3847_91965C.1
ccacgcgtccgttttgaaacctttcattccgtttccgtattcaacgtagccctcaaaaatgctctccaagttccgaatcctaagcctcttcactcaccgtctttctcctagaaccgccgccgccgccgccaatggctcgcaccacttcctctgcaccatggcggagtcaccggagctccctccgtggctcaagttctccgacaccccgacccctccagacgctgactcagacgacaacttcgttatcccttcactcgctcactgggtcgacacccacatgctcatcaccaagcccaaagtcctgacgcaatcacccaagcaagacaacctcgacgaactcgacgcaataaccaaagttctcaaaaaacgctacccttctcccgagttagctgctttagcccttgatggacttagttttcagccatctagcggtttggtttcgcaggttctcaacagattcagcaacgactgggtcccagctttgggttttttcaaatgggcaaaatctctaacaggttaccggcattcccccgaactctacaacttgatggttgacatcttgggaaagtgcagatcctttgattccatgtcggagttggtggaggaaatggcaagactcgaagggtatgtcacactggaaaccatgaccaaggtaatgaggaggcttgccagggcacgcaagcatgaagatgctattgaagcatttggcagcgtccggaagtttggtgtcaataaggacactgcagcgttgaatgttctcatcgatgcattggtgaaaggagatagcgttgaacatgcccacaaggttgttttggagtttaagggtttgatacctttgagttctcattctttcaatgttttgatgcatggatggtgcagagcgaggaaatttgacaatgcaaggaaagccatggaggacatgaaggaactcgggtttgaacccgatgttttctcgtacactagtttcattgaagcatactgccacgagagagatttccgcaaggtggatcaagttttggaggagatgagggaaaatggatgcccccctaatgctgtgacttacactactgtgatgcttcatctggggaaagcagggcaactgagtaaagctttggaggtttatgaaaagatgaagtgtgatggctgtgttgctgacactccagtttatagctgcatgatattcattcttggcaaagctgggaggttaaaggatgcttgtgatgtgtttgaggatatgcctaagcaaggggttgtgagagatgtcgtgacatacaatactatgatttctactgcttgtgctcactcgcgggaagagactgctcttaggttgcttaaggaaatggaagacgggtcgtgcaagccgaatgttgggacttaccatccgttgctcaagatgtgctgcaaaaagaagagaatgaaggtgctcaagtttttgttggatcacatgttcaaaaacgatataagccctgatttggccacttactcgctcttggtaaatgctctgtgtaaaaccggaaaagttgcggatgcttactcgtttttggaggaaatggtcttgaaggggttcactccgaaacccagcacgctcaagggattggctggagagcttgagtccttgagcatgttaaaaaaaaaaaagcgtgtttaggaatggatggatcgcttctcgcagaaacaaaacatttagctgttttcgcataaaatgaactatttttaagtctgcttgtgattgatccctaaagtttcgtcccatgccatgaatgaaaatggaaatccccttcgtctttgggaatgaatcttgtgctattttcccatcatgtgaggattttgtttttattcttctcttcttaaaggtaggcaaattttaatataattccacctctcgtacatttaagaagagaaagattgacacatttttacgtcaattttatttgctcgatgaactgattggagtgtacttgtgttttgaacgtgacttatgtatgttttcttcgtactcaagtaggcatgattaccgattgtaagag

SEQ ID NO: 133953 - DNA, 119 bp, Glycine max
  Clone ID: PAT_MRT3847_91966C.1
gatgacgagactgccacgcctattagaagttgaaaacgaggcgaaagcttggagcttagaaaatatttcaaaatgttgctagacgccggtgcaggtatatcttccccgctcgacttggt

SEQ ID NO: 133954 - DNA, 122 bp, Glycine max
  Clone ID: PAT_MRT3847_91967C.1
ctttagccaactcaggagacatatagtgattcgtggcatgccgatttcgacgagaggctttttgaggtccttacacgtcctcactgtacttaacatgaaccacgttctgtgtcgaactcgaa

SEQ ID NO: 133955 - DNA, 1279 bp, Glycine max
  Clone ID: PAT_MRT3847_91968C.1
gttcaatacacttttaaataccatgtgtgtgtgtgtttgacatgaaagattttcctccagctttgaaaaattgaattgacacagcaatatatctgacatagattcacaatcaaacaaagattacaagcaaaaactagaaacaaagaaagagggaaagaaaaaagaagcaacaaagccatgagcttgaacattcaaaataaatattgacagaaaaatttgtagttgaggaagagcacttgcacaggtgtgactgaaagcaataatttctttcaagtgattcagttaccagaaaggaaatggatactctacagcagagaagagttactgagaagtgaactagtcttctaacttttgctttagtgtgccctttttagacttctttaactcccatggtggtaggcaacctttatagtgagagtgcataaataatgaagacattgacacttccttctgaggcattgagattgacgacaagcaactgaaggcggttcgtagtcttcgtttctcactatcacacccttgaaagtttggatcatcatgctgaacagtggaagttttaagagcatcagggagtatacagttgcaaaaggaacctattcttgcaagacgattgacccattttggaatagaattgcctgttagcttgtaacaaatatcctcacagaaatggttgcaattcttcacaatcaagtgataagtatcaccattgtaatttgcagactggcgctccatgaactctctaatctggaaaggatctaagtttgtagttcccatgaatatcgacttcctaaacttaaagccaggacactgtcgaggctcaacctcgaagacaccacttgttggatagtcatgggctccaaatgcatattctactccataaacttcaacccctgagtggaaaataccaattcctgcccaatacatatagccatttacagttgtcaagtcatagacattgagatagacaggtgtattcccaggtatgttgccagctgatttcactttagagaatatgcaaaagggtgtcactgatttgtctcggagacgaagacgcacaacagagggccaaccattttttaaacctgatttcattgtatgtgaacccaggaagcagtcaatatctacttcctaccttttgtgttgcaaagggtagctgaaagaagagaggatgaagtgaaagactccttcggagtttgaaagagccattgtgggtcttagacagaaaaaagagaaagagaataatggaacaatgtgtgtgccttaaactcacactcgagcc

SEQ ID NO: 133956 - DNA, 573 bp, Glycine max
  Clone ID: PAT_MRT3847_91969C.1
agggggtgggcacacgacaaaataaaaataaaaactttcccactttgcttcttcgtcttcttcaacgacaaaataaagtggggtttcgccttcttctccaaaatatgaggaagaagctagatactcgtttccctgcggctaggattaagaaaattatgcaagctgacgaggatgtagggaagattgcaatggctgtgcctcttctagtctctaaagcactagagctatttctgcaagatttgtgtgatcaaacatatgagataactttgaggaggggggcaaagactatgaatgcttttcatttaaaacagtgtgtgcagacttttaatgtctttgattttctgaaagatattgtcagcaaggttcctgatttaggctcttctgttgcaaccggtgatgaccatgctgtcactaagaggaggaaagttgccggagatgatgataatgacagcgacgaggaactcaagagaaataagaagccagagcctggacatagcagtggcagaggaaggggtaggggtcgtggccgtggaatcagaactgtagatcaagagatagggttcacatgcccaa

SEQ ID NO: 133957 - DNA, 182 bp, Glycine max
  Clone ID: PAT_MRT3847_9196C.1
cttttaagcattctttcatgtttgagtgaagatgggtaagtttctctgcaaaccttgttctagtttagaaatcacctcttttgtaagtcttgaatttgggtttgacagttcataaagcaacatgctctcccataatactaatagtctactattttgaaatttgaaaacttctgattttcatc

SEQ ID NO: 133958 - DNA, 421 bp, Glycine max
  unsure (1)..(421): unsure at all n locations
  Clone ID: PAT_MRT3847_91970C.1
nnnnccttttttttttttttttcaggtgcaaaaacaaacttggataatcttatggagatatcacctttctctatgtgattgatattttagggtccaaaacaaatgcaagggggactcagaaatcgattcttagggaaaagctaaaaaggaacccaaaaatgaaccaagaaagttgtctaacattcttgtggggcttagaaactcacattctaaacagatgctttacatgcctatgagtggtccaaactttttggacgtcctcttaaggggtataaaccttttccttaggggggtcttggatgccggaccctaacactggttagatggtgtgtttcaaaataacgtgccttgttgatggtttgcactcttgatcatacgagcacatttttcatagacgtttttcccaaacggatctgtgtcc

SEQ ID NO: 133959 - DNA, 199 bp, Glycine max
  Clone ID: PAT_MRT3847_91971C.1
gagaacctttgcacaccaaacacacaagaatcacctcctttgtatcgtcatcattcatgcatcttgcatccccatagcctcatgcctcaatggcgcgctaagtactatcgcccgattaagacgccaccactatattggcctccactctacaagtcactactgtacaacccactggtttataaatcaacatcaccggctt

SEQ ID NO: 133960 - DNA, 292 bp, Glycine max
  unsure (1)..(292): unsure at all n locations
  Clone ID: PAT_MRT3847_91972C.1
ctgatatcagncntnnnctnntgagaaaaatgtctccaatgactggcagagatcaccagccaaangcagnggtgtanccatggagatggaacnctgccaagngaagtcnnagttgcngcnaaaggnagtagggcnacctantggggcttntgccantgnangacattgaggaatgtnggtnatgagagggatagtgggtntcttgtggctgaagcagaagaagagcaccnaccacaagtttgagaaagattnggaactggtttcctatgctcctgagatcangcctatgtng

SEQ ID NO: 133961 - DNA, 600 bp, Glycine max
  Clone ID: PAT_MRT3847_91973C.1
ggcttgttcaatatatcaaataaaagttcctggataaagaatcaagcaatgaagcaggttttccagaccaacatgcacttggagaatcactgaatattgaggaaacaggaaaagaaagcattcaagaggggcatccgttagagggagctacggtaaaaacgttgtcaactggtgtaggaagcattagcttgggtagcggtgttgtgactctcaccgacattagtagcagggacatacttgcacaagatttccaaatccaagaaataatgccatgtcaagaaatccaaatccaagaagggttgaacctgatggataaacaagagggaacaggcattatttctaataacagcattgaggtttctccagatatccgtacaagattgggagcatataagcactttgttgatctggatgatacacaagttgctctgctggaggaggcagtaaaaaaatatcctcatctttggaatacttgtgagatgtgtagtgagcgctttcaagctttgatgtgaaatctttggcagagattttgttgttcctccggaatgaaactgcagttagtgttactcctcagagataaaatgaattccgtagactatg

SEQ ID NO: 133962 - DNA, 1474 bp, Glycine max
  Clone ID: PAT_MRT3847_91974C.1
gacctaactaacccacacttcatatcttctcgtgtggacacaaattggaattggaattgaaattccccactactttttcaatgccatatgctgcaaacccttcacttttcacttcttttctagctctcatttgatattcccaatctctctgtttctatttctttgttcgttgcttcacactatggcttcttggtgggatttaagacccttctttcgttttcagtctgttaggacccgatttcaggaattcaggacgagggaagtccaacttggttcacatactgtgagttctcatggatatgcagttgcaagaacacacaaacatgattggctcattctcttgctcctcgtgttgattgttatcagcctgtacattatccatcctttccatcgctttgttgggaaggatatgatgactgatctcaaatatccactgaagagtaatacagttcctgcttgggctattcctatatacgtaattttattgcccatagtgatctttcttggtgtctacatccgaaggagagacgtctatgatcttcatcatgctgtgctgggtttattgttctccgttttaataacagcagtatttactgaggcaataaaaaatgcagtggctcgagctcgaccagacttcttctggcgatgttttccagatggaaaggatgtttatgataaatggggagatgtcatttgtcatggtgaccaaaaggtcataaaggaaggatacaagagtttcccaagtggtcatacttcagggtcattttctggtctgggttttttatcattgtacttatctggaaaaataaaagcatttgatcgcaaaggtcatgttgcaaaactttgcattgtttttctaccactacttgttgcatcacttgttggcatttctcgagttgatgactactggcaccactggcaagacgtgtttgcgggaggtcttttagggcttacagtggctacattttgctatttgcagttttttcctcctccttatcattctgaaggctggggtccttatgcgtattttaggatgttggaagaatctcgtggtatgacccaagttcctagtgttcaaaattctggtcaagcgcagttagcagaggctcaggctgagagccaagaggaacaaggtctccacgggtgtatggggttaactttatcacgggatcatcatgcagcattgaatgactgtgaatctgggaggggataaagtctgtacatttcatgatcttgctctctgtaaaatgtaaatcagatgttagttcgtagcctaggattttaaccagtatttaaaactaacacattttgttgaatagttgtttctattcagtcactagtgtctctgaaaaccttgaagcgtagttgtttgtaagagtcaggtttgggacaattaacctttgttatttcaatattttgtgaatatgttgacataagaaaatacgaaatctcttgagaagattgccgttcattc

SEQ ID NO: 133963 - DNA, 755 bp, Glycine max
  unsure (1)..(755): unsure at all n locations
  Clone ID: PAT_MRT3847_91975C.1
atatttccaatctctctgtttctatttctttgttcgttgcttcacactatggcttcttggtgggatttaagacccttctttcgttttcagtctgttaggacccgatttcaggatttatcaagcaggaggatggggatctctgctgttactggtgctcacttttcatccattaattttccattgatagacacaaagaatgaagaggaattcaggacgagggaagtccaacttggttcacatactgtgagttctcatggatatgcagttgcaagaacacacaaacatgattggctcattctcttgctcctcgtgttgattgttatcagcctgtacattatccatcctttccatcgctttgttgggaaggatatgatgactgatctcaaatatccactgaagagtaatacagttcctgcttgggctattcctatatatgcaattttattgcccatagtgatctttcttggtgtctacatccgaaggagagacgtctatgatcttcatcatgctgtgctgggtttattgttctccgttttaataacagcagtatttactgaggcaataaaaaatgcagtaggtcgacctcgaccagacttcttctggcgatgttttccagatggaaaggatgtatgttttcctttaattntaggttttcaattcatatttatcaattatgttggttcttaatagtgggcataattaattattagtggcttcttgttaggtttatgataaatggggagatgtcatttgtc

SEQ ID NO: 133964 - DNA, 3034 bp, Glycine max
  Clone ID: PAT_MRT3847_91976C.1
gacctaactaacccacacttcatatcttctcgtgtggacacaaattggaattggaattgaaattccccactactttttcaatgccatatgcaacccatctttgaaaacccttcgcttttcacttcttttctagctctcatttaatattcccaatccttttttctttatatatttcagtaattttttctgcttcacactatggcttcagatggattttgaagagcctggtatcactattgttgtatcagttaacgctgctgttaacttcggtgttgagaagaagccctagacacgaacatcggtttcagtctgtgaaaacccgatttttaggaattacagacaagggaagtgcaatttagttcacatactgtgtagtgctcatggatagtgcagtaacgagaacacacaaacatgatttgctcattctatgattcctgagttaaattattatccaaacagaaaaatattcattgtatccagcgttttgatgagggggaagtgataacacggggcaattgttgttgcaaagagaattcagaattatgaggatgcacaagtcatgagagagttggaatatctcaaaaaggaattgttcaagcttaagcttgatgtggcttctgtgatggatcagaaatccagggcagagaaggaaattgaagcatcgaactctaagatgttatcatgtttaccaatgcgagaagaggacagaagggagattgaggaggccaatgaggagcaagtacttgctgaactagctaggatcgaggcttcgaaagaacttgcagatattgaggcccagagagaaaaggaagcaaatcaattttcattcaatttggaaattgcgaggagaaagttgaaggaggccattgaagagattgatgagtcaaaggagcttgaaatgaaattggctgtgacaatatcagatgttgatttcttgcagaacgagttaaagtcagttaaggatatgaataaaagggttcaaggagatgggagtgtaaagcaattggaaggaattttcaggaaaggggaggaaccagaatactctatagtgttgcaaactataacggaagaattggaggcagctaggaaagaattagctttggttagagaagaaggttttcagtttatggcctctatggatgtcataagaaatgagttgaagcatgtcactgctgagacagatcggttgaagaagaaggaagggaaagtggactcaacagttcaaaatctcaatttcaagattttgagagcaaaatctaaattagaagctgtgtctgctgctgaggaaaaggtgagatctatagtcatgagtctgtctcatactcttgaaaagctgaagacagaaacagaagatgcaaaaaaggaaaatgaggatgtaagccaagaggttgcagccagcaaggaagagattcaaaaagttgagtttgagatagacatgacagaggaaagattgcaaggcatcatgcaagagctggaagtagccaaagcatcagaagctctagccttagagaagctgaaaactcttactgagaccaccatgagagaaagagctttaacaacacagcatagttccatgatcactatctcaaaatttgagtatgagtatctaacaaatcatgcagcctcagcacaagaaattgctgataaaaaagtagcagcggctgaggcatggattgaagctctcaaggccagcgagaaggaaatactgatggaaacaaaaatagctcaaagagaactcaaagaaacaaaactggagcaagaacaggaggtttacacgaaagagaagatgctttcaagaagagtagttagtagtagtgaggagtttgacaattggccaagaaaacgcgagaagagttcatccaagaacttccagagagccatgtctagaaagagcatcaaacttaatggcactataactcctgcaaggggagcaaagtttcagaagactgcttcacctgcagctcggcatatcagtccttttactattaagaagagaaagaaggaattcaggacgagggaagtccaacttggttcacatactgtgagttctcatggatatgcagttgcgagaacacacaaacatgattggctcattctcttgctcctcgtgttgattgttattggcctgtacgttatccatcctttccatcgctttgttgggaaggatatgatgactgatctcaaatatcccctgaagagtaatacagttcctgtatgggcggttcctgtttatgataaatggggagatgtcatttgtcatggtgacaaaaaggtcataaaggaaggatataagagtttcccaagcggccatacttcatggtcttttgctggtctgggttttttatcattgtacttatctggaaaaataaaagcatttgatcgcaaaggtcatgttgcaaaactttgcattgtttttataccactacttgttgcatcacttattggcatttctcgagttgatgactactggcaccactggcaagacgtgtttgcgggaggtcttttagggcttacagtggctacattttgctatttgcagttttttcctcctccttatcattctgaaggctggggtccttatgcgtattttaggatgttggaagaatctcgtggtatgacccaagttcctagtgttcaaaattctggtcaagcgcagttagcagaggctcaggctgagagccaagaggaacaaggtctccacgggtgtatggggttaactttatcacgggatcatcatgcagcattgaatgactgtgaatctgggaggggataaagtctgtacatttcatgatcttgctctctgtaaaatgtaaatcagatgttagttcgtagcctaggattttaaccagtatttaaaactaacacattttgttgaatagttgtttctattcagtcactagtgtctctgaaaactttgaagcgtagttgtttgtaagagtcaggtttgggacaattaacctttgttatttcaatattttgtgaatatgttgacataagaaaatacgaaatctcttgagaaaaaaaacaaacattc

SEQ ID NO: 133965 - DNA, 1872 bp, Glycine max
  Clone ID: PAT_MRT3847_91977C.1
taagattcgtgtcttcccagtgcgtccggcatggggtcatgcattaattcggatggagcgctacggacatgctcgtgtgaaatttaagcaagctcttcaattgcacaagggtgatcctggacctgtgattcttgagattattaatacaatagaaggtggcccaccagttgatgtttcagctgttcgttctatgtatgaacacctggctaaaagtgcacccacaatcttggatgattctctttctgctgattcatatctcaacatcttatacatgccatcaacatttccccgttcagagaggtcaagacgatcacaagtgtctgcaaataataattctgtgtatagtcgagattttgaagatggtcctcggagtaacctggacaatgttagatatactgaatgtgttacttacttgaaagagtatgcacgccagcagttgcttgcttttatgtttaggcatggtcattaccatgatgcttgctccttgttctttcctcctgatgaggtcccaccgccaccacaaccatcaatcacgagtggagtgtcttcttcatcaccccaaagactagattctttggcaactgattatggaacaattgatgatctgtgtgaattatgcattgtttatggtgctatgcctattttggaggaagtcctttcaactagaatgtcatcaactcaatcccaggatgcagtaaatcagtatacagtgacagcccttgctcgtatttgcctctattgtgaaactcacaagcatttcaattatttatacaggtttcaggtaataaaaaatgaccatgttgctgctggactctgctgcattcagttgtttgtgaattcttcttcacaagaggaagccattagacatttggaacatgccaagatgcactttgatgaaggattgtctgcaaggcacaaaggtggggaatctactaaggttgtcacaaaaggacttagaggaaaaagtgcctctgaaaagcttacagaagaaggtcttgtaaaattttctgctcgggtatcaatccaggttgaagttgttaaatcctttaatgactcagagggaccacaatggaaacattcactttttgggaatccaaatgatccagaaacttttagacgaaggtgtaaaattgcagaggttcttgttgagaagaattttgatttggcattccaattgatctatgaattcaatcttcctgctgttgatatatatgccggtgttgctgcatctcttgctgagagaaaaagaggcagccaattgacagaattctttagaaacatcaagggcacaatagatgacgatgactgggatcaggtcttaggtgctgcaataaatgtatacgccaataagcataaagagcgcccagaccgtctgatagacatgttaactagcagccacaggaaggttcttgcttgtgtagtttgtggtcgtttaaaaagtgcattccaaattgcttcacggagtggaagtgttgctgatgttcaatatgttgctcatcaggcactgcatgcaaatgcacttcccgtgctagatatgtgtaagcagtggttggctcagtacatgtaacctactgctagaagctgattgtccaaagtgcatattttggtccattaattcaacatatatgtctacaaagctggagtaagatcataaccatttccgaagagaagtggaaagaaccaaagcaatgggaatcaagtattaattgtttgaaagattggtggagataaatcatcacatgccctacgcagaaattggtgcagttttatccttgaatcccatgcaaacactaaatttgggaccatctgaatgtcaacaacgatacatgaacttcttaagcactcaatggaattgaactctctttcagccaa

SEQ ID NO: 133966 - DNA, 627 bp, Glycine max
  unsure (1)..(627): unsure at all n locations
  Clone ID: PAT_MRT3847_91978C.1
aattgaatcggcagatcaggcaaatatgatccaccttacttttgattaatatcgttgtcttatcgagtgacactcgtaaaatcgaattaatgacatctttacaacaactaactttgatacattgaaaaatgctcaaaaatcatgtacaaatgttctattcttaaacatcattattttgctaaaaattgtagacttctcttttccgatgccgtattaaagagtaactttccttggctgaaagagagttcaattccattgagtgcttaagaagttcatgtatcgttgttgacattcagatggtcccaaatttagtgtttgcatgggattcaaggataaaactgcaccaatttctgcgtagggcatgtgatgatttatctccaccaatctttcaaacctggcaacagtagcagtaccagacaaatatgttggaccaacttggatgtttgtatatacctcaagatcaagaaacccacttcaacaaaatctagggactgtgaaatcactgaaaaaaagaactcttgattcttacaattaatacttgattcccattgctttggttctttccacttctcttcggaaatggttatgatcttactncagctttgtagacatatatgttgaaattat

SEQ ID NO: 133967 - DNA, 475 bp, Glycine max
  Clone ID: PAT_MRT3847_91979C.1
ggagagtcttcccctcataactcatgctaagaaacccgttaactatcctctgactgatcatgaagccatccctatactgaatgagacacatgttcttaatcatacaaaacgcctgactgacaatacttaccctgcagatatcctttatatatcttatttccctggaagccatgataacttccatctgctctatgacgctcaaggactatttcggatacatactcacgagatatgacgtagcgcacctgctgctgtctgcaagggtacgtcctagcagggcttatcagaagagctgccatacctagaaacatataatgtattgatcatccctaaactgtaccctcatttctagatctacaactccattaaggtatatctggatcaaaacaatatatgtagatgtatcaaattttatattgaacacgaccatataataacgagtcggagatacttgggctgtgttggaaccctcaag

SEQ ID NO: 133968 - DNA, 462 bp, Glycine max
  Clone ID: PAT_MRT3847_9197C.1
tctctttttttgggttctggcacaacatctctgcctttattatgggctatattggagccgcatatataagacccttacattactacgtgcatacgttgtttattctggtacctaaactatacccatctactatttcctccacactcgtgacgcgacactgttcgtccgtgagggcatctgcaccgaagttgttcgaagacaacaatgattatatatatgcatgcgtgcctgacgcaggatgcatctactagtcagtgtgacctccaggaagcggcggcttaaacggggacataatcccttttttttggttctgagcaccatgagatggggcctgctgacgacgttccttaccatatgctgcttaagggagcgcccccccaggggtgactccatacccagctgcagtttcataaccagggccaccagtggttccataataacagccgccagcgcctccataaa

SEQ ID NO: 133969 - DNA, 420 bp, Glycine max
  Clone ID: PAT_MRT3847_91980C.1
aaacaggatgattgaagtaatttgtaaaactttgaagatctcagctatctgaacacttcaaaatcctgttcgattcagccagttctaggtcaaatacaacatcctggagggaaagaaaattgagaatgaaaatgctgcattctacagtacgcgttgattcgataccaaatcattatggctcacgtttacttgagcattgtaaagatgaccgacacgctccaactgtcccacgaactggaatctcagcttaaagaaagtcaacgtgcttcaggtcaggcacctttttgatgctggattgccatcaccacgatcatgaaaaaacgaccactatcggtcaatttctttccaaggcaacagagcaactgcttgacttggagttgcctactggcgaattgatggcactgctccaaccagcgatga

SEQ ID NO: 133970 - DNA, 305 bp, Glycine max
  Clone ID: PAT_MRT3847_91981C.1
tttttaaattcaaataatgctgcattggcacatagtgtacggggcctgggaaactgacagcaatcaactatgttcaccatttggaattggcatctgattacaaattcattgcatcgataatggaatccacctcactcaccttaataaccttccttgagattggaggattccctttccatgtctaaggaaaagaaatggcacaaaaaaatttatcatcatgtactggatagagaaaaactctattcccaataaatagctgcaggctgccattaaaccatctcacaaagcgagcgttgcttttacaa

SEQ ID NO: 133971 - DNA, 290 bp, Glycine max
  Clone ID: PAT_MRT3847_91982C.1
tccggctctttaggggctggactagatgagccagaaatgagcctagtgcatagatgagctatctgagctctatatgcagccatggacactcctcctgaacctgttgaatagactctcgttctgccatgagtgacctgggacgtagaagaccagacgctacttggcttggaagtccactgtgaacaccacttggcttgttcattatctcgtcatgggactaccgacaatgttctgaccagatccagtactacagcttaataaattgaggtgagccggactttgatcagtgc

SEQ ID NO: 133972 - DNA, 283 bp, Glycine max
  Clone ID: PAT_MRT3847_91983C.1
aggaggtcccccacggcccttcaggatgaaagctgcggtgctgaccttggccgtgctcttcctgacggggagccaggctcggcatttctggcagcaagatgaacccccccagagcccctgggatcgagtgaaggacctggccactgtgtacgtggatgtgctcaaagacagcggcagagactatgtgtcccagtttgaaggctccgccttgggaaaacagctaaacctaaagctccttgacaactgggacagcgtagactccaccttcagcaagctgcgcgaa

SEQ ID NO: 133973 - DNA, 264 bp, Glycine max
  Clone ID: PAT_MRT3847_91984C.1
gtgatgatgacacatggcaatgtcttagctgcactctctgctgtgatgaccattgttcctgacattgggacaaaggctatatatcttgcatacttaccgatggctcatatcttagaattagcagctgagaatttgatggcagctgttggggttcctataggatatggatctcctctgacctttactgatacttcaaacaagatttcaaaaggaacaaagggggatgctactgcactgaggccaactttaatggcagctgtgcca

SEQ ID NO: 133974 - DNA, 280 bp, Glycine max
  Clone ID: PAT_MRT3847_91985C.1
cccacgcgttgttgcagttttacgctcccgactacacacaccagtgacgacgttggtccctatgttggggaattgcacattactgatgcttgtaagccagaaccacttgagaaagtaaacgatgctgtagatcaggaaaggcctccactgcggaacatcactctggaaccatacagagctaaggaaccgaagattggggcggacacagtaaaggttgcgatgttgatcacagcacaagccatgccttgaaaccagttgtcatcacgaagggtcgccggtc

SEQ ID NO: 133975 - DNA, 577 bp, Glycine max
  unsure (1)..(577): unsure at all n locations
  Clone ID: PAT_MRT3847_91986C.1
cccggggtcgacccacgccgtccgcccacgcgtccgattttttaaaaatatctatgaattttgaaacctatctttcattataaagcttatgtgtgaagaatttgtgtgtatatatccatgaaatgaagactatgtatatgtataagatgcataaaatgagtaagaaatgcgatatatgtggataattcttagatctctctgctggtggaaggcagcaactgctggaagacatttggtgacttgcaccgaaatggtgccttgaattttgattgattttacgatgttaaattgcaggagagttgggacaacatatcaggcagtgcatatggcctctggagggtcgttacgctagcaattacttgtgtcttcttcattttcttattcttactaattgtaaatgtgagaagaagaacgtccaaagttaagaagtgaaagtaattaaatcattaatatgtgagatcnacagagtctaaaagattttagagaacagatattttagacaaagccatggtttgaattgaaccatcgatattctcattccccggtcgtatagcttatacagttaaactggattttg

SEQ ID NO: 133976 - DNA, 425 bp, Glycine max
  Clone ID: PAT_MRT3847_91987C.1
atacaaaaggacttatcaactagtaaactccatagaaaagtgaatcacttcaaggaatttagagacaataagtgatcaagatactaaccctaaaaaagtgaattttgtacacaacacataggtgtgaaatccagtgactcaacattaagattccctataaaggcaattaaacacaaaggagatttcaggaatatagattggcccaactgtagtccatatgtggggggtaatattttggtaactagtgagttggtcactacattctcaactataaaggcaaagacttcaccaccaaatacaggcccgggccaggcaatccaaaacacataccaggttcagcttacgactggaaatccaaatgggacacatgtgattatggcccgttcacattaatgtcccacacaatactctatacacaccattaa

SEQ ID NO: 133977 - DNA, 489 bp, Glycine max
  Clone ID: PAT_MRT3847_91988C.1
acccggggggggcaacccccaaaaaaagaaatcttcgggcttttttaaaaagggtcaaaaaaaaaacagttttaaagctaatgggcaagccacaattgggcccaaaaggaacaaccccgggcccaccgtttttattttggaccaacccaaaaaaaaaaaaaacccccaaggggggaaaaaaaacaaaatttcaattaacttaaacccgggttttaaaaaaaggtaaaacaagctaaggggggcaaaaaaggccggaaagcaaaaaaggcccccacaaaggggggccccccgaacccaaaaaaatttgaaagggcaacggggatttcaggcgggggggggaaatttgccacgggaaaaaaaacaacgggagggtcggggtaaaaaggatggatggggggaggcacccaccccggggggagggctttaacggggggaaggggttccaaacccccaatttgaccaagggagggccctaaaaaaaacgggggg

SEQ ID NO: 133978 - DNA, 622 bp, Glycine max
  Clone ID: PAT_MRT3847_91989C.1
aattcggctcgaggagatttcggctatgccatccagatctttccatttccattattagctatggattctatgcctgatgccattctccaatgcatcttgtcccgaatcaccaatgctcgtgacgtgtcatcttgcaattgtgtttccaagagatggaaggactccactccctacatcagaaccctctactttcctcgcagctcatttgaaaccccttcttcttcttctgagggtgctgacaatatcatcaaaagaatggtgtcaagagtggtgaagttagaggagctaattgtgtatagccccttttcccctgatggccttgcatcatggctctcactggcggggcaaactcttcttcaactcgagctccgaatggacaaccttgctgacaatcggggcttccatgaaagcccttccaaattggactatattggtgctgctaagaatttggagtctctgaaactgtggggtgtgttgatggtgcgttcccccaaatgggatgtgtttcctaacctcaagaaccttgaaattatcggtgtaaggttggaggaccctgtgttgagtgtggtgcttcgctcatgcccggttctcaccaggttgttgctgcttggatgtgaagggg

SEQ ID NO: 133979 - DNA, 367 bp, Glycine max
  Clone ID: PAT_MRT3847_9198C.1
aaaagatttacttcaatttcattagctcttacatgatttctttatatatcatcaggtgcggatcattcgctagtcgatcaatcaatatttaatacacatgatttaacccgtttaaaccctatagttacacgcctttacaattacatatacaatgatatagtaccggaatacataaattaggcatactggcatcatattaacagatatgcatatcaatgtacatcatcatttgaacatacattaccatgttactctgcttcgattattgaaaatcccaaaattgaaaatgattatcaaattattatgcctcctataacccttgacctactaacatttctacttatggattatccaatcatgttccaac

SEQ ID NO: 133980 - DNA, 441 bp, Glycine max
  Clone ID: PAT_MRT3847_91990C.1
gcaccacgtacgaatagttgcagagctataatctaacatatcgtgaggagaatgtggactggttagaaatctttagggctgcagtagtcttgatggcatggccatgccatggcgcatgctaccaaaggttacctctccgaatgaaaactggctatggtgagccttcttcagaggtaaaatgcgcaaggtttaggcttgctgtggacgcacacaacatccgagcctttaaaaccattcctgaagagtgcgatgaaccaaccaaggactacattgatggcgaacaatttagatcagactctaagaccgttaaccaacaagctctcttctatgctagtgaacgctaaggccatcacagcgacatctgtatattcgacatcgataacagcgtactctctaatgtccgatactatgcataacacggatatggagaggaggaattta

SEQ ID NO: 133981 - DNA, 803 bp, Glycine max
  Clone ID: PAT_MRT3847_91991C.1
attataaaccggggatattattattggcaaaaaaaaaaaaaacaagctaaaattataaggaaaaataatgctacagtcacagttcacagccatacaaaacttcctatgcacaccattaaaatgattatttatcaaccgtttaataaatttgataactcaattgggtgtttctgaaaggtaacagccttgtgcagaaaagaaagataaccaaatgaagcactattatacaagacttagttggactatagaaagccttacattctttctttatcttccaaatatagatcaccatcgatcttctatatatttgtttctttctttcataactttattctcgtttccacactcgtattgtagaagttagaagtagtcttctgtaatgggagtgaagggtgagccgaattcggattcggattcactcttttcccgcatttatgcattcaacaacttggaactgttggatgaagatgtcattttataagcagtctaatttgaaaaacttattcgagatatcagcagttcaattttcatccaacagttacaaatacactgaatacatgaatgcgtgaaaaagtgactccagtgaatccagctcggccgaattctccctgtgccaaggcacagtatttagactcagtggtaaaggcgggaagaagcaactgctagttccttcagaaacgaaacgacatcgtctgatgaatcgagtatataccgagcatttgttcttgttcgtccaatagcacaagagaagtaattctctttcttaaggtcaagcacgttccatgattccttttcgggcgctg

SEQ ID NO: 133982 - DNA, 178 bp, Glycine max
  Clone ID: PAT_MRT3847_91992C.1
cgcgaatatctccggggtgtgacaccacaccgcgtcgcatcaataaatacttgcggttgggggatgacccccaatggtgctctttagtgctatatcttttgagagggagaagtggaagctgaagaagagcaatatgggagccaacaggcgacatcattgtcgcggatgcacgcgggga

SEQ ID NO: 133983 - DNA, 148 bp, Glycine max
  Clone ID: PAT_MRT3847_91993C.1
gagactgcatcataaactacaagacagtcaccagaagattcgaaacttcattgaaggagacgtaccaatgattcctactggagttcctcactggacctacatcactggtgatgaaccagctgctgcatcaaccttcttgacaccatca

SEQ ID NO: 133984 - DNA, 215 bp, Glycine max
  unsure (1)..(215): unsure at all n locations
  Clone ID: PAT_MRT3847_91994C.1
agatggtgctacgtcaggattacctttgagatacctagaaactctctccataggacacctccgtcaagtagtagtgatggattcagcacaagagtcagtgattttttttnatttttataaaatatttattattattattatcatacatgtgaaaaggaaacgtgaaacataatcaattgtactataaaataattgccgctaaaatctttaatggt

SEQ ID NO: 133985 - DNA, 514 bp, Glycine max
  Clone ID: PAT_MRT3847_91995C.1
ccggaattttcgggtcgacccacgcgtccgaatgggttgatgaagatgatgatggtgctgatatcaacatggatgggatggacttctcgaatttcggtggcatgggtggtatgggcggcatgggtggtatgggtgatatggctggtatgggtggtcttgatggcatgggtggtatgggtggtcttggcggccttgtcgatctggcaaagtattatatggtacaaaacagtgttgttcaatacgacatcaataatcctttgtctattatctaaggaagtggcggtttcaaccccatcgcgtagggcacaacaaattgggcctttctgatccccttgataaagctttaatatctaccctagatgacatacaccagagcctcccatttgtttcagaggaagctcgtatatgggaggcgccatccactgagaatacacagccccacacccaaagtttgcgacctataaaagtttattttaggggtaaaccatcaacatttcatattttgacagtatga

SEQ ID NO: 133986 - DNA, 1451 bp, Glycine max
  unsure (1)..(1451): unsure at all n locations
  Clone ID: PAT_MRT3847_91996C.1
aattcggctcgagcttgcaatattaaagaagagctaaatgataaagtattttgtaaggacttcagtaaaacacatttgcagcgccagaccacacataccaatactctgtaaacaaagagtaaaatacaacaaaaattcattttcccaaggagggtaattatttatccagccaaaaaattgaatgggattaaggtacatatggcccaacttgaatggatcaagaagaaaacaaaaaatcagcgaatagatactatgacagctacaagaatatgaactcaccaatggataatgatgagcgggtttggtttcatctaatactctcagggagaataatttccatcactttgaggctctaggtaccaagaaagatccatttttttctgttaacaagactgcaatttcactcttttctgaaaactatgagaagcttgatcaactgaaatccgagattaatagttcaactaaattgattgttactgggcatggtcttggaggagcagttgtttctctctttactatatcgctattaaatagcattggttctggaaagaatcgcccactctgcatcacctttggttcaccccttattggtgacaagaaattgcaacaagccatatcacgtagttctaattggaattcttgctttctacacgttgtgtcactcaaagacccacttccaacgctcttcattacaaactatagttcttcacctgctgtattgactcctgaaacaagtggctacatgccttttggaacatttttcttgtgttctgatgcaaactccacttgttttgagaaccctgactctattttggaacttctcattgcaatgggctcaatccacactcagaatcaaggatttcagtcttctgattacggaaatatagtagaaaagctcaatgataaagtaatttgcaagttcttcagtacaagggttgaaaacatggctcatgcaggttcagcacttgaaagtagtattagtttacagttgcaagcattagcattgacaccgcatttgcagcagcagaacattgataccaatactttggaaacaaagattaaaatacaagaacaaaaattcattctccataggaggataaaaaattttgatccagccaaaaaattgaatgtagtgaagctatgtatgtcccaacttgaatggtacaagaaggaaacaaaaaatcagcgaataggatactatgatagctacaagaatatgaactcaccgtgggattatgatgttattcagttccataaaagactcacaaattactgggaaaagatggttgaagaagtagagatgaagcctcagaaagaaggtgcagctttttcgtacccgctggctctatgctgggactaactacaggagaaatggttgaaccccnttgctgttgctcaatactatagagaaagggggtatagaactatgtgacccanaaatagtctaaaca

SEQ ID NO: 133987 - DNA, 435 bp, Glycine max
  Clone ID: PAT_MRT3847_91997C.1
tgctttcagagattaacaacacttcaacagacgcgtaaaccctgccatggcttggaattcctctttcaagcttatctttctctttgtccttgttaacttcctcagttttgcaacacctaaggcacaacaggtccctacttttcttgcccaggattgcccaagcaacggaaccacagccaacagcaccttccaaataaacatcaggaccctcttctcttcactatcttccaacgccaccgccaacaatgtattctacaactccacggtggcgggagcaaacccctctgacactgtctatggacttttcatgtgcaggggtgacgttccatttcagctgtgtggacagtgcgttataaacgcaacccagaaactattatcagacttacagtgctccttgtccaaacaagctgtgatctggtatgaccagtgcatggt

SEQ ID NO: 133988 - DNA, 304 bp, Glycine max
  Clone ID: PAT_MRT3847_91998C.1
tttttaccacaattttttaactcctttaatttaattttttaagagacctttttaccacaaaaagcacatctaactcctttggcctcactctcaaaatattccttacaccccaaaactttatattacctgcaaaattgaatattttattccttttaaaaaagcggctaactcaaaaaaaaaatctgtctaatgcccaaaaacacagtcatttctcctacaaggtctttctcaaataactccttacttgaatttttaagcttctttccctgccccttcaaaaagaacaaaaccttttcttttaaaa

SEQ ID NO: 133989 - DNA, 202 bp, Glycine max
  Clone ID: PAT_MRT3847_91999C.1
tccgacatatggaaatcatacaaccattctcaacatagacggtggtggcatcaagggcattattcctgcgactgttcttgaatacttacacaacgctcttaatgctactgatccatctacatctttagcccattattttgatgtgatatcaggaactactactggaggcctcatgactgctatgtaccagccccaaactcat

SEQ ID NO: 133990 - DNA, 261 bp, Glycine max
  Clone ID: PAT_MRT3847_9199C.1
gggaacatggtcattttgaatccgtggaaggttggggttcaatcattttgattttggcctctaatagatagaaattggtcctgaggttgtcccttagtcttaaacccagtagacattttggttcctatgttaagtacaattaaactaacagaaatgcacgagacatggaaacaactttgctccatgttttaggtcaaaattgtttccctcttcactgtctgattggtgttttgataagttcagcattgataatgagaataa

SEQ ID NO: 133991 - DNA, 391 bp, Glycine max
  unsure (1)..(391): unsure at all n locations
  Clone ID: PAT_MRT3847_919C.1
gatgaattgagattttnttttacatgaaacaccattaatgtgcacaaacgtcataattaaagttacatacgttacactggaatacataccatatcaacagcaatagatgatgacatttattatcaacaattcaagcaataacccaaaattgaataaagtatcatcactaaaatgcggccttcatgaaaataagtagaggggaactttggggtattggtaataaaaataggatatggaggcttatatcaaaccctatgtttgggtacgatttatggcccagaagtgattagacttacattttactgatagatccttggcattaatctcacggaattcaaattagaaatcacggtctttagcacactggggatagacttgcgggtagcgggtg

SEQ ID NO: 133992 - DNA, 335 bp, Glycine max
  Clone ID: PAT_MRT3847_91C.1
cactgacatggacacctacaactactctattgttctttccaactccctaaccttctttggggggctacttaccaaggcacactcgacctataccgctcttcttcaccttcaacacgttcaacccattccaaccaaacattatgctccaaaaagacgctagtattccatcctctggagtgttacaactcaccaaagttcacagcatctgcgtgcccaccttcatatctcttggtcgagccctttacactgccccaatccacatatgatacagcgaaaccaccaagggagccagctggtctacattctttatattcaacaatttctcacctcaacaa

SEQ ID NO: 133993 - DNA, 363 bp, Glycine max
  Clone ID: PAT_MRT3847_92000C.1
accaaaatgctctttcacattcaaagggggttgaaacatatatgggtacttctccataattatacagtaatagtcattcataaaaaatcatgtgaaattaaaatgtaaagcaacagttcagttgcaagccattttatcttgatgcgattattcttttatccgtaaacatcctattaccgatagcatatagcttttctgtcctagtttaacttctttgaaggaaagaacatgttaatggcgttgtccttagtgctaaaaattcttctaagtaaattgagtcatcacctttatttttagtctttgttgtccttgtcatggtgtgtctcggaggcaccctcctgcaagggtagctttacctttgta

SEQ ID NO: 133994 - DNA, 349 bp, Glycine max
  unsure (1)..(349): unsure at all n locations
  Clone ID: PAT_MRT3847_92001C.1
cattcttctanttctatagcacctgatagtcattatcagaggtcatctacctcttagtggtaagttagacctttttagtagtctcagtagatccagttcttggatttaaataggaatagacannaaatcttgaattagacccagaatcttcagaatnntcttttttttttctatgcacatgctaagcagtggatanttcgtttcattacctttagaggacttcaattgtttagttacctttttaaatagaagactatctnctattttttagacctagactagtgtacagctgttttcctagtttcctatttataccaccacctgtaatgggggaaaaatgcaatttttt

SEQ ID NO: 133995 - DNA, 2323 bp, Glycine max
  Clone ID: PAT_MRT3847_92002C.1
taaatattggaggccggcttcagacggacgcgagcaatgggaatactagagtctacatgaatggccgtgaaataacaaagattgagcttagaatgttaaagctagcaaatgttcaatgtccacgagatacccatttctgggtttatgaagatggatcttatgaggaagaagggcaaaataatattaagggaaacatatggggaaaggcatccactcgtttcatttgttcattattgtcattgcctgtacctcctactaatcctcctggggtcaaagataattctactaactattcaacaagatctgtgcctgaatatttggagcatggtagagttcagaaacttttgttgtttggcatggaaggatctggaacagctactctattcaaacaggccaagtttttatatggaaacaagttttctgcagaagaatcacaaaacatcaagcttatgattcaaagcaatatgtacaagtatctcagcattctacttgaaggacgagagcagtttgaagaggaagctctggcagagagagaatctacttcattagaaggtgaaggatctggacaagaaagacagcagctgatgaaaagaagctaagcgtttactctatcaatcaaagattcaagcatttttctgactggttactggatattatggccaccggagatttggaggccttcttccctgctgcaacacgtgagtatgctcctatggtagatgaaatctggagagatcctgctgttcaggaaacatacaagagaagagaggaattacataatcttcccaatgttgctaaatatttcttggatcgggcaatagaaatatcaagcaatgagtatgaaccttctgataaggatatattatatgctgaaggagttactcagagcaatggtcttgcctttatggaattctcatttgatgataggagtcccatgtctgagatatacagtgaaaacagcaattatcttctcatttaaccaaatatcaactgattcgcataaattcaaagggaatgcatgacggctgcaagtggttggaaatgtttgaagatgtgagggcaatcatattttgtgtttccctgagtgactacgaccagatgtggcctactagtactggtcagcttcgtaacaaactgctggcaagcaaagatctttttgagagtctggtgaagcatccttgtttcaaagataccccatttgtgcttctcctaaataaatatgatgtctttgaagacaagataaacaaagttcctttgtcaatttgtgagtggtttggagacttttgtcccgtgagaccccatcacaacaatcatgccctagcgcaccaagcatattactatgtagctatgaggttcaaggagctttattattcactaaccggccagaagttgtttgtggggcaaactcgaggccgggatcgcacgtcagtggacgaggcattcaaatacataagggagatcatcaaatgggacgatgagaaggatgaagatgtatatgaaatcaacccagaagagtcattttacagtacagaaatgagttcttctccattcatcagacaagaatgaattcccaaccttggatagcccttctttgagactaaatggtcttttatatgtggatagagtgtcgcagctccaaagaatttgtaggagcatagcatttgttgaaggacagggaggtcagttggctgggctgtgttgtggagtatgttgttttattttgttcttttaggatcttcctgaaacaggttcagaatgatttttgccccttcataaataagctaatttgattgagaggttgtaaattcagaggttatttgttctctgtacagcttatattgacaatattgttcagcttaatttgaaaaaaaaaagggggatttttatttgggacgatgagaaggatgatgatgtatatgaaatcaacccagaagagtcattttacagtacagaaatgagttcttctccattcatcaggcaagaatgaattcccaacctttgataacccatctttgagactaaatagtcttttatatgtggatagagtgtcgcagctccaaaaaatttgtaggagcattgcatttgttgaaggacagggaggtcagttggctgagctgtgtggtggagtatgttgttttactttgttcttttaggatcttcctgaaacagattcagaatgatttttgccctttcataaataagctaatttgattgagaggttgtaaattcagaggttattttgttctctgtacagcttatattgacaatattgttcagcttaatttgaaaatataaaataaagaggtatttttatttttaacac

SEQ ID NO: 133996 - DNA, 866 bp, Glycine max
  Clone ID: PAT_MRT3847_92003C.1
cttccctcgcgtcccggctcttggctgcaactctcctctcctcgcccagtagaaggacctccaaaaccgacatgagcactaactctatactattaattctccaaaggactacaactctctgctgcatgccaattgtgtcgtatgctgtttctagtgtcaacattcaacgtcctcgctgcgagtagacgacagaaggggactcaacatttgcatttcctcttcatatacagtacacacttcagctggtggtagcctggtagatagtgtgcttccaaaatgaagaacaaaaggaagactttactattgctgctgctcatggctgcaactctcttttgcatgccaattgtgtcgtatgctgtttctaatgtcaacattcaagaccatctcaccaatatttctgagctggtaaaaggtccaaatagaaggcttttgtcatttgtggattgtggagagaggtgcagggtgaggtgcagtttgcactcaaggccaaagatttgcacgagagcttgcgggacatgctgtatgaggtgcaggtgtgttcctccgggcacttacgggaacagagagatgtgtggcaagtgttacactcacatgatcactcatggcaacaaacctaagtgcccctaaacctctgcatgcatgcatgcatgcatgtccttctctgtctacacttttaattatcatgtttatctctacttaatcaacactaattatatttaaattcccgttttttgttttgtctaccttaatttcttaattaatgctttgtgtttctcctaatttgtaatcatcagttgtgtattgctgtgacttaatttatctataatgcttcagttgtagaataaaagtcgagtaaattcccccgc

SEQ ID NO: 133997 - DNA, 1669 bp, Glycine max
  unsure (1)..(1669): unsure at all n locations
  Clone ID: PAT_MRT3847_92004C.1
attccctggagttctccaaccatgagggcaagaattggttgaatgctgaaaagtgtgcggagaaagaagaaagaagcaatgaattgagataatagaatggaggttaaatccagagctccggggaaaattatcttgagcggcgaacatgctgtggttcatggatccaccgctgttgcctcttccattgacttatacacctacgtttctctccgcttctccactccttcagacgaccaagattcgttgaaactgcagctgaaggagacggctttggagttctcgtggccaatcaccagaataagagcatcctttcctcagctatcttccacgccaacctcatgctctgtcgagaatgccaaggcaattgccgcactcgttcaagaccttaatattccagaggccaattttggactcgcctctggtgtttccgcctttctctggctgtactcttccattcaaggctttaagcctgctactgtgcttgtcacttctgaacttcctctgggttcaggattgggttcgtccgcgtcgttttgcgtggcgctggcggcagccttgttggcttatactgactctgtctctttccatgtcaaccatcaaggatggctctcatttggggagaaagatcttgagttggtaaatcaatgggcttttgaaggagagaagatcattcatggaaagccctctgggattgacaacacagtaagcgcatacggtaacattatcagcttcaagttgggtagcttgacgcatatgaagtcaagtgtgccgcttaaaatgctcattactaacaccaaagtagggaggaacacaaaagcattggtggctggtgttggagagaggatgctaaggcatccagatataatggcttttgtgtttagtgctgttgattctcttagcaatgaattgacttccattctcaagtcacctacaccagatgagctctcggtaactgagaaagaagagaagatagaagaactaatggaaatgaatcaaggtatgctccagtctatgggggtcagtcatgccacaatagaaactgttcttcgaacaacattgaagtataagttagcctccaaattgacaggagctggtggtgggggctgtgttctgacactgcttccaacattgctatcaggcaccgttgttgacaaagtagttgctgaactggagtcatgcgggttccaatgtttcattgctggaattggcgggggaggtgttgaaattagctttggggtgtcatcttgattttctgttattatttttccaaggactgacatcaatgatcacagcatcggatcctcaaataatcagcataaaaatatatgctaccctttttacagcttgtgcatcaatctgttactttttcttttctacttttgaatcaatttaagcattttcttattcaatcctgaacggaaaatggagaatataaactcatatttggttaatnaaaaaaaaaaaaaaaaaaaaaaaaaaaaaaaaaaaaaaaaaaaaaaacaaaaaaaataaaaaaaaaaaaacaaaaaaaaaaacaaaaaaaataaaaaaaaacacaaataaaaaaaaaaaaaaagggggggcccgcttaaaagaaccaaatttaactaccgggtgattccaacggaaaactttttttttggggccccaaaaataaaatcccgggccc

SEQ ID NO: 133998 - DNA, 731 bp, Glycine max
  Clone ID: PAT_MRT3847_92005C.1
ccacgcccgtccgggtcctcctcatatacagtacaaacttcagctggtagatagtgcttccaaatggagaagaaaaggaagactttactattgctgctgctcatggctgcaactctcttctgcatgccaattgtaagtattccaaaaacatgcatgttcacttgctctatagttttaattaacaaaagaattagatatttttgccttgatttttttgaggctttgagcttaatttgcaggtgtcgtatgctgtttctagtgtcaacattcaaggtcatctcacccattctgagcttggtaaaaggtcccaatagaaggcttttgccatttgtggattgtggagcgaggtgcagggtgaggtgcagtttgcactcaaggccaaaaatttgctcaagagcttgcgggacatgctgtttcaggtgcaggtgtgttcctccaggcacttacgggaacagagagatgtgtggcaagtgttacactgacatgatcactcatggcaacaaacctaagtgcccctaaacctgtgcatgcatgcccatgtgtgtctacaccttatgatgtttatcactagttaacacaaatttgaattcccatttttttgttttttctaccttaatttcttaatgcattgtgtttctcataatttgtaaccatcagttttgtgttttttttcttctgaacatcatcagttttgtgtattgctgcgatttaatgcatctatatataatgca

SEQ ID NO: 133999 - DNA, 442 bp, Glycine max
  Clone ID: PAT_MRT3847_92006C.1
gctttccatgaatgatcttctctccttcaaaagcccattgatttaccaactcaagatctttctccccaaatgagagccatccttgatggttgacatggaaagagacagagtcagtataagccaacaaggctgccgccagcgccacgcaaaacgacgccgacgaacccaatcctgaacccagaggaagttcagaagtgacaagcacagtagcaggcttaaagctacacaaagagccaaacagaatacatgaataaaacacagagagagaaaaggatttgaattctgaaatagaagaaaaaatggatagagatttgggacccttgaatggaagagtacagccagagaaaggcggaaacaccagaggcgagtccaaaattggcctctggaatattaaggtcttgaacgagtgcggcaattgccttggcattctcgacagagcatg

SEQ ID NO: 134000 - DNA, 210 bp, Glycine max
  Clone ID: PAT_MRT3847_92007C.1
tgttattgctgaccttaatgcagctggtgcgtcatggattcagtttgatgagtctgcccttgtcgtacggcgtctgagtctcacagatctgtcgcacttgcaggggcatgttccaggcttgcgcgtactttgtctagtttgaatgaggctaatcataccgacgatgctggcatccctggtgagcgataccagagtctcacatcgctgaat

SEQ ID NO: 134001 - DNA, 387 bp, Glycine max
  Clone ID: PAT_MRT3847_92008C.1
gcacgacttgtcagaggttgggagtctcctgggacaccacatgaatggattaacacgagagacacaaggcagcagcctgcagagaaagcaggggccagagtcaaaaaaccgcaagggagtgattctttcctggtgaaggcacaggatcgcccaactctagcaatcttgcatcaaagaatatgggcgcactctcgtgactatgtgataccgctatacaagtgagaccactacttgactagcaacttgacagccaagtgataatacctattaaaagccatatagtggcatgctctacagaaaggcacggaccgagatctattcgcggttcttgtgagcgtcaaagattccccggacggagttttctcactggcaagagatgggaaaaac

SEQ ID NO: 134002 - DNA, 493 bp, Glycine max
  Clone ID: PAT_MRT3847_92009C.1
acgagcttccatttgatgtaaatgcaggttccgaggggagaacgaccaatgagaactgcatttctcaaaatgttacttttacgattggaagtgaaaagataatttgtgagagacaaaaaatttcggaactttcggcaccatttcgtgcaatgctcaaggggcatttcagtgaatcactctccgagactatagatttgtctgaaaataatatctccccctcaggtatgaaggcaataagtgatttcagtttgaatggcagtttaattgaggtccttccaaatcttttgttggagatattagttttcgcaaacaagtattgttgtgaaagacttaaagatgcttgcgatagaagacttgcatccttagtttcctccaaagaagatgctgtggagctcatggaatatgctcttgatgagcattcaactgtccttgctgcatcttgtttacaagtccctttgcgtgatcttccaaactgtttgaatgacaatcgggt

SEQ ID NO: 134003 - DNA, 468 bp, Glycine max
  Clone ID: PAT_MRT3847_9200C.1
tggattgtttttgatgaggtccattacatgcgtgatcgtgagaggggtgtggtttgggaagagagcattgttttgtcccccaagaattcacgtttcgtcttcctctctgccactgtccccaatgccaaagagtttgctgattgggtggcgaaggtgcaccaacagccttgtcatgtcgtttatacagattaccgaccaactcccctccagcattatcttttcccttctggaggtgatggtctgtatttggttgtcgacgaaaagggaaagtttcgtgaagacagttttcagaaatctttgaatgctctcattcctgccactgagggtgacaagaagaaagaaaatggcaagtggcaaaaaggtttggtgcttggtagaagtggtgaagaaagtgacatattcaagatggtgaaaatgatcattcagcgtcaatatgaccctgtcatactcttcatcttagcagaaagg

SEQ ID NO: 134004 - DNA, 451 bp, Glycine max
  Clone ID: PAT_MRT3847_92010C.1
cccacgcattcgttttcttatttctattctttctttcactctgttcttcttactgatccaaagtggcgctcaaagagaaactatttgaaaaacactcggacgttggcgcaaatgattgcttctgtaaacatctgtgtagacaacaagctcactgagacaacaattgatacttgcagagatgtggacatttaggctgtatattatacaataacaacttaattaacaaaattcataccgcattacatgaggaggtatctgaataccatgctgatatacattctcacagctgaaatcactgctgaaattaaatataagcagaatcagagtaatatctacatttacgactgatgatacgacggctgatacaaacactagactaaacacgatataactgttgatgtgacagaggaggagatgatggatgtgagcataaatggtggcattcctgctg

SEQ ID NO: 134005 - DNA, 413 bp, Glycine max
  Clone ID: PAT_MRT3847_92011C.1
tttttaggaaagcaagaaaaaatatcattttctttatggatgatatgaagacaagtctttaatcatattcgtgttaccaaggatctgcaataattattaatcacagcatctattctatcgacagcgggcactctcacaaaatatagggtcgagggataaacagaggcccctcttcatattaatgcttgttgatagagtagcggatcattatcattctaacaaagctttgggcgtaacagcacattaatattgtggtaccactaatgactagtacatctgccgtaaaacctttttttccaacttaggacttttttttaggaactgataaacatcagccattccgtgtgggtcgaggggtaatatagtgtatcccctacccttgcaaggcacttaaatctgtgacttattttaaa

SEQ ID NO: 134006 - DNA, 343 bp, Glycine max
  Clone ID: PAT_MRT3847_92012C.1
cgcctgccgctcgtagctcgaattcggctggggagcgttatgatccctattattggggagagaactctacaacaccccccttgtagactatggattgtaccaaactgatgtagagcgtgtatgtgtggacgtcaatctctgtgtaggatgcacatttatttaagtttgatctgcactccctctccccccatgtaatgttgctacccagctagctacaacttcggtgactcacattcacacacgtgagcttgttgcgcagccttcacaggggtcaagcctgctaacggcatacgctattctggaagcctcttacgaagggctgctggtggccggctcatcatac

SEQ ID NO: 134007 - DNA, 1287 bp, Glycine max
  Clone ID: PAT_MRT3847_92013C.1
gcggctaagaatccactctcgattgctaccattccaaattcaagcttcttacgagagattcgttcattgcttcttctttttttcctttcattttatacggcatacagcaccagactttccttcatgggcatggcaatttttccataaaaattcgttttttatttcctctctttttttaattttttatttgggtcttttcgatcactttgattgaaagacctttttcttcttggttagtttttgttagaaatatttgttgatgaaattcaaatccacaacctctcccagctattcctttcatacctttttaactactagatcaatcttatatatccgtatggcaattatttttgttttatatattttcaaaattcttataaatcattatccaaagagattgtttatttacatatctgattagtccataaaaaaatggtcaaggagtgtcaacatatgttgttgggtattgcattgacacaatgtttattgtctctgcagtttgaggattgcacatttgattggctttactggtcccaagcacgtgagccttactcccctgatagggttgattatatcaaatctctggatgcggagaaagacacagagcttctgaaatattacgggtgggatgtcccggttgagtgtgcacgaacactccgaatctccacaattttattgaagaaaggggttgacagaggcctcactccctatgaaattggaagcattatgtctagggaaaatttgaacaaagaatctgtaatcgacgagattatttgtgaagcccaagaatcattgctacctggcatggaggaatatgtgtttcttgaatctgtctcccagatcatggattcccgcttgataagctttcaaaatagactctctgggattcctagttatattatataataacaataatatatatttggatgtattaagtgaatactatagtccatatttggatggactgcacagactatttaaagtggggttagctaggtgcgttctggacaatataggtcttgaagctcttgctcctctctcattctttcacttccgtgaactgtttttcagaattttattgccatgtggaacagaagttaaaaggttctgataagatgtgttttccactaagatgtttatgtattttaggtttgtgtgagggttaacacaggagttggatggataccttgtgtatagttgtaatatgtttagaagcttcataaggggcattttactcataaaaatatattattgatgcctgctatttattaggcatttttactcaaa

SEQ ID NO: 134008 - DNA, 206 bp, Glycine max
  Clone ID: PAT_MRT3847_92014C.1
tccggttgcaagaagccgccagaagggggattttgaaaggtgggttattgccaggaaaaggaactcttacttggttaaatggggcctcttccgaaggaaactggttaattggcttgttgcttgggtttggagtttttacttggaatgttggaggttgctttgttgggacttgaccatttggcctaaaaaatggcaaaggaaccttt

SEQ ID NO: 134009 - DNA, 510 bp, Glycine max
  unsure (1)..(510): unsure at all n locations
  Clone ID: PAT_MRT3847_92015C.1
attcaagctaaatatcaaaggactccaaatagcacacgcttccatatcaatttatattgcatgatacatgcacattttgcaccaccttcctctcaaattaaactctatcagttgcctatgaaaaatactacatgcttcatactgaaatgttgtggtgctgtgaattgagagaaagaaatacagagaacatcaagagaacagaagcaaccggcaaagtctgatggctatgggacgtatccttacaattacaaagagcaagaataaaaaagctttataagaaaatattgcaattttagttatgggtaggtgctaggaagtgggaattgggagatgggactaacaaatcacaaggacatgtttttttttttaaaaaaaggagacactgatatttttgtgaattcaatggtgtcatttaataatgttcatttgttattattggttataactntgagatttggatataattatttcatattattgatataaaatatttttttactttaccgattt

SEQ ID NO: 134010 - DNA, 295 bp, Glycine max
  Clone ID: PAT_MRT3847_92016C.1
cctcgtgagggctgaggcatataggggagagcagcgtttgactatggcctctgaaaaacctggaggtgctctacaggggtgccctggcattcaagcccttcacataaaaatatatggcatcataatacgggattttgtgctttagtgggaggtttttggatttgagattttggacctgggaatggccttgccttcctttgcccaatttcactcttcctttctttcccactacttttctccacaaatccgcctccatacgccgttacgattaaggatagagaatgaagctgacttg

SEQ ID NO: 134011 - DNA, 290 bp, Glycine max
  Clone ID: PAT_MRT3847_92017C.1
cacgtgcctgactgcaggggtggtacatcgattggccggctttcttatcatactcacgccataactgtgagtctagtccttactagcgcttcttggcaagacaaagagataacgaatggcttttctatcgagaccacctcattggataggtataaggacctgagtgatggtcctactgactgtgctaatgcttgggaccttcttgattctgcgtatagcatgaacctggcaaaccatgatgctgatggggacgatctcgatctagtggtaacagcattgaatgggcacag

SEQ ID NO: 134012 - DNA, 376 bp, Glycine max
  unsure (1)..(376): unsure at all n locations
  Clone ID: PAT_MRT3847_92018C.1
cgggnctggggtggaccaacccttccgccaacccttccgtactttaaactttccctttttttttttttgcctaaggggggccctgggaggacatggaacattggtaaaggctggggccgtccttggcagcaggaagggggcaactgaaactattaacttggtcaaggagggaaggggtccaaccacgcgaactgaatctttggctggtcttaagccgggtctccatggtttcaatgtccatgcctcggggagcactaccaatggttgcctttaaactggataacatttaaatcctattaacaaggagcttggggcccctaaggataagaatcgttatgctggggaccttggaaatgttaatgtcggggataatggt

SEQ ID NO: 134013 - DNA, 514 bp, Glycine max
  Clone ID: PAT_MRT3847_92019C.1
cttggaaacatttctatgaaacgcttcaaaagaactattggcatgggagacatctcaaaagagcaaaaaagttctaatgtttcttctggatgctctgctcctgtggttactcaggcatctgtggaggtcaacaaaattgattcctgtactgatgatgctgtagacactggctttgtcaacaaccttgtagttgatgaagggtcaggtattgatcaaggctggtcgtcagatttggttgaaagaagtgatgagtttctaggctcgaccactgggagttgcttgaaaaatgattatctgagagtcttatatgatcaaccatgttgcaatctccttgatgaccttaaactgttggattccttgatatggaagaaaggacggaatcaaaatcattttgtgctttcttctaattgtaaaaccaatcaatctcaaaaagtcaagaaagtccttaaaggaaaaaagcgaaagagaaatgtggtgaggattgtagatgcttcatcttccttattgcataaaa

SEQ ID NO: 134014 - DNA, 244 bp, Glycine max
  Clone ID: PAT_MRT3847_9201C.1
tccagccctatcttgttgtttttcgagtagcactggctttcaatttgaaacaggataaacgacgcgcgcgacccaagagaaagggtgagggcttactacccaaacctgtacgcgtggtcaatatacacaccttgaaacgagaggccattatgttgaactcagatactgcaatcaatgttaggcacaaccgtgcgggtaacattattacagcagcagaacttcctgacatgctacgcacaatcta

SEQ ID NO: 134015 - DNA, 260 bp, Glycine max
  Clone ID: PAT_MRT3847_92020C.1
gtttaacacgactttaaaaccgacacaacgatctagtcgtagcttgaatcaatcaggggggatctaaccttcaagaacacattgccatggcaaggaacttgcttgctgagcttattgcggtacccaccctccttcatgggtgaggagcccaaaccatacacatggtcatcgatgccacaggctgaatcatgcctgctggcggggctgacacctacaccgcctgggcttacaacaaaaccttccccgtaacacgacactgt

SEQ ID NO: 134016 - DNA, 257 bp, Glycine max
  Clone ID: PAT_MRT3847_92021C.1
acgcgcgccttttcgttcggaaaccttgatggtcttcctcggggacgttgtgattgcctgggggtgtcaggcgacaatgatcgacgccgtgggggtttgcgtcataatgcaacaggatcaggttttggataacgactcctatgcagcatggtgaggcctacgaaccgcgttctacaggagccgagcctggaacccaatgtttattccaaaatgtttcactgggtggtgaatcatcaccaggacatgttcttggagag

SEQ ID NO: 134017 - DNA, 226 bp, Glycine max
  Clone ID: PAT_MRT3847_92022C.1
aacattcttgccatccaggacgaaagaatcctccacgctgtgcgcaagaagccctatcgtgggctttatcagaccgggggcactattaatagacccgtggagggcccttaaccgccctaatgatacatttgaagcatccgtatgagtgggggcggatgccaatcatcccacatggactgaagagggccgcggaaggagcaagcactaagggcccgacaccgaaaac

SEQ ID NO: 134018 - DNA, 265 bp, Glycine max
  Clone ID: PAT_MRT3847_92023C.1
gcaggtcaaagcctttgattggccatcatgtgtaggccaatgataaacaccacaatctgaggaccctcccacttgcagagagccagtgtgagccactgagagagagattggactccttctcaagcaggagctcaatgggcctcttgtgtaaatctgtatgggcccctaataatcacatggcacactatttgattactcataaaggttccctgcacccctgtcggtcgtgtgcgctgccacttccatgagcttgaggtggaagctg

SEQ ID NO: 134019 - DNA, 288 bp, Glycine max
  Clone ID: PAT_MRT3847_92024C.1
ctcgagcgatttggaggctaaaagaggacttagtaagaaaaggccacatgaaaatgtttctggtgtccccaacaacaatgcccagactaatatggagttagatattgtggacgaagattaccagattttcctgaattcttgtagggatgactatatacctagtgaattaatagaaaagcagaatttggaggctaaaagaggacttagtaagaaaaggccacatgaaaatgtttctggtccccaacaataatgcccagactaatatggagttaattgttgtggatgagg

SEQ ID NO: 134020 - DNA, 259 bp, Glycine max
  Clone ID: PAT_MRT3847_92025C.1
tcgcccacgcgtcctgtaaaatggaagtaatctgaatatggaggtggacagtctgttgctgggttgatattgcatacggcatcactgaaccatccagcttagctgatatggccgccaatccttcccatgcactggtctatcttgtggttatgctctcagctagagccctgttcacaaacacatggatcgaactctgtggctcatctgctagagatttcgccaagcagcttaaggaacatcatataggcatgcccttaca

SEQ ID NO: 134021 - DNA, 441 bp, Glycine max
  unsure (1)..(441): unsure at all n locations
  Clone ID: PAT_MRT3847_92026C.1
aaaatagaaacacacgcaacaaaaccaaagcatgtgatatttagtgcatagttggcgagagaaaaagcaggaaagcttgaactcccattcaatggggtttggcacacatccaacttgtcttgctggagtcagcgagagagagagacagttttgctttgctgagttgctgccaactcccattcaatgctcctatctttcacaaccgattacgcgcgccttgttcttcacgctttacttttagttctagtttagttttattactccctaaaaatccactttctgtgctcccgcactcgaactcgcaaaaccctaatttctttctcgtaacgaaaccttttcttcttcaatcttctcgtccctttctttgccattcccgatttcattcccactgcttttntcttcgctagggtaagttctttcacttttcactgcgatcaattt

SEQ ID NO: 134022 - DNA, 430 bp, Glycine max
  Clone ID: PAT_MRT3847_92027C.1
gcgcgagaagacgacagaagggtacgtattttatgatagtttaaaatcatttagtgataattttgaatggtcaaagtgacattttttatcatttagattaaaggatcaagttgaatgaatttaaaaaattaaaagatcaaattaaacctaaaaaatattaaaggacgaagttgaatataaaaatgcaaaagaaggagccatgatccgtcagtaaatttacgtttagccttacatttagcctcactagtgttagccaaacataagctaatatagtattaatttttttttatagagagattattttttctacttaagaacttcgggtggtgtttcgagagaagaatggaaggaagtaaaggaaaagcagattcaacacaaccatgatttggataaagagaggattaatattttttggttctgggcatgatat

SEQ ID NO: 134023 - DNA, 1879 bp, Glycine max
  unsure (1)..(1879): unsure at all n locations
  Clone ID: PAT_MRT3847_92028C.1
tcagctgaatcnactntcgacttngntangattcgacctgactcgtcaatctgacatgagtncgatcgtagtagttttgntntcgaagcgagttntatcacttcgcgctctgcactagtcatatcttgatcnactcgtaccctactgacngtactctcatacacctcattctcactataatattatgattatctataataanntatnnnggnnnnaaccnnnnnnnnnggnnnnnnnaannnnnngttttnnnnnnnccgnnnannnnnnnnannnannngananaatagactngaacgactacatgcatcgacgcacacggcangaggnngacgcagcgagcgcagccgatgtactcgtatatcggtctagtacgtcgtctgtntatgctactcatcgtatctgtctatctcatatacttgatccattgatatagttgaccataccgtctctctanggctcgacatggaccatctgtctgactgatcataagatagatctatccactatgctgactatacgtctactcgtcggttgaggagatatctacttatctgattatctatcgatcgtatcgacgtcgattcgtcagtgatctgttctacttctacatacgagcgttggatcgatgttgcgttacgcatctcttgtcgctcatcgaatgtactgtgctctagctcgatatatcgacgttctacaatgttatattgacgacgatcgtcactcataacttactacgtcgatgccgacgtctgacttatgttatgtagatgatatctacngtctactgtgtctacctcgtatcatatgatattatgtatctttgacatagtgatgatcgatgtcgtgtgcatcgtgaatatcgatatagttatgtgatcatgactctactgctattgtgatccgatgatgtcatgaatcgancgctatgacagtcacgatgtatgtcgatgatatatcatgtactagatgatacgatctatgatatcatcgagatgtgatttgatgtctacatgacatgttgtcatctcttctcactgtcatatcgtagtgttatgtgtagtgttactatctcagtgtcatnaacatgatatgacgcggtcatgatctctagatatctcgacgttatgttatgatgagacgtgatgcaactgatatatgatatgatagcatgacgttatcacgttgtatgatgatacatctagattaatacatgttatgatttgatgactacgatacttctacatgattactatgtcactacttactactgtgatcatctantaccattatcgatcatgtcgctgactacttctgacgtgattatgatgatatcatgtgtatatatgataatgatgacttcgtcatgcactactgcgacgtatcacgtctgtcgacgctcacgactgtcgatcgtcgacatgtcttngatgtactgactatgatcgactatagtcgtcgattcatacgactatgatgacgacgatgatatgctgggatgatacgatgattagatgatgatgtgatgtgagtgatgtgatatagcgatgtcgngacgatcgcgtacacgacgactaccttgtatgatgagatgatcatactgatgatgtgtatcgatgatgatgtcgtcgacgacgatgnatgatgatgatgagcatgacctactgatgatgatgatgtcgatgatgtacgtggtcgatgctagactactgatgatgatcgacgtcgatgaatcgattacgatcttcagatgatgatcgatcgacgacgatctgacgatcgangcatgatcgttgcatcgacgattgaatcgatcgatngactanatcgatcgatcgactcgtctagtcgtcgttcgtatcgatcgtagtcgatgtan

SEQ ID NO: 134024 - DNA, 2011 bp, Glycine max
  Clone ID: PAT_MRT3847_92029C.1
gaggttggcattggttatggtgatgaaggacgcggtgagtcggatgagtgttttttggcgtttgctaggatttttagtggggttttgcatgctgggcagagaatttttgtgctttctgcattgtatgatccggtgaaaggggagtcgatgcagaagcatattcaggaggctgagttgaaatccctgtatttgatgatggggcaagggttgaaagtagtgacatctgccagggctgggaatattgttgccattgcaggccttgggcagcatatattgaagagtgctactctttcttctactaagaactgttggcctttttcgagtatggcattccaagttgctccaactttgagagttgcaattgagccgtctgatcctgctgatgtgggtgcattgctcaaaggcttgaggcttttgaatcgagcagatccgtttgttgaggtcaccgtgtctggaaggggagagcatgttcttgctgctgctggggaagttcatcttgagagatgcataaaggatttaaaggagaggtttgccaaggtaagcttgggaggtctctccgcctctcgtgtcctacaaagaaaccattgagggagacgtattgaacgtgatggaaaattttgatagttcttagcacggagatcatgcagattatgttgaaaaaacaacacccaatggaagatgtgttgttcgggtgcaggtgatgaaacttctaccttctttgacgaaggtgctcaatgaaagctctgatttacttggagatattattggagtaaagtcgaggcagagaccgagtattcttgaaaacgataacccagttgaggtgctaaaaaaacgcatattggatgcagtggggggtgatattttgagcaggaatgaaaatgacaaggaccatgctgagaaatgtaaattgaagtggctaaagattttgaggaggatatgggcacttggaccaaggcaaattggtccgaaccttctctttactcctgatattaaagcacaaagcaccgatagctctgtcttaatacgtggttctcctggcatatcagaaaggtttggctttgtggccgattctagtatcaatgactcagttactgagacgtcttcaaatgcaaactcggctttatacatggatgccgagcaccttgagagtagtgttatatctggtttccaattggccacttcagctggacccttgtgtgatgaacctatgtggggtttggcatttgtcgttgaggcacggttatctccatttccaggacagcatgatgaatctgaaacgcaccaacaatcagagcagtacggcatctttgcagggcaggtaattgcaactgtcaaagatgcttgtagagcagctgtggttcagaataaaccacggctggtggaagcaatgtatttttgtgaattgaatacacctactgaatatttgggtcccatgtatgctgtactttcccgaagacgggcccgagtattgaaggaagagatgcaagaaggttcccctttcttcactgtgcatgcgtatcttcctgtttctgagagctttggttttgcggatgagttaagaaggtggacttctggcgccgcaagtgcacttcttgtccttagccactgggaagcacttcctgaggatcctttctttgtacctaaaacggaagaggaaattgaagagtttggagatggttctagtgttcttccaaatacggcaagaaaattgattaatgcagtcagacggtgtaagggccttcctgtggaggaaaaggtagtgcagcatggaaccaagcagaggacactggctcgtaaagtctgatacttttcattccttagctgtgaagagaacatgtagttgttgaatgtgtttgtagctcatacttcatgtactgtaccattaggaacaatttttcagcatgagtttatttttatatagcttcaccaaagttttgtcacatacaaatacaatccaattcatgatgattttatattttgagtaatctatattgtctcatttcaatcaaaa

SEQ ID NO: 134025 - DNA, 364 bp, Glycine max
  Clone ID: PAT_MRT3847_9202C.1
aaacagcatccctgactacaaatttttaaccacattttcccaaaatttgggaaaaaggaaaaattgcctcaataaattcaaactttcggttctgggggggaaaatgaatcagggcctttgaaaaattgcttgaaattgaaacccattttcccgtcgggccccataggacctaaaaaacccccatcagccacatgattctccgaaaaaacaaacaattcctggtgtttgcactttggagggcgttaaccataaccataaccagcctgggccttaccactttttttttttttagtctaaggggcatcctccttttaatggttttggccctcgtaatcccggacccgtgggcgaacccttggttccc

SEQ ID NO: 134026 - DNA, 599 bp, Glycine max
  Clone ID: PAT_MRT3847_92030C.1
gcacgagctttcacgaatcaagaagaagaagaaacacaaaagaaattaccttaactactgcaacgccgacgacaacgataacgactctcactctcttttgcagatcttgaatttctcaaatcaggataaaaaaaacaacccatttcgacacgtcatcacataactaatggcaggtaataaaacttttcaaatatcatggaacatatgcgaaggaaaaatttatcagggatcaaacgcaaaattcgaatatatatcaggaatcaaaaacataattaagtctattattattaattattcaatgagtagttgagttactctgtcttaccttatagtcttctgtattcctaataagctcaattgctcctaattaaagtaatgtaactactctctctggatttgattaaccgtgaaaatttagtctaaatttaatttgtactcaatttaaaacttacttgattgtagtaactttattttacctttcaaaaagaatttcaaatgtttttcaaacataatatagtttgttagtagtataaaacttatgccatcttcttattttaatcaaatcctaaaataacatggaagccaagccaagcaaatcg

SEQ ID NO: 134027 - DNA, 4941 bp, Glycine max
  Clone ID: PAT_MRT3847_92031C.1
tacggctgcgagaagacgacagaagggggcttctctggatgcgatacggaagaagattgtcaaaggagagataccttgtccctccctcatgctactaaaatatccactctcgtactgccaggacatgccaacaacgtccagtctttgcatatatcttttcaaatatccctagaaaatgttttctttatgtttctcttattccatatttcagtggaaaaaccttgatcatacttgtgtttaatcttattttactgctcatgtagcaatatgatttgtttgtttaggcaattcattccggtgcagatcttgaatctgctatttcaatatgtatgggctacaaatctgagggtcagggcttcatggtaggggtgaagataaatccagtgccgggtttgcctactggttttccagaattacttgagtttgtcatggaacacgttgaagagaagaatgttgaaccacttcttgaggggttgcttgaggctcgtcaggaactccaaccatcactcagtaaatcccaaagtcgtctgaaagatcttatatttttggatgttgcccttgattctacagttagaacagggatggccgtggccgggtaagaaaggtaaacagctggggctgcgaagctaatgtagctcattaacagggttcgtcttctccccgcgctaattatattgtatgaactaggttcgatgcctgtttcatttaaggttaagacttcttttcttgtatatttggccacttcccttacattttcaatatggtcaatataaattcaaaatatttttcttgagatgctattgggggtcaatacttaagctcatttttcttctgcaaccatcggcagaatatcttggatcactgcttggcgtggacaaatgggccgtggaaatatttactgaagaaattatccgtgctggatctgctgcttctttgtctactcttctaaatcgactggatcctgtgctccgaaagacagctcatcttggaagctggcaggttattagtccagttgaaactgttggatatgtttgaggttgtagatgagttgcttcctgttccaatcttatgcactatgcgacctacaattttgatagccaatagtgtgaaaggagaggaagaaattccagatggtacagttgctgtcctgacacctgatatgcctgatgtcctatcccatgtttctgtacgagcaagaaatagcaaggtgtgttttgctacatgctttgatcccaatatcctggctaacctccaagaatataaaggaaagcttttacgcttaaagcctacatctgctgatgtagtttatagtgaggtcaaggagggtgagtttattgatgacaaatcaactcaactgaaagatgttggttctgtgtcacccatatctctggccagaaagaagtttagtggtagatatgctgtctcatctgaagaattcactggtgaaatggttggagctaaatctcgtaatatctcttatttaaaagggaaagtagcttcttggattggaattcctacctcagttgccataccatttggagtttttgaacatgttctttctgataaaccaaaccaggcagtggctgagagggtcaataatttgaaaaagaagttaactgagggagacttcagtgttctcaaggagattcgtgaaacagttctacagttgaatgcaccatcccagttggtagaggagttgaaaactaaaatgaagagttctggaatgccgtggccgggtgatgaaggtgaacaacgatgggaacaagcttggatagctataaaaaaggtgtggggctcaaagtggaatgaaagagcatacttcagcacaagaaaagtgaaactcgaccacgaatatctttccatggcagtcctggttcaggaagtgataaatgctgactatgcttttgtcatccacacaactaaccctgcctctggagattcatcggaaatatatgctgaggtggtaaagggacttggagaaacactggttggagcttatcctggtcgtgctttgagttttatctgcaagaaacgtgatttgaactctcctcaggtcttgggttatcctagcaaacctgtcggcctatttataagacagtcaattattttccgatctgattccaatggtgaagatctagaaggttatgctggtgcaggtctttatgacagtgtgccaatggatgaagccgagaaggtggtgcttgattattcatcagacaaactgatccttgatggtagttttcgccagtcaatcttgtccagcattgcccgtgcaggaaatgaaattgaagagttgtatggcactcctcaggacattgaaggtgtcatcaaggatggcaaagtctatgttgtccagaccagaccacaaatggaaacttgcatatacaggaaaacattgaatgcgaatggaataacaaaagaacgacttctgagctatgacccaaacgtccatttggcagcttatttgagttcaggagtaacccccggattaccaaacatggccttaaactactattacatgatatatgcagtattaacgggtgcagatcttgaatctgctattcaattgtatgggctacaaatctgagggtagggcttcatggtaggggtgcagataaatccagtgccgggtttgcctaatggttttcctgaattacttgagtttgtcgccgaacacgttgaagagaaaaatgttgaaccacttcttgaggggttgcttgaggctcgtcaggaactccaaccatcactcagtaaatcccaaagtcgtctgaaagatcttatatttttggatgttgcccttgattctacagttagaacagctgtggaaagaagttatgaggaattaaacaatgctggacctgagaaaataatgtacttcattagcttggtccttgaaaatcttgcactgtcatcggatgacaatgaagatcttatctactgtttgaagggatgggatgttgccttaagcatgtgcaagagtaaagatactcattgggcattgtacgcaaaatcagtccttgacagaacccgccttgcactcacaaacaaggctcatttataccaggaaattctgcaaccatcggcagaatatcttggatcactgcttggtgtggacagatgggctgtggaaatatttactgaagaaattatccgtgctggatctgctgcttctttgtctactcttctaaatcgactggatcctgtgctccgaaagacagctcatcttggaagctggcaggttattagcccagtggaaactgttggatatgttgaggtcatagatgagttgcttgctgttcaaaacaaatcatatgagcgacctacaattttgatagccaagagtgtgagaggagaggaagaaattccagatggtacagttgctgtcctgacacctgatatgcccgatgtcctatcccatgtatctgtacgagcaagaaatagcaaggtgtgttttgctacatgctttgatcccaatatcctggctaacctccaagaaaataaaggaaagcttttgcgcttaaagccaacatctgctgatgtagtttatagtgaggtcaaggaaggtgagttaattgatgacaaatcaactcaactcaaagatgttggttctgtgtcacccatatctctggcccgaaagaagtttagtggtagatatgctgtctcatctgaagaattcactggtgaaatggttggagctaaatctcgtaatatctcttatttaaaagggaaagtagcttcttggattggaattcctacctcggttgccataccatttggagttttcgaacatgttctttctgataaaccaaaccaggcagtggctgagagggtcaataatttgaaaaagaagttaattgagggagacttcagtgttctcaaggagattcgtgaaacagttctacaattgaatgcaccatcccatttggtagaggagttgaaaactaaaatgaagagttctggaatgccgtggccgggtgatgaaggtgaacaacgatgggagcaagcttggatagctataaaaaaggtgtggggctctaagtggaatgaaagagcatacttcagcacaagaaaagtgaaactcgaccacgaatatctttccatggcagtccttgttcaagaagtgataaatgctgactatgcttttgtcatccacacaactaaccctgcctctggagattcatcggaaatatatgctgaggtggtaaagggacttggagaaacactggttggagcttatccaggtcgtgctttgagttttatctgcaagaaacgtgatttgaactctcctcaggtcttaggttatcctagcaaacctgtcggcctatttataagacggtcaattatttttcgatctgattccaatggtgaagatctagaaggttatgctggtgcaggtctttatgacagtgtgccaatggatgaagccgagaaggtggtgcttgattattcttcagacaaactgatccttgatggcagttttcgccagtcaatcttgtccagcattgcccgtgcaggaaatgaaattgaagagttgtatggcactcctcaggacattgaaggtgtcatcaaggatggaaaagtctatgttgtccagaccagaccacaaatgtagacctccatacctatgtcttctaagccaactacctcaactatgttctatgttcattcccgtgcaacatggcgtttcaaacgtggccgtggcagcttctgcgagtttaagagtaacccgcgggattaccaaatttggccttatagatttattacacgtgatatattgaaaattaaggaataatttataagtgtataaacatggaataatgtaaattaattaaaaaattagatggtcttattctttttccctactatatatattgtatctacttacttcttcctaattaaaattgctattcttagttgatctttctagaaaaaaaaaaaaaa

SEQ ID NO: 134028 - DNA, 2346 bp, Glycine max
  Clone ID: PAT_MRT3847_92032C.1
ttccggtccggaattcccgggtacgacccacgcgtccgcgcccttcataatgccttaaactaaacccttctcttctatctccggccaccgtttatcttttctcaataacctcaaaccttattatattattcggaaagagacacgacaatgataacgttgttggacttgtaccacgttctgacagcggtggtgccgctctacgtggcgatgatcctcgcctacggctccgtgaagtggtggaagatcttcaccccggaccaatgctcgggaataaaccggttcgtggcactcttcgcagtgcccctcctctccttccacttcatctccaccaacaacccctacgccatgaactacaagttcatcgccgcggacacactccaaaaagccatagtcctcgcagtgctcttggtgtggtccagaacaagctcaagaggctcacttgaatggtccataacactcttctctctctcaactctccccaacaccttggtgatgggtatcccgttgctgaagggcatgtacggtgatgactcgggaacactaatggttcagattgtggtgcttcagtgtatcatctggtatacccttatgttgtttcttttcgagtataggggtgcgaggcttttaatagtggagcagtttcctgatacagcgggttcgattatctccttcaaggttgattcggatattatttcgttggatgggaaggagccgcttcagacggaggcggaggttggtgatgacgggaagcttcatgtgacggtgaggaagtcggcgagttcgcggtcggagattttctctaggcgctctcatggccccaactcggtgtcgttgactccgaggccttcgaatttgaccaatgcggagatttactcgctgcagagctcgaggaacccgactccgagaggctcgagttttaaccacacggatttttactccatggtgaatggtaagaacaacaacaacaacaacaacaacgtgagtatgagtccgaggcagagtaattttggaggctttgatgaagaaagtggtgggggtgtgagggtgaatggtggtgctggtgtacgtgggtaccctgggcctgcgaatgcggggattttttctccggtggcggcgaagaagaagggtggtgagagtggtggtggagggaaggatctccacatgtttgtgtggagttcgagtgcttcgccggtgtcggaaggtggaatccatgtcttcagaggtggtggtggggattatgggagtgaccagcttcctgttggtggggtggctcaccagaaagattatgatgagtttggtcacgatgagtttagcttcgggaacagaaccgttgctaatggggttgacaaggaagggccagtgctttcaaagcttggctcgagttccacagctgagcttcgccctaaagctcaaggtgaagccaaacctacttccatgccaccaacaagtgttatgacaaggctcattttgattatggtttggaggaagctgattaggaaccccaacacatattccagcctctttggtctcacttggtctttgatctcattcaaatggaatgttgttatgccagcaattgttgctaaatcgatatcaattttatctgatgctggtcttgggatggcaatgtttagccttgggttattcatggcattgcagccaaagattattgcatgtggaaactcggttgcttcctttgctatggcagttcgttttcttactggtcctgcagtcatggctgttgcttcaatcgttgtagggctcaggggagttctattgcacattgctattgtacaggctgctctgcctcaagggattgtcccttttgtgtttgctaaggaatacaacgttcatcctgacatactaagcaccggggttatatttgggatgctaattgctcttcctattacgctagtttactacattttgcttgggctttgaagcatgttgaggaagcgaaaaaggaatcaagtcatgaagattaaaaaaaaagactaattgcagtgtggatcaaactacccttttgttatatttataggttaatttttttggcatcttctaacaatggtagaatttcgaaatgaagttagtgagagggggggagtgtgaccttgtaattaatctccaaacacaaaaacaatggtgagagttgaaatggaagcaaggagatagtagtatattttagggctatagctagctactaggaaacttttattttggtggttttagcctttttttactgtgaaccccactctcttatattttgcttcgtttaatggaaaaaaagaagagaaagtgaagcttgtttgtagttgtcgaaacacctttctctttcttttcacaagt

SEQ ID NO: 134029 - DNA, 1122 bp, Glycine max
  Clone ID: PAT_MRT3847_92033C.1
tccggaattcccggctcgacccacgcgtccgacgggagtgtccagcttcccgtttgtggggtggctcaccagaaagattatgatgagtttggtcacgatgagtttagcttcgggaacagaaccattgctaatggggttgacaaggaagggccagtgctttcaaagcttggttcgagttccacggctgagcttcaccccaaagcacaaggtgaatccaaacctacttccatgccacccacaagtgttatgacaaggctcattttgatcatggtttggaggaagctgattaggaaccccaacacatactccagcctctttggtctcacttggtctttgatctcattcaagtggaatgttgttatgccagcaattgttgctaaatcgatatcaattttatctgatgctggtcttgggatggcaatgtttagccttgggttattcatggcattgcagccaaagattattgcgtgtggaaactcggttgcttcctttgctatggcagttcgttttcttactggtcctgcagtcatggctgttgcttcaatcgtagtagggctcaggggagttctgttgcacattgctatcgtacaggctgctctgcctcaagggattgttccttttgtgtttgctaaggaatataacgttcatcctgacatactaagcacgggggttatatttgggatgctaattgctcttcctattactctagtttactacattttgcttggactttgaagcatgttgaggacgtgaaaaaaggaaccaccaagtcacgaaaaaaagagactaattgcagtggatattacactacccttttgttatatttataggttaatttttttggcatcctctaacaatggtagaatttcggaatgaagttagtgagagaggggggagtgacgttgtaattaatcaatctccaaaacacaaacaatggtgagagttgggaaggcaaggagatggtatattttagggctaatggctactactaggaaacttttgttttggcggttttagccttttttactgtgaaccccgctcaactcttttattatatattttgcttcgttttaatggaaaaaagagaaagtgaagcttgtttgtagttgtcgacaaaaacca

SEQ ID NO: 134030 - DNA, 1570 bp, Glycine max
  Clone ID: PAT_MRT3847_92034C.1
gaatttccaagacgcatcaaaatgcatgagaattgaagtgtactagttaatcatactcaactagaggagaggctttgatctactgttttcccatcctcagttgccttggtcaccttatatgaatcaaacatttacacaatgagtaacaacttcagcaagtatgaaactagagaagaggctttcattaggaagagcatgaaaaaaataaatgagtatagtgtgtttagaagtatgtttgaatacagaaggctatgttaaatgaatataaattgcagaagctaaactgggtagaattcatgcttaatctgcctctagacgtgtgagcaaacatgcatcaagtagcttgagaaatctggagtaaacaaatgtaacctgttctgcagttttatcaatgtgtttcacgttcagttcgtctcagatcaccttagttttgatggaaaagtagcaagtagtaacatcacttgcagcatgcttgtttgaaagaaacagtatgaatccatgactagtgtcatgccaattacggttgaaaatttatcatttttgggataatgtttagactcacagtttgaacatggctgtgatagtccttccttcaatgtcaacagctacgatatcagcttgcaggacccagctgtcctttaacatgacttcctttacctgaatgatcgatggaaagcatgctaagttttattgcagtacttcaaatgcaatatcgtcaatagttttagaggcaaccatgcctcttcgtggtgcctgttgtagcaggggatcttaagtgaggacctgttaatactttgacgggtgttgtggggatttaattagctttatgttttctggtgttgatttatgtttggtctgtatgttcttgtgtgggatggtttcggtagtgccttaggcgacgtggtgcctaatggtatctgtttttctgctgatgtactgacactatgtttttgtctagttgggaaattacttatgacccaaatcacccaattagcattatgaatatatatgttgcttataaaaaaaagcgccttagcaaatccaacagctattactaattttgaatacatgtttgtgtttgcatggtatcccggtacccctcatagaaagtagttaagagcaactttatagttcaagatctgatcttgtgtggatcttgcaataaaggggaatagagatctctgaggtggagaatggattcttctacaagaaacctgaagagcttgaaaaaaaattaaaaaaaacttcaaaacagaaacccacaagaagaaggttgttgaagaaaaacaaaccaacagaagaggcaaagaacaaaataaagatggacttacctggaggtcactgaggtggctgtggactgtcatggagggcgaaggaggaaaaagggggaggtcgcagaggggaggaaggaagaaagaaagaagaggaggaaggagagagggaggagaacaaatcacgaaggaagaagcgtgaacggtcggaaaaaaaatgcataatatcggtctgaaaatttatacactataaattgaatcaaatagtagagatttgtatacctaattttcattttcat

SEQ ID NO: 134031 - DNA, 417 bp, Glycine max
  Clone ID: PAT_MRT3847_92035C.1
aaagaacccattaaattaaaagggggggagtattgactattgattttgaactgtaaaaaataatggagccgtataactaaataaacggggacatatttaaattttcgctacttaaaaacagacatgagctaattctcatggatgatcattcccaggattgcatacatacaggatcatgggggccttttttgagtattgggaaaagcaccacatttttctacaagggtaaaaacattcaaattcattgggggaacacaaaggggggtggacaaatataatacacaggtgtaccacactaaatttggctagttgccttcatttggggaacttatccccaaatatactcctgaggaaaaattatcaggaataaagaccccataatccccctatatttttaaaaactgaccctaacaagct

SEQ ID NO: 134032 - DNA, 558 bp, Glycine max
  unsure (1)..(558): unsure at all n locations
  Clone ID: PAT_MRT3847_92036C.1
cggtttcgtgggttcaggtattgaggactccatatatgaaaaacaatggagctcccattcaacaccagcaggtactccataatatttatgtccgaaggctctagtaacacacacatacactaggcatcttgattaactgcgatcaaaatcaccctagtgaattatatacttcatcatttcttaattataagatattttttttagaaatttatgtcttttttcataagattaatttttaatttttatatgtattatttttttcctacatattcttatttaattatttttttaaaaatattaatgaaaatcaattaagtggataaaatataagaaaataataataaataattaatatattgaatatgattaattaaatgaattattcttctttaggaaagaaagaaaaaatatatgttacaacatatataaactgtttgataattatatagtcatccatctaacagtttatgttacactacatcattaaatgtagtgaatgtccaaagattaactngagtagctgtaggggataggttcatgcacttaacaattattata

SEQ ID NO: 134033 - DNA, 736 bp, Glycine max
  Clone ID: PAT_MRT3847_92037C.1
ccacgcgtccgcttccgcttaactcagcccttttcaacttgtcttttctccggccaccgctatcttcatctcttaaaccttattataacgatgataactttgtgggacttgtaccacgttctgaccgcggtggtgccgctctacgtggcgatgatcctggcctacgggtccgtgaagtggtggaagatcttcacccctgaccaatgctccggcataaaccgcttcgtggcactcttcgcagtcccactcctctccttccacttcatctccaccaacaacccttatgccatgaactacaagttcatcgccgcagactcgctccagaaagccatagtcctcgcagtgctcttggtgtggtcaagaactagctcaagaggctcacttgaatggtccataacactcttctctctctcaacactccccaacacgttggtaatgggtatcccattgctgaaggggatgtacggtgatgcctcgggaacactcatggttcagattgtggtgcttcagtgtattatttggtacacccttatgctgtttttgtttgagtataggggcgcgaggcttcttatagtggagcagtttcctgatactgcggcttcgattatttcattcaaggttgattcggatattatttcgttggatgggaaggagccgcttcagacggaggcggaggttggtgatgacgggaagctttatgtgacggtgaggaagtcggcgagttcgcggtcggaga

SEQ ID NO: 134034 - DNA, 445 bp, Glycine max
  Clone ID: PAT_MRT3847_92038C.1
acgaggtaatctgcagtttcaattttgattggcttcttctatgtttttaactttacctttgttaatttgaaatttgtagcataattagggcgatcagtttttaaatttttatatgttgggtcatttacaatacgcttttaaactttgggggtcaaaacaagattcacaactttttgaagagtccacttaatttctataatacctttcaaccgaccaagttcacctacaacacaacatgcgtccaacttccagtccatatcaactggaaatgtcccaaagctaaatctccttaaccattagcatctctctttctctctctaaaatttgttgtatttgttttttatcggtcaatgttagatgttagtgagagagtcgaatgcacttacgtctctcttcgactatcatattaaccttataactctacatttgttgtctttgtagaaga

SEQ ID NO: 134035 - DNA, 330 bp, Glycine max
  Clone ID: PAT_MRT3847_92039C.1
gcgcccacgcgtacggtgactttatcaagaacatgattactggtgcctcccaggccgactgctgtgaccttgggattgactgcaccgctggcggatatgaagatggtgattctaaggatggacacacccgtgagcatgctcttcttgctttcaccctacgtgtgaaacaggtgatctgatgctgtaacaagatggatgccactacccccaagtactctaagtatacgtatgaagaaatcgtgaacgaagtctctagttactggaagaacgatggctacaacccatacaagattccctgggatgccatctctggcgttaaagttgacaaca

SEQ ID NO: 134036 - DNA, 284 bp, Glycine max
  Clone ID: PAT_MRT3847_9203C.1
tctcccactcattctgttcacttgatccttcttaagtcttcatcatcatcatcatcatcaccgcggattgaataatattcctatcataaacatctccatcgcaaggcctgaatagtctactcaccccgactctttctatgcttacttggcttagttcatatacacctttatcttccttttcgcctagtcaggttcaagcatcttctactacatactcacctactactgctccacaaatccctcctgcctcatctactcttctatcgcccattctttagccctct

SEQ ID NO: 134037 - DNA, 289 bp, Glycine max
  Clone ID: PAT_MRT3847_92040C.1
agacgtcagtagagctgcgaaagggggacacaaagggttcgatgcttgagatcacagcttcgtttcgatattcagtgtcgtcggtccggatgagtctcatgtcagctctgtggctcaggttaggctgaccgcggttattgcacacgtatccgtataggcatgtgacactgtggaaaggcctgcaaataaacctaacggcacttcgtactcatattccacgggttgccgtaccataattgatcccatttatgatcacgatcagtcagtagttccacgttgatagactgac

SEQ ID NO: 134038 - DNA, 283 bp, Glycine max
  Clone ID: PAT_MRT3847_92041C.1
ggaaaacagaccgttttcagcttcaagcttcaatggagatgagatttctttgccgatggggcaccaggttagatcagaccccttgagaactgctcagagtaagctaacattttataagcttactcgatgtcagagtgaacatgtggtacatccttccaaacgtgtttggaatgatgatggttactgggtttaaggtttgatgattcttctcaatggttactgggtttaataaagtttgacaattcttgcgtttttataatgtacagtttcaaaatggcccgaa

SEQ ID NO: 134039 - DNA, 285 bp, Glycine max
  Clone ID: PAT_MRT3847_92042C.1
tttgaaacctttaagtgcggtggatgtttctaactgggatcaatgcactcccaggtaccggctggttgcgcaagattagccaataccaccagctaggcagagaacatagctcgttgcagacgtgtgtgaatgatcactgggtttctggaacttctggcagcgaggagtatcgctttgaacacatgcgcgaaaatcagaatgaggagagcttgctgagagtgaaagatgacaagctggaactcgatgtgtcgttagagggtgaaaaggtggtaacccaaaagggct

SEQ ID NO: 134040 - DNA, 226 bp, Glycine max
  Clone ID: PAT_MRT3847_92043C.1
tgtggccactgccgcgagtgcagtgctggctagcaacgccatggccattgaagtgttgcttggtggtgatgacggatctctggctatagttcccaacaatttctccgtggcctctggggagaagatcgtgttcaagaacaacgcaggtttcccccacaacgttgtgttcgacgaggacgagattgttagcggcgtggatgcagggaaaatctgaatgaacgatgaa

SEQ ID NO: 134041 - DNA, 442 bp, Glycine max
  Clone ID: PAT_MRT3847_92044C.1
ttgtttcgtgggtgcgactctgctagttttgatggtttggttaccaaacaagctgtgagcaagatggcagaactgataaatagtgtttgcgggggtgatgaaaaattgttgctggaagggccccccctgttgttggcttgttgttcaagaatgggagggtgaaagaacgatgtttggggaggtgaatgtccaattccttttggatctccgcttacaggtttttgcaataccattttgaatgacatgctcattggatatagctatgaaaaattactgcgccaggctaacgctccaagtgtgttgatacagctccttcaaaaagtctggatgtttgtgtgagtatggggatgataactgagctagtgtgcatgaatatgtcccggcttactatattggttctcaattgcaaagctgggtagctggccataatatcaccatgact

SEQ ID NO: 134042 - DNA, 235 bp, Glycine max
  Clone ID: PAT_MRT3847_92045C.1
gaactagcctaaaacccttcccctccgccccaaacccccaacaatgcgccctctgttccgtttcgctcaattggctcggcgccactacaaggcgtcgccaccaccaccaccgccgaccccaccgaagcccccgaagaagccacagaagttcagcttccacggcgcaacgtgggcggatccatacagctggatgtcgcagctgaacgacaaggtggcgatgcggcacatggacgtg

SEQ ID NO: 134043 - DNA, 491 bp, Glycine max
  Clone ID: PAT_MRT3847_92046C.1
tggtcttagatatgttcgggcggattcggtcgagcctcctgaggctggacaagtcgaaacgggttatatcgtatcggcgttttctctttatcttcccccgcgcaacatcatagctcctgctgagcacttgagtacaagggcaagccataccgtgtggtaagtgtattatcatgattttttgttagtggagcacgtatgtcggatgtggaaaagagggacgcatgcactacaattattgcattgttatatacacttcattcacatctagccatactctacagtaacattgatgactgtgagattacgaatgaataagacgttttggttactacgccaatggggatggcatcctggcactgaccttgatcccgcgaaaccaactaaacggggaggagaaagtgtccggaaatatataatgttattatgtatgcaatgccagacagtgggatggtctggaaggactgatgcccaatacacagtgccggcgaaac

SEQ ID NO: 134044 - DNA, 201 bp, Glycine max
  Clone ID: PAT_MRT3847_92047C.1
gccgtcgtcctatttgtttatttaaagacagacattcaaagatgtctccggttgtgcaaccactaccctgattaatgcttcaatattattgaaggaggtagagtatgactattcaacattctcgtgaagccctgatctccttttttgacgaatttggccttgctgtatttgctcacccagacacgctggtcatagtaaaag

SEQ ID NO: 134045 - DNA, 527 bp, Glycine max
  Clone ID: PAT_MRT3847_92048C.1
ataaaaaaaatatatgttataataacttcattaactggcttgcctaccgaaatttaaagagacaaaatttctataataaaaatatttggaatcctaaactcctagttcagggttcaatgccagcacacatccctaaatcctacataaaatatttccttccttccttttataaaatattgatataggggtcctgaaaaaaggaccccccaaaaaccaaaacagatgttacataattaaggacaaaatcatggcctttggtttgtacccccatgtgtgaactttgaaccattcttggtatttggtatccctctttgccatttcatgtagtttacctcctaaaccatccattttcaaattgggtacaacttcaatttgggcaaacataggaaacccatttcccaaaaggctacaactttttttgaaaaggattcattgatcttggtttcgtttcactgcttggctgatggtgaaactaacattgttccctattgcggcagatgaccaaaaatcagcaccattgctacctg

SEQ ID NO: 134046 - DNA, 411 bp, Glycine max
  Clone ID: PAT_MRT3847_92049C.1
ctcgtctttttttttttttttttttttccttccatttttattgaatattagggggtggcgggcggaaaattttgttttaattattaaaaactaatcttcttgttattaggctttctacgtacacttatgggatttaatctggccactgggttggacttttatcacaaaccttctgtctttaacaaaacattcttaggaaaactcaacccaaaagcgttcttgttaccgcaaactgcccgcagattatccacgttatttacattaaacccggaacttacagtcttattgatctcccctatcaaaaaatgagggacttagaaactattcagaacttcattgcaaagattgggacagcctatcctgtgtctttctcacatcatttttagaccactcttgtgcccatccccttgg

SEQ ID NO: 134047 - DNA, 1017 bp, Glycine max
  Clone ID: PAT_MRT3847_9204C.1
aactcaaaaaaataaaaatgaaaatctaaatttagctcgtctaatatgcaaacaatgttaatacaaaaaacaaaactatacagatgtattaaatacaactgactcaagcaatcaacaaataaaagaccgggccatcaaaattttctatggcctgtatgataatcattgctagtgaactcaagcaaacacacagcaaatgtaaaaccactcagaaagctactatcacacaatatttctagtctcttgtcagcaaccatggaatgaatgagatttagaccaacatgcaccatgccaatacaagtgcttctcaaaatttgctatgacttgtgaagaacacatttctcatacagagcaatgatatctttcttgttgggattcttcaaccgaagcagctgatcaccatagttgtgctttgtcagctcttgcttaagcctttgtacggtaaattttctataatcatcctcacttgttcgctgactaagattttcttcagcaccctcaaagatggaaccaccatcttctggttgtgtgtatgtactccttgttctcttggttccctttacaattctcgggcttacatccatgtcatcaccaatgttgtcatctaccctcattcgtttaccatgggaagcagtgtttagtttactgtccaatgcagtttcattcagtcgaaatttagtcagttcttgatggagagaatcaattttggcttgtgcagattgtaactgtagagagagagcctccgcccggttatttgcctgtgcatgtgcttcacgttctgtttccagaagctgttcaagaatctgggcactatttcgcctgtgtgtcttatctttgtccaaaagggcttctaaatccttctctctctgttgcaccttctcctctagtttcacagctctggtaagtgcatccttctccgaatcccttactctctgtaattcagcttccagttttcctttctccccccccccttctgcgatccccctctcagccctctcaatctgtgccagcctttcc

SEQ ID NO: 134048 - DNA, 286 bp, Glycine max
  Clone ID: PAT_MRT3847_92050C.1
ttttttttttttttttttttttttttttttttttttttttttttttttttttttttttaaaaaaacgaaaggggaaaaaaaaacaaggctttaacccgggccccataaaaaaagggtaaggttaatttggatccccatataaaaggttctcatagctcccccccaaagggaaacaagagcgggggctaacccccaagctccagttaaaaaactttgggaaaataaaaacctcgaaatggcccctttaaaaacccctaatggggggcccgggggaaaaatccccaat

SEQ ID NO: 134049 - DNA, 190 bp, Glycine max
  Clone ID: PAT_MRT3847_92051C.1
ggcgtgagtgacacgcatgaatttatgaggctgagtccccacaagcctggtgcggttttggcgtgagatcacagggaagagaaattggtgttgtaaatttttacatggaggaattgtttttgcagatttggtcaactttaagtgcgtgtcgtaacgactctattgggtgatgggagtccatattttgtat

SEQ ID NO: 134050 - DNA, 363 bp, Glycine max
  unsure (1)..(363): unsure at all n locations
  Clone ID: PAT_MRT3847_92052C.1
ggattgaatccaaaaacagaaaagccaaaatcctaatgttggtttaggcttatcatttatggcaagcacgtttctccttgacactctcatcagtatatacaacactagcaaaaggctatctcccttcaacatcaaaggaatattaatatccttcaagaaattaaacaaagacaattaattaaggattaattagctttaattatagctagcctagtcacagttccttatcatcctaagtgccaattcttgcagctcacccaagtcattgttatatgatcttttcttagaattacaggcttgcagngcgaaatattcctctctgctgctttgtacatctagcatgctcattccatcattgatgct

SEQ ID NO: 134051 - DNA, 646 bp, Glycine max
  unsure (1)..(646): unsure at all n locations
  Clone ID: PAT_MRT3847_92053C.1
cccgcgtccgctccttctggggttgggagtgtttggttctgttctggttttggctctcttattcaagcatttggcatctcagcaaccgaatactgatgaattctttgtgtctgagttcttgaagaagatgggtttagcatcttcccaaggctacaacttctctgcttctgtctgttcatggcaaggggtttcttgtgatgccaatggagaacatattgttgacttagtcttttctggtatggacctttctggcactatgcctgacaacaccattggcaagctaagcaaacttcaatctttggatcttagccacaacaaaatcactggcttgccttcagatttctggagtttaagctctctcaagagccttaacctgtcctccaatcagatttctggctcattgactaacaacattggcaactttggtttgctagaaagcattgacttgtccagcaacaatttctcagaggaaattcctgaagctgttagctcactgctgagtctgagggtcctcaaacttgaccacaacaggtttgcacacagcataccttctgggattctcaagtgccagtctctagtttcaatgatgtttcttcaatcagctgaatggacacttccagaagggtntggcgctgcttttcctaac

SEQ ID NO: 134052 - DNA, 232 bp, Glycine max
  Clone ID: PAT_MRT3847_92054C.1
gtcttgctgcggcggctactgcggttgccgtttctcctgctcgtgcggcctctgctgccgaggctgctcgatgtacccatacttgagctccactgagtcctccaccaccgataccttgttcatgggtgtggcgcctgttactgctcccttccacggtgctgctttggttgcgcccgctgtcaacgatggctgctcatgtggaccatgctgctcctgcaccccctgcgcttgc

SEQ ID NO: 134053 - DNA, 1089 bp, Glycine max
  Clone ID: PAT_MRT3847_92055C.1
caccaccatcaccaacagtcaccctcaaatgagttcagttcctgaaacactgcactcttcaccctttctttctcagtaaacaacaacacagcactgcatgttgcgctgtctctgcctctttcgaaggagaaaaaaagcccctcttgaaacttcagtttctacacaaaaagtgctgccacagaacagaaccaaagcatcacagctttttcgacaaccttgagtctagacaaagccaatagtttgcttcttgcatcggttgtttctttatttatccttctttttgttgcctttcggggatcctcacatccagacaaacttgttcacattctcttgttatagtccacaatcttcatattacatcacactgaatttgtttttgtctttaaaaagtaccattagtttttataagcttgtgctgtgtacttttactctctcaactctcaattactgtgtcctttagcttgtgtttgtgtccttctatgctatattatgcagtaaaaagatttgagagatttttcttacagtaaaacactaaaacattctgtacttcatgatatggttttgaagttctgaggggacattttattttcctgtggtggtttgcatcttttgcaagtatcagataacactccttgatggggttgggagtgtttggttctgttctggttttggcactcttattcaagcatttggcatctcagcagccaaatactgatgagttctttgtgtctgagttcttgaagaagatgatgggtttagcatcttcccaaggctacaacttctctgcttctgtctgttcatggaaaggggtttcttgtgatgccaatagagaacatgttgttgacttagtcttttctggtatggacctctctggcactatacctgataacaccataggcaagctgggaaaactgcaatctttggatcttagccacaacaaaatcactgacttgccttcagatttttggagtttgagcactgtgaagagccttaacctctcctccaatcagaatttctggctcattgactaacaacattggcaactttggggtgctagaaagcattgacttgtccagcaacaatttctca

SEQ ID NO: 134054 - DNA, 294 bp, Glycine max
  Clone ID: PAT_MRT3847_92056C.1
aaaattgttaatttttataataattatttcaatatatatatatatatatatatatatatatatatatatatttaaatggattcctaattgatagaatgtgcggaaattaaactggccataatatattacactttacccctttggtaagggaaaaaggtaaaggaaaaaatgtataaacaagaagtatattcctttggatttttatttctactaacaacttgcaaacattcacatgtaatccctgcacaagggtgggaatcatggccaccatgattctcaatgaccctagagaaa

SEQ ID NO: 134055 - DNA, 482 bp, Glycine max
  Clone ID: PAT_MRT3847_92057C.1
attttgtgtatgccagctttaaactttgttttttttagggcaattggtggattgctgtgatgaagaaccattcagaaaaaaatgtgggtgatgaaagaatacaaaagtgcagtcaccttggactaagaccattgttgtggtgatattcttggaagagatggccaacctgcaactacattgctgaaatgtaatgacaaggggcaattctgcacactgtatggctgtgtatacagattctctactttcactcccttctgatggccagcaagctgaagcagacgactaacaatagcgaacaagaaaaattagatggtgaaatatttttggatgtcttcactattttttgatgctgctgttgtattatggcttatggattcttctggttttatattgcatagaaaagtaataggcagaatgatgaaactgctatttcattaatatgttttggttaaatttatttcatcatgatgttattgccggtt

SEQ ID NO: 134056 - DNA, 214 bp, Glycine max
  Clone ID: PAT_MRT3847_92058C.1
tcaaaagcactacgtatgatcaggggcttcaaggtgagacaagtatggcaacagttgaacaagcaaaccggacgaatacggcaaccgtattcatgctgctagtatcacctatctatccacctcaactcctactcataattacaatgataacattaataaccaacataataccaccaatacctactacttatacactaatacacagcattctact

SEQ ID NO: 134057 - DNA, 280 bp, Glycine max
  Clone ID: PAT_MRT3847_92059C.1
tttttgaatagctcaaaaatatggccttcgaaatcgggacaacacatttattaattgtttacaagctttacctgcttggaaatgaacggcccaatttgtagcgagggtctacattcacgacaacccgggtggatcctggaatcttaaacgccgcagaagacactgctgaggctggttggtgacatgggtattctgtctgaaattaagaatgacatcaactgggatatgatgtgtgccaatctgtatataggaggtgctccactataggccttcatagagg

SEQ ID NO: 134058 - DNA, 264 bp, Glycine max
  Clone ID: PAT_MRT3847_9205C.1
cggacgcgttttttacaccttattaaagattctcactcgtctccttcggcggcgccctaaccaaattcaattcaaactcttctcatcaaaatccaaggcacgtccttgaaaccctaatacgatatcctcctactcagaagacgaaggatcgatgtggccagttccttgcctggcgtaatgctgcgcggactgcgcatgcgacgcctgcaggaccgacatattcgggaatcaaacgacggtccgtcagtatcgcctactgcggcc

SEQ ID NO: 134059 - DNA, 1046 bp, Glycine max
  Clone ID: PAT_MRT3847_92060C.1
gttttctctgtatactaagttcgacaacacatcacgatctggtccaaaggcttttgttagtgaatacgctgtgaaaagtgatgctgcaaacggaaatctcttggctgctgtggctgaagccgcatttcttattggactagaaaagaacagtgatattgtggagatggtttcttatgcaccacttttcttaaatataaatgacaagagatggattcccgatgcaattgtgttcgactcttatcaggtttatggaactcctagctattgggtgcagaaactttttattgaatccagtggagcaacatttattgactcgacactcagtacaacttcatctaataaacttgctgcatctgtaattatttggcaagattcttcagataagaaaaattacctaagaataaaggcagtaaactttggagcagccgctgagagtcttgacattgatttaagtgggttggactcaaatgtgcaacaatatggttctacaataacagtgcttacatcaaccaacgtaatggatgaaaattcattcttggagccgaagaaggtggtgccacaaacaagtccattggagattgatgacaaacacctgattgttcttctcccttcctattcagtgatatcattggattttttaatatgattagaatctagttttacagcataggaataatgtctctaaaataaaaatgaagacaaatattaaggagattgattgtgccttttttatatcatcaagaaatgtaatatattgtgggtggataaaaatctagcaaatgtagcacttctctttctagcgcccaaattgtgctgcctacaatgacaagaccaactcacctgcatagagtatagctgaactggtgaaggttcagtagaaaatagatacagatagctagtgagagtagaaccttagtgtcaatgtcattgatgcttaattggcaacgatgtaccatttatgacaatcataatgaaatcaatgtcatgagatattgttttaatcacaaggatttataaaacctatggtactgtatattggctaaaaa

SEQ ID NO: 134060 - DNA, 300 bp, Glycine max
  Clone ID: PAT_MRT3847_92061C.1
atggtttttagttctctaaagacatgttatatatcttgtaaggcaccgtccggattaatcaaccgtacaatattaaattaaactcccccaaaacaatttttaaaaaatataatttttcgcataatataaagcaagtgtggttgcatcccatagttcaatcttcattggtcctctcccattacttctgtgaatctgtattcacctacactttcctttttcaattcaattcaaatcttctttttggttcagaatactctgacagttaattaaatccccaatctctacctcacaggtttttag

SEQ ID NO: 134061 - DNA, 728 bp, Glycine max
  Clone ID: PAT_MRT3847_92062C.1
aattatcaagcacaaattaataatatccgtacgtgtggaacgataaagctttagttctacaaatattaaacaatttaattaattaattaacacctacaatcatttgctggttgttgtctaattagaaaggcttattaatattgaatttgtgtggttcacaagtttgataaattcataagataataacatgactttgtggtatattaagattttggggtgtgtgttgcagaacaaagctgaagcaaacggaggtggactgtgagttcttaaagaaatgctgtgaaacattgaaggacgaaaacaggaggctaaagaagaagctgcaagagctgaaggcactgaaactagctcaacccttgtacatgcctatgcctgctgccacactcaccatgtgcccttcttgcgagaggctcggtggcgttagcgataacggttcgaataaaagccccttctccatggctcccaagcctcacttctataaccccttcgccaatccttctgcagcatgttgattattgtggttaggttttcactcttctataaaaaagacaagagttatttcccacaaccattgtatttttttggttgagggcgatgcgtctagccagggaaaattaagctgtaattagctaatactgttgagagtagtaactgctgattgaaattacctttttctttttcttcatctattgtatgtttatataaaccgttatagaaggtgttcatct

SEQ ID NO: 134062 - DNA, 1435 bp, Glycine max
  Clone ID: PAT_MRT3847_92063C.1
aattatcaagcacaaattaataatatccgttcttgtggaacgataaagctttagttgtgcaaatattaaacaattgaggtaattaattaacacctacaatcatttgctggttggtgtctaattagaaaggcttattaatattgaatttgtgtggttcacaagtttgataaattcataagataataacatgactttgtggtatattaagattttggggagtgtgttgcacaccatatatcattcccaactgggctcgagcacacgtacatctatctctcccccccaaacccaccgttttattctctcaaatgggtcttgatcaggatgccaatagctcaggccttcacctcgttctagggctttctttgactgctagtgttaaggaaaccactcaatccaccaagcctgatgatgatcatcatctttgtgttatcaagccaactccaacgaaaccttatccttccaatgaaccgtctttgacgttggggctgtccggtaagggttaccacgtgcccaatcacgttgccatcaacaaggtttattgtgaggaccctcttgagttctctagacagacatcacctcacagtgttgtttcgtctttctcaactgggagggtcatcaagagggagagagatcttagctgtgaagacatggaggtagaggcagaagagagggtttcttcaagagtgagtgatgaagacgaagatggaaccaatgctagaaagaagctcagactcaccaaagaacaatctgcactgctagaagagagcttcaaacaacacagcactctcaaccccaaacagaagcaagctttagccagacggttaaatctccggcctcgacaagttgaagtgtggttccagaatcggagagccagaacaaagctgaagcaaacggaggtggactgtgagttcttaaagaaatgctgtgaaacattgaaggacgaaaacaggaggttaaagaaggagctgcaagagctgaaggcactgaaactagctcaacccttgtacatgcctatgcctgctgccacactcaccatgtgcccttcttgcgacaggctcggtggcgttaacgataacggttcgaataaaagccccttctccatggctcccaagcctcacttctataaccccttcgccaatccttcagcagcatgttgattattgtggttaggttttcactattcattcggggcgaagaggttaaaaaggcaagagttatttcccacaaccattgtatttttttggttgagggcgatgcgtctagctagctagggaaaattaagctgtaattagctaatactgttgagaatagtaactgctgattgaaattatcttttgcttttttcttcatctattgtatgtttatataaaccgttacagaaggtgttcatctatgaaggaattagaattttttttcttttgtcgttcaaaaa

SEQ ID NO: 134063 - DNA, 448 bp, Glycine max
  Clone ID: PAT_MRT3847_92064C.1
ttgcctttctaaggagcctccccatgcggcagcttcaaccaagagcgccggcggcagtggcccctttgccggagaaaaccctgttcgaccgggaactcaccgccgagctggacaccctccggtcacaaggtgaattagggttggctcagttgcttgatgctgccatcaccacacagaaagttgcctcagattctcttgccaacgtttgttacaaagactatgctgaccgtggtgctgttgataagtacctagaagacaacgttgagatgcttgatgaatgcaactattttatggacaaaatagatcacatcaataagtacgtggactcattgagagtggtcgttcatttggtcgataagggtggttctgcaaagcctataactcgtgctttggagcttttggaatcatgtcaaggcatggaaaagagatgcaaagcaatggagaaaca

SEQ ID NO: 134064 - DNA, 374 bp, Glycine max
  Clone ID: PAT_MRT3847_92065C.1
gggaaacaaaaaaggataaatcccctttaacattaattaataaataggggggggaagattacaaatcccagactttcaaggggtttttccccttcttttgatccccggccatttttttgaataaccccaccccccttttcccattttttggttgaaaaccattttttttaacaggttaacccacaatttttttcgcccgggattttaaagcaaactttttggttgttaattaaccaggggggcctttgccacacccccccccctttaaatttttttttagggggaacccttttggggtttttttaacgggccttaacaagatgagcctccccttttttggggagtttaaccaccaaatttttttacttggttgg

SEQ ID NO: 134065 - DNA, 225 bp, Glycine max
  Clone ID: PAT_MRT3847_92066C.1
gcatataggaagattcccaggcgaggagtgagatggatgggcaggagcaggatgtgtcgttgggagctaacatgtgccccgtgagacatcggctttggacggcgtcgcagagccaagacgacggcgaggactagcatgagccggcgctggcgccgctggttgaccctacggagtttacgtgttgagtcggttgacatagccgggatagcagcgtttgtggccact

SEQ ID NO: 134066 - DNA, 660 bp, Glycine max
  Clone ID: PAT_MRT3847_92067C.1
ccacgcgtccgtgcaaaaacaaattttaatctgggtagattagtgatttacatttaccaatttaccattcctaccttgtctgacgaggcgaaacagctcaacacaaagccacacacacaggttattgtaatttgtaaaggatgagatgagataggaagaagaagtcgttcaaggatccatgttttttcattttgtttttggacccactgttatcccatcactgtctccggaaccaaattccacttccactctccccaccttccctttcaattcactccacaatttattttcccccaaacacacccttccttccctcattctcactgctacatacatatacatactcacatctcatcccaaagttccctcctttttcactcccacgaaacgaatccatgagtagttccgagtgacgcacgtcatcatcttccaaatccaaccccatttcgcaaaagggtaggtaggcacttactttcaatgatggtggagacctcgacgctagggcacttccaccaccaaaggctcgaccttcgccgctgggtccccgcgttcttcacctcgcataagaaccttcttgacctttctatggatcgccggcttctgctccggtttttctgggggcagagaacatagtgggcggggtttcttggtctacggagg

SEQ ID NO: 134067 - DNA, 498 bp, Glycine max
  Clone ID: PAT_MRT3847_92068C.1
ccacgcgtccgcccacgcgtccgcccacgcgtccgggaagaagatgacgaggacggtgaaggggacgaagaagaagaaggtgatgaggaggtgactggattctaagcgaggctactcatcacctgtaactttggaagtgtgagttagttgacatactattcacttgtacctcgtgcgatttcttatacgtgtacttgtgtgcgttctatgggacgcactgagcccataaatcgattcgtgactatgtaggtatgtgtagtgctgttgtgtgtaccttgaatttctttctacatcttcctgtggtggcatagaatgcgtgcagtaaggtatggtctaccttctgtttgacatgccttgtgtatttatggtcgatatgtgtttttgtttaaatgatgtttctctgttgctccctctgggtaacagattgttattgacttgggtgttgcctaatggcccttgtgcctcctacctcgcctctaatctggggtagtgggacct

SEQ ID NO: 134068 - DNA, 211 bp, Glycine max
  Clone ID: PAT_MRT3847_92069C.1
gtggggagaagatggctacatcacgttataaagaaatcttgctaacagcatatcaggcaagtgtggaattgcaatggagccatcttatcccctcaagaatggtccgaatccacctaatcctggaccatcaccccctacacctgtgaagccacctaatgtctgtgacaactactacagctgagctgattgtgctactagttgctgtatttat

SEQ ID NO: 134069 - DNA, 633 bp, Glycine max
  Clone ID: PAT_MRT3847_9206C.1
aaaaaaaaaatctaaatttagctcatctaatatgcaaacaatgttaatacaaaaaataaaactatacagatgtattaaatacaactcaagcaatcaacaaataaaagaccgggccatcaaaattttctatggcctgcatgtaaccattgctagtaaactcaagcaaaacacaccccaaatgtaaaatcactcagaaagttactatcacacattatttctagtctctatgtcagcaaccatggaatgaatgagatttagaccaacccagatggggaaacaacatgcaccatgccaatacaagtgcttttcaaaatttgctatgacttctgaagaacacatttctcatacagagcaatgatctctttcttggtgggattcttcaaccgaagcagctgatcaccatagttgagctttgtcagctcttgcttaagcctttgtacgggaaactttctataatcctcctcacttgttcgctgactaaaattttcttcagcaccctcaaagatggaaccaccatcttctgggtgggagtatgtactccttggtctcttgggtccctttacaattctgggacttacatccatgtcatcaccaatgttgtcatctaccctcatacgtttaccatgggaagca

SEQ ID NO: 134070 - DNA, 331 bp, Glycine max
  unsure (1)..(331): unsure at all n locations
  Clone ID: PAT_MRT3847_92070C.1
aaatcatcaaaagtcattttgnaccaaaccaaggattgatttgtgggtaaggcaaattgtgaattccactggccagaactgccattaaatggacctaaattttcatatttaaggccaccctgttatgtccactgctgggaggagagataacagtgcttccattcttcaaaccttccagtatcactggaccaaggatccctgcaccccatgtgtcaaaaaaggctccatagttncgaagtcccacagttaaactcagaagatcaattgatttcttcccagccattagtgtgagcgggatgcccacattgactttagctttgccactgttgcc

SEQ ID NO: 134071 - DNA, 278 bp, Glycine max
  Clone ID: PAT_MRT3847_92071C.1
ttattagattgcccactagacctttctgctctcatggccttctctcctgtaccaactgctctggactgcttgccagttgaagaaagctacaacactgaggccaatgctttttttgattcaaggtttgggtctggaaaaaggcaaaaaattgaaaatctccttgatgctaaaagcttactttttgctgaaccttggtacaagactgttaataacttgcacctgtggaatgcctctttcattgatgttgtattaatatccagtccaatgggtattatggg

SEQ ID NO: 134072 - DNA, 403 bp, Glycine max
  unsure (1)..(403): unsure at all n locations
  Clone ID: PAT_MRT3847_92072C.1
tacagattcaagcaaatctggtttcagcttgaattgcaataagagaactaagtttctggtgacaaaagttgatgagaaatcaagatcaaaggaaaagggcgagtactctcaaagctcaaaaagtagcattggtgaatatagtagtagcacaagcatcagtgaggaaagcagtctaagtggttccagtcgcagtggccacaggcctcacatgtcaaaacacttgagatgggaagctgttcgtgctgttcagcagcaacatggtagtttaaatttgaagcactttaagctgctaaggaggctnggtagtggggacattggaactgtttatcttgcagaactaattggaccagctgccttttgcactcaagtgatgacagtgattttggcaggcggagaaatgtca

SEQ ID NO: 134073 - DNA, 668 bp, Glycine max
  Clone ID: PAT_MRT3847_92073C.1
tttttaaatttcttatttattatttgtaaatggggtgtatatcaatctaagtacaaacaaattacacggtcacacttctaattactttactacctttgataatttagtacacttgacaataaattaacaattatgaatagagagatattcaacgtgtagcattgtaaaatatcccaggattgcaagtaagttaacacaagattccaggctaatggaacttcacacctgttgaattacaagatcagtgtgccccaaaatcacaggaattgggattagcatagtcataacctcgctctaacacgcacagtagacgtctcactgattggatctcattatgaagctctgtctgaagtttattgcagtctgtatgaagtcaaaaagtgatcaattcaatgggattggcttttatttcatcttgttatggaaaacagtaggagagatggtccagctgtgtcatatactcatatttaatcaaaaaagcaaaccagcttttataggatgaccagaagaaccaacgttagtagaagcccactgatcccgcgactaatgcacacaagttcaatccactgtgccttgtttgttagtttgggaaaattgggctttgtagctgatgcatctgatgttcctttcgcggtcacatttttctaaattcacacaacatataaagc

SEQ ID NO: 134074 - DNA, 519 bp, Glycine max
  unsure (1)..(519): unsure at all n locations
  Clone ID: PAT_MRT3847_92074C.1
cagctgtcttgcttatattttagctaattaaacccgcaaaccataagcaacgactttgacttgggaaattagacacagacgaaaggagtttgaagaacgatggcagaaggtgtgaaattggaggacagatggggatactatgttgcaacttcttctcaggcatgcgtttcagccatcaactcttactaccatcaggttctcatctatggcagagagaggtctgtgattctggaagcagtggcacatgacaaacactgtgtcttggccaacatcttggcagcacatttccttcactcttctggctcttcccgtgctctcacttgtcttcatgccgctaagtccaaccttgaacatgccaccttgtacgagaaactagttttcgatgccatcagttatatgctatctgaagatagagacgatgatgtagctgttgaattgcattccaagctttctgaaggagttcccaagagatctggtttctctaaagagagcacangtcatatgcttctacatgggtct

SEQ ID NO: 134075 - DNA, 503 bp, Glycine max
  Clone ID: PAT_MRT3847_92075C.1
attcgcagtttcggcccaggcctccgtataacaagtacttcttaagccttcaaagcaatagggaaaaaaaagttcaaaggttgagtgaaattggagagtgatgaccaaggagtgtgatttacaatggaacagcagcctcgagttcttgccataaggaggaatctggagaaactgaagctagaattgcacaacatcaaccgaggaattgactcccatgtacaggggaagagagtgaatggaacttggggggcttcaagataccttattggagaggaagatgataccgaatctgatggagatgaggatgatgatgctcaatcccttcttcgatgtccttcctgtgattttgagattgatttttcttctctgcgtatccatttggaagagatgcactgctatgacccaaaaaatatgctatgtcctgtgtgtgatgaaacattaggggaggatgcaatcagggttgcacagaattcaagtgcacaaaagagagcttggaagtctga

SEQ ID NO: 134076 - DNA, 1176 bp, Glycine max
  unsure (1)..(1176): unsure at all n locations
  Clone ID: PAT_MRT3847_92076C.1
tcnngnnggatcaataacaacaataaaatggccatctaaccaatggccaataatcaatttactctcagataatataatacaggtatgactaagagcccatgggcatggaatgaagatgaaactatattgcaatacacaaaatagtgtacattattcaattgaattggctagcaagaatgaaatcacataggttgaaacacaaacaaatgggacaaaagcaataattaaatgaaaaaacacgtttcagcttgcatatgccttcctttatgtttagaattgtgacttgaagcattcaggaggcatccgtccattgaatcttttggtatctctgcaataatcatagatcatgtaattgttcctgacccaattcatctggcccagtttggcataactcaattgcttgtatgtgggagaggtccaccaattggcagggaaatttaatgcacattggttgatactaactgctccattccacttacaagcccttgctctaaaatgattaaatctggctatgaatggtgcaccactccaattggtcttaacaagcccacctctagtggcccaatcatctgcattccacaggctagtataaaccctcattccttgcttgtttgggtaagcaatgccttcattttcatagtttcgatacgccctaattggtatactatcaatgtaccacacaacttcaatggggttccaatgaatggtgtaattgtgaaaatcagcagttgggtcaaaccagaggtaaaattgttgctccctgcttccatttccttgtgtatatatgtttgtatggacaatgtatggttgtcctgaaatgttgcctaagaactcaaaatctatctcatcatgctggcttccggtagaagatagatagtaggcagtaactgttcctgcagaattaccaggcactagcttgattctcgattcaatacttccaaataagaatgctttctttgtttgtgctgcggatcctgaggtttgatccaacacaagttggaggtcttcaccctgcattgatgcatgtcgggaaccccaagtgatgtacatgcttttggaaaaagtggcatctacgaggattatactgtgtgccattgcaaagaggaacaaagctaccaaaaatttctcaatttgtgccatgttaacttctgccgcctctgtttgatcttctctcgt

SEQ ID NO: 134077 - DNA, 239 bp, Glycine max
  Clone ID: PAT_MRT3847_92077C.1
ttctctctcacgagcgctttatatgcttgatggagcatggactaagccataaaggccaaacgagagtgctgatgaatgctaaaagcaatttcggacttgctctgattgtgattgtaggatccattgtgtgcctggaccgactgcctaaactctggaaaaagctcatgttacaagctagcgtggagttcattatccacaatgtactccacggacttattgaggtaccaccgccttgggct

SEQ ID NO: 134078 - DNA, 206 bp, Glycine max
  Clone ID: PAT_MRT3847_92078C.1
tcttcacttcacaatgtcagagtattgttcatattggggcccctgtcccaacacactcccaacacttgcggtgccgccacgtgtcccatcggtttcggcgttaggttccttccttctcagggaacaacagtcaccgagcactcccctgccgcacccaaaaataaaaaaaaaaactaaccaagtgttctgtccggataagtaacacc

SEQ ID NO: 134079 - DNA, 370 bp, Glycine max
  Clone ID: PAT_MRT3847_92079C.1
actttatgatgaaggaactacagaaaacaagatgtgtagaataatgaatgttatcattacattcacattcatacacataaaacattgacaattctttgtgctaaaaaagaaaataaagtctttccataggatataatccaaaatttgtttgaactcagtgcaatgcagtttccatttacattaatctcctaaattgattcatgttcatcatcatttgtcttgtaggtcgtacatccatttgatgctcaagctgagggggagttaagcctatcagttgatgattttgttgtagttcgtcaggtatttccttgatgactgttatgctatttatgattcatcatcacctgtacttcagataaaccagattctt

SEQ ID NO: 134080 - DNA, 180 bp, Glycine max
  Clone ID: PAT_MRT3847_9207C.1
tttttgtcccaaattaagcctgagatgtaggatttttgtgtatgtatgttcactggaatcaaaatatgcagaaggcataaaaaaaaggggtccaaactctgcttccatagcaaaatttatgtacaaaatgcaattttgtgtaggtccattgtcaaagatctatgcgaatttcaccattct

SEQ ID NO: 134081 - DNA, 443 bp, Glycine max
  unsure (1)..(443): unsure at all n locations
  Clone ID: PAT_MRT3847_92080C.1
atcagggcttgaagggccgtcaacccacgcgtccgcttgttgtaatagagcttagattttagtggggcaattagatactgaaaagggacacacacaggacagctgaagatagncgtacattctacanaacanacaataacacaccgtgtactggttgggatagcgtcctccccagattcaagtccttcccagaacctcaaggtgtgatctgatttaaaaacacggccattgcagatgctgaagtttcatctcatgcttgagtgaggtggactcttaatccaatatgactagtgtccttctaagaagagaaaagatacagagactgtgacccaagggagaagacagccacctgaagacagaggcaaaagattggagtgatgcggctataatccaaagaatgcaaggggttgctggcagccaccggaagctgacagggggtggga

SEQ ID NO: 134082 - DNA, 218 bp, Glycine max
  Clone ID: PAT_MRT3847_92081C.1
tgggattttcataggtatttctttgtaagatgaatgtgtatattcttatgtttgtattggagcatattatgcttcaatcctatttaatgatttcgcatttatgaatatttgggctcaaatagatgatcttcaatcatgctattaccagctatacgacatcccactgttactccgctctatagagtgttatactcaataaacttcaatgaggatggagg

SEQ ID NO: 134083 - DNA, 480 bp, Glycine max
  Clone ID: PAT_MRT3847_92082C.1
cgggaaagagaccagaaatcttgaccattcttcaaaactgtgcggtacttagcgtggcatgctgtgtattttatagtcattgtggtaaccgtgccatgttaagagagagaccacttgaccgaagaaattctaactggttttctttctggaaaaaagaggagaggaacacatggcttgcaaagtttcttcggatgaacgaattgaaagaccaggtttgctcatcttggtttgcaccagttggatctgcaagtgattatcctctcttgtcgaagtgggttatttatggcgagatagcttgcaatggatcatgtcctggttcatcagatgaaatttctcccatctactcactttgggctacatttattgggctttacattgcaaattatgtggtggagaggtcaacaggatgggctctcactcacccattatctgttaaagaatatgagaagttgaagaagaaacaaatgaagcctgattttt

SEQ ID NO: 134084 - DNA, 641 bp, Glycine max
  unsure (1)..(641): unsure at all n locations
  Clone ID: PAT_MRT3847_92083C.1
gtacgtaagcttggcctcggtgagcggccgccctaaatttctttttttttgctgaaaaggtttggaccatgaattttttaatcacgtgtngggttatcgcacataaatcttcaaaattgtcccaagttatcaaagtcacatanctaggaactacaaattttaggcatgcttgttcctcagagtaacacctagatattgtgtgaaggtggtggttggaaagattctaattgcactgtgtgaatgcggntgacacagctggagcaagcttccatgtcatagtgaccaaacatgataccaacagcatccctgtgtggatttaaccattntaaaagctaggcctgccnctgttagtgagctccttactttcttctnnntctcttacgaaggccgatagtgcccttttatcattgcgattgtctctcttaatctaaccctcctcattaagttgggcattttcctcccttttcaaggcgggaacttcctaatttctccgtaggtgatcagcctggtttttaagggcgtcctgcgcctatgggctgcctaccgtccttattgcagctgcctttattttagtttccaatgaaccatgcttttttataagttttagagcagttttgcggccaaaacttgggtccagatgt

SEQ ID NO: 134085 - DNA, 397 bp, Glycine max
  Clone ID: PAT_MRT3847_92084C.1
ccacgcgtccgctggggcagcaccgtactgcgttctccatacgaacaactttgatatttctcgaatttttcatggattccagcttcgatacattggtgggcccctccagcgccagcggtcgtatggaactgagaatctccgtcgctgggcgatggagtcgcaccggaaaatccacactcatagccgcaatggtatcggtagcttttccccaagcccgctcctcccgtgctttcccccactccctggcccagaagtctcttgccagagtgcgtttctcttaccctgagaggctcaccttaccagcttggcaaatcgggggacacgcacatgacgacaggagcttaggtgatacacaggcagaaacctatgctgggctttaaccggcaagctttgttcg

SEQ ID NO: 134086 - DNA, 427 bp, Glycine max
  Clone ID: PAT_MRT3847_92085C.1
cccacacgtccggattgttcttttgagtacctcagaaaaaacacaaaccacggccggtttaaagaatccaaaccgacggacgcgggcgggcggccgctttacaagaccctagctgtacacccaacatgcatgccacgtcacagctgttacaaacggtgagccagagaaaaccctgtggccaccgatttacatcgaacttgcctgggataaccctgttgtaacccagcttaataacctagaagtacatcccctatttcgactgccgaacgtatagcaaacaggcacggctaaggtgaccctgcccaacagaggcgcatcctgaacggcgaatgggacgctccctgcagcggggcataatacacttgcgagcgtgcagattacccgcaacttgaccgatatccttgccagggccctaacgcccgcccct

SEQ ID NO: 134087 - DNA, 518 bp, Glycine max
  Clone ID: PAT_MRT3847_92086C.1
cagtatcaagcatgtaacttcttgtttgaaaataatagagttgtaatttgatatttttttaaagctaaaatatgtttttttgtccttataaatgtaccaaagtttgaattttattcctataaaaattataatgtgactttttgacctgaagctggacttggactcatccgaaccaacatgaaattttttaagttatatattaaaatataatttctaggggttaaaagccatccacaaattgtagaagaaaaaaaatgcaaaaatcaaaaacataatttatagaggttaaaagccaccataaattaaagaatatatgtgtgtgtgtgccaagacaaatccaaacccaaatccaaaattagagattgttaaaggtgtaccacgcatcgagcaaattttgatagttaggaaaagagggttatcatcgcattgcctcaaccaatggttttgatttcatcattgccacctcgtcattctctagcagaaaaaggtggtgttgcctcctaaaaatcctttttttt

SEQ ID NO: 134088 - DNA, 162 bp, Glycine max
  Clone ID: PAT_MRT3847_92087C.1
ctgtgaagtacgacacgagcatacatccagggtactgactaggatgccgttgacccgacacactcatgagccatggagtttgataatcttgttgtgatcactcgccgaatatgaacagtttagagagcactattagcaggcggctctattatgtacaagctc

SEQ ID NO: 134089 - DNA, 310 bp, Glycine max
  Clone ID: PAT_MRT3847_92088C.1
agatcatacatagtagtgttggtgggttgcaaatatgcgtgggggtcttctccacatgggtcataagagaccaaggacactgctgtagacacgcacaaagttgtaggacacagtgtccatgtgcacacttcaggaaaccgctacgaaacgtgcctcgtcacgctcgctcgttttcaagagccgcattacgaacccggcatcaatgcgtcttcttccatttaacaatccgagagaggtccgacgacctctcaggttctcacagttgtctcgcgcctttcggtcggtggaatcctcctgctcctggaaggac

SEQ ID NO: 134090 - DNA, 285 bp, Glycine max
  Clone ID: PAT_MRT3847_92089C.1
gtgccccaaaaaaattttttttacaaattttttttctaaattagagctacaaaaagaccccaaaggcactgggattttcaaataaaacaacaaaaaaaatggggtccaaacaataaaaattacctttttcgggaaaagcccaaaaaaaattgaactgggtattgaaaccaccaataacccccgactttgtattaccccacctaatggctcccaatattaaatacacataaaaaaaatgggggaatgtgaaaccaacccttcacaaacgtttttaaaaggaacttg

SEQ ID NO: 134091 - DNA, 362 bp, Glycine max
  Clone ID: PAT_MRT3847_9208C.1
ctcaatcacaacatccgatgctgcaaatacaaaccgggtcttggctctctgaaagacgggaggtcgtacggacaagcgtcatgctgaatctgacataggaattttttgacaccttgctcatggggtagcatgtgcaacacatggtggacatgggtacccacctgtggctgacccaccatcatctggggcatacccttcacaacaaggatatcctacagctgggtatgctgcacaacaagggtatgctgcagctgggtaccctgcacatgcaggctatccttctgatggctaccctgcaattggttatcctggatgatcacatgcaccaggatctcatgggcacggcagtattggagcaatgc

SEQ ID NO: 134092 - DNA, 579 bp, Glycine max
  Clone ID: PAT_MRT3847_92090C.1
cttgtgggggataatccaattgcaaatttgcgttctcttgatgctcttttgggaatggtgacatccaaggttggaaagcgccatgccttgacaggttttgaagcacttcaagaattatttattgcaagcttattaccagatcgtaaattgaagaccttgatacagcggcccctaaatcatgttcctgaaactaaagatggttactcccttctccttttctggtattgggaggaatgtttgaagcagagatatgaacggtttgttgttgcacttgaagaagcatcacgagacatgctacctgctctaaaaaacaaggcattaaaggccgtatacgtgctactgagtcggaagtcagagcaagaacgtagactactttctgcacttgtcaataaacttggggatccagataataaggcagcatctaatgctgactttcacttgtccaaccttttgtctgaccacccaaacatgaaggctgtggttattgacgaggtggattcttttctctttcgggctcatttaggacctcgttcacagtaccatgctgttaacttcttgagccaaattcgtctcacaaat

SEQ ID NO: 134093 - DNA, 1515 bp, Glycine max
  Clone ID: PAT_MRT3847_92091C.1
gacttgttccaaaaaaaaaaaaaaaaaaaaaaaaaaaaaaaaaaaaaaaaaaaaaaaaaaatcttcaacaccacctccgacaccgaggttgtcctccacctcatcgccacttcaaaacacaggccattcctcctcagaatcgtggacgcctgcgagcatctccaaggcgcctactccctcgtattcgtcacggaggacaagctcgtcgccgtcagagaccccttcgggttccgacccttggtgatgggtaggagaaccaacggcgctgtagttttggcctccgagacatgcgcgcttgatttaatcgaagccacgtacgagagagaggtgtacccgggtgaagttatcgtggtggaccacactggaatccaatccctctgcctcgtggctcatcctgagccaaaacaatgcatcttcgagcacatatacttcgcgcttcccaattcggttgtttttgggaggtctgtgtacgagtctcgtagacaatttggggagattttggcctctgaaagtcctgtggagtgtgatgttgtgattgctgtgcctgactctggtgttgtggctgcgcttggttatgctgcgaaagctggggttccgtttcagcagggtttgattaggtcgcactatgtggggaggactttcattgagccctctcagaagattagggactttggtgtgaagctgaagctatcacctgttcgtgctgtgcttgaaggtaaacgtgttgtggttgtggatgattccattgtgagaggaaccacctcgtccaagactgttaggctgttgaaggaggctggtgctaaggaggttcacatgaggattgcgagtcctccgattattggttcttgttactatggtgtggatactcctagctctgaggagttgatttcgaataggatgagtgtggaggagataagggactttattgggtcggattcacttgcctttttgccttttgatagcttgaagaggttgttgggaagtgaaagtccaaatttttgttatgcttgtttctctgggaattaccctgtggagccaagagagcttaaagtgaagagggttggggactttgttgatgatggcttgaatggaagcttggagtctattgatggtggttgggttcaggcaaaccgaaatcaaatcaaggttggtactggtactagtactagtatttcataatattcctatatctggtttttgcagcataaggcatccctcagtggacaaaaatcagatgcagttcttcaggtgtttttggtgttgttcttcattttaaattgaagttttaccttgatgatacggataataatgtttacattataggtcaatataagttctctaagtaaaattctaattctgactcgagaaagtactagaagtacttcagaaactgtatctaaatcttgtccagtttgatagtttaactaaagggggtgtttttattagcctaaccgtactactacctatgttgtgatgtgatgatgtgatgcggggaggggaaatactgtcaaagca

SEQ ID NO: 134094 - DNA, 764 bp, Glycine max
  unsure (1)..(764): unsure at all n locations
  Clone ID: PAT_MRT3847_92092C.1
ctggtacagcctgcaggttaccggtncancggaattcccgggtacgacccacgcgtccgattggttcttgttactatggtgtggatactcctagctctgaggagttgatttcgaataggatgagtgtggaggagataagggactttattgggtcggattcacttgcctttttgccttttgatagcttgaagaggttgttgggaagtgaaagtccaaatttttgttatgcttgtttctctgggaattaccctgtggagccaagagagcttaaagtgaagagggttggggactttgttgatgatggcttgaatgggagcttggagtctattgatggtggttgggttcaggcaaaccgaaatcaaatcaagcttggtactgggactagtactagtactagtattcataatcctctatttctatttctggtttttgcagcataaggcatctctcagtggacaaaaatcagatgcagttcttcaggtgtttttggtgttgttcttcatttcaattgaagttttaccttgatgattcgcacaataatattgttttacattataggtcaatataaattctcgaagtaaaactctaattctgactcagaaagtactagagtacttaagaaactgtatctaaatcttccatttgatagtttaagcctaaccgtactactacctatgttgtgatgtgatgatgtgatgcggggaggggaaatactgtcaaagcattcagcttcactggtgagcttaatggttcatttggattct

SEQ ID NO: 134095 - DNA, 415 bp, Glycine max
  Clone ID: PAT_MRT3847_92093C.1
acggctgcgagaagacgacagaagggtacatcatcaatacataagcattaatctctctctctctctctcttcgagattggttgaaattatcttattcgcttaacatattaaaatgcgtcatttttaatgatattattggtctatagtttttatgaattatatttaatgtttttatatatttgtatataaataactttaatctattatttcgccctagcctatgaagtgtaagcacagatttgtcaatgagtagcacatgtatagtttgccaaaggcctaagagcacctttaatgagattcttgaactcaaaaacccctatccaccagatctaccattattcttatcgagaggttttcaagagggagattcgggtatagggaaaaaactcccaaaaactcctatttttttcttggg

SEQ ID NO: 134096 - DNA, 829 bp, Glycine max
  unsure (1)..(829): unsure at all n locations
  Clone ID: PAT_MRT3847_92094C.1
taaggattggcttggggtagattaggttcgtcttgtgtatcatttttctctaaaaaaataagacagctattaagttaaaattaggaggctttctctttttctttcaatttttttgttggtttttgttttcctgttcaatcaaattcatttacctttacttgtgagatatgagtttattattttctgttgttataaatatttttacatgaacttacggatattttattttatatatgttatcttacaaaattgatgctttaaaaattatattagtatattcgtacctttaattttttaagattgtcatgtttagtactcgtatccatgtctatgcaacatactttttcgtactcgtacccatttcactgatttatatttctgattagaaaatgaagcacatcaccgaattgggtagacttttttttttttttttttgtctttatgtgtgtccattttggtctttgtttatgtgaatttttgccgtcattttacttttgtgagaccatctggaaagcttttgttcaattagtctatgcaggatttctcttttatgtataataatttgtagttgttgtataataatttgtagtacatattaccgattgacattttagccacacactgattttgtggcctggttgttggaattgcttgntagtaaaacacaatcattaactatttaatgtgtggatcaactagtgtgaggttttaccgcttaattagtaatatcagatttataagtcacatataccattgcattaaatacttgaagagagttttttttgtttataaatattttattaggcttaaacatgattgctacttggga

SEQ ID NO: 134097 - DNA, 347 bp, Glycine max
  Clone ID: PAT_MRT3847_92095C.1
ctttctctttctattcacttccctacggattatcctttcaagccttataatgacgcctttatgactaagctgtttcacccgaacatcaataccattggtagcatttgtcatgatatcctgaacgagcagtggagccctgctctcaccatatctaaggcactgctatctatctgcgcatagctgactgatacaaatcctgatgatccacttgttccggaaatcgctcacatgtgcaaaactgaccgggcacaatatgaggccattgtacgccgcaggacccatgaggatgcgatgcgctgattcgagtttggataatgtatattgtaatgcgttgcatctatgaaaac

SEQ ID NO: 134098 - DNA, 441 bp, Glycine max
  unsure (1)..(441): unsure at all n locations
  Clone ID: PAT_MRT3847_92096C.1
gcttccttaagctccttagtgctgctccttgcagctctaattctatcccctcaagtgcttgcaaactatgagaatcccccagtgtacaagcctcccactgagaaaccaccagctcataagcccccagtttacaagtccgtcgnttacaaagctgcagccgaaaaccccccaatttataagcctacagtacagaagccaccagtgtacaagcccccatttgagaaacccccagtttataagcccccagttgagaaaccaccagtgtacaagcccccaatcgaaaaaccaccagtgtacaagcccccagtagaaaagcccccagtggacaagcccccagttgaaaaaccaccagggcacaagcccccagcggagaagcccccagtttacaggcccccaggagagaagccaccaggttacaggccctctgtagagaagccacca

SEQ ID NO: 134099 - DNA, 427 bp, Glycine max
  unsure (1)..(427): unsure at all n locations
  Clone ID: PAT_MRT3847_92097C.1
ggacgacagaagnnggggcaactggtttanncaacaatnnaataagttatattaactcntngcgtagcgcaagggannacagcataaagcgagcgctgtcgcttgaacagacgcgcgggtgtgcgagacaaanncggtgctggttgggnttggggccgctcacgcctatnntacgcctagatcgtattctcatcactcctttcatcaagaaccgcctcctttctctttaatttagaaaccccttaattgcagaagataagaagttacctttctccaagaatatagcgcgctatattggcatcttcaagactcatgtgatgaaaggaataataatgaaagctggtgaatacttggctgattgatatgcaatggcattgaatttctgaaccgtagttcggtttccctgcaatctggactcaagaaaccc

SEQ ID NO: 134100 - DNA, 535 bp, Glycine max
  Clone ID: PAT_MRT3847_92098C.1
gagattttgaagggaaagggaagggaggacaattttttatttttaaattaagagagttatataatgtttataaaaataagcaaaagattagaggacattaagtttatgctaatctatcattatgtttcctttatattaaattaattatcaaattaaaagtcaggtagattgaaggttgttgaagttatatagggttttaggtattgtggaaagaattttagagaatacaaatcataaagcattaactcttaactaaatcatagtaagattaaacaaattatgtaatatagggaaatagagagtaaaactaatcctaaaaatagtgtaaggtgattcaattgaatatctaaatgagtaaaagtcagtctgattgaattcaatgctgaagaattggatctttcacagaaattttgggcctttggggtagggaaggtgaagaaaacaaaaatgaaaaaaagtattcttcaagggtcccaagaagaaaaagtatattactagaaatctttagaaagttgtgttaaaagttcatgcatga

SEQ ID NO: 134101 - DNA, 115 bp, Glycine max
  Clone ID: PAT_MRT3847_92099C.1
gcagatttgcattttgtttactcttgaattcactttcagccacggcgtctttgacggcgtggacacttttttatgagcgtcatcctttttgctctgtgcatgccaatcatcaatg

SEQ ID NO: 134102 - DNA, 764 bp, Glycine max
  unsure (1)..(764): unsure at all n locations
  Clone ID: PAT_MRT3847_9209C.1
agttgacaagcgtcgtaccncacagccgaaaatgcaaaagcgcattctctgtgttccgtccaccgccatgcacatcacgctcaagagcggcaaggacgtgcccaccggcttcttcctctcggagctcgccgtccccgcccagatcctcaaggacgcgggtttcagcatttcgtacgccacggtgaacggggcgcgcccgtcgctcgacccgctctccgaccgctccctctggttcggattctctaacgaggagtaccacaaggcgaaggctttcatcgactccgagcgcaccaactctggcttcgaccggcccacgccgctgtcggccttgagcgacggtgacttggaaatcttctcggcgctgttcatcccgggcggccacggccccatggtggacctcgccgataacccggacatggcccgcatcctgtcgtacttcctccgctccaacaagatcatcnttctcgatctgtcacnggccctgcnggcgttcctttcgctgacgcgctccggcgccccgttcgccctcaaggactaccgcatgacctgctactccaacgtcgaggagaacatgaacctgctgatttggtattccacaccccagtggcgcgtcgcctcccgcctcgccgaggccggcgccatcgtctccaacagcgtcccgatgagcacccaggtgatcgtggatcgcaacgtcatcacggcgcagggccccagcggcgccaagaacctgggcaacgccgtgctcaaggggctcgagaagcagc

SEQ ID NO: 134103 - DNA, 476 bp, Glycine max
  Clone ID: PAT_MRT3847_920C.1
tttttttttttttttttttttttttttttttttttttttttttttttgttgttttttattttttggaggaatttattttttttagggggggaaacaaaaccgggaaaagaaaaaaccccctgggggaaaccaaattttttaaaaggggaaaataaattttaatctacccaaaacttttttttgctgggcaaaattttttgaaaggcataaaaaaagcgtatcgcaaaccgatttaaaaatccccccgaagggttgggggagggtttttattggcccaaggaagagaaaaacctctcaaaaaatgttttttagagcaaaaccttttaaaaaccaaaaaatggttttcccccaagggttttttcccgcgacagggaaaactgatttgaaaccttttttttagggagagaaaaaaaaaagggggggttttttccccaaaaaagggaaacccccctttggcggggggggccccccatagg

SEQ ID NO: 134104 - DNA, 564 bp, Glycine max
  unsure (1)..(564): unsure at all n locations
  Clone ID: PAT_MRT3847_92100C.1
gcgtacgtaagctnggatcctctaaaaccggccgctnnnttttttttttttttttttttttttttggggcgggggaagtgacctcaacaagattgcttgggtcaattgggagattgtttgccttccaaaagagaggggtggtctgggaatcaaggacatcaccagcttcaacttggcacttctaggcaaatggaagtgggagttatttcatcgtcaggatgagctatgggcaaaggttctggtttcaaggtacggggactggaggggacttgctgaagcaccatatgataaaaatgcgtccttatggtggagagatttgaagttagctttacatcagccatcaatacaaaatgtgtttcgggatggcatagcatggaaagtggggagaggtgataaaatattgttctgggaggataactggcttcagggggatgcagctttggtagcacgatatcctagactatatctcaactcctgtcagcagaaccacagaattatggatatgggagcgcaaaaggatatgggctgggaatggaatttcaaatggaggaggcatttgtttga

SEQ ID NO: 134105 - DNA, 509 bp, Glycine max
  Clone ID: PAT_MRT3847_92101C.1
aacccaagcatttctatttttgtaaagttctgaaacttgctgcgctaagaaaaatgtaattaggggttccgacaaactcaacacattaaaacactatatgaatgataagcatgtttcgccaccgttgatcaagaatctacttctgggaactacaaactggagatgatggcggagattttaaactgtgtccgaaaaacatagctcctagaaatgaagacacacgagttcagaagagaaacctacattgattgttgcaaacatgcattgatgaaccagtcggtacagagcattttttttttagggcagcctgggggtcccttggtttccggaaggatatcttttctttaaacgtttttgatgactcccacaggacacagtttgacttattgttctttgcaagaaacctatcatgttggaggatattcagagaaagttttcaacaaccatgggttgtggttggtaacattttaacaaaacctggatcaccgtttcttaaaaaacttgggttt

SEQ ID NO: 134106 - DNA, 384 bp, Glycine max
  Clone ID: PAT_MRT3847_92102C.1
tctttctcgtgcgatcacgccggcgacctcgcgttggaattttgtcagatgaccaatccctacattaaatgttcaacctctaattcaattgtatgagggaatttggctgataacgccattaattttgaggctattccccacatgctggctcagatcggatagattcaggaaaaaggtggcttgaaatttccacaagaggaattttgtacagttcgatcaactcaggtgcgtcctgctacagctctattggctgatgagtgctcatctttggacagtatggcgcatgatatgtcattgtctacaataccaatcgtatcctgcatatgttgtaagtagagaaccataaacactatgtgtgcatatggactcaatcctggtatttca

SEQ ID NO: 134107 - DNA, 1453 bp, Glycine max
  unsure (1)..(1453): unsure at all n locations
  Clone ID: PAT_MRT3847_92103C.1
gtacgcccatgcaggttatccggatnccggnaaattcccggggtcgacccacgcgtccaacaacagcaacagcaataaaataggaagcaacaacagcaacagcagcagctatagaccctagggaaatgatacaggaagatcaaggacagtgttcttctcaagcgatcaataactaccaccaagcctatcaagagcagcttctccttcagcaacagatgcaacaacaacaacaaaacaatgatatctttggtggaggaggaggattgaacatgtaccctggtgctgaagtttctccaatcatgaatcatcatcatcaaccatggtctatgactatgccacatcatcatcaccatcatcaggttcatgacccttttcttgtccctccccaaccttcaccctatgcaagcttgttcaacagaaggggtccttctcttcatcagtttgcatatgatcatcatggttcatcttctgaccatcttaggatcatatctgaatcccttgttggaccggtggttcaacccggttcagcagtaccctttggcctccaaaccgagttggctaagatgactgctcaagaaatcatggaggctaaagcccttgcagcttccaagagtcacagtgaagctgaaaggagacgcagggagagaatcaataaccatcttgctaagctgcgcagcttgttgcctagcacaaccaaaacagataaagcatcattgctagcagaagtgatccagcatgtgaaggagctgaagcgtcaaacctctctgatagcagaaacgagtccggttccaacagaagctgatgagttaacagtagtggacgaagctgatgaagatggaaactcagtgatcaaagcctctttgtgctgcgaagataggtcagatctgttccctgaactcatcaagaccttgaaagcgttgaggctaagaacgcttaaggctgagataacaacgcttggtgggcgcgtcaagaacgtattgttcatcactggagaagaaacagactcatcaagcagtgaggaccatagccagcaacaacaacagtgctgcattagctcaatacaagaagcgcttaaggctgtgatggagaagagcgttggggatcatcatgagtctgcttctgcgaatattaagaggcaaaggaccaatataatatcaatgtcctaggaacggatcgaggtctttatgaattttatttaattaaaggcctatatatgcatgatcattattattattattactatctactaattaattagttgttatataagcatatatatatattttgattttgatttgcatattttttggggggtgtggtttggcttttacttttttttcttttcttgttaatggtgtgtgctggaaaatgttgttactttatatgtattctccatcaacatcatcatcgttataagaaatgaggaaatgagagtttggtggggttttttgtt

SEQ ID NO: 134108 - DNA, 786 bp, Glycine max
  Clone ID: PAT_MRT3847_92104C.1
cgtcagctcggaattcggctcgaggcaaaatattcttatataaatagccttggagtttgtattatccttcaatagagttagtttcatatataaaacaggaagcaacaactgcaacagcagctatagaccctagggaaatgatacaggaagatcaaggacagtgttcttctcaagcgatcaataactaccaccaagcctatcaagagcagcttctccttcagcaacagatgcagcagcagcagcaacaacaacaacaaaacaatgatatctttggtggaggattgaacatgtaccctggtggtgaagtttctcaaatcatgcatcatcatcatcatcaaccatggtctatgactatgcctcatcaccatcatcatcatcatcaggttcatgacccttttcttgtccctccccaaacttcaccctatgcaagcttgttcaacagaaggggtccttctcttcagtttgcatatgatcatggttcatcttctgaccatcttaggatcatatctgaatcctttgttggaccggtggttcaacccggttcagcaccctttggcctccaaaccgagttggctaagatgactgctcaagaaatcatggaggctaaggcccttgcagcttccaagagtcacagtgaagctgaaaggagacgcagggagagaatcaataaccatcttgctaagctgcgcagcttgttgcctagcacaaccaaaacagataaagcatcattgcttgcagaagtgatccagcatgtgaaagagctgaagcgtcaaacctcactgatag

SEQ ID NO: 134109 - DNA, 412 bp, Glycine max
  unsure (1)..(412): unsure at all n locations
  Clone ID: PAT_MRT3847_92105C.1
aggaagtaaaatgatagtaatgtctattgcagagaactacgttcaaaacctaaaccattgaggatttatgcctaacatccttcaagcagtacgattgattccaataactaaaaggaaattgtagagactagagagcttccacgaagacatcgagatggagctnggaaacgatgtggttaaggttctctacaatgaaaaatgaggtaagcaattcattctgaggtcaacaccaacaaaggcgggaaatggtgggctctatacttggcccgaggagttcagcccaaaacatataaatgctgggaacgggtatttgatccatccatacaaatgcatgataattactttaggcaccacagtatttgctttggtgtacccccaattgcattagggggcaatgcgggcaatgcataag

SEQ ID NO: 134110 - DNA, 433 bp, Glycine max
  Clone ID: PAT_MRT3847_92106C.1
tctgacatcatagaccatgtgtcttccaattcgttggatagatactgatttcatgttaaaaatattgttaaaatttagtatgcatttcgatcaatttatcttaggagtaaaaaaagtcagttttaactcttatgttttataaactaattctcttaaaaaatctaaacaggtacacttcactttaatttttttattttacactttttaagaacaaagtaatctgcaaaagaattaaataatccaattacggttggtgagtcaaatcggtatgcttttcattcttctgtctttccgttctgcatatacgaaagaaatatgttttcggcatattattagacgttgctaacaagtttcagcaactcacggtattgcttttgtcactgtcatatgaaagtggaatcggaaagaatgtttgaacaaaaaaatgattact

SEQ ID NO: 134111 - DNA, 391 bp, Glycine max
  Clone ID: PAT_MRT3847_92107C.1
acacatacgtggctatctatataggacagactcaataacgaactaccaacactcgtagttctattccataaacctggaatggcatcccaacgacacatcgatgttcaatataaatcgcaccgtgctctctattataccatactacaaactgcttgggattggggtggaaaagtagaactccatctagtatgcataactggctaacaaggacaatgcacggagcactgtcccaaagtcgtgaaagtatctacagatctgcgtctcttgtctacacgatcatattgcctgattgagaacactggacgaacatgtcgtggcagcatctaccgtagataaggctgatctccacacatgagatgattctattctgaaggatagactagatcctaac

SEQ ID NO: 134112 - DNA, 160 bp, Glycine max
  Clone ID: PAT_MRT3847_92108C.1
attggctcccaacggtattaatctctttggctgtgcaatgctactcaccactggcactgactcattgtcttgcggaggatcatggacttgttatgaacttctacaaggaactatgccctcaagctgcagacattatcaaagaacaaggagagctttttta

SEQ ID NO: 134113 - DNA, 222 bp, Glycine max
  Clone ID: PAT_MRT3847_92109C.1
tacttttaagatatcagaactatataaaatctatgactagtgcgtaaataatgcagggaaattgtcggtttcactcatgtcttggagaactatactgctttacacacaccctctccctgaattatttacgcactagtcatagattttatatagttgtccaagacataagtggtgccgaccatttccccggctttgataactttttttctctatatatatacc

SEQ ID NO: 134114 - DNA, 360 bp, Glycine max
  Clone ID: PAT_MRT3847_9210C.1
cggaaactataagggtttttgggttaattttgtgcttattcatcgccaattactacaatttgatacatgggcattgtaaataaactagtgcgacctatccgtataaaaccatttatgaagctatctatcagcccccctaaaaaaaatcctatttcaaatatcatgacaggagagaatatcaaggcggcgaaaaatttaaaaaaaccacacaaatgtccacgaaaacgatcagctttctaaaggaaatgtcagcctccatcattggtgccccaaaactccgggctagaaggagttaaaatatgcttgaaccaatcttgaacttaacaaaccaaataacaaggaaggcacaacccacaaaga

SEQ ID NO: 134115 - DNA, 663 bp, Glycine max
  unsure (1)..(663): unsure at all n locations
  Clone ID: PAT_MRT3847_92110C.1
cgacccagcgtccgctttttcagtttctctctcttagggttttctcctcccccattgacccaccgtccatcgcaaaggaagtcgcgcccaatttccatgggtaaaaatttctctcccaccattcacttcgtttgccttgtttgattttcgtgaaacgctgaaataatgaaagttgattctttttttattctcgcgtttgtgtttgttattatgtgtcaattttgtgtttttagtgtttcaaatgcttgttttgatcgtctaggtctttgtggatctctatggagcagagttaaacgttgttgtaattttgatcatctgtcttgaaaaaaaaaattatagtattaattgtaaaaatttctgggtgttagttttgttgggaatgaatgattatgattacattctatgcatgcatgagagcggttatttttttcattgaattttgtggaggataggaagtatttgtgttgtgttgtgttgggagagaggaagtgaggaaacttctttgatatcaaccttgtactgctaattacaactcgttntaaaaaaaggggaataaatttcaagatgctntgntttctctggttatttgnngtaatcccagggagagtagagaagtttgctatcctttntgaaattttgatgttctgcaacagagcaggcttt

SEQ ID NO: 134116 - DNA, 422 bp, Glycine max
  Clone ID: PAT_MRT3847_92111C.1
ggctcgagatttaactatcacctataactcttctgccaaatttccttgttatacatactaggtaccggtatgactaacaaggaaatgagacgaatctgctggacttgctcgacgagcaatataccacgcaacatgacgtgaccgggccagtggtggatatcctagcggtatttttttttctctacactacatcgacatgctaactccgatcaggacatgacattgagatgctatcctttacctcaccagcaataaattagtctctacacaaagacatcataactgaattgatatgtctcagaaagctaaacctgctctggtgcagcacaacacactaggacatgatcaccaaagcagtgcagtgcactatactctgtccagtggaatggatagaagaaaacaaggcatggtacctaactaga

SEQ ID NO: 134117 - DNA, 286 bp, Glycine max
  Clone ID: PAT_MRT3847_92112C.1
cgaggatggagatgtatcagatctggtgcaggagaatagcgttgggagcgctcggcatattctgactttcctatcggcctcagcagacgacgtcgttgtgctctctgaagataacttacgagaaggaagttggtcaggacagaggagctctcgttgagttctatgctccttggtgtggacactggaaaaagcttgctccagaatatgcacagcttggtagcagcttcaggtaagccatatctgttgtaatcggcaaagctgactgtgctgagcgacaagagtttgt

SEQ ID NO: 134118 - DNA, 1285 bp, Glycine max
  unsure (1)..(1285): unsure at all n locations
  Clone ID: PAT_MRT3847_92113C.1
cggacgcgtgggctgggaaaaaacgaaagaaggggggtatgaatgggatttccaaaggattaaaaataaaaaaatgaattaaaagacacaacacagaatcggaagaaagacttcttctttcacattcacaattcacaagcagcgcgcccacacaaccaaagcagcagcgtccaggtgcatccccttcctccgtcaaacccacgcccatttcattcttctcaattcccaattccaaattagggttagggttttcacaatctcaatgaccttctcttcttccttcaccttacaatccctattccactaccgctactactactccctttgtcttcgtcgttgtcgttcgtaaggattaatcaattaacctatcgaatcgtttcagtatcttcttcttctttttcttccatggacctctctcaccctcagtctaacttgtccctcggattttcttcctcccacgcttcgccgcctcctcgctccgacccgccggtgccgctgcagctcatggaaccgcagacggagaatggcaacttagatgttgaatcggacgacgatgaggacaaagaagtcgaggagtttcgcattctaggccactcaatgtgcctcaagaggcgaagagattgcgactcctcatcctcctcctccgccgccaagagggtttccgtcgagcccgatctcgacgcgcgtaaggcagcggtgcgcgcgtggggttgccaacccctctccatcgctgaccccgacgtccacgagataatggaaaaagagaagaaacgtcaatttcgcgggattgaactcatagcctccgagaatttcgtgtgcagagccgtgatggaagcgttgggaagccacttgacgaacaagtactctgagggaatgccccggtgcgcgctactacggcgggaaccagtacatcgacgaaatcgaaacgctctgttgcgaacgcgctttgaacgcgttcggcctcgaccccaagtgttggggggtgaacgtgcagccatattcgtgcacctctgctaattttgctgtttacaccggcttgttgctgcccggtgatcgtatcatggggctggatactccttctggagggaacactagtcacgggtactatactcccaatgggaagaaagtttctggggctgcctttttctttgagagcttggcctacaaggtgaacccctcaacgggttatattgattacgataagcttgagggagggggcgctggatttcgcccanagatcttatttngtggtggatgctctcncttcagagttgaatatgcnagg

SEQ ID NO: 134119 - DNA, 373 bp, Glycine max
  Clone ID: PAT_MRT3847_92114C.1
gaagacgactgaaagaggtctaagtggatagcgatatcttttttatctacatctatccctcccgttaccggtgtagtctcaaaaggaacgtgatgtgattattatttatatagagagacttattgtataaagaaagatatgagataattccttctttatcttttatcatagcagtgaagaaaaaactgagaaagcatgggctttgactactacaagattcttcaggtacatttaagggccaaaaagaaggaacttaaaaaagcttattgtatgctatccattaagtgtcatctcttttagaaccctaacatcttgatataggctgaaactaaattcaagccatattatcgaagcttatgatgttttgaatgat

SEQ ID NO: 134120 - DNA, 1055 bp, Glycine max
  Clone ID: PAT_MRT3847_92115C.1
ctgagttggagtttactcaggaggaattggatgctgttcctaaaccagatgatacttctgattcttcaaaaacgattgatttcttggttagccatagccagcctcaacaagaactctgcgacaccatttgtaatttaaacgctatcagtacctcttcgggacttggctcaatgcatttggtgttattcaaggttgaagggaaccaccggttaccaccaaccactctttcacctggagacatggtttgtgtgagaacatatgacagcatgggtgcaattacaacttcttgcatacaaggatttgtgaacagttttggggatgatggctatagtattacagttgctttagagtcacgccatggtgatcctacattctctaaactatttgggaagagtgtgcgcattgaccgtattcaaggactggctgatacacttacttatgagcgcaactgtgaagctttaatgctgcttcagaagaatggtttacgaaagaagaatccttctatttctgttgttgctacactgtttggagatggggaagatgttgcatggcttgagaaaaatcatttggttgactgggcagaagaaaatttggatgcaagattaggaaatgaaacctttgatgattctcagcagagagcaattgcaatgggtttgaataaaaagagacctgtattggttatccaaggccctcctggtacaggcaagactggtttgctcaagcaacttatagcatgtgctgttcagcaaggtgaaagggttcttgttacagcacctactaatgcagctgttgataacatggtagaaaagctttcaaatgttggattaaatatagtgcgggttggaaatccagctcgtatatcaaaaacagtgggatcaaagtctttggaagaaattgtaaatgctaagcttgcaagttttcgagaagagtatgagaggaagaagtcagatctaagaaaagatctaagacattgtttaagggatgattcactagcttcaggcatacgccaacttctgaagcaactgggaaggtcactgaagaaaaaggaaaagcag

SEQ ID NO: 134121 - DNA, 397 bp, Glycine max
  Clone ID: PAT_MRT3847_92116C.1
acggctgcgagaagacgacagaagggacctacaaatagtgaaactttctttcaaaaatccattgcaataataaagaaataatttaactacttaagataagcaaagtttccgttatgtaaagaatcacaagccaatgtagtgaatagttatcaatctttttttgtgttggctatatacatcaaataagttgttcttatactcatccacttgacttctcttccatttcacctccacttcattttccatcttatctctcttttcatttcctattacaccatttgtcgtatctatcaatttctctcttccttaatttatttttgttctttctatttctctcatccttctacccatattaccccaaaatgggatgattattaaatgaaggaaaagagaagtt

SEQ ID NO: 134122 - DNA, 381 bp, Glycine max
  Clone ID: PAT_MRT3847_92117C.1
cggcctcaaagttgggatacggttgcatgggccttactggtgcctacaatgatccttttcctgaagaggaaggcatatctattattaaccatgctttcagcaaaggaatcacttttttcgacacatctgatatttatgggccagaccatgctaacgaaattgtggtcggaaaggtatacaaattcacgatcgatttcttttgcatttccacccttaaaattgaaatttatatatccgcttgaaatataaccttagccatggattttcaaaatacatgcttacttggatgaacttccttggaaatatttcttggagaagaaaaatgagatccaagaaatgaaatgggtgtttccataaactaaaatgaactcatcatttata

SEQ ID NO: 134123 - DNA, 642 bp, Glycine max
  Clone ID: PAT_MRT3847_92118C.1
gacgcctgcggtccaggcgtccgctcccgcgctttttcccgtccgaaaaaatttgcattcattcccaaacctacacacttccaaaatcaccgttttcccttcccaaacacatccaaaaaaaataatcagaatgtccttcttggcccccgcgaaggcgctgctctcggcggcggcctctctggccgccaccgcaatggtggtccgctccgtggcgtgcgacctccttccgtcggagctccgatccttcatcagcaacggcatccacagcatgttctcgcgcttctccccggacataaccctaatcatcgaagagatggacgacctcgacaacaaccaaatctacgaagccgcggaaacctacctcagctccaaaatctctcccaccacacagagactcaaggtgagtaacccggtgacagacaaaaccttcgccctcaccatggagcccaacgaacccctaacggacgttttcagaagcgtgaagtttatctggatcctcgtttgccgtcagttggagtcccacagcttctacaacccgcgcgacctgaaatccaccttgaaatcagagtttcgctcgctggaactcacttttgacaagaagcacaaggagatggtgctcaacacctacattgcctatattgt

SEQ ID NO: 134124 - DNA, 151 bp, Glycine max
  Clone ID: PAT_MRT3847_92119C.1
actgccaaccaggtccatgcatactatcaaactccttctttataaatcgagcaaccctaatggcttcagcgacatcaaagaaatcgactgctttcgatgctaaatccatagcaatatgctgcatggtctgaatcatgtcagactcaccaat

SEQ ID NO: 134125 - DNA, 399 bp, Glycine max
  Clone ID: PAT_MRT3847_9211C.1
aaaaataaaaaaataaaaaaaaaaaaaaaaaaaaaaaaaaaaaaaaaaaaaaaaaaaaaaaaaaaaaaaaaaaaaaaaaaattaaaaaaaaaaaaaaaaaaaaaaaaataatgggggcggccgttttaaaaaaaaaaaaatttacttacacttggttgcgcgtttttaaaattttaaatattgcaacctaaataaaattctttggccgtttttttaaaacgcccttgattgaaaaaaccttggcgttccctaactaaatcgcattggaaaaaatccctttttccccaacttaaaaattttcaaaaagacccccacttttcgcccttcctaaaattggcaaaaccccaatgccaattggccttccccatatagcggcaattaaaaagggaaggggggggg

SEQ ID NO: 134126 - DNA, 307 bp, Glycine max
  Clone ID: PAT_MRT3847_92120C.1
ggatcttggtctggaatacgagcgccctattaaacaactccacatttcgctcacggacaagattgagctctctgtcatatctgttgtaatagtgcagccattgatgtcttctatcttaacatgatggtatgatggcatgctatcatcataagcctcagacaggatctatgctgttttcattcactgtacgaaggagatatatgacaacattacagctgtgtctggtgaactagccaaaggccagagccgcatgtatatggtgtatgattgctcagactcaagggtgtgcccatctcatgtgctagat

SEQ ID NO: 134127 - DNA, 277 bp, Glycine max
  Clone ID: PAT_MRT3847_92121C.1
gtgagacaacatgactgagaggtccacataccttgcctggctcaaggttacaactctgattggtgcacttgaccagattagtgagcccaagaggccctgtgacatgcaacatatgctgcaactatatgaagtgtatcattaaaggacgcttcggatctgtaacagggtgatgtgttcacatacgggataggaagcttggcatggaattcacagacgcacgaactagtctgactactgaagattgggaatgccttttacaacatgatcgtctcacaga

SEQ ID NO: 134128 - DNA, 171 bp, Glycine max
  Clone ID: PAT_MRT3847_92122C.1
aacacgcgttcgatttaggagtgagtgtatagcttatacggggaagggtggtaggattacgagacgcactttgacgtatggctacagtgagacagaagactgggtgcgggaaatctgactggtagtacgtgtggaactagagggtcatgctgtatgactgaattatacgag

SEQ ID NO: 134129 - DNA, 440 bp, Glycine max
  unsure (1)..(440): unsure at all n locations
  Clone ID: PAT_MRT3847_92123C.1
gcgagaatagaatagaattcagcacacacaacacattctctttctttgtagatcccactcaactcactcaggacccatccctcagcatctgagagagagccccacaaacacaaagggaatctgtctcaactcaactcagctcagtgcagaatgcgaaagagcaatgaggaatttccgaatctgagtctaaggaagccacccttaaagaggagcaagacaattccaaatccaaaacacacccatttctctgtctctgtctctgactccgacgagcaatggaactacccttcttttcttggcaccaccaccaagaaaaaaaaaacatctttcaaaccccacaacctcaaccttcccaaaccctcacttgttccaccaccgtcaccaccacctgctnctgcttcttccacatcctcgtcgccactctcttcacaagtcaccag

SEQ ID NO: 134130 - DNA, 388 bp, Glycine max
  Clone ID: PAT_MRT3847_92124C.1
ccatttataccccccctccccgaatccataattcacatgcaaccatttatattgttctacacaatacagaatatgacgagtcctctgcagtaattgctcaaaatccaccatagagtgcacatccccatatagaggattttaaataagaccatgtacctgtggatgaaattccaaggttcgagcccaagtattcagatggttctccacagcattataatgctcgaaagaaagagattccaagaagaagaatgccatttataaattcctgtgctgctaacatgcctaatggagatgaaaaaattgttctttccacatgaaaaaccaattgagtactctggctcaaagggccaaaatcctaagaactattgtggcaataataactcctctc

SEQ ID NO: 134131 - DNA, 391 bp, Glycine max
  unsure (1)..(391): unsure at all n locations
  Clone ID: PAT_MRT3847_92125C.1
aaagggngagaagttgggnnaannagannaagaagggggaagggngagnangaggaagaangnnannaagnagggnnnnnaaggaagnnaatggnanggnnnagaangatttaagtanttgggnnnattntttggngagnnnnngttttanntaannggtgagtttnnaggngaataaggttgggaaantgntgggntttnnngagaaanagaaaanttngnnaagaanngtgaanttgaaatgatnnaattnaggtgggnnatgatnggaagattgggntgggtntttnnggagttgattgtangaaaaggggtgaagttaggagaaaangtgtgggttaagggagggtagaagattttaaggaaggggggggttgaattaattggggaa

SEQ ID NO: 134132 - DNA, 404 bp, Glycine max
  Clone ID: PAT_MRT3847_92126C.1
ttcccatccaggaagcgttcccgtcatcactgtatgacgtcctccttctttggggggggggggggggaagttataaaagcaaatgcggaggcagagcctacgtgataggcaatggcagtaggaggtggggctgaacacaaaaggatcgggggttccaaactgggccaacgactattataattataattgtaagtgtaaaatttaaacgtactggcatacgaagttagcttaaacaatggaaagtgggtccccaaaggttagcagcggcctaggcaacgtatagtaaataatgcccaaattggccaagttacatttggccattagcgttggaaatgtgggtgtgctgtgtgtgggtttattgccaggagccgttaatagcagtatagccagcgcaattatattgg

SEQ ID NO: 134133 - DNA, 428 bp, Glycine max
  Clone ID: PAT_MRT3847_92127C.1
acgcattttctgtttgtatgattcaagtgggctccacagatatctaattcatctccatgatgtgataatgtaagttcatcgcccttatagcaacaatgaaacgcttaatagatcgtataagctgcatcaaagatcatgtgctgtcacgactacctcacttgcttagtacgacgcgctgacaacgacggtcgacatactcgagcatttgatgataatggaatgacacgctctggattaaattttaacacaatggacggtcattgacatgaccgtgcaggggcttctctgttccaagactatcgtataccaacatcgtcgagcgattagacttttatcatgaatgctctctctgatggccctagcagcagcaaagacccctgaccaatgagttctttgactaggatcgactctctcagtctctcgggcga

SEQ ID NO: 134134 - DNA, 147 bp, Glycine max
  Clone ID: PAT_MRT3847_92128C.1
ttttctgtttgtgttgtatctttttgaagggggcgggacggaaaataaaatctactgtccattgattttgaatggaaaggaaaatcagccacacaaaccggggcaaaccctcctatagaacaaaagcttgacacccatacatgagga

SEQ ID NO: 134135 - DNA, 1104 bp, Glycine max
  Clone ID: PAT_MRT3847_92129C.1
tcacgggggtgacaaggcgatagaagggggcgggttaaaatgcaacgataacggttgaaatagaaaaaagaaaaacagtgttttggtgaagctgagaaaacaaaggtttagatcacctctgaaattctgctatggcctcaaccagatcactcattctttgtcttttcattcaactgtgcttctaccttctacccttctcattcgctcaatcccccgccaccgggtctgccgaaggttacaccatttatggtcgagtgaagatccccagtgtgggaacaaaagattatattcttcctggaaaaatttcaaatgtcaaagtcatactcaatggtggtcaaagagttacttttctgaggcctgatggatatttcgcattccacaatgttcctgccgggacacatctaattgaagtggctgcaataggctatttcttttctccggtacgagttgatgtaagtgccagacaccatggcaaaattcaggcagcactgacagaaaataggaggggacttagtgagtttgtcttggagccattgaaggatgaacaatattatgaggttagggagccattctctattatgtccattgtgaaaagtccaatgggtctgatgatgggatttatgctgattgttgtcttcctcatgcccaaattaatggagaacatggatccagaagaaatgaggcgtgcacaagaagaaatgagaaatcaaggagttccatctttagcaagcctgttacctggtgctgcaagaagcaactaggtgtatgagtaacggaaaaccagtgagcaagttggttacccccaagcaggagctgaaaaaatgacatacgatgattggagaattttcttgtgacaaattgatagcgatggaaatctttcgattatttatgtagtgaattagtaaaaatttgaaatttctgatagaggtttatatgtttgatttgaacagtcgggagtaggtttctacgtaattcttgttcactttctcgtcaatgttgataaccatgcactgatggatgatttttttttttttggtttacttatagaaactgttaatttccacataaagtccttttgcttgaaaaaggaattgatttatgatc

SEQ ID NO: 134136 - DNA, 454 bp, Glycine max
  Clone ID: PAT_MRT3847_9212C.1
cccacgcgtccgtacggctgcgagaagacgacagaagggtacggctccgagaagacgacagaagggttcctatttacagatgctccaatcttgcatttactacaagactttgtacaacaagtggcttgcattcaaaacctttaacctcacatttcatcacaaaaaatatgatctataccgacgaaatcatatggttgcaccatttttgcctacttgcattattggcttcacaactctaacatgaacagaatgtttgtatctatattgctcaatgtcagtgaatatgattactcaataagcacttgttgctgcaaagtcttggaatcttaggaattacttcctccgtttttttcttcaagaaacatgcttcagttttttatgtaactataagtatcgcaaatagctcttggattgtaattctcatctgtagcatcttgtacatacatcaaacaca

SEQ ID NO: 134137 - DNA, 617 bp, Glycine max
  Clone ID: PAT_MRT3847_92130C.1
caggcagccctgacagaaaataggagggggctaagtgagtttgtcttggagccattgaaggatgaacaatattttgaggttagggagccattctctattatgtccattgtgaaaagtccaatgggtctgatgatgggatttatgctgattgttgtcttcctcatgcccaaattaatggagaacatggatccagaagaaatgaggcgtgcacaagaagaaatgagaaatcaaggagttccatctttagcaagcctgttacccggtgctgcaagaagcaactaggtgtactagtaaaggaaaaccattgagcaagttggttaccccaagcaggagctgaaaaaatatggcatacgatgattggagaattttcttgtgacaaattgatgccgatggaaatcttttgaccattcgtccggtggattataaaaaatttgaaatttctgatagagaggtttatatgtttgatttgaacagtggggagtaggcagaactcgtcaatgttgataaccatgcactgatggataatttttttttggtttacttgtagaaactgttaatttccacttttggtccttttgcttgaaaaaggaattgatttatgatctgttttggctgcc

SEQ ID NO: 134138 - DNA, 296 bp, Glycine max
  unsure (1)..(296): unsure at all n locations
  Clone ID: PAT_MRT3847_92131C.1
ggcatncgcttgnnagntcgggaattcgggtggaggtaggnttagagnggggannnnggtgnggngtnncctgcnatgnttnggggngttgnnggngagngtgtnggnnagngccntnaggnnggggngtntgncccngnggtgngggngantnggnaggggntngngnagggagnggnnnattgncgtgtggtngttggngatgggaagntgnggngggggggnnnggagtgnggngggtgtntgggngnntggngagggggangggtagtgnnggggagggggaangggggngn

SEQ ID NO: 134139 - DNA, 2957 bp, Glycine max
  Clone ID: PAT_MRT3847_92132C.1
ggctcgagaaaaattaaataaacaaaataaaaaaaataaagttaaaacttgtgtgtctgatttagtgttttctctctctctccctctccaccccaattcccattgtacgttcttcttcttcttttctttctttccaaaataaaatcttttacccttcacacccccacccctttgggtttctctcctcaattttgcatctggcggcttctcagttctcaccaccatcatggtttcacttggagctacctgtgctctgtgctgttctatgttcatggtgtttgtcactttgagtttggctggggacatagtacaccctgatagtattgctcccagaaggcctggctgtgacaacaactttgtcctggttaaagtccctacttggattgatggtgtggaaagctgtgagtatgttggcgttggtgcaagatttggccctacattagaatcaaaagaaaaacatgctaaccatactagagttgcgatagcggaccctcctgattgttgtagcaagcctaagaataagctcactggcgagatcattttggtgcaccgaggacaatgtagtttcacaaccaaggcaaatatagctgaagaagctggtgcttcagccatcctcattataaattatcgtacagaacttttcaagatggtttgtgaagcaaatgaaactgatgttgatattggaatacctgctgtcatgcttccacaagatgctggtgaaaacttgaaaaatcacatactaaacaattcagtagtgtcggtgcagttgtattctccattgcgtccattggttgatgttgcagaagtgtttttatggcttatggctgtcggtaccattctctgtgcttcttactggtctgcctggtctgcaagagagtctgccattgagcaggagaagctattaaaggatgcttcagatgaatacgtaaatgcagagaatgctggttctagtgcatatgtggaaatcagtactgcagcagcaatatcatttgttgtgattgcttcttgtttcttggttatgctttacaaattaatggcatattggtttgttgaagttctggtggttctattttgcattggtggggttgagggactacaaacttgcttggtggctctgttatcatgtttcaaatggttccagcatgctgcacaaacatttgtgaaagtacccttctttggtgctgtatcatatctgacagttgctgttactcccttctgcattgtgtttgctgtgctttggggagtttatcgccgtgtatcatttgcttggattggtcaagatattcttggcatcacattgataattacagttcttcagattgtgcggataccaaatctcaaggttggaactgttcttctcagttgtgccttcctatacgacatcttctgggtgtttgtctctaaatggtggttccatgagagtgtgatgatagtggtagctcgaggtgataggagtggagaagatggtatccctatgctactcaagataccacgtatgtttgatccctggggtggttacagcatcattggttttggggacatcatcttaccagggcttctagtagcattttcactaaggtatgattggttggcaaagaagaaccttcgagatgggtacttcttgtgggcaatgactgcttatggtttaggtctccttatcacatacgtggctttgaacttaatggatggacatggtcaaccagctttgctttatatagtcccatttacacttggaacctttttgtcattgggaaagaagagaggtgaactcaaggttttatggacaagaggggaaccaaaaataccttgccctcacatccaagagaatcaatcaacaaaccagtaatccccagcaggaatagcatcctaggtgttagtttacaggagacttatagcacaatcttagaagactttgtaacatctgtaactttgtcataaccaaatttcagccaaatgattatagcatgtacttaaaatcggcaccttagacttgagataccccacaactgttggatgttggaagaccccatgccaaactgtttattgtaagaatagatcttgttctaaaatagaagatggactgaggtgaggagattcaagagattccacttcctgattctggctttgccttggggacatgatttttatagttaccttttacaactttacttcaatgaggctctgactaaaataatgcattgaaacttatgaactggaaaatgaagactggagaataaagcaaacggcaaaaagccaaatgacatgcatcgacaactttcaaccaatggagagaagacgggaaaataatgaattgaaacttgtgaactgtgaagttaaagatggctaaattatattttggaagaatactccttgtatgaaattaatgatgtatcaaatattcttgcagtgctgaatcaggctcggttgtcaccccagcttttattccaactggatagctacacacaaaggacttccaaataatctctataaagtttataaaaaatcaggaagattatttggtatattagaattagccccatagtccaaagacatggatctttcatttctcctctccaatctttagttttacggccccccctttttttttctctgtttttttttttctcttgctccctttcttgtatcttgttcagttttttctcttctccccctggttttctcttctttggtttggtaatgcaagattgagtaatagtataatttacacttttttttgtttcagttaaaactacataagtcataaggaacaaaggagcctttaaatcaaaacttaaaaaaagaacaaaccaaaagaaaattcacaagaaaaatataatccacacaagctcagaaccctttttatttctttcctgtacgtacaagagaaagcccccagcaactaatagcatcagagctaaacaccaacaatgaaccacaaagaataaatttaaacagta

SEQ ID NO: 134140 - DNA, 306 bp, Glycine max
  unsure (1)..(306): unsure at all n locations
  Clone ID: PAT_MRT3847_92133C.1
ccccccccaaccactatcccttntnntccatatcaaaagcatatctatctcaacctggtggaacaattgttcctaggttccccgacttgtctcccaaaaaattggtaaaagctggtatggatcgagaaaagtcctttggtacaacaaaagaccggatgctgttcattgaacattgtgcagattctagggctggaaccatattcattcgtgggggtgacaaaatgatcattgaggagacaaagggcagtcttcaaaataccttgtgcgtggctaggaatcttatacacaaccattctattggatatg

SEQ ID NO: 134141 - DNA, 273 bp, Glycine max
  unsure (1)..(273): unsure at all n locations
  Clone ID: PAT_MRT3847_92134C.1
aaatattcaaacctngcnctatactacacagtacacacactagaagantaatgggttccatcctccactactttttagncctctctcatnctngctcttttcttncttcnnatccgactcagtcacccctacaaaaccaannaaccntgangntctacccgcacaaaagtacggaaccacagggcaccagngggcttaaccncnaaaaaagaaccccnctanagnaagnancagacntggcggcaccnnaaangaaaanacctntggggtnac

SEQ ID NO: 134142 - DNA, 391 bp, Glycine max
  Clone ID: PAT_MRT3847_92135C.1
gatatttagcttcataaactccatgtcccttaaatgtgtggttgacatacgcatatcagataccatacacaactatggcaattcgagggtattctcattactgatttctcaacttgcaatccaatcagtttcaacatgcattcctaagcgattcattccatgctcaatgaatgccatattcacctttctggcctctatgaagcggttctcacaaacatctacgcctgcaatcaactttccactatcactcgaacttccctcggtcccaatgggatgaataagatggttataaatcacttggccaagctttttgtcacgaacgatgctgggacgattgtgaatgaacttgaaattcaccatcctgctgccaacgtttttggctttggcttgg

SEQ ID NO: 134143 - DNA, 487 bp, Glycine max
  Clone ID: PAT_MRT3847_92136C.1
aaaaaaaaaaaaaaaaaaaacaaagcatttttttttttgccgcaatcaatcaataactgtcggcgacatatccgaatcaccgttgcagtctcacgtttcctctaactgtttttctcgggctccgagctcgccggagctaacattcacggcggcgcaccgcccatttcttcaccctcactcaaaatgcagtgccaccgcgtctccgccgtgctttttctaagcttatgctttagaattgcgctagtatacgcgcaaggagagcctcatctcactgctctggaccaacattggttcccgggaaccgccacgtggtacggcgacccccgaaggtgacggtagcaccggaggggcatgtgggtatggtacgttggtggacgtgaagccgttgaaggcaagggtgggagcagtggggtcagtgctgtttaagaagggggaagggtgtggtgcttgctacaaggtgaagtgattggaccatagcatatgttcg

SEQ ID NO: 134144 - DNA, 155 bp, Glycine max
  unsure (1)..(155): unsure at all n locations
  Clone ID: PAT_MRT3847_92137C.1
aaantatcacactcntgtttggacttgacgaggaaagctangctggcgtgatccgnttacnattgcagtgacttagangtcantgacggtggtgcnccttccagttgatcaggagtangataagttttgtgacagagatggaaatagtggattng

SEQ ID NO: 134145 - DNA, 210 bp, Glycine max
  Clone ID: PAT_MRT3847_92138C.1
gaggtcgttgaaccaggcattcactcaggagctctgcgagcaagtctaccatcttgtcctagagtcattcctctaacaggctggagtgatcatggttacatgtgatacatgtgtaaaattgttatcggcacagacttccacacaactatagaagacggtcacatatgatgtcgagactgaggtgcctaacaactgcacgaacacagattt

SEQ ID NO: 134146 - DNA, 660 bp, Glycine max
  unsure (1)..(660): unsure at all n locations
  Clone ID: PAT_MRT3847_92139C.1
caggttaccggtncaccggaattcccgggtacgaacccacgccgtcacgcgggacgcagtagggttctggtggtacttctctgaccaagcaaattttccctcatttattctcctctcctgacaaatgacttgaccttattcagtaccagaatcaaattattccttcgcaatcgatactcttaagccatggttgctgacaggggttgagtgcccgtacctctggcaccctttctgagaagcttcaccctttactctgattgacgaaatgcccaacctttctacaccaacctatacactaacttcgattacctccttcacccatctaccaacgagccgattccagctcagaccaattttctgaatggaatgaatacatcagtgactatcagattgggatcgtatgaatcggccttacatgagcatgaatgtgaaagagcaaaagtatctgatcagtcggagccatccgagactgagggcagaccaaagaatcagaggctaaaactagaggtgatctgaccactgatgaatcgaggaacctggatgctgagaattgacaacgtctgaagttgctgtcatggagattgagaaaatgcaggattaaggactgcgaactcatgcagagatggagaatgtgatgcattggacacgacgcgaagcggc

SEQ ID NO: 134147 - DNA, 374 bp, Glycine max
  Clone ID: PAT_MRT3847_9213C.1
tttcggttaaatgttcgtccgtttcagctcccccgtcgcgacccgatccttactcaaatcccatccatgcattatgctattcgatctattgtgttgacagacgcttaagagccaaatgatccatatcgaaatattacaatcaattgggataacaaaagttggaccccagacgggtatgttgctgttgctacaatgaacaactttcaacaatatcgccatatctaggagcctgggtggacggttgtatggacatgggcgaaaaaagaggtaatatggtacatggtgggagggcagaccactgagcaaggggaatgaacaaaacataaagggaacatccaacattggtgtaaaaagaaccatggagatgctgattt

SEQ ID NO: 134148 - DNA, 321 bp, Glycine max
  Clone ID: PAT_MRT3847_92140C.1
ccctgaactcggcattgggctcgagctcaggccgctcatggctagagtatataaccactaactgaggaagcggatttctggggttggagtttactcaattgggacgaaacttctgaactccaccgtaggaccttcaccctttcgaccaccgaagatggatttggccacgctctctccgtattgtaacctgcttgtccccaaacaagagaatgtgcagagagttcaactcggtggcaagtactttgaccgagctgctcttggtgatgcttatcaggatggcatctgaagacgaactttctctggctaagcaccccagcatgt

SEQ ID NO: 134149 - DNA, 504 bp, Glycine max
  Clone ID: PAT_MRT3847_92141C.1
gtaaggaggggcatgcgtcgaacagcttacgtcatgcacctctaagctgattgtgagcggatacatcgtcctggttgatgcaaaacttgcccacctgggatggattggcgtagggaaggtgtccccgcagtcatttgcggccctcaagcacagagaccttctattcactcatcggcatttctactgttatcggtcttggaacggtggcgccgtgcatcgcccgaccttggaccagctagagaacggagtcaagtgaagacccgtcctttgcgtcctttcactctacgaggacagttctggaacgagacgccgctggtcaaggaaaattgcgttgattgcattgtatgagttacgtcaccgtttcttcgtctttgtgaagtcgattcagcgcgcgagactcatcaccagtgacgtcgccggcgttttgatctgtccgtgcagctataccgggagatggcgcagactgagagtgcaacatgctttaagagatgcttggcagagctc

SEQ ID NO: 134150 - DNA, 322 bp, Glycine max
  Clone ID: PAT_MRT3847_92142C.1
tgaacgtactacctacaccaagagaaaccgtgttgtttctcaggtgatttcttatttgactgcttacctgaggtttgatggggccctgaatgtggatgtgactgaattaaagaataacttgggaccatatcccagaatccatatcatgatttcctactaagatacagatatctctgctttttttttttaccaagaacagctttcaggggctgaaattattaatttgtgctttaagccatcgaacatgatggacaagtgagacaaacgccacggaaaggccaatggatgctgaatgatgaaacgtgatggagttgagcccaaa

SEQ ID NO: 134151 - DNA, 206 bp, Glycine max
  Clone ID: PAT_MRT3847_92143C.1
ggtgtacacgggatagaaaaggaatggtgggaaaaagcaagcacgtgtggaaggggccatggtctgcttcatgctggtcattcgttatcaaaagcttaagaaaaggtgctatttggctgatgggtggctgaggctgatcggatatccaggcctgaatgaaaatctatcgtttacatactgttgagaccatctgatgagctcgtgtg

SEQ ID NO: 134152 - DNA, 397 bp, Glycine max
  Clone ID: PAT_MRT3847_92144C.1
ctatcatcttgatatcctctacaatctctctactgttatgtactacactgtgatactctgctccctaatgcttgacactaacgaagctgagataccgactggatgtcttatatatggaaaacctattccacttcaagaatgacaaaaaatcaccatatatcgtactgattatgacattaaagagtatcacgaaatgatatccataacttactagaagctacctggccactttaactctgaaaacaccatattgtgctctgatgggacaagtactctcactgtcttatcttgcgatcctgatgctgatactgttaaatgtcgatacgaaaacactgctaccatccccgacagagaaaatgacactcttcctggcgaccttgctaatctccccacactt

SEQ ID NO: 134153 - DNA, 454 bp, Glycine max
  Clone ID: PAT_MRT3847_92145C.1
aaaagaaaaccaagggtggaggccctttcccattttaaaaaaaagctttatgggtccgcccataccccttttttggaaatttcccggacccccctttaaaaagggggggggggggaccaaaaaaaaaattcctttccaatcttcaaattagtctcccaagaaaaaaaaacatgaaaaaaaggggttttttgttttaatggacaagccctggccccttatttttgtcccaactttgggcaggggtgccataaggggtttgtaaaaaaactcaagatcaagggggaggggccgcccctggtgttaaatcaactcatgagggggccccatttgggataacccggcaacccactcctttttttttgttttcccctcaaaaccgggggggggggtggtcaacttattgggggaagcttaaggggccgagagcaaggggggcccctgatccacagccccc

SEQ ID NO: 134154 - DNA, 456 bp, Glycine max
  Clone ID: PAT_MRT3847_92146C.1
cgtacgtaatctcctcgatgctcaagttcctccttgtgatatcttttccaaaagagagatgtcgaaatttttgggaagccggaagatctcaccaccctcttatgtcaattatcagattagaaggtcagaatgctctctgcaaccaaggaacatgaatatcacaagactacagggaggtgtgaatgtcagcagtagtgacaatcccaaacctaaaagtttaggtccagaaagttcaaatggttcagcccatgtggatcatccatctagagagttccagattgcagttagcagcaataggaaggtagtgaacgggagtacctgtagttctgttaggacaacagtaaatgaatttagtgaacgggaaatgccttacatgactaatgccaatgcttccatcattgtgaaggatgattctgataatgtcacaactacctctcaaagattgaagatcatatg

SEQ ID NO: 134155 - DNA, 519 bp, Glycine max
  Clone ID: PAT_MRT3847_92147C.1
ttccgggtcgacccagcgttcttatcaacaccaaactctttcttctactccctcctgcaacaaatcaaccttccaatctttcacccatacatgcactacttttcccttgccccctaaaattgattcgcggcatatataatatgtgtgacccaccactcacatcatcggcatccgaggcacaaggcggaagcgggacccaccggaagcgagcagtttttttactgagcaaacctaaccgtaccaagctcaccctcaagtgatcttaggggaatgtggaacctataagaagcaacccaagatgcagtgcgccgggtcgtaaaccacaccagcaagccattacacacactgccacacctctagcataagcaagcatcaaagctcccagaggagctagcagaaccccggacatgttgagaaagcgggatattggatccaagagctaaaaccaccacttctgggagagaggggcttcaaggaagacagctattatcgcgattggcataaacacatctttcagga

SEQ ID NO: 134156 - DNA, 287 bp, Glycine max
  Clone ID: PAT_MRT3847_92148C.1
tttttttttttttttttttttttttttttttttttttttttttttttttctttggaattttgttttttttaaaaaaaaaagctaattttcaacagaacaaagaccatgacaatttataaaaacaaacaaaatgttcacatgaagaaccgtaaaggattatgcaagcacacgcctgtgaaatatactgcaaccctacacgaatcccacaccggccaattaggggatactccactgaaaaagaaaaggaatcccccacaatgggaaaaaaaagccttaattcttctaac

SEQ ID NO: 134157 - DNA, 350 bp, Glycine max
  Clone ID: PAT_MRT3847_92149C.1
acgagaaaaaatatggtatcaattaaggtattaaaacaatataaaaaagagatagagaaataatgagaatattaaataaatgtttttttaactaaaagaactgataagtcatacatcaatatctctaaccttaatgttataaaaaaattatttataacatcaataatcatgttactaattaatggtataatttcttataataagctacaaattcaattttcaattatatatatgattttgataattagttttttcacctctaattattaattaagacaagtagttaatttttgaataattttccaatcatagaacattttttttcattataatttaaacaataagaatga

SEQ ID NO: 134158 - DNA, 385 bp, Glycine max
  Clone ID: PAT_MRT3847_9214C.1
agggagacacgagcttccattcaattgcactaaatatttacgagtacttttttttattcactttactattaattctcatggtgtttttaaaactgtgggctggcagttatttccttcttcacgagtgttcttcctttaacaatggagaatatttgaagtcctgtttacatcactcccaacaatggcctcttaaaccaacataccagtttactaggtcatcttgttcttaactcaaacacatacaccaagctgtgatctctctggtttttcatcacaagactcaaaaatctttgtaagatatcacaaatgagctctgtccggagttaattttttcacatatatatcttatacgaactatattcttgcatgactagtatggaccaca

SEQ ID NO: 134159 - DNA, 166 bp, Glycine max
  Clone ID: PAT_MRT3847_92150C.1
aattcggctcgagggacttactataaacagtccttatcttacacaccctatctttaacacgtaccacactgagcatgggggggtcaggtacatgggtagggctttaatcaaaagattttgcattgtgccacatcatgatcccgttgcgaacttgttctatgaatct

SEQ ID NO: 134160 - DNA, 413 bp, Glycine max
  unsure (1)..(413): unsure at all n locations
  Clone ID: PAT_MRT3847_92151C.1
ctgagcatcgtctagctatctcgatcgaactgtccaaggtcctgtcaccgtggacatcttctatcttattattcgtatgcgggtaagttgtcaatgcgcgtggtggtctgggtgccgtgggggaggaccaggggcggtagtcagttagtcttaaataggttggttacgtatggctggtgtcaccaattgaggaccagccgtgttagttggcacttagttaacttgacggggggtgtggtaagcataaacaggcggccgatttgcccattgaaagtgacagttcgtcaaattagggtgccggcttgtaacatgcatactgtcnccatgtcggggcatggggtaccatagcatttgcacgattattaccacatgggccacaagggcaacatgctgagtaacacgatgaacaactg

SEQ ID NO: 134161 - DNA, 203 bp, Glycine max
  Clone ID: PAT_MRT3847_92152C.1
tgatgctcaactcttttttcaatgcctattaagtcattactttttattacttgaaaagattttatgcacagattaattttttgataatattaatatttgattacattgtaaaatttacaacgtaatatgtatatacactaactctcttcacaacatgtgcaaaaattaaatattaacctaactataactttatccatttatta

SEQ ID NO: 134162 - DNA, 467 bp, Glycine max
  Clone ID: PAT_MRT3847_92153C.1
atttgaactactttagtattatgttagcattttcatatgttaacacatcatttttaatcttgtatagttatacctattatttgccagttatatggataggtaagtaaggtgctgctaacataggggatttgtgagtacaaaaatttacggatgtttcgaggtggaagagtgatgttggtgatggaaatggtaatttgtatactaagtggaccaccaaattgcaaacaccacaaggatactttttattataaagcacatcttttattgccctatccttacctttttgtctatcattaatatctcctttattagcgccacaaaccatatacgatttgaaatttggtatggttgaagcatgttatggaattttcttttgcataattcatgacgattatgcatttgtttctttgcccattatgaacagtgaaagggttggcttgatgcttcacgccttcacctgttgttct

SEQ ID NO: 134163 - DNA, 299 bp, Glycine max
  Clone ID: PAT_MRT3847_92154C.1
ccggctcgaggtgactgacgcaccttttagaacttttataccactaccaccacggacgggaagttgcgtctctattaaaatcccactacaccgtcttcattaccaacaaggtttgttttagttaagaactgataggaaacatggggccaaacaaaacgcccaatctatggcagggacgtgacgacagaaccattttttcagcgcctagaagtgaaaaaaaaatcctgcccccctaccaagcccccccctaagggactctggcgagcaactggggggggggggggctcttttatttaaaa

SEQ ID NO: 134164 - DNA, 505 bp, Glycine max
  Clone ID: PAT_MRT3847_92155C.1
cctttggcagtgatagtggtcctaactctgcccgattgcttctttttggcacataattacttaatactctataggaatatcttggcatcaagttattcagctttgttaaggaatattctctaacatctgcttacttctgagaagataataccccaatcaatttgttctcggtatggtttagcaattggtgcaacagtggctccagttgtccgtgttctggtatggttgttggactttttgttggggcatcgacataaagcacttttccacagagctgagttgaaaacactagtaaatctgcatggccatgaggtctgtatcagagccacatgatgctttggattaaaacaaaggctggaaaaggtggggaactgacacatcatgaaacaacaatcattgctggagcactggaacttgctgagaagacagccggtgatgccatgacccccataactgaagcattttgtattgacattaattctaagcttgacatgtatctgatgaa

SEQ ID NO: 134165 - DNA, 314 bp, Glycine max
  Clone ID: PAT_MRT3847_92156C.1
ggggatcatgttgctgtaaaagcgcttccggctatgagtacacgcccttcatatgatgatggctccaatgctgagatgggcatattggggctatgccgacagaggcatattgttaggttcttgggctcctgttcaaatcatgacataaaccttctggtctatcagtacatgcccaatggaactttacgcgatgttctacatggaaagaacgggggtcattttcatttggatccacagtattcaattgcggtggaggcagtcatggtgctttgccactagtcttatgaatgtactccagtcactgtctatcgtga

SEQ ID NO: 134166 - DNA, 1921 bp, Glycine max
  Clone ID: PAT_MRT3847_92157C.1
aattcggctctctcttctcttccatccctgtgatcttttcgcctctctgttcagggctcaaatataacaaaacattaagcacgcgtctgctcttctcttctcttcactttgatttcattgcaattacctctttttgttgtgatcttcttcccttctctgttctaaaaaagaacacggctgatctgggctcgactaaaacaaatcactaagttaaaaatgacgcaaaatgcgatagtgtccaagacaaaatcggggatcaaccgggacataaccgtgccacaaaagccactggcggcggcggcggcggcgggggggtacattcccattccgaggaggagggttttgaagaacctggaaatcaatgcatgggttgattccatgagatcctcttctccaaccaattccaaatccacctcttctctcgcagaagaacacagcacttggattcttcgccacccctcagcattagacatgttcgagcaaattatggatgcgtcccggggaaagcaaattgtcatgtttctcgactatgatggtactttgtcgcctattgttgatgacccagaccgtgctttcatgtcggattcgatgaggagaacggtgaggaaacttgcaaggtgttttcctactgctatagttaccggcagatgcaaagacaaggtttacagttttgttcgcttggctgagctatattatgctggaagccatggcatggatattcaagggccaacaagaacctccaaatacagcaaccaagataaaggagagcctgttctttttcaacctgctagtgaatttcttcccatgattgatgaggtgtaccatgaaaaattctgctgttctaaatcaattcctggagccaaggtggagaacaacaagttctgctgttctgttcattttcgctgcgttgatgaaaagaaatggagtgaactggcacaggaagtgagatcagtattaaaagagtacccgaagcttcgtcttaaccaaggaaggaaggtattagagattcgtccatctattaaatgggacaaagggaaggcgctggaatttttgttagagtcacttggatttgccaactgtaacgatgtctttcctgtttacattggagatgataaaaccgatgaagatgcattcaagaaattaagagacagaggacaaggttttgggattcttgtctcgaaatttccaaaggacactactgcatcatactctttacaagaaccaaacgaggtgatggatttccttcaacgtttggtggagtggaaacaagtatccctccgactcagaacacgttctcgggtgtaaatggatagaatgataatgtacatccctaccctgccataaaaaatggagttcagctagggtagcatataggacccttttttgtatgttttgttcagattagaacagagaacaaaaatgtatggaaaaaggaaagacaaaagtgtctttctgagtttgaagcacgtctacgttgatgtaattagccacgtagtttgtgtagtacaggggaaacgtctctgttgcatcaaatgtaattctgaatggattaattttgtacttttccaaatatgataatatatattacaagttacgtatctaacaatatatattgtatactcttaagttctgagtcgtgacatgcttagtaaagtctcacaatcatggcttgcatgctcgtacgaattggtcttcgttaaatggtaaaataacattggaaataccgtcgctaacagaattttggaaaaacatggctgtatttttacgatgcactacatgagcaaagaactaattaattagactgatgtcatcttaatgagtgtatgaaataatgatactatgatagtcttttggcctatggggcaagaggtaaaaggcttaagttcgtttcatatctaatcatttgctttttattgaaaaa

SEQ ID NO: 134167 - DNA, 182 bp, Glycine max
  Clone ID: PAT_MRT3847_92158C.1
caaagaatgacaggatcttctttggggttcccattttctcctacaaggaacttcaagaagcatggggcgtggtttaccccactaggagatctaggttatagaggctttggcactggttactattggaactctattagattgaatgtacgttgcaatcattgcttctatttgatcacaattac

SEQ ID NO: 134168 - DNA, 131 bp, Glycine max
  Clone ID: PAT_MRT3847_92159C.1
ccatacctgagctttgttgggaaaactgtatatgctttcttattcattgcccgtgtattgctgggaacggaaaaaggagagctaaggcttccactacaatgaattctgaggcgaaaattgtatgaactcaa

SEQ ID NO: 134169 - DNA, 987 bp, Glycine max
  Clone ID: PAT_MRT3847_9215C.1
attcacgacagtaaagaaaataaagttgcattgaaaggtcgaaaatggacatagcatttttctcaacagagttttacaagaaccaggctacgagaaaaccaaacattgcagtagtgggaagtgggccctctggcctatttgctgcccttgttcttgcagagcttggtgcagatgttactctgatagaaagaggtcaaccagtagaaaaaagggggcgtgatattggtgctcttgtagttcgtcgaattttagaattggaaagtaacttctgctttggagaggtacctggagtgatgggaagttggtgaccagaattggacgcaacagtggcagtgtccttgcagttatgagaactctagtgcattttggagctccaaaacagatattgattgacgcgaccgctcacttaggaacagataggttggttcctttacttcgcaactttaggcaacatctgcaaaatttgggtgtcaccataaagtttgggacaaaagtagatgatttagttataaaagatagacatgttctaggggttatggtatctgagtcagctgataaattacatttaacaagtcagaagatggaatatgatgcagttattctggctgttggtcattctgctcgttatatatatgaagtgcttcttgctcacaatgtggaattaatacccaaagattttactgtagggctacgaattgagcatcctcaagaactaataaacagcatacagttttgtatctagtcgaattgtttcaacacggttgttttttctattagtgttaactatactgatgacaagtgctccatgttgctcatgtaatataagaatagagcccctaatgtcattcccgcaacaacttattagtaacctttagattctcaaaacccttgtgttatctagaaaattgaaattgagttgagagattatgcaaataatttaaaagtgatattcagaggtttcgaagctttgaattattatggtcctct

SEQ ID NO: 134170 - DNA, 1247 bp, Glycine max
  Clone ID: PAT_MRT3847_92160C.1
cgttgtttgagaatgcagcgcaaagcaggtggtaaattccatctaaagctaaatattggtgcgacacgcccattcaaccataccgtaccagcagaggaaagagagaaaatttcagaacaaaaaagaagcagaggaaaagagagatagagagagaagaaaagctgtgaagagaagagtctgaaatctgaatcataaataattggtttttgagatgaagaactgcgagttgtgcaagcttccggctcggactttctgcgagtcggaccaggctagcttatgctgggactgcgacgccaaggttcatggagccaacttcctcgtggaaagacacacgcgcacgctcctctgccacgcgtgccagtcgcccacgccgtggaaggcctccggcgccgccctcggaaacaccgtctcgctgtgcgagagatgcgccggcggaaccaccgaacaaggtcaagagagccaaggaggcaatgacgacgacatagacaccgacatagacaccgacgatgaggatgactacgatgagagcgaggacgaggttgccgccgacgaggaggacggagacaaccaggttgtcccttggtcctccgagccgccgccaccagccccgagctcttccagcagcgaagaatcggttagccggtgcaacaacgtggacgaggtttcgaccacattgaaacgccgtcgccaggaggacaatgattttcagggttggaattcgaataattggggatgtgaacggagcgaagtggagagaggaggttggttggttcggttgcggcggagaaccgccgatgatgtggcggttgagcaacggagtgctagagcggcgtctccagacggttgctgtggtgatagagcatctgaagacgtttgatctgaagggacacgaggaatctcaaccgcgtgatctacggggccgtaccattggatattatttatgggctctttgattattaactttctctaacgttacagcactcaggttttgataatggcaatcaagtgtatggatcgttttttttattattcctattattttttgttttgatattttgaggatcatggttgtgggggtgatgtaactctttacttctattttattgttgtaaaataacatttttttcttcttctgtttataagtaggtgaggatgctttatgttgtgatgaatacataggaaaaaccacgaagcaaatgaatgtgattccttattcatgataaaaaaaaaaaaaattatattcgttt

SEQ ID NO: 134171 - DNA, 554 bp, Glycine max
  Clone ID: PAT_MRT3847_92161C.1
gatagaagaatggagccatacacaataaacagcaaatacaagaatttatacactatcatgcgttgtttacaagcatcagctggtcctgtgtcaattcttaaaatctcaatgaataatgataactaaactacctaattttcaacctacttaaattcaaatggcaaatgcacaagagccacaatctgtcagggaaattatcttttattgcacaacaacacgagaaattcagtcttttccacgtggttgctaccataatgcctcctcctctgcccattgtacaaaagatggtcttccacattagtgagccattgcttgagcatgtgagaaatggtggctaccctcctcatctgtatcactatcgtcatctgaaagatctgcaagccttgcaattgcatcaataagagcttgctcatgatccttcaatattttcttgacttgctcaatttcaagcgcatcaggatgatttgcattgaataccctctccacctccttcactagtgtgtctgtgtgaagtatttgtatatcatctggagtcttcattcctattccattct

SEQ ID NO: 134172 - DNA, 508 bp, Glycine max
  unsure (1)..(508): unsure at all n locations
  Clone ID: PAT_MRT3847_92162C.1
ggcagctgcttccccaatggcaagccaactcaagtccaccttcactaggactcttgtaactcccaaaggcctctctgcctcttcaccacttcacctcgtgccttctaaaaagcaatttaacttcactgttaaagccatccaatcaaaaaaaccaacctatcaagtgattcaaccaatcaacggtgacccattcattggaagcctggaaaccccagttacatccaaccctttaatcacatggtacttgtccaacctgcccgcatacaaaaccgcagtaagcccactactaagaaggatcaaagtgggcctggcccacagataccttctggtgggcccattcntaaaagccgagcctcttaagaacaccganatcaccagacaaacagactctctagccaccagtagacttatagtaatcctcaacctttacctcacaatctataagatttcatccttcacagaaaaaccccattcactactccgtcgcttacctttacaagcgcgaaaa

SEQ ID NO: 134173 - DNA, 439 bp, Glycine max
  Clone ID: PAT_MRT3847_92163C.1
ctcacgcgtacggttaagacatggcctagtacattgattgggtcattaaaaacaacactgctgtgtctgccatatatgagcttgcaggtatgctatcgcacattacagcagcgcagtacataggaatgtgctatggaatgatgggtgataatctaccatcaaggcatggaagctgcatacttatataaaacacaaggcattgttggaatgcgtatatactacacagttgaggaatcactagaagtgcttagaggttaaagcattgtactgattatggacatgtataatgtaacacttcagtcatagacagacttgaatgcttgtacagactgcgtcattcaatatgggacaccttactcgcgagacgccaatttcaagttcatcgatgttggtaatgaaattcatacgagtaccactgtggcacaatatattctatgtg

SEQ ID NO: 134174 - DNA, 465 bp, Glycine max
  Clone ID: PAT_MRT3847_92164C.1
caaattttaggtattcagtattctttattaattatttgagtatttggagcagcatttcaatgtctgtttcaagacaattgtacagatggagtgtggaagaactaagactcgcgtctggggcagaaggagtcactcgtcttcagcaccagctcaaactctgcagtgcttatagtggtgttcctgtatgctgtattcccaagtctactccaacttcaataaaatctttaaaatcaaatatttctgcaacttctttgtgattgtgatataaagattgtccatgaaatattgatatgggaaactctagaattttttcgttggatactcaaaacagttgtgatatttcccattcccccttaatattcataaatctcatatggttgtggttgtggctgcagggaaaccatataacaagagatgattttggggagcccttggcaacatcataccactccaagttcatgggaa

SEQ ID NO: 134175 - DNA, 718 bp, Glycine max
  unsure (1)..(718): unsure at all n locations
  Clone ID: PAT_MRT3847_92165C.1
ggctgcgagacgacagagggggggatttgtcaggtagttggggatgatctcttgatgtcaaatgcaaaacgcattgagagagcaataactgagtctgcttgtaatgcccttcttctgaaggtcaaccaagttggaactattacagaggtcattgaagtggtgaagctggcaaaagaagcacattggggggtggtaacgtctcatagatgttgagaaactatagactctttcattgctgatttatctgttggccttgcttctggtgtaattaaagcaggagctccttgcagaggagagcggctagaaaagtacaaccaggtctctttctgattcttatgctgatggttttactgcatgcattatggtcatgattcttgaatacttcaaaaaaatttatgtaccagacttattttgtcaactcaccaattcctctcccatgggaaggtggcggcagttttctatgataggtggtatatttgcaatatcagtagtgtttaagtgatgattttatactttgttcattgctggttgtaaatatgctaatttattcctctttaggcttcacaccctatgtggcttgaaggcaatatctgcgtatgattctttataataaaatgcatattaaaagttgatatttgtcgcatatggattctcgtttataaagtgaaactaangaaaagcataacaattactatctgaattntgatacagttacttc

SEQ ID NO: 134176 - DNA, 381 bp, Glycine max
  Clone ID: PAT_MRT3847_92166C.1
ccgtactgatgtcccgcaacggtgtcaagtttggagaatctgtgtggctcaaggccgggtaccagatcttcagcgagggtgggctggactacttgggcaacccaagccttgtacacgcccagagcatcctctgcatatgggccacccaaggtatcctaacgggtgctgctgagggatatctgattgctggcgggcccctctgtgagggcactgacccaatctaccctgtgggcagcttttacccattgggccttgctgatgacccacaggctttagctgcgcttaatgtgaaagaactcaagaacgggagattggccatgttctctatggtggggttccttgttcaggccatagtcaccggtcagggtccattggagaacc

SEQ ID NO: 134177 - DNA, 253 bp, Glycine max
  Clone ID: PAT_MRT3847_92167C.1
ctcaggtgttaaaaagttgattgattctagatgtcaggcctctgttggtgttatatctaatccaagccttggggatcgggcacttaggaaagccggacacaatccatggcttggtctaagaccagctgtccgaggagtggcaatgaatccactacatcatcctcatggtggacgagatggtaagatcaacagtggtggacgatctgtgcaaggatctctcactccttgaggcaagcctactaagagtggctac

SEQ ID NO: 134178 - DNA, 233 bp, Glycine max
  Clone ID: PAT_MRT3847_92168C.1
ttaggggacttttttttcaagctagcaaaccaacaactagggggggttgtaagaaactacagaaatcaatttgctttcacttctgcatcttcaatggcttttccaataccttattctagccattaaaggttcgtgcctaactttaatgcatttttcaagccactgccactaccggcttgcaaggcattcacaactattaaaactcattgtaatgtttcaagttactgccttca

SEQ ID NO: 134179 - DNA, 473 bp, Glycine max
  Clone ID: PAT_MRT3847_92169C.1
tacggctgcgagaagacgacagaaggggactcaattgcaacagcagaagaagcataagcttctagagacacagaaaaaaaaaaaaaaaaggaattgaagatggattgcagaaacagggactcaatcacagagaatcacacttcatcatcatcatcatcatcatcttcttcttcttcttcttcttcttcttcgtgtgactcactcagcgaagccttgcttttcaccaccatgtgcatcgttggccaccccgtcgatgttcacgttaaggatggctctgtctattccggaatcttccacactgcttctgttcacgccgattacggttcatttcctcttttttctctcgttgatttcttcacactttttttttctgggaaattcggttcttttgtgtagattcccttgtaggctcaaatgggttgtgagaaatttcgtattttgggcaattcccattgccctgcttgaacaatcac

SEQ ID NO: 134180 - DNA, 462 bp, Glycine max
  Clone ID: PAT_MRT3847_9216C.1
ttagcttttcatattgattgataaatgttaaaacatttaaacctaggatacataatttcttgtagtagaattataggtagtgttttaggattttgatattttttttctgcaagcatctatggaaatacatcaacattagccctgtatttgtgggaatgattcaattcaatggtcgttggatgattgatgttatagttatatttatcagtttgcacttcctcttcagtcttcagtgaaatacattatgttttaggttagaagcaattgctgtttttgtgcattgcagttgaattgtcatcaataagatggggattgtctgttgaactttagttctgttagtggttaggaatcttattgatagggagaattgacagtatttggtccttcggagaattagtaagtatttataatgctccctcaaaatatgtgtacaggacactccgtggtagaactatttcatta

SEQ ID NO: 134181 - DNA, 295 bp, Glycine max
  unsure (1)..(295): unsure at all n locations
  Clone ID: PAT_MRT3847_92170C.1
ccaaaaaaaaaaaaaaaaaaagggttctcgattcgcgcttctctattaaaantgaagaccataattacgggcgggggagaatagctatttacaagtgagagaacatggggttgtcgttcaccaagctgtccatcagcttgtttgcgaagaaggaaatgaggtttctcatcgtaggtctcgatgctgctggtaagacaaccatcttgtacaagctcaagcttggagaaatcgtcaccactatccccaccatccgatttaatgttgaaactttttagtacaagaacatcagcttcac

SEQ ID NO: 134182 - DNA, 1109 bp, Glycine max
  Clone ID: PAT_MRT3847_92171C.1
ctgcgagaagacacagaaggggcaatccatatgcattatacggaattcccaatccaaaaaacaatcagaaaaatagagaggtagggagcacgaccacttacgacggacacggcagtgaggttgtcactgacggggcaatgacaatggagggacagacagtgtggattcacggcatgacgacgaacagtagcagcaacgcgataaagagggaggctgagggagcaggctttttaaatttttgtactgaaagacattttcgccacttcagtaaaattattgggtgcacaaagaaaaacctccttcacaccatgcttgaatcagtaccaaccatgggcatagtccaaaggtgcagtagcccaaggcccatggctaaaaggcatccaaacaaattatagttgtgtaatggttttttttatattgctttacattattttcataaatgcgttgaagatgtttcttattttatgtttcttttatttaaattaaaatgtgcatgtaaataaaaaaaatataaaagatttagtttttttccctctaatgtgttatatttttaaatttgtgttacatgaattttcaagtaagtgtaacatattaacatgtaatgaacctattatgataacttagttagtatattaacatgttttttaaacaagataagaaacataaataacaactcaaattataaagaaattaaacctaaaagttagtgtattagtaaagaacaaaaatatatgaagtgattaaaaaggaaaagggatatagaaaaaaatataaaatggccgaagattttaaagaaataaaattgtataaaaaaattatatattcaaatggtgggtattttttcttttagatgtgcctttatatataaatatttatgtgcatgtaattttttaagtgacccaaattgaatgaaaattgtgatgcatctttttacttgttgaaatttgttaaaatcatataattatttccttgatataattaaacaatatcatttttaataaaattatgtgtttattttttataaaaaaaatatgtttacatttttatactaggatcattgaggaaaaaaaagtagaactaggatcattgatctcaagttcaagtctttt

SEQ ID NO: 134183 - DNA, 334 bp, Glycine max
  Clone ID: PAT_MRT3847_92172C.1
gggatggcattgacatggaccatttggaagcacaggaatactattatcttctcaaatggctcattcaatgctaacggaatcctagatgatgcaattttcttactatggacgtggctcacaaatttggagaaggattttaatacacactataattactggtcttccaacatcagagcagggttcctaaatagaataggatagaatattagtgcagatttctgtataaacctatatgttctttcagattggttcaaactgtgttgggaccaaatctgaactgctacttgtattgtcagtacctctggtactcaattaatgtataatattatgtttg

SEQ ID NO: 134184 - DNA, 126 bp, Glycine max
  Clone ID: PAT_MRT3847_92173C.1
gcccacacggaaacaaaatagtttaaatctgactctcgatgaagttctaactcctaaaggtttcatgttggaccttaaaatttctcaatctaatattgcccttccctaaaacacacttggtggaac

SEQ ID NO: 134185 - DNA, 378 bp, Glycine max
  unsure (1)..(378): unsure at all n locations
  Clone ID: PAT_MRT3847_92174C.1
gaggaangcggncncccaccaaaanaagaaaaaaacaaaaaagaaacttctggcatggggaaaaaggaaccccagacacaagagaggggaaaactggatagagaccaaaaactaagcacgngagggcgannaaannancancttgtaatcggggtggtcnaggaggagganccccacnnnaaacaacgacaccaaacacaaccccccnaggggggggggggggggggcaaaaactttgataggaacgggaagactctccctcagttctttgtgcaggatggaataacagggcggcggcctcaagcatgaggatcacatggcccatttttggcctctgtggtgcatcaggaacaacacaccgaagagcaagcaacaaag

SEQ ID NO: 134186 - DNA, 472 bp, Glycine max
  Clone ID: PAT_MRT3847_92175C.1
ctgacgcgtgggccgaacgaaaagtggacgcacagcgaacatcgagtcaaagtgccagaattgctagcaaattattgcgatttgttgctcagaaagtcggccctgacgaaaaagttttcttctgaagagatcgacaagagagactgaacaacgtgcttttggtgctgaaatatgtcacagctaaagatgttttcatgcgttatcataagacgcacttgagccgaagactgattctcgagttggtggccgactaagaaaaggaggaaatgctcaacttggccctaaggaaatcgctggaaaatggcagctgcagccaaatggccgattgtgtaagcgtcaaaattctgaatgccggagcatggtcgaggagtcgagaccgttcgcacctgactttgccacgggaattggaggatttgaccccggaagttgaggacttttacaaaaaagcagcactgcggacgaaagctgaatt

SEQ ID NO: 134187 - DNA, 772 bp, Glycine max
  unsure (1)..(772): unsure at all n locations
  Clone ID: PAT_MRT3847_92176C.1
gaattcgagctcggtacccggggatcctctagagtcgacctgcagaatggacactaacgtcgctgatttcacattcctacttctaagttactctttgttggtagtctgtcccaaattaatctccaagcaaaaaatcaagctttacttgaaatttttaactttcatagtgtagtgaacactgcgtcctgattcttatctgctgagtgcctatcaagcagcctgtaggcactccccactgcatgtcccccacccgagtctcccttccacctccagacatcttgtcgctgcatttgtacaataaggccttctatatcctccataaattttgcaaccatgtctatttcaccctctagaaaaaatctcctccattagagctgtcattctcaccttgtacctgatgtcgtcctcatctgctggatatattgattttgttgttgtgaaatattgtacaatcttgggtacttctccatcaacgagatcccatcatccttccacccgtcttcccaaaacatcacctttgatccacacccaattttccatttagacccgcttttaaaccaactcccctcggtcgaattatagatgaaactcaaatcccaccaccagagggactctntgttagtccttcttgtcacatccaaattcctccaccctccatatttttgagtccaacacttgtgcccacaattctccttgacggtgaaacaaattccagcgccattttccaagtaatcaaaaatttgaattcaccaaatctctgatgcccaagcca

SEQ ID NO: 134188 - DNA, 362 bp, Glycine max
  Clone ID: PAT_MRT3847_92177C.1
tccaattcgacctaggcgtacgcgtacgcgtacgcttcacaacacccgtgaccgaacccaaattggattccacagaatagagcagggcctctagtctgagatattataatatttattacagcatctacaggtgtggttgtaacagtaattgtgattgctacatgtaacatcattatctcatgcaccatgtgaatagtgggttcttgccctgaaaatagtagttattgcatttattgattatagctgctttcagcccttacagttaactctgtacctatttatgtattctagatgatcaagtagatcggcaattgggcaaagtcctaatgtccaagcacatgctcaaagataatgtcatgcgg

SEQ ID NO: 134189 - DNA, 328 bp, Glycine max
  unsure (1)..(328): unsure at all n locations
  Clone ID: PAT_MRT3847_92178C.1
atagtattggatttcttttcttcttaaacgaaactgagattctcggatggcgttccttcagtaggcccccagatccgtgttgccctatttcggagatgaagaaccagaggaagaagaagagaccgaagctgcagaagaagcttgagaagaacaaaggcgttgttagctgctgctgatgtngttgccgagaacgaaaacgaaagcgaagaagaaaagagaaaacgcagcattttggaggcactggttgaggccttctccttgtctttagtcagggaagcttccttggcctataacattggncggcggtgaatgccgacaagggcttcgg

SEQ ID NO: 134190 - DNA, 105 bp, Glycine max
  Clone ID: PAT_MRT3847_92179C.1
accaggcgagagagtcaggcactgttcacaactagactaaatgaagcttatgagggaggtatctctggccagcatctgtctaaagtgcgcggtgtatcctaacat

SEQ ID NO: 134191 - DNA, 304 bp, Glycine max
  unsure (1)..(304): unsure at all n locations
  Clone ID: PAT_MRT3847_9217C.1
ttattttgcgcagcatgccgctttatagccttcacaatgcttgacactaggactccctagtctttgggatgagacacccaaggtattgaccttctgtctgacagaaaaacatgaccgctccaagaagagccaccgaggacagatgcatactgtacatggatggaatgctcacaaaggttgtgctgatctatgagcttgacgacaccgacacgcactttgtaacttccaccagtgaccataccagcattcccaacctannnnnnnnngaaaggcagggagnntgatgcttcgaagggccatnttg

SEQ ID NO: 134192 - DNA, 278 bp, Glycine max
  Clone ID: PAT_MRT3847_92180C.1
ctagtctgagatcgcaagcggtccaccttgtattacttgattaaccactgcacgcgaaccgtgtctgtattcctaccacgcgaggtatcatcacattggatgttcacataaaaaacactgttacctgcatggcgagcgtgcttacaccaatcgttagtgaatccaatgatgagaaacccgttgcaaacgatgagcgccgtcgtatgacgtacatcggctagattagtcgaaacgcaggatcgcacttaatacttaagggaggcctcgtcgagtactcg

SEQ ID NO: 134193 - DNA, 544 bp, Glycine max
  unsure (1)..(544): unsure at all n locations
  Clone ID: PAT_MRT3847_92181C.1
ggctcgagccacaatctatcactcatacaaagaaaagaaaatgatgtctgttactatttggtgatttaggcaacatagcacttcgtgttaaactttcttttgcaatgttgtcttgaggcagtgctatggacctcagcaagctaccaccatgttaaaaaaagggctaaaagcctggaatagcggctaagtgtaagtgacatacgtcgagctgggggtgattaacctgaactgtataaattctctctgaaacagtatcaaattctgctgaggtaagcttgcaattaaccgagagacacgcttcacgggaccctttttcttttgtgaaatgtcacccttggttgtctctgcttctctccatatgactctattgactactctcactatagagtgaacacagccgttggttggtggcatattattgntgttgatttattaccttttttaacttgttctcaacatctttttgctttgcaacttgtggataactctggtgcangcaagaaaaggcttatagtaaaaggatcattatcatgaatatcaagca

SEQ ID NO: 134194 - DNA, 233 bp, Glycine max
  Clone ID: PAT_MRT3847_92182C.1
gcgggagaaagaaaggtgaataacttgcattcatgtaattaactgatagatgggtttatatggggcctttcacttttgaaacccaaagccttctactatattattataaatccctttccatgtatgacaacttccaatattgggccataatgctaagatttcccaatgtagggcagccgattgccacattcaaattttccatttggaatttatgcattggtggatgggtttaa

SEQ ID NO: 134195 - DNA, 245 bp, Glycine max
  Clone ID: PAT_MRT3847_92183C.1
gacttttgacagctggcgggcctttcctgagacagcgtactggactaaaccatggattgtggactgttcaccatctaccggaatctgaaacctgtaaagatccttggattgcgatgcgtagagtctcctgacgctaatagcatcgtgctgaaacatgtcataaacagcatcaaccagtgcctgcacttgaacactcgcttcaacccccactactactccatcaccgtcgtgtgcaacagtatgga

SEQ ID NO: 134196 - DNA, 307 bp, Glycine max
  Clone ID: PAT_MRT3847_92184C.1
tattcaaaaagttgatttttagttttgggcaagcagataccaaacccgcataaaatctactgctgacttttgccattgccgtacaagggacttaacattaactcccttccagatctgccgcgatggggaaaaattgtacagcacctgggagtcctgaaggttaggacagtattatgcatacaagggattgttttaaaccaaagcctaacatggtgaatgagttaaaaccagcattctttggcagcaattgcttgctgctgttttgtggcggaaaatagggaaaattttgtttttgcataaaactaac

SEQ ID NO: 134197 - DNA, 357 bp, Glycine max
  unsure (1)..(357): unsure at all n locations
  Clone ID: PAT_MRT3847_92185C.1
cgcaaaaactccgattatttaattaaaacttgcattatttgaatccccnntgaaccattaattaagcctcactcatgtctttcactacnnnnnnntccatatatgacttttgagggcaaggggggcttcatgcaaatgagagagttaatcctggtgcatannannntttctnnnccttncccnttnncccttcctcctnacccttnnanncnnccnnnnncctntnnnnaatttnntcaaaatgacccgcaccatacccacatgggttattatcaaaaggacaaaccaagatgttgaacccgataatttcatcggcggaaactctcttcaatgtaaccacaccgggcactgtatttt

SEQ ID NO: 134198 - DNA, 536 bp, Glycine max
  Clone ID: PAT_MRT3847_92186C.1
agaatcccttgcttctttttgctctggcaagacttacgcaagaccaaggcacaacaatggcttgcacggagttatgtattgacttcatgggacttctcatggcgctggtgattgctctcaccctcatgatcatctgctcctcccctaagaggcgcgtcgtggtgcatcgctggccttgacctttttctctccccagaatatctctgtcaatcgctacagatttctgacaatctcaagttttgtcattttgagtttgtgttcatagggtgatttttcatttctgtggtttccttaccctttgtgattttatctggtgtaattcatatagctggaagcaggtaactggggatgtgccatcttcatttcccctgcctctcatagctaaatagatagatactctctgttcatacaattgaaatgaataaaatagaagctacttttccaatcagcgagatacccactttcaagtgatatctaatttgcatatcaattaggaagataggtgcacaattttcttttttccctcacatatttcg

SEQ ID NO: 134199 - DNA, 197 bp, Glycine max
  Clone ID: PAT_MRT3847_92187C.1
cgtgattctcgatcttcagattctaccgcatcacgtcaggtgcactgaaattctacgcgtgcaaaatctcagcggacggccagatcaaccgtgacgccggcggatgtccgggcggaggcgcaccttgccatctggttccgcagacggtctgagacggtcgcatactgaccgtcggaacttgatgccgtgatgctcgc

SEQ ID NO: 134200 - DNA, 224 bp, Glycine max
  Clone ID: PAT_MRT3847_92188C.1
ctatgtgactatggcatcaaggcgtccctttttattattcttgcgtgctaaggttcaagtttgacttacaaggaaagaaccatagctatatatcaggtattgagaacccgtaaagatcgcattcacatctcgctggttgtgacacctccttatagcccccacaccaaccaagatgccacaccatcttcccgccccaataaccatccactaatgctgagaatatt

SEQ ID NO: 134201 - DNA, 489 bp, Glycine max
  Clone ID: PAT_MRT3847_92189C.1
ccacgcgtccggtttcgttttcgcaaggcgcaacccttgccttccactctcaccaccccaaccaataattaacccttcattctctctctcacgctctcccttagggtttggggtttccaattgactgcgctcattcacttttctcttcgttattcgacgctccacaaggttttcgtgcgtttcggtgtttgcgattgattcagatttttcgggtttaggtttttgagggggtttaggaatggctacggcaactgaaggggttgagtacgagagtgatcccgaagaggccgcgagatcgctcgcaatggaagaaactgacgccgacgctgacagaagagacgccacttccgatcgccggataactcattctgttgactccgacggcgagggcggcgtggcagattatgatgacaaagaagacttggaagaagaagaggaagcggtgggggaggaggaagaagaggaggtagaagaagaagatttagaaga

SEQ ID NO: 134202 - DNA, 1342 bp, Glycine max
  Clone ID: PAT_MRT3847_9218C.1
atcctcaggcttctggggcatatgttttccgtccaaatggttcattttccattaaatcagatcatcaggcatcttttactgtcctgcgtggtccaatattggatgaagtacatcaacagctcaatccatgggtatcccagattacgaggatattcaaggcaaaagaacatgctgaaattgagttcacagttgggcctattcctgtggatgatgacattgggaaagaaattattacacaatttaaaactacaatgaagaccaacaagacattctacactgattctaatggacgtgacttcattaagaggattcgagatttcaggacagactgggatctacaagtgaaccaacccattgctggaaactattacccagttaatttaggaatatatgtacaagatagtagtatggaattatctgtgttggtggaccgctcagttggaggttccagcttggaagatggccaagtagagctgatgctccacaggaggttgcttcatgatgatgcaagaggtgtaggtgaggtactcaatgaaacagtttgcgttgctgataagtgtgagggcctaacaattcaaggaaaactgtatcttagaattgaccataaaggtgaagctgctaagtggcgtcgcacagttggccaggaattatattcaccattgctgttggccttcacagaacaggatggggataattggttgcatttcagtccatccacattttctggcatagattcttcctacagtttacccgacaacactgctcttttaaccctccaggaatttaaaaatggaaaagtgctcctaagattggctcacctttatgagatcggagaggacaaaaattactcactaacggcaagtgtggaattgaaaaagttgtttcctaataagaagatcaataaagtgacagagatgagtttgtctgctaatcaagaaagagctcaaatggaaaagaggaagctagattggaaggtagaaggctccactgaagaaccgaaggtggtgaaaggaggccctgttgatcctacgaagttggtggttgaacttgctccgatgaagattcggacattctttattgaatttgatcccctccaaccagttcctgcaccagaaaatcatgtggcaatgaagcaaagcactccaaaactttctagaagcttagggaataaggaatattattgttgaatctgttagctttctgttaggtcgttagtatcctgtggctcacatgtagtaacagtaatctctataaatgtaagggaagcgcttgtgaaggatattaagaaaagcattatcccaaagatctcaaaaacccccccaaaaaaaaaaaaaagggcggc

SEQ ID NO: 134203 - DNA, 401 bp, Glycine max
  Clone ID: PAT_MRT3847_92190C.1
ttttttttttttttttttttttttttttttttttttttttttttttttttttggtttttttttggtttttttttccgaaaagcaaaattaatgcctaaaaggctttcttgggggtttaaaagcccaaattattttttgggggaaaaaaaaaagggttggggcggtaccaaaactaacccctaagcaatttccttttggtcctaaaagggcaaaaaattccccaccctttttaatttaacattttcccacaaaaaagggcccccccccctgagaaaaatcccccggaaacagggtttttccaaaaccccgcgttaacacccccccaaaggccgggccggggtttaaaacggcgtccccccccaggaacaaaaggaatccggagcttttcggtttctgaattg

SEQ ID NO: 134204 - DNA, 359 bp, Glycine max
  Clone ID: PAT_MRT3847_92191C.1
gtccattcaaacagcctccagttatctgggtgctgcgaatcacctgcctaacccaacttttttttgattgatatagcatggtctatctacatccgacaggaacagacgatacccaactagctctacgcttgctaaggatccatcacacatacaaagggtccctgatggagcttaaatgatccaagcggattacaaaataagaccagatgtgcttcttaggtggtgtggcaacagaggattccatatgaccaggtgcttaaagctgcgtagagaatccatctgaagaagaccggctatctttgccttgtctaaccccaccatgcaaggtgagtgcccttatgttgatgcttaaacccgtg

SEQ ID NO: 134205 - DNA, 381 bp, Glycine max
  Clone ID: PAT_MRT3847_92192C.1
cggtctcgtggtctgacgcgtggccggacgcttgggttcaaccactgttccaacggcctatttctctctcttcccttcctctcatcctagacccatccttttccacttgaaaaggatgctgtttgtggcagatcaagtgactcgggagaagggagaaaagcggtcctgaattctgactggttcaaatacatggcatcgggtgccatatcgtgtgttccttctgtgacaaatataacctaactaatcttgttcaaagatattgactatgaaatggaaagtcttgcagtgtaagtgaaaaaaaacaaaggatgaccatcgttttatttagacgaagaggctggttctgtgtatagaactgcacgtttgacaattgaacaaaga

SEQ ID NO: 134206 - DNA, 182 bp, Glycine max
  Clone ID: PAT_MRT3847_92193C.1
tgcttaaaataaaaaggcaggttgtaaaagcatgcttaagaaaaaggcctttgttcaacaacttgagtcgagttggattaggcttaattagttggaacaagagcctcaaccggctcgaacttaaggcatgttcttgggtggaggtgcactcttgggcggagagcaaggacttcctgtcacta

SEQ ID NO: 134207 - DNA, 428 bp, Glycine max
  Clone ID: PAT_MRT3847_92194C.1
gtcattcattttaaatataaaagtttttatacaatcaagtaatgaaaaacatttttagtggaattgttaaggaaattgattaattattctaaaaaaatttatatatatagttgcaattacataataatgttaagaaaattttagaacattaatacatatattatttatttaaggaaaatttatttgacttgcatctaaataggatgattttttctcttgggttagagattgtctttcaatttgctgagacatatactaattattaatttaacaaatttttacacacaaaaaaaagcacatcaatcctatgaattactctaaataggatatgtcaaactaaagaacaattcaataatttaatgtatttagaggatttactatttaattaaaatatttatttttcatttaaaaatcatatgtatattttt

SEQ ID NO: 134208 - DNA, 243 bp, Glycine max
  Clone ID: PAT_MRT3847_92195C.1
cccattcatacgtggtgttattactgctgctcttatcacttttcttatctctttagttctctcttcaccttgctatttctttatcttcttcttctgagacttgtttaagcttttcttccagtaacataacatcataatgtgtggtatacgagctgttctggggtggcctgatgactctcgagagataaaggtccacgtgcatgagctgtctcggagataggagcagcgaggccctgtctgtag

SEQ ID NO: 134209 - DNA, 279 bp, Glycine max
  Clone ID: PAT_MRT3847_92196C.1
aaaggatctttattaatttcattgagacgcatgggccaaagcagaatgttggcacgatattatttacagaagataatgattacaagactttagcttcatgtgtaattttgtcaatcagcgcatgcatagaagaaagaagaaccgctgcttttctcttgtgaggtgctgcgacttgaactatctccaaataagatttgattgctccatgaccactactccggagagaatttttttaggggttacgactcagctttccttatgctgggaagagtgcctgac

SEQ ID NO: 134210 - DNA, 493 bp, Glycine max
  Clone ID: PAT_MRT3847_92197C.1
cttccctatctcccgtacaggccgacaatgccatccctcatggagctgctgcctttggccgtggcgttcgccgctgtaatcggtggcttcctctggtacagcagcaacagcggtggaagccgcaaggtgctaaagccgactgagttccaagaattcaagctttcagagaagacagtcctctcgcataataccgccatctaccgccttgaacttccacgccctaccgacatccttggcctccccattggccagcacatttctcttgccgctactatcgaaggtcagccgaaagaagttgtacgctcatacactcccattacatccgacgaagacaagggccatgtcgacctcctcatcaagtcataccccaccggtaacatctccaagcacgtcgcgggcttgaagatcggagacacaatcaaagtcaagggccccaagggcgccatggtctacacacccaacatggtcaggcacttcggtatgattgctggtg

SEQ ID NO: 134211 - DNA, 478 bp, Glycine max
  Clone ID: PAT_MRT3847_92198C.1
aaacaaggatgcatccactgcaatgactcgagcactttaagcatcttctggcaaatccctcagtatgcatttataggagcttccgaggtttttatgtacgtaggccagttggagttcttcaatgctcagacaccagacggcttgaagagctttggaagtgctctttgcatgacatccatttcccttgggaactatgtgagtagcttacttgttagtgtggttatgaagatatccaccgaagatcacatgccggggtggatccctggaaacctcaacaaaggtcacttagatagattttacttcctcttagctgccttgacatcgatagacttgattgcttatattgcatgtgcaaaatggtacaagtctatacagctagaggcaaacactggagagattgatgagccagaagtataattagcatgagacgtcattcaaaggcaatggttacagcatatattaaaaaaaaaaaagaagg

SEQ ID NO: 134212 - DNA, 1301 bp, Glycine max
  Clone ID: PAT_MRT3847_92199C.1
gttatattgtgctcaatggtgtggtgtcctagcttgtagagttatttcatatatagcaccgttgcacttgcttagtggcctggtagtaatggcgctctttgttttgtctctcttattcttctcattcttaatggggagttccgagagtcagcttcaagtaggtttctactccaacacatgtcctcaagttgactccattatccgtgccgttgttagagacgccgttctctctgaccccaatatggcggctgtcttactcagacttcattttcacgattgctttgctcagggatgtgatggttcaattctgattgagaatggtccacaatcggagagacatgcatttggacatcagggggttagagggtttgaagtgatagaaagagcaaaggcacaattggaaggctcttgccccggcttggtttcttgtgcagacatagtggctttggcagccagagacgctgtagtcatggcaaatgggccagcatatcaagttccaacagggaggagagatgggttggtttccaatctttcgcttgcagatgacatgccagatgttagtgattcgattgagctactcaagaccaagtttctcaacaaaggtctcacagtgaaagaccttgttcttcttagtggtgcacatacaattggaaccacagcgtgcttctttatgaccagaagactgtacaactttttcccaagtggtgagggatcagacccagcaattagacaaaacttcctccctcggctaaaggcaaggtgccctcagaatggagatgttaatattcgcctagctattgatgaagggagtgagcagaaatttgacataaacattttgaagaacataagggaaggttttgctgtgctagaatctgatgccagactcaatgatgacatagccaccaagaatgtcattgactcctacgtttctcccttcagtccaatgtttgggccttcttttgaagctgattttgttgagtcagttgtgaaaatgggccaaattggtgtcaagacaggtttccttggagagattaggcgcgtgtgttcagcttttaattgaagtaaatatgcaattaatgatcaattggtcataataaaaatgtatggcttctagataagttattttttgagtggaaggcttctgcacttcattatatctattgttattgtgtaattcaactcggtaatgtgcacttcatatgtgcaaagtcccacacctctcgcttgttctgttagagcatgttctctggaaattatttatgatgttcggttttgagtctgttagagcatgttccatggaa

SEQ ID NO: 134213 - DNA, 506 bp, Glycine max
  Clone ID: PAT_MRT3847_9219C.1
gctcggaattcggctcgagcttcgtttttcacctaaaatcattctttttcctgatttatgatggatgtgaaaatttttttcaatctctcttattggggattgggtatatcaatcggaaacggaagacgcgtacgcagatgagttggaaacgactggaaaagcgaaaaaaaagcaccgaaaaacgttgcgccaccttgattactctctcgcggaagacaaaggctcggtaggataggttggtccttgagctgcttgtgtcagcacaaaggagagttgtattgatccctcaaggaacgattcagacatgggtgactcagacaaatgcgggttgtatatcgaaaaaatccttcctgcctagttgtcttaggaaaagtttatgagggatccacaatcgttcacaacattcctttgttgtatgataaagtcaaggttggtggttgaagaggttagagatgcagatactctcattcctgtacccactgaagaggttaaggtcatagagcaga

SEQ ID NO: 134214 - DNA, 649 bp, Glycine max
  Clone ID: PAT_MRT3847_921C.1
cccgcgtccgttttggtaagccaatcaaattggacacctaatataggaatggagagggcagaacaaattggaggaaggcaaagctgtggccacagtcctatccattggcacagcaaatccacccaatttcatccttcaagaggattatcctgacttctactttcgggtcaccaatagcgaccatttgcaccgcttgaagcaaaagttcaagcgcatttgtatgtttctcatatttgcatcacattctcttgcatatatttttctgataactctttgaatgaatgcatgtgtttattgttctatttcataaatacttaagaaaaacgtaaactatattaatcttttcgtaagataaaatcaacttatgtatcttaatttttttagaaaaattattaaagaagttaaatgaaaacaacttcttataaaagttaacagctcaagttaattttggcttacagaacaaacttggttcattttttttttaattctcttttctttaaagttttaattacaaataaatttaattaaaattacctaagaaaatttgtatttataaaaaaaaaataaaaataattagtatattctgtattggtaaattactttaaactaaatttaaaagaccttttgctatctattttatatataactg

SEQ ID NO: 134215 - DNA, 585 bp, Glycine max
  Clone ID: PAT_MRT3847_92200C.1
actagacagcgtaggattaaacatgatttatgactgaacattttaatgtcatttgatccatgtcacaggaaatgacttggttgttgttcttccaagagtgctagattttattgttattacttgttaagttgaaatatggttaccaaccatttttttctcaagttttcttgttggatttcaaatattttgctattttaagttattaacattttgtgagtgctatgtttcaatgttatcacttattaagtaggaatatgctcaccaagctttgattgttgaagattcttgctggctgtaaaatctttttttattctacgtaattaatgatttcatgagagatctctgacatgccattcattacacctctcaacaacaccaagggaactatgaatttaggacatacataatgtcagatgctgtttatctcttcttgctttcagaccattttcagggcactacatttatgtacttgctttcagaccattttcagggcactgcatttatgtacttgctttcagaccattttcagtgcattacatttttgtagagaggtataatgaatgacaagagtccagattggaagca

SEQ ID NO: 134216 - DNA, 252 bp, Glycine max
  Clone ID: PAT_MRT3847_92201C.1
ggctagaaggattttggtcggggggtaattggaattccccacccttatcggaaaagtttagtgtaaatttcccaatgcattaaaattgcgggggggggggacgaaatataaaaagttaacttcccctgcctggaaaaaaaattaaaaattcccaaaaaaaaggggggataaacttactcttggggttgggggggggggacattgaacccacttgaactttaatcctcgggagcagacccgtgggcgaaccct

SEQ ID NO: 134217 - DNA, 475 bp, Glycine max
  unsure (1)..(475): unsure at all n locations
  Clone ID: PAT_MRT3847_92202C.1
gtactcgcgtccggaattctccgggatcgatcccacgccgtgccgtacctggcgagtaagaccgacagtaaggtggataccttaacatggtgtgagcgtcaagaaaagggcgtctaggggaaaagagcaccaccatcagttcagttggttaccatgttccgtaagtattgagtagttacctcgcagttagtaatcctatggctttaatagcnnatttccctcttctcttcaaacgccaaaactctcggttttaaaattatcgtcactttgtttgnngcggttcagctatctgaaaccgggccgaaagggggtgggcccattcccagaaaagcgaagnnccggatanntggatcccnnncagcagcngtcccgtgtagatgtcaggactccgggtcaaaccgttaaacgngctccnnngtcacgccgctttggcttcttctttcgcnncgacggccccgtctaattttgtggtctg

SEQ ID NO: 134218 - DNA, 314 bp, Glycine max
  unsure (1)..(314): unsure at all n locations
  Clone ID: PAT_MRT3847_92203C.1
ttgggttttttttttgtttttttttttttgggaaagccgccatcctttcgctatgtttttttttctcgggcttctttgaaatcgcttcggtagacgcccctcggaaaacatcgggctaaaacttattccgccaaaaaaactttctctttcctgctggagngaccaaacggatacgaatagtgggagtagccctacaccgacaccggttttaaactttttttgcagacattcattcgccccgataggacctttagggccctgtaccgcgtaatctcctcttaggtgaccctacctgaggactgctgcctcctatc

SEQ ID NO: 134219 - DNA, 1186 bp, Glycine max
  Clone ID: PAT_MRT3847_92204C.1
ggaattcggcacgaggctttgatcagttctatcaagatcgtgattctgagccgatgatccctactgatagccttaggtgtttgaacaaagcttgcataaaaaatactgggacagtctcaaaccctgatgtatcagtttcagatccgtggagccaatgcacagtgggacaagtagagtcgctaaaatcattggtcagactcctacctatgtggtcctcgggcgtcttgatgatggtgtcccaaggctcattctctaccctccaagcaactaccttggaccgaaggttatttggcaatttcaagatgcctgcagggtccttcaatcttatcatgatattgaccttatcaatagtcattcccttgtatgaccgcataatggtacctctactagccaaatacaggggcttgccgaatggattcggttgcaaaactcgaattgggataggattgttgtttgtatgcgcagctaaggcaacatcagctgtagttgaaactatgagacgaaatgcggccattgaacaaggctttgaggaccaacctaatgctgtaattgacatgtcagttttttggctgtttcctgagtttgttttgcttggaataggcgaggctttcaactcggttgcgcaggttgagtttttctacacttgtatccccaagaccatgtctagttttgcaatggctcttttcactcttgaactagctgctgctaatgtagtggggagtgtgttagtgagcattgtggacaaggtcactagtgtaggagggaacgagagctggatagcaactaacattaacaggggacatctgaattactattatgcactgctcacttgcttaggtttaattaactacctctactttcttgctattagtttggcttatggtcctcctcccgggcaaaaacttaagctagaagagaaatttgattgcaggaagttacctacttcctagattattctttatacaacatgtactgtaaacgcctgagaaattgtggttttgtaagttgttttatctgtgaaattaataggctaaatgtagatctgtcctaagagttttgtgatcttgtacagtagaggtatatatgatgtaaaagtggaatgaaatgaatgtatctttcccacgcctaatactgccattgtagtggaaacttttgcatggtaataaacttaggtataccattaaaa

SEQ ID NO: 134220 - DNA, 467 bp, Glycine max
  Clone ID: PAT_MRT3847_92205C.1
gcggcgccgccacaaaaacaaagattgggttttgacacaaaccaaagaagaaacagagaggggggaaacacgcaaaaagacagccacacccacaagaaaccaagaagggaagacaacccacacaacccaagccgaggccccagacagagggccccacaacacccagggaagcagggcacccccccaaaggccaaaacagccgcccgaggaaccaggcccccccgaaggccagaaaggggacacccaggccgaagacaaaaccccccacaaggaaaaaccccagccaggaaccgccagacaaaagggcaaaacacgaaagggcccaggacaccaggaaaagaaccgggacaacgccccagggcaagccagcgccaaacagcgcgcagccgccccaaaagaagcacccctccgcaacccagagaggcccacccggaaaagggaccacaccaagaacaccccaccccacc

SEQ ID NO: 134221 - DNA, 168 bp, Glycine max
  Clone ID: PAT_MRT3847_92206C.1
cccacgcgtccgtgcggatacgacagaaggcggcacgggtcagtttgttgatcacgataactaggtacagtgtgaagaaaacgacagaacgtgttttcttcgatactacaactttaggagcctggtgatgcaatacgaccgatatgttccgtttccaaatgaccactg

SEQ ID NO: 134222 - DNA, 453 bp, Glycine max
  Clone ID: PAT_MRT3847_92207C.1
ccgggggaaaagttgggcccctaaggccacataacaaaaaaggttaacctacaaaccgatcaatttttttttactggacaaaaaggggggaatggcacatccttgtaagccttttttttttcaacagtacctcatttccaagaggaaaaaaaaaaaggatttttaacactttgcattttgataaaaggggaattgaaaaatatcccccttaaaaaatttttttacccggaaaatttcccagccggccaaaaaaatcagtcttccaaaacccaaaaatttcagggaccgggtttccaaatccatcacctccaatttaacaaaaaaaggggaaaaaaagtttaacaatcaggagccatcaacatttgggttgggaccatggccatcaaaaagccctgtatatatttgggggggatcattgggattcacttttttcaggaacttccttttgggggg

SEQ ID NO: 134223 - DNA, 222 bp, Glycine max
  Clone ID: PAT_MRT3847_92208C.1
ataagggttcccacacttgtgcaccatatgatttaacacactaaagaaccttaatgggcattgctttaatattcacataaggggaaagagtaacttatttgggggggtgttacaaaagcttctgcgacggggatttaacttggtttcatcggggggggggagacttctaaaccttttttttttctccctctatacaaacaaaagtgaagattagcattcatg

SEQ ID NO: 134224 - DNA, 1209 bp, Glycine max
  unsure (1)..(1209): unsure at all n locations
  Clone ID: PAT_MRT3847_92209C.1
ccaagcgtccggtgatagtgaagaatctcatttccagcttccattatcttctcatctcaatcaggggggaaaatgagcgggcggtcaagccgcacaatttatgttggcaatcttcctggcgacgttcgcttgagagaagtagaggatctattctacaagtatggtcctattgttgacattgatttgaagatacctccgagaccaccaggctatgcttttgtagagtttgaggatgctcgtgatgctgaagatgcaattcaatatcgagatggttacaattttgatggttttcggttacgagttgaacttgcacatggtggacggggatattcatcatcagtagaccgttacagtagctatagcggtggcagtggtagccgtggagtttccaggcgttctgactaccgtgttctggtcactggattacctccgtctgcttcatggcaagacctgaaagatcacatgcgtaaagctggtgatgtgtgtttttcgcaagtcttccgtgagcgtgggggtatgactgggatagttgattataccaattatgatgatatgaaatatgctatcaggaaacttgatgactcagaattccgcaatgccttttctcgtgctttcatacgggtgagggaatatgatcgaggttattctagaagtcctagtcgtgattcaaggaggagctattctagaagcctcagccgcagtccatgtatctcacgaagccgcagccatagccgcagcagaagtcatagctatagtgacaggagcagaagttggtctccgaaaccaaaacactctcgacgttcaatatctctttcaaggtcagtttctaccaagtctgatacatatgcagttttgtgctctgtgctttgaatgttgaaattttaaagtttggttaatgtcattagtgaatgagtatccctgcgttattgtaactatcaaaaaagggggaggggccatggttgaagggaaccgcagcttggccactaaatatacaatgttcattagggttgactcttgttttttagatgtggccttttgcggcgacctgngaactgcatgttaggatcttgatggcatgtggtgctcaaacgccaacttttggtttgagactggatgagttgcaatctaaaagctggatcaccgtctaaatgccattggttagcaaccattgcaaatcagcagtgttacaattcaaaaaactaccacata

SEQ ID NO: 134225 - DNA, 543 bp, Glycine max
  Clone ID: PAT_MRT3847_9220C.1
cgcactacaagtggtgggtccctcttgaacgacagtcttgatgtgaagctttggctctgccttaccttgataggttaaaccacaacaataacgcctgtgtggttacgtactcacttcacattgtgaacggccaactttgcggcccaatggccaaccacactttgcttgatgcgcatgcggtaggattcatcacctagcaagagcataataagctactatgaacatggaaatctcacaagtgctataggtaaagtgcagcgcatgcgtatgtgctagtgtgcatgatgcagtgtgcttgtgatgctcgtacaatagggagctctcctgcttacacatgagcatgaggacctccctggtatagaggataaacactacctcaatgagcctggtgagatctactgatctggaatggtatacacattgaaagagccatagtcaactgtacattaactggaacagtacattgtggaaaatgaacatgaggggacccaggctgtataaacgactcgttctgctaggacggatccagtataaccaaagtct

SEQ ID NO: 134226 - DNA, 360 bp, Glycine max
  Clone ID: PAT_MRT3847_92210C.1
gcgatatccattcggcgaacactgaccagtggtttggcgttggagatgagagaaaatgcattccaaactttggattcattgaggaacccattaggatggaatccatacttgtgccgatgaaagactactttttttacggctagtgacgaaaagaagaggctcacttggggctaagaaacgatcagtagaggtaatgaggcatagccttgatgcagagaatgtctgcggcgaggtctgacatgtcatggggtgacgcaaattaccatcaagagacattgctaaagtgaggagtggctatgataagtactaagaaactctgtgcatggtatgctatatacttgagactcagacttacataat

SEQ ID NO: 134227 - DNA, 360 bp, Glycine max
  Clone ID: PAT_MRT3847_92211C.1
ttttcgccccggcccccccccccccccttgaacctccaaaatagcgaaaaaaaagcgtgatattagaggtacatagtctacgccgtattatgcggcataataatactgacaactaggtacatgatattacttgagtgtctgttgctataatggaagcacgggggctgatggtgattaacatggagtttgacctctcacaaataatacgcttgttggcccctgaactttgtctcaataggactaactttctcaccactagacctgaagttttgaccaatctcttgcctgccggggttgaccttacaagggaaaacactatccttatggcgcatatactgaaccttccgattaagaaaaacc

SEQ ID NO: 134228 - DNA, 281 bp, Glycine max
  unsure (1)..(281): unsure at all n locations
  Clone ID: PAT_MRT3847_92212C.1
ananctcttcgttccttcgattcattccatttcttccaaaatggccaaagacccagttcgcgttntcgtcactggagccgcagggcaaattggatatgctcttgtccctatgattgctaggggagtgatgctgngtcctgaccagccngtgatnctccanatggttgnncttcctccagcagcagagtcacnganngngngtnnaaangngattggnggangntgnantnccngttgcttcaaaggngtngnacctcacaaccgcngtgggtgaggntgca

SEQ ID NO: 134229 - DNA, 497 bp, Glycine max
  Clone ID: PAT_MRT3847_92213C.1
accacgcgttttgagaatacagttcttacatgtcccacaaacggtggcgatagcaaaaacgtctccactcgaccattctcactaactctagacccgtggacaatattgacgatatacgagcgtccatcaaattcatcaagaactcctgcaacatcacccaggacccaagcctgagcatccagtacgtatacgtgtacgcctcgaccatccagtaagaccctgacgagttcgatcagacagccctgattcctctccgtcaacctcaccgaggccacaataatctttgttgcaaaatgcaacaaattagaggccttaaatcgggacacgagacggtcttgaaggaatgatgctcaataaattcagcgacagcggagagcggctcaatcgatcgctgaaggaactcaaattgtgcacagtgaagggtgaggacttcacgtaggagattcacaacgtagatacgcgggtgagttcgaatttgaccgaagagagcactcgcg

SEQ ID NO: 134230 - DNA, 445 bp, Glycine max
  Clone ID: PAT_MRT3847_92214C.1
gcaaggtgcctctttcaaattcacttctcctcttctcacctaatcaaccttctctctccccctctcgtcaaaaaccagagcttgctacgtccgcaacaacccgttcatttctcttctgagttctccacacgaacacaacacacacagagaaagagaatcagagagagagatggtgaacagtttatacgacgaactactgcaagaaatcttgcagaaactcccctcatcctcctcctcctctgtctccctcgtctgcaagcgctggctccgcctccaccgttcctccacaacctccctctctctccgcctcaccacccctcatttctctctcatcccttctctctcctcctttctctcccaccacccttttctctcttccctctctctctccctctacccacccctctctctctccccacacctgctctcttttatcactcccttt

SEQ ID NO: 134231 - DNA, 433 bp, Glycine max
  Clone ID: PAT_MRT3847_92217C.1
cacccttgcattgaaaccaggcctggtcttggcgtggctttgattggaattgacacacagtggacaggaaatcacgtgaaccacccgaagaaggatcacagtcacaagactcatagtgagataaccagacctggataactgcacagaacattgtgggagaaaaactgatcacagaggactgtttcctatgctaattacaagctggttccaacgaggaagaagccttgatatacgttgctggcgttgacatcagcttgtcaaaggatgacccatcacgggcatgtggcaccctcgtagtcttggacttccacactgtctaagttgtgtatcaagactactatttggccactcttcaagtaccttatgtgcctggctgtctagcatttagagaggccccaggtcttctgtagcttatagagaaaatgaaaaggag

SEQ ID NO: 134232 - DNA, 277 bp, Glycine max
  unsure (1)..(277): unsure at all n locations
  Clone ID: PAT_MRT3847_9221C.1
agagcangaccgcgcaagcacgccttccttaacctcggattccgcttcaagccctaatttcccctgcttaacttttctccctttggagtttattcttgaggtccgccgaaagtttttaaattttgtgaggttcattttgaagaaaagggccaagcttagttgccaagttggaatcaacccatactccatggaatggactggtttggccaataagttactgagtaagggcaacgatattctgtgttgcgattatgcttgttttgatggttttgattac

SEQ ID NO: 134233 - DNA, 437 bp, Glycine max
  Clone ID: PAT_MRT3847_92220C.1
aagaaattgaggaaattttttttgaggaggcctgaaaaaaaaaccccccccaccctgtaggggaaaaaaaaaaaaagaaaaggggggggactacaaaacatgggggaaaaagaaaacgaaatggacaaaaaaaaaaacaaccaattggggaggaaaagcctggtgttttaaacacgccaaccactgatgagtagacaaagagtaatggttttcagcataatggaagcaggcgcaaaaacctacctcttttagcagcaaaaggcgttgtgccccgcccccccgactatgctagacacagcactaggctcaattctcatcttgaaaggtgtgtcatcatccatggcaatttatttctttcatgagatttagttttcttggagaagaacaaggtttttttacggcccccctcggggaaaaaaacggaataatttttccgg

SEQ ID NO: 134234 - DNA, 309 bp, Glycine max
  Clone ID: PAT_MRT3847_92221C.1
cttaccgcttaattgtccatttatgagttcctccgattttcggacccatgaacttggtatgaaatcacattgatagcctctactagtgtcctagctcgcctaagatctagagtcgcctcaattgttagtgcttggccttccgactgacacaaatcagcttgtgctgtttaaagagcttgctgtgcctactgtggatcaatgttactaccgtttttcggagagatactaaaacagtgatatcacttattgtagattaaagcaaaaccgcccatcagagccatctacaaccatacttattattaaagacca

SEQ ID NO: 134235 - DNA, 270 bp, Glycine max
  Clone ID: PAT_MRT3847_92222C.1
acatgtaattttggttattgacaggcattattcgaaatgagtcaacaaccatcgatagatacagagtagagattaacttacatgaaaagggatcttttaaaattatactctattctcaccattcattttttaaaatctgttataaaaaagaaataataaagataaaaagccatcctaaaagtctaagcagattgtcctatcgtctggatattactatcttcaggtggatatggcgagccagcagaagggtggagggccaaaccatgatta

SEQ ID NO: 134236 - DNA, 466 bp, Glycine max
  Clone ID: PAT_MRT3847_92223C.1
gcaagcatcgaagagaatcaatgcaatactcattgtagatttgatctactttttgggtggccaattgttgagtgtttttttgaaaaatttatgagatgcgttgaatcctataaatgttgtaagatgctgtacaggtttttggataatacacctagcctttggaggattgtttggaagagctagagccttgtattttgtctgtttgaagattaatatctgttgaaatagacttgacatcaattttgaggccttttcagataccttctttagttattggaccaatttgttacagatgatgaagagtctatcttatttgaggcttgcaggccggtggcattgttaaaaggtttatgcatcattaagaaatccttaggctgtgtctgatgtattacattaaggaagacctgatagtataagcaaacagtatcaagccttactaggtgtttggcacatcaaagtgacagta

SEQ ID NO: 134237 - DNA, 480 bp, Glycine max
  Clone ID: PAT_MRT3847_92224C.1
caacccaccaatcaaggctttaattaaacccaacactagccattctggaaaaagcctaagcctaagctttaaacacacatgaaaggggcggggggggaaaacgaaattagggccctaaggcgggcttggaaaactttcagggccagaaaaacaagacatcaggattaggcggacatttccttaaccgggggttcaaaccaccataagcaaacggattttggaaaactccaaccacaaagacggactggtaactcacttaaaggctttttgggactggtaactaaacagggaaacagcccccataatttttggatcccggagcggaaaaataatggggggaagaggaatctaaccggtccccctaaaaaaataagaaactgggggaagccgaagggaaagaccatccaagggggaggagtttggaaggctcaaccctttctaattggccaaaggcaatagacatatgaggcacaaaggggg

SEQ ID NO: 134238 - DNA, 782 bp, Glycine max
  Clone ID: PAT_MRT3847_92225C.1
ggctcgagcatcaatctcacactcacacaaatcagaattcacacccacacaaacacaaacacaaacacacaatctctgaattgaaacccactatgttgatcaaagggaatcaaattaaggcaccaatattggtcctcaatttcttccttgtcctaatttgttccacatcttcttcagtcaacggcgttgaatcaaggaaacttgatgagactccagtgcctgccacaaacggcactgaagaaaagtgtggatcatgtggtggtaccacttatccatcgccaccgccaccagtactaccaccaccatcaccaccaccgccatcgccaaagaaacaaccaccctctcagtattgtccgccaccaccaccatcgtcgttcatatacatcaccgggcctccggggaacttgtatcccgtcgacgagaatttcagcggagccatcagccaccgccaccgccggagctttgccaccatgttgttgccacttttggttggcttgtttagcacgcttgcgttttggtgattcgcttgtgaagaaggtaatagtaacgatgtatcattcagatcattctaaacacaaatacacaatggaagaattttatggtttatgatgttattgttattgttatagttatgaatatcaagattttacgtatggtacggcacagagaattttgtaccggtaattagtgtttgacaccatgctctgttcttcttttttatgcgatcacaatctctcttgtaattctctgtcaaatttataaagaacgccttttttgaaaaa

SEQ ID NO: 134239 - DNA, 465 bp, Glycine max
  Clone ID: PAT_MRT3847_92226C.1
ttttttttttttttttttaccgttcatcctcacttggattattttttgtttcatgggtcacatatttcaaaaactatgaatcacttagtaagaaggggaaaccccgtccttggaagggttcctcttccggaaactcttaaagaggaaaggacacaaggatccctgtgctcggggggccccccagggcaggggacacatattaacgcacttagaggggggggaacaacggggaccacctatcccgtgccccccccttcaccagggccaaaaaaaaaaaagggggaaaaagttccccggggaaaaccccaccgagaaaccaaacatcctttattttttaaaagagaaaaaagtttaaaccctccccaaggaaaccggggaaaaaaaaacaaaaaacctttttttttggggggggggaaaagaccccccccccgcggaaaacaaggaaaaagttttttagggggcccc

SEQ ID NO: 134240 - DNA, 402 bp, Glycine max
  Clone ID: PAT_MRT3847_92227C.1
actgagcatggtctagctatgtcgatcgaactgtccaaggtcctgtcacgtggccgcccgggaatacgtggggatgtgccccagcggggcggcgtttttggggctttttaggagggggaaggggctaggagtatttggaaacgggtacatgggcggcaggggccggctagtgcaaacctcgaattgggcacgggccgtagaccccgcaggggcggcagcccgctggctgccacgaagaccaggaacgtgcacacgttggttaagatacccagtatggtgacaacgcgtactaccacgccttagcatagtactgtaaagcgtaccagtgtagtacttgctagatttcgtatggtgctcagcacccgcacagtggctaagtggttaatgcgaaacgtggtactg

SEQ ID NO: 134241 - DNA, 922 bp, Glycine max
  Clone ID: PAT_MRT3847_92228C.1
ggcatctatctgtgacatatgatactcctgataccgaatctgatattaagttgctttgctcacaagttcaaagtgaccttaaacaagggattgcaggtgctgtgcctattccctctgatggtgcttgtaaaagagcagtcattgatgcattggtaactaatgtcgaagctatgattaaagcagatagaaagatcactgccttgaaagaattgcagggtcatatgtggcgcactggttatgagaataatgaattgaagggaatagtttttgatgatgttccagaagctctagaaaagtggcataccttgggcataaaggtatacatatattctagtggcagtagattggctcaaaggctaatatttggacatacaaaccatggggacctaagaaaatatttatctggcttttttgacaccacagtagggaacaaaagagagacacgcagttacgttgaaatttctgagtctcttggtgttgataagccatcagatattttatttgtcactgatgtttatcaagaagctacagctgctaaggcagcaggcttggaggtgataatttctgttcgaccaggaaatgcacctctccctgaaaatcacggcttcaagatgatcagttccttctctgagatctgaaagtagatgctctgagacctgaaagtagatgcagtcatctgagactatgttaaagggaacatggtagctacagatattgtaacttccatttcaaatgaaatatattgatggagctaatccaagttgcagctttacttgccttgtttttcagataataagaaaaagtaaaacctccttaagtattaatttgaaaaaagtttgagatcagaaaatgaagaaaaattgtaaatttattttggaatatgttttgaaaacatataaatagaacccctgtgttctccctt

SEQ ID NO: 134242 - DNA, 484 bp, Glycine max
  Clone ID: PAT_MRT3847_92229C.1
gtggcagtagattggctcaaaggctaatatttggacatacaaaccatggggacctaagaaaatatttatctggcgtttttgacaccacagtaggggagtgtttcactttatctcaatgttgctttttgacaatgcctgtctgaagtaacctatttcatccaaaactttttttgcaggaacaaaagagagacacgcagttacgttgaaatttctgagtctcttggtgttgataagccatcagatattttatttgtcactgatgtttatcaagaagctacagctgctaaggcagcaggcttggaggtgataatttctgttcgaccaggaaatgcacctctccctgaaaatcacggcttcaagatgatcagttccttctctgagatctgaaagtagatgctctgagacctgaaagtagatgcagtcatctgagactatgttaaagggaacatggtagctacagatattgtaacttccatttcaaatg

SEQ ID NO: 134243 - DNA, 248 bp, Glycine max
  Clone ID: PAT_MRT3847_9222C.1
gggtctttctgtataattttttcctccataacaaatcaaaagcatatgttccattcaggccctttccaacaagggaaacaacctttaatccctggaaggccaatgcttttgttacactcaatttaaatttacaaatgtttgtgtcgttaatgcggcgaagatgatccaatacataagaccggcctaagggggggggattttcccaatttcaaaaaccggggccttaaaaaaaaggacccccccctttt

SEQ ID NO: 134244 - DNA, 407 bp, Glycine max
  Clone ID: PAT_MRT3847_92230C.1
cccacgcgtccgcccacgcgtgggcggacgcgtggggtgaagtttgtttattctgagaaggaagagagaatagaacgccatggatgagatattgaacaaggtggggtcttactggttcttcaagaagggcagcaagggatttaactctggcggcgatgatatcaacttactgtgaaccagtattgaagggggaacccaatgggtggtcaacaaggttaaagggaagatgccaaaggcgttaacacgaatgctataaggagtatgagactatccatatgaatctttcctctcgatgcgacacactacgaatttaacgcaaagacacgagagctcgtggtgtacacttctcaagtgtgtgaggttggctacacggattcgtcagagctgcgtgtctccaccagcgtgag

SEQ ID NO: 134245 - DNA, 222 bp, Glycine max
  Clone ID: PAT_MRT3847_92231C.1
tcggttcgggaaaaaaaaaaaaatttattaaaaaaaaaaaaaaaaaagggccggccgccacttagtgacttcgtcaccccggaattaaattccggcccgtgccttgaaggcttccaacttttccttatagggggtcgtttaaaacctggccgtaataatggccatagctgttccctgggggaaatggtaatccgttaacatttccacacaaaatacaacccg

SEQ ID NO: 134246 - DNA, 258 bp, Glycine max
  Clone ID: PAT_MRT3847_92232C.1
atttgttgttttggaattgcactatacataatacgaagagcagttcctggttgataggggagttattaggaagtattcaggatagttggttatttgtaatgacaattatgttctttctttttatggtaaaagataatagttggacctggaggataaaaaatgaaaccaagtatggaactaccttttctagctttagcatcgattgatcaatcattgacattcattttatttttacagagttcatctagatcaccaagt

SEQ ID NO: 134247 - DNA, 198 bp, Glycine max
  Clone ID: PAT_MRT3847_92233C.1
aacacaaagagaaacccgccatttgttcatcaaaagaaacatcccttaatcaaagcccgcgagggagaccaattcgaacttgccaaaaccccccctaggcccaaaggtagagaaaaaaaaaggcacgcggcatacaggaatagcgccttggagggacccaaaagggagaaaggaagaaagcttttatgggaagaaaaa

SEQ ID NO: 134248 - DNA, 233 bp, Glycine max
  Clone ID: PAT_MRT3847_92234C.1
accacgcgtacggccatgcataagagacgtttcatctaccagaacatgcacaattatatgggctgtggtcaataacatttaagcctccgtctatgtctatcatgagattgatgactcttaccagatccattgtcaataccttaaaagctgagattatacaccactgacgactcattcaactacataatgatgaaggctcatgtcactgctaagactatacaccatatgacatg

SEQ ID NO: 134249 - DNA, 606 bp, Glycine max
  unsure (1)..(606): unsure at all n locations
  Clone ID: PAT_MRT3847_92235C.1
ccacgcgtccggctcagttagcaggatcgttgcaagaaaaacaccagagagcaggtgtcctgcaatttcattagcagaagttcctagcaaacaagcaagaaatgatcatgaggcagcagagaagcttaagtttgtcatttatcaaaggcccaaagcattccaaaatggaagcactgatttgggaaacaagaatggtgcaccaaaaactgttgaagagagaatagaggaatataataaagcacgagcacgcatcttcaatggttctgtttctgcagattctgatgctgcaagtgttttgggaactctttgcactggcagagatgagtcagtaaatgttgaaccttctgttgatgaaatcaaagtcagcacgatgaacaaccgttccagagttgctgttttcaaggatactcaaaaggatcgcagtgacccagattatgatcgaaactacaaaggtatgttaggagcccagttcctgacttcaacttgagcccaggtgccttcaactttgtgcctcagtttatgcagntatggcgtggttatgtgcaatcntctggcatgtctacaaaccagcctgctgtctactttggccagcctgatctaacaatg

SEQ ID NO: 134250 - DNA, 369 bp, Glycine max
  unsure (1)..(369): unsure at all n locations
  Clone ID: PAT_MRT3847_92236C.1
taggatttaaacctacaaactaacgacctaccttacacgtcgacaacatggctggcaccggcgctgagttcccttgcaccctcaccatcaacacacctttccctacccaaccgcctagccgaaacaactctcaaactcgctcgctgttgacgaagagctatcgcctcttgttcgtcgctctttctcccttgtcaatgctgccggngaagatgccggaagcgatggggagaagacggtcttgaggaccgagtacaaagccacgacaaaccgcatgctgcgcgtcgctgtgaacggtttcttcgagtctctcaatgtcgtggtccaagtcatggaagagtntgacgtggatgtgctgcacgagaacggact

SEQ ID NO: 134251 - DNA, 199 bp, Glycine max
  Clone ID: PAT_MRT3847_92237C.1
tacggctgcgagaagacgacagaaggggtagttggttttatgaaatgttgattgtgaataagccacggcaggggaaaaatcggccataattgggtcgaaaaagggttggatttttgggaaccagggggaacagagtctggatgccggaaattggcaggaaaagttttaacggcagcttgcaccattgagtcatgcttta

SEQ ID NO: 134252 - DNA, 106 bp, Glycine max
  Clone ID: PAT_MRT3847_92238C.1
gcgacgcacagcgtcagaacagaggcggcatcagccacgttcccgggcggggcaccgaaagagcatcgggaatgcccaggaggacacaaggctagacgccggcagc

SEQ ID NO: 134253 - DNA, 1625 bp, Glycine max
  Clone ID: PAT_MRT3847_92239C.1
acgcccacgcgtccgcccacgcgttcagactataacaacagccaagcgcattggcctatatatatcaacacaaaaactctttgattcagaaacatacatatatattcacacaaatatccatttatatatacatatatatagttctatatggcaatgacaacggtggtgtttgtcttgtgcatctttgtagtgttgaatgcaagtgcctctgatgccactcgcttattgctgaacaaaactgcaacaggtaacgtgtccagagagaagattgagagatacttacttgaaaatggactcggccagacaccccccatgggatggaatagctggaaccactttggctgtgatattaatgaaagtttaattcgagaaacagctgatgcattggtgtcatcgggccttgctgctttgggatacaaatacattaatttagatgattgttgggccgaacttaatcgagaccatcagggaaatatggttcccaaggcttcaacatttcctgcgccaattaaggctctggctcattatgttcatgggaaaggtttgaagttggggatatattcagatgcaagaaatcaaactttcaagaaccgtatacctggttcactattatgggaagattctgattcaaaaacatttgtgtaatggggagttgactacttgaagtatgataattgtgaaaataatggtatattagccacagaaaggtaaataccaatgagtgaagcttttttagaaactggattgccaatcttcttctctatgtgtgaatggcgatggcaagacacaaaagattaagctaaaactatgggaaataacaagagaacatcttgggatattgaagttaattggaatagtatgacttccatagcagatgcaaatgacagaagggcaacttatgctggacctgggaggatggaatgatcctgatatgctggaagttggaaatggaaggatgaccacagaagaatatattgcccattgaagcatatgggctttagcaaaggctgctttatagaaaggttatgatattcaagcaatggataataccacatatgaactgataagcaaccgagaagttgttgcagtaaatcaagacaaacttggaatacagggaaagaaggtgaaaaacaataatggtttggaggtgtggacaggtcctcttcgtggtaacaaggtagcagtgatcttatggaacagaagttcatcaaatgcaacagtgactgcatgttggtctgacattggcttggaaccaggaactatagttgatgcaagagatttatgggagcactcaacgcaaacatcggtttcaggaaaaatatctgctgaactagattcacatgcttgtaagatgtatgtcctgactcccagaaggtattaatttcgagtggcagagaagaagataaacacacaactatattggcaaaccatttaaagctgcaggaaccacaaataaagcaaacagattatttttttttcaattagaaagacaagtataatgtataagactataagttatacttaatgtataagtctttgaccttccggttgtatttgcaatttggttgcactgaggaccactttattttaaggaaaaaagtttttcatgtttcaaaaaaattaaa

SEQ ID NO: 134254 - DNA, 571 bp, Glycine max
  unsure (1)..(571): unsure at all n locations
  Clone ID: PAT_MRT3847_9223C.1
cttggttttctctagagcggccgccctttttttcctttttttttnggcccctngcttcgttcccttnnnttcttccccccgaanctgccattctgtttccctcgcntgcccttctccgctctccttctttcgttcagcgnccttcgttccccaattactncctccctctcnntcttggcccctcttggtgcgtgcttttactttcattacttcggtgggcttnnttccttnngctcggtcggtcgtccggccccggcgcgctcctcttattgtgggtctactctaattctgtcggtgncnngcctgcgggtgtgagttcccttctcctcccgccttccccgggnggctttgtgtggctccccgattagagggacctcgggctcttttcctcttcgcccgtggnntgtcctcgaagctggcatcgctccgggcctgtgcgcctccacccccnccatgcctgaatttctcttcttgtgcatccctgttccttgctcttctgggcggccccttcgctggccggcccttggttcttctgccccggcccctttcccttgtggtggcgcctcctctt

SEQ ID NO: 134255 - DNA, 489 bp, Glycine max
  Clone ID: PAT_MRT3847_92240C.1
ggctcgagcttgatttcacaaaagcatgaactaacattttgctatttcaaacactctggggaacgtatttctttgctaataaatcttatccgatctatatgtatatttcctttataggtgttaaaaagcccagcgagtgatcataacatttttcttccgttaaatgttccagtgagacacaatcattcattcattcccaatgtcttggcccaacaacagggaaaaccaactaccagcgaacaagaccaccaatctcttgaaccacctcgtgaaggagctactctacgccatactggaccaccttgacaaagacccttgtgcccgaaagaccctctgccaatactgcaagtcctttcacgcgctcgaaggcacgcaccgttcaaacctcaagccacgccaactcgagttactaccacgaaccctccaccgatgccgattaatttacaacctacaactcacgctctgtacctgcgtccaccattacacgtt

SEQ ID NO: 134256 - DNA, 355 bp, Glycine max
  Clone ID: PAT_MRT3847_92241C.1
cttccgtcactggaacccgcattaaccctgcaaggaggttcggaccaactgggatcttcaacaaccaccaagcctgggaccaaccatggatttactggggtggacccgttggtggaacttgtgggggttgaatctaccattaattcctttttaaaaggttttgaattaaaggttttggattctttaagaaccatggttaatttaaaaaaaaaaaaattaaggttcttccattccttaattattaagaattgggccttgggcaaccaaaaccagaaccagggtttaagttaaggtttgtttccaggcccttttttttgggtttttttgctaacccgggggttgggggaaaaagcca

SEQ ID NO: 134257 - DNA, 283 bp, Glycine max
  Clone ID: PAT_MRT3847_92242C.1
aattcggctcgagacaagaagatgacactttatgagttacgcattatggctgcatatcgtagctatattcactgagacaaatgcaggcgctcggaaaataggagtggatgcagcatcggcttgcatagtatgctctgcaatatacagttcatgcgagaacaatgtcgttcacacatgggtactgcgtataaaggggcctgggtaatgtacaatggccaagccactgttaattggcataacctttggccttggagttcatgtgccgggcggttcacctcaacct

SEQ ID NO: 134258 - DNA, 309 bp, Glycine max
  Clone ID: PAT_MRT3847_92243C.1
ccctctagcggatcggtcgaggagtcgatcaaaccatgcggtgccatcagatgcataaggatgttgtgatggaaccttattgatgagtcaagtgactttatgtgatggaccacttaaagccattactgatttgcagggggacccatgactaaggggactgtctataaagttgaatattatgaggaattatttaatcaagttataaaataggtcacattaagctgaatgattaatggtcaattaatggtcactatagaatattgggaagagccctactaaactatttggaatggttcacgcatgcagttt

SEQ ID NO: 134259 - DNA, 291 bp, Glycine max
  Clone ID: PAT_MRT3847_92244C.1
gccacaaataaggccactcaagggaacaaccaaaggaagcaatttgcttttttggaagtcacttaataatgccaaaaagcaaagtgttattaatccctccccccaaccaaaaagatcggaatagcaaatgatgaacctagaacggcgagtcgaatcccccctctccagtcattattcatagtgaccaccctgctggagcggcagcatgccgcttaaactttattctacaccagtataccccgcgcataccccgttgtttaatacatgaagttgaacgtacgtaaattaatc

SEQ ID NO: 134260 - DNA, 317 bp, Glycine max
  Clone ID: PAT_MRT3847_92245C.1
ggacaaaaaagcaagcttctattgtgaaagaggaggaaaaggaaaagaaggaagaagaggagaaaaaggaagagaaagaaaaagagaaaaaagaaggtgaagaaagcaagggagaagatgctgaagagggtgatactaaaactgacatcaagcgaagtgaatactggccattaaggtcctacgttgactacgttgactacccttatgctcctcagattttcagtgatgagaacccaaatgcatgcactgtaatgtagatcagtctattgtactaactcggtattttttagtagctgatcaactgaagcaacttgtgc

SEQ ID NO: 134261 - DNA, 232 bp, Glycine max
  Clone ID: PAT_MRT3847_92246C.1
acttgctctatactagacagtacacacactagaagaataatggcttctatcctcgattactttttagttctctcgctttcttgctctcgtcttttcttcttatccgactgagtgaaccctataaaactaataaaccttgttgttctacccgttcaaaatgatggttgcacagggcaccattgggtcagccttcagaaaagaactcgtctaatgaaagtacgagtcctggtgg

SEQ ID NO: 134262 - DNA, 396 bp, Glycine max
  unsure (1)..(396): unsure at all n locations
  Clone ID: PAT_MRT3847_92247C.1
ntttattttttttttttttttttttttcttttttttttttttttttttttttggttttttttcaggccctcttaaaatggtgttttagttcccaagaaaaatgttttcctcactttggccagggggccaaataaaaaaatttcagagtcacgggcgcctaggcactcaaggggtaccaccaaacgcctaaatttgcctaacagggtgggggttgttttgtaggagcccaccaccaccggtggttctttgccaagtttcaagtagctttcccttttgcagcctaggaataggattagaactgataaacccgtgaggaaaattgagccttgtgccagatcaaatgtggttttgccaaaaaccgggatgaaagcaccccattttacctgggtttgggaa

SEQ ID NO: 134263 - DNA, 283 bp, Glycine max
  Clone ID: PAT_MRT3847_92248C.1
gatcatagcatcagaatccagtctcaaccgtctggcatcgctcaccagtcagtcccgtatgcatgagtctggaggcctctcgtagatgtcatgcacagaggacagtcccggatagaatcgcagccagacgctcccgtacctgctgtgaagcacattggagcagccaccacagctctgactcttgcgcgcccggggacagcagctgaagatcttaacgttcgtacatcgtggccgcgtcatccccacctgcacacgcatgagttgaagactgtgctctctcccc

SEQ ID NO: 134264 - DNA, 335 bp, Glycine max
  Clone ID: PAT_MRT3847_92249C.1
cccagcatggttcctggaaaaaaaaggcgaccacttcatagaacaaaaaattttgcttattgcgaaaaaaaaaaaaaaaaggaaaaaaaaaaaggaattcctgtttaagttatccctacccccaagggaagttttaatatggggggcagatccgttataacaatggcactcctaacttttgggacaccatccttccacaccaaacctcaaaattcaggttttgtttggcaaaattgtgttggaaaggaaactttgaaaaaaaatttctggttttttcgggaaaaactcagggggtctggctcaaccttaacggaagcccctttaaaagatgaaac

SEQ ID NO: 134265 - DNA, 511 bp, Glycine max
  Clone ID: PAT_MRT3847_9224C.1
aatccggctcgagtggaaacgaagcaaaatcctgaggcttctatggaagaaaagagttcatctgaacagccatcagattctcaaccaaagcccgatcatcacaaaagaaatcaagatgctctggctgcagcaaaagagcgctttctggcacgtaagaaagcaaaggaacaatgaaattttccctgcctttgttcagatgtttggtggttcatttggtctttagtttttcgtccttgatctaatatccatgaaccttgaatgccaaagagctttatctgttgaaatgaatgaagatgagatgattcgaggattacagcagttgggatggaaaaaagttgatgtcagctttcactcagcattctggcctttctttgctcataacaacattcatgtgaaaaatgaatggtttcacaatgctggtgtaggagttattgctcatgtggccgaaagcttaagacagctagaagcatcatcatttttgtctgctagcttgtaactagtgtactagtat

SEQ ID NO: 134266 - DNA, 294 bp, Glycine max
  Clone ID: PAT_MRT3847_92250C.1
acccacgcagacgtttattatattatatgaaatctgctttacaggaaaaaaaaaaaaaacaaataaaaataaaaaaaaaataatctgaaaaagcattaacatatgacaatccaactgaaaaaaaacaaacaaacaacggaaatgggaagactctaaaaaggcccaatttgaatgccggtagtcatacaacactatgccctgaacttaattgagaaagattatcttttgatatatattcaaattttacgattgcaagataagaatggcgaatggcacatgccctgaaaaacaaaa

SEQ ID NO: 134267 - DNA, 369 bp, Glycine max
  unsure (1)..(369): unsure at all n locations
  Clone ID: PAT_MRT3847_92251C.1
gagaagacgacagaaggggtgaatctgatgtggtatttgtgccattcttttcctctcttcgttataaccggttctcctccaaaactaatccacatgagaagaggagcatgaacaaggtgctgcaagaaaaattggtgaagtatgtgacggaacaagaggaatggaagaggtctggggggaaggatcatgtgatcgtggctcaccatccaaatagtatgttggatgcaagaatgaagttgtggcctggcactttcatactctcagattttgggaggtatcctacanacatagccaatgttgagaaagatgtgattgcaccttacanacatgtggttggatcctatgataatgatcagtccagcttcgata

SEQ ID NO: 134268 - DNA, 188 bp, Glycine max
  Clone ID: PAT_MRT3847_92252C.1
ttggggcacactgtcggcaacgcccacgttacgttccaaccgggacggggcgccaccaatttggcttccttacacaaggcagttcaaccgggtttccgccgattggaacctgaccctaactggcttaagtttggcttggaaattgggcctgtggacccttgggaaggccaagtttaaacaccggggcc

SEQ ID NO: 134269 - DNA, 337 bp, Glycine max
  Clone ID: PAT_MRT3847_92253C.1
tcggtctcggaatatcccgggctcgacgcgcacgcgtctcgctccgacgcgtctcgatccatttgtgtgtattatgttgtatactcggggaataacaatgtatcgagacttgtataggggtctattcttatgatggagtactacggtttatttggtaatgttgtattgtcgtgattatagtggattcgagtgtaaatgtgtgatcatggggatgtcaatttcgacattatttgtctggaatataatctcttggattataaagtttttaaaaataaaaaaaaaaatataaaaaaaaataaaataaaataaataaaaataaaaaaaaaataaaattaaa

SEQ ID NO: 134270 - DNA, 913 bp, Glycine max
  Clone ID: PAT_MRT3847_92254C.1
ctactgttttgccaaaggaagttgaaaatggagctgcagttgcttcagtggcagaaaattcagaggttcagcaaaaagatgtgaaaaatgataaggaaacagaagtctcccaccggggagtttttctccttggagagaatcggtgggaagaaccatcaagacttgttgcaagggatggagttgataagagcaagaacaaggatatgacaacaaaatgccttcaatgtcgtggggaaggtcgcttgatgtgtacagaatgtgatggatctggcgagccaaatattgaacctcaatttattgaatgggtggaagagggtacaaaatgcccatattgtaaaggcctagggtatactgtatgtgatctatgtggagggaaaactatggtatagggctttggagcttacagagctacgtgaaactctactgagaaacctcacaaattacaacatagattgaacggtgcatgcaattttaaaccttcaaaatgaatgagatgcttcacaggcagacactgtcatctttgaatactatttggccataagccaaaaataataggtggccgaagggaatgacaaatcgaagactgcacaaaggcttttatagcaagggttgcggaagtgtgagcagtttccaaaatccttcgagttaactcgaaataaaggtgtggtagcatcgagctcagtcaaatacttggcactagacctatatctttaatgcttatttatttgagggacttggagattaaggagctttagatacacatgacaaaatgagtaaaatatgagatggtcagtgaataaaaaatatgcgccaactaaaatgaggtggttagcaacgaataaccacgaatttttaagtgtcattataattttattttgcacatgccgatctaattaacttctcactcatttag

SEQ ID NO: 134271 - DNA, 473 bp, Glycine max
  Clone ID: PAT_MRT3847_92255C.1
ggctcgagcacacgttgttcatctctctatatactgtacaaaaacaaaaagagagctcagacgttgtagagctaacctatttaactgactggtaacattctcttgtgtggtctaatgcgaacgggaaaagatgtaggtatagagatctgatgcaatagtaaggattttgaattgcgacgggtttgggaagcgatgactataacagtaacacgcctaagtgcttcggtgtaatgggagggtcaatatgccttgaggacggtagctataacggggaccgattctgggccaagctgcaaagcggacatcagctttctcgtgatggcatctgctcagcctcttgcatgaaggaggcaatgcagtgcccttatagccagaaggttgaagaaggtcatgggctgtatgcttgtggttgatcaacctattcaaaacggagcatgggttgctggactcatgatgcggatctataagagaat

SEQ ID NO: 134272 - DNA, 1542 bp, Glycine max
  Clone ID: PAT_MRT3847_92256C.1
gtctctgttagaagatagaagaagaaatatcttgttgcgtgttgcgatatcataacatcgatggcctccatcatccaaatctcacaatgtcgtcaactcttctcccagtgacagcaactcccattttcactctcaccaaaaccctccctctccccaaaccctacctactctcctataaattcaaattcaacaccctcgtccgccgctgctccctctccgaccacgaggagcagcgctggctccgcgaagagcagcgctggctccgcgacgaacaccgctggctccgtgaggagcagcgctgggctcgcgagcgcgaccaactcctccgcgagatcgccgacctcaagctccaaatccaggcgctggagcgtcgcctcttgacgcgcgatttgtcctctccggcttccatctccgacgccgtcgccaatgtcacgttgctcttgcaggtgctcaaggacaagaatctggttctcgagagcggttcgagcctgcggaacacggaggaggtgaagcaattggaagaggtcgtcgaacatgtgaaggaggttgtggtggttgaggaatctgctagggttgaaaagaggatctcgttgcggataggttccgaaggtgaagaggttcgacagatgcaggaagcattgttgaaattggggttttactctggcgaggaagacatggagtattccagcttctcaagtggaaccgagcgtgctgtgaagacttggcaagctgcattaggtgctcctgaggatggtatcatgacagctgaacttcttgaaaggttgtatttggagataaggaataaggacaccggcagtgcgactcaagacaaacaatctactactgttttgccaaaggaagttgaaaatggagctgcagttgcttcagtggcagaaaattcagagggtcagcaaaaagatgtgaaaagtgataagggaacagaagtctcccaccggggagtttttctccttggagagaatcggtgggaagaaccatcaagacttttcacaaggaatggagttgataggagcaagaacaaggatgtaacgacaaaatgccttcaatgtcgtggggaaggtcgcttgctgtgtacagttttttggaatgggtggacgagggtacaaaatgcccatattgtgaaggcctagggtatactgtatgtgatctatgtggagggaaaacaatggtataggtatgacatacatttctagttcatcgtttcatactcaggcatgtaattatcagtatcattgcatcacaaaattttgtatagtatgctatttaatcatcaaaactgggaaataggaacttaatatttgagagatttttaactttcaaggctttggagcttacagagctacgtgaaaatctgcagagaaacctcaaattacaacatagaacggtgcatgcatttttaaccttcaaaatgaatgaggtgatattccattctgagtaatactcaaacatacattttacccttgtccgaactacgtctgtttcaaactttatgatttgttaaatcgcaaaatgtaatgctatgtt

SEQ ID NO: 134273 - DNA, 537 bp, Glycine max
  Clone ID: PAT_MRT3847_92257C.1
cgcgcatatttttaattcactgaccatctcattttactcattttgtcatgtgtatctaaaactccttaatctccaagtccctcaaataaagaagccattaagatataggtctagtgccaagtatttgattgagctcgatcctaccacacctttatttttagttcactcgaaggatttttgaaactgctcacacttcaacaacccttgtataaaagcctttgtgcagtcctcgaacctgtcatctttggccttactattttggcttatggccaaatagaattcaaagatgacagtctctcattcattttgaaggttaaaaatgcatgcaccgttctatgttgtaatttgaggtttctctataccattgttttccctccacatagatcacatacagtataccctaggccttcacaatatgggcattttgtaccctcgtccacccattccaaaaattgaggttcaatatttggctcgccagatccatcacattctgtacacagcaagcgacctttcccacgacattgaaggcattttggc

SEQ ID NO: 134274 - DNA, 1798 bp, Glycine max
  Clone ID: PAT_MRT3847_92258C.1
cctcgaattacaagcgtgctctgttagaagatagaagaagaaatatcttgttgcgtgttgcgatatcataacatcgatggcctccatcatccaaatctcacaatgtcgtcaactcttctcccagtgacagcaactcccattttcactctcaccaaaaccctccctctccccaaaccctacctactctcctataaattcaaattcaacaccctcgtccgccgctgctccctctccgaccacgaggagcagcgctggctccgcgaagagcagcgctggctccgcgacgaacaccgctggctccgtgaggagcagcgctgggctcgcgagcgcgaccaactcctccgcgagatcgccgacctcaagctccaaatccaggcgctggagcgtcgcctcttgacgcgcgatttgtcctctccggcttccatctccgacgccgtcgccaatgtcacgttgctcttgcaggtgctcaaggacaagaatctggttctcgagagcggttcgagcctgcggaacacggaggaggtgaagcaattggaagaggtcgtcgaacatgtgaaggaggttgtggtggttgaggaatctgctagggttgaaaagaggatctcgttgcggataggttccgaaggagaagaggttcgacaaatgcaggaagcattgttgaaattggggttttactctggcgaggaagacatggagtattccagcttctcaagtggaactgagcgtgctgtgaagacttggcaagctgcactaggtgcccctgaggatggtatcatgacagctgaacttcttgaaaggttgtatttggagataaggaataagggcacaggtagtgcgactcaagacaaacaatctactactgttttgccaaaggaagttgaaaatggagctgcagttgcttcagtggcagaaaattcagaggttcagcaaaaagatgtgaaaaatgataaggaaacagaagtctcccaccggggagtttttctccttggagagaatcggtgggaagaaccatcaagacttgttgcaagggatggagttgataagagcaagaacaaggatatgacaacaaaatgccttcaatgtcgtggggaaggtcgcttgatgtgtacagaatgtgatggatctggcgagccaaatattgaacctcaatttattgaatgggtggaagagggtacaaaatgcccatattgtaaaggcctagggtatactgtatgtgatctatgtggagggaaaacaatggtatagggctttggagcttacagagctacgtgaaactctacagagaaacctcaaattacaacatagaacggtgcatgcatttttaaccttcaaaatgaatgaggtgatattccattctgagtaatactcaaacatacattttacccttgtccgaactacgtctgtttcaaactttatgatttgttaaatcacaaaatgtaatgctatgttaatttgtagatgcttcacaggcagacactgtcatctttgaatactatttggccataagccaaaaataataggtggccgaagagaatgacaaatcgaagactgcacaaaggcttttatagcaagggttgcggaagtgtgagcagtttccaaaatccttcgagttaactcgaaataaaggtgtggtagcatcgagctcagtcaaatacttggcactagacctatatctttaatgcttatttatttgagggacttggagattaaggagctttagatacacatgacaaaatgagtaaaatatgagatggtcagtgaataaaaaatatgcgccaactaaaatgaggtggttagc

SEQ ID NO: 134275 - DNA, 575 bp, Glycine max
  Clone ID: PAT_MRT3847_92259C.1
aaggatgtaccgccaaaatgccttcaatgtcgtggggaaggtcgcttgctgtgtacagaatgtgatggatctggcgagccaaatattgaacctcaatttttggaatgggtggacgagggtacaaaatgcccatattgtgaaggcctagggtatactgtatgtgatctatgtggagggaaaacaatggtatagagaaacctcaaattacaacatagaacggtgcatgcatttttaaccttcaaaatgaatgaggtgatattccattctgagtaatactcaaacatacattttacccttgtccgaactacgtctgtttcaaactttatgatttgttaaatcgcaaaatgtaatgctatgttaattggtagatgcttcactgacagagactgtcatctttgaattctatttggccataagccaaaatagtaaggccaaagatgacaggttcgaggactgcacaaaggcttttatacaagggttgttgaagtgtgagcagtttcaaaaatccttcgagtgaactcgaaataaaggtgtggtaggatcgagctcaatcaaatacttggcactagacctat

SEQ ID NO: 134276 - DNA, 294 bp, Glycine max
  Clone ID: PAT_MRT3847_9225C.1
tttcaacaacatgcttctggtgacgcaatgcatattttcgtgcataacgatcttgatggagggaggattcggagtgaattatcctacagaaaggtcacattcagaggatggaggtgaagatgggtatgagaaaagttgtgaaatgtgactttcactgggaatagaaatattttgatatgtcgaacaaagtcgatgctcatagccaattctcatgtgtttatagcatttgactgtagaaaaacaattaacttttaagtacatacttgcatgctttatgcaaactgggaaataccc

SEQ ID NO: 134277 - DNA, 456 bp, Glycine max
  Clone ID: PAT_MRT3847_92260C.1
agcacgcgtccgatcacgcgttcgcacacgcgtacggtctgaaacgatcgctgccacggcgaccacgaccctctcttcaaacccggaactcgcatcttgccacggacagcccgctacatattcttagcgcgtcgtacccaccaccaagttattctcattcaaacaaggcacaatctgcatgtccctaacccaacaccccatacgacctgcaatccttcaaattccaacccatcgtagaatccatcgtctcacgcgaaatgacgcgccggtacatgaccgacatgataacctacgcccacaccgacttcgtaatcgtcggagccagctcggcggtgctctcctgtgcgtacgagatcagcaagaaccccgccgtgagcgtcggcataatcgagcagaccgtgagcgcccgcagaagcgcgtggatcggcggacaactcttatccgacatggtggttc

SEQ ID NO: 134278 - DNA, 273 bp, Glycine max
  Clone ID: PAT_MRT3847_92261C.1
gctcgagccgttcagacagagcaacgatggtggtgagtagaattacgatttacctccccttagtattcggctgacgagtcggatgttctcacgttagatcactcaaacttctccgacactgtaagcacgtacagtctcatcgtcgtcgagttctatgcaccaaggtatgtttccattctcgtttgtttcgattgatgttgtttactttgtcagtgtttaagcaaataagtgtggtatatttagagtgttgacaagtttgaccgttgaaacttg

SEQ ID NO: 134279 - DNA, 835 bp, Glycine max
  Clone ID: PAT_MRT3847_92262C.1
cggccgctgctaaggcggcggcctctacgctcttcccttcacacccttttaacctttgttccatgccatgcccatgatccaaacctccattcccacacacccggagcttcttccagttccgggcctccattcctaaaaccatgcctcctttccccaaaaccttctacgctcgccctccacctcgcagaacctccttcctcgtcttctcatgcctcttcctctccctctccctcttcgttttcttcttcgcttttctcagacccctccgggaccctccctgccccaaccgcgtccccagatcggttaaagttctctgggatcaccgcctctccggcgacagcaacaacgctccggtcgaaacccgacacaaagttatggcctttgtgggaattcaaaccgggttcagatccgtggggaggcgccaatctctcaggaacacttggtttccttccgatcctcatggacttcaaggcttggaagaagccactgggttggcttttaggtttgtgattggtaaaacgagtgatagatcgaagatgtctgcacttcagaaggaagtggcacaatacgatgatttcattttactggatattgaagaggagtacagtaagctcccatacaaaacgctggctttcttcaaagctgcttatgccctttttgaagctgagttttatgtgaaagctgatgatgacatatatttaagtgcagatcgtctttcattactactggcaaaagagagatctcaccctcagacttacataggatgcaaagctaaagggtctgtgaattcactgatcccaaactcaaatggtatgagccactatctaatttgctc

SEQ ID NO: 134280 - DNA, 1164 bp, Glycine max
  Clone ID: PAT_MRT3847_92263C.1
aggttcacgaagacacactcaagtacatgaatgattttgagctgtacgactttgttgctgattcaaattttgatcagttcatcaatttgatccgaggggagaatgaagatgccaactgtgatcatttcggttctgaccttatcaatgattgctttgttaacaatcagcagcagcccctttcatctcctgcaaacccttttgatcagaacaacaacaataataataatgatgctgtgaatgtctatgatccaagctccacattcagttccttctcttgttttgatggggagctcaagggagaaggagaagaagaaaatgatggagagcattcttctgggacaacgacaacgacaacgaagaatgctgatggcaaactgaaactaaaaactgataggtcaaaaactctcatttctgaaaggagaaggagaggccgaatgaaggagaagctttatgcattgcgttctttggtccccaacataacaaagatggataaggcttctataattggagacgcagtgtcatacgtgcatgaccttcaagctcaagctaggaagctgaaggcagaggttgcaggacttgaagcatccttattagtgtctgaaaattatcaaggatcaattaacaatcccaaaaatgtgcaagtgatggcccgtaatattagtcatccaaactgcaagaaaatcatgcaggtggaacatgtttcaagtggaggaaagagggtacttagcaaaaatagtgtgcaataaaggagaaggggtggctgcttcactgtacagggctctcgagtctcttgcaggttttaatgttcagaactcaaacttggctacagttggtgagagttttctacttacatttacgttgaatgtaaaaggaactgaacaagaaattaacctgccaaatttgaagctatgggtgactggcgctcttctgaaccaaggctttgaattcgtggcatcttttcctgcttgactcactgcaccaagtatgacgtagaagcaattgcattttagagaatatgatgagccatgaaatattacgtataatatccacgtcaacatcttgagctagtatgatatcacttagtattaccgcaacaccgttgctaccttcgttctgtgtaattctccagttttcagaacaaataataacactacaaagactagc

SEQ ID NO: 134281 - DNA, 193 bp, Glycine max
  Clone ID: PAT_MRT3847_92264C.1
cacacgaataaattattacttttattgaatgttttaaaagccacacataattgttggagcatagtatttagattgaagtggcacaataattgcagccacaagggacatgtggactcaagcacgcatgacatttttcttcatagtcttttgataagacttagctccaaacaatgctaacaacacatgggtggct

SEQ ID NO: 134282 - DNA, 131 bp, Glycine max
  unsure (1)..(131): unsure at all n locations
  Clone ID: PAT_MRT3847_92265C.1
cagccactggcnccgctcttcatcttcaccagnccaacatggccanaatccagtgcggncacaaccannctaatactgttantncctgcctcctcctcatcataccaagatcnaattcccaacaagagtat

SEQ ID NO: 134283 - DNA, 107 bp, Glycine max
  Clone ID: PAT_MRT3847_92266C.1
gtctatcttaaagagatttctccaggagatattccttgtgagggtgaagatcctggattatcccataaaggttgccagccctgtccaggttgaggattgaagaaatc

SEQ ID NO: 134284 - DNA, 475 bp, Glycine max
  Clone ID: PAT_MRT3847_92267C.1
gtgcatttcccttaacaagtgaaagtgaaagtgaaaacatgcatatgtatggatacagagcaagggtttttctgcgctcaatttcactttgtaaatcaaagtggcataatcaccatctccatggaagtctaatccatttctctcaaaatctcacctccacagctggtcgtgaatttacggaatttgcaacagaaccgtctatgcagaggcaagttgtggaggcactccactcgggtgacagaaagaaggcttcagacttactttcggattttggttccagaagccgccactcattaacagctgaccattttgttcacatttttgagtactgtgctcgctctcctgatcttttgtttgttatggagattttgagattcatggagttaaaaggtgttagcatgaacaatatatgctcatctcttatgatgcaggccctttgtaatgggggttacttggaagaggtcaactattactt

SEQ ID NO: 134285 - DNA, 197 bp, Glycine max
  Clone ID: PAT_MRT3847_92268C.1
atatgaaaaaaaacacctttaataaaaaaaaactcgttggaaaaaatccccaaaatcaattggatccgacttacgaatgggatctgaggccaccttaaagtcctgattgtaacgtggacaggatgcaacaaccccggatttttgtttaatacccaaatcacacccaccaatcataggtgccaaaaaaaatgaaaatc

SEQ ID NO: 134286 - DNA, 454 bp, Glycine max
  Clone ID: PAT_MRT3847_92269C.1
ggttttgactggctattataactttccctttaagctcagattgcagtttggataacaagtttggaactgttttcgggcgtttaccaggcatgatgcccaggagaccttctgctcttagtacttcccattacaaatatgtttagcaccaaccgggaaatcctggctacatatattatccttccctgaggctttcaccatgctgaaaattcctcatatcggcataaactcctttgtcatcgatcctcgtcaaatcttgaccttccatctgttttaactttctatcctactgttctctcagccactgggttggcttccgtgtattcctatgggggcctgctcttaaaccccttcactacggtagtaaacgccccaacttctatcttcttagttgaagctttaatacttggcttaacctttgcttcacgggctttggggaatgtcacatcctagtcct

SEQ ID NO: 134287 - DNA, 680 bp, Glycine max
  Clone ID: PAT_MRT3847_9226C.1
aaaaatgttgcttatgggcaaaagatgccgaagcaaggaaacatgccaatcaggctgggcataaagttccagagacccatgagcgagtgagccatgcatcaaatgagcatgaacctcgtaatgtgtcagatgaagtgcaacattcattgggcaactcaagttcaccagcgacgtccccaagagtaaagattgagggggatcagggtgaagcttctaatccttctgataaaagtttcaataccttggaaacgaagcaaaatcctgaggcttctatggaagaaaagagttcatctgaacagccatcagattctcaaccaaagcccgatcatcacaaaagaaatcaagatgctctggctgcagcaaaagagcgctttctggcacgtaagaaagcaaaggaacaatgaaattttccctgcctttgttcagatgtttggtggttcatttggtctttagtttttcgtccttgatctaatatccatgaaccttgaatgccaaagagctttatctgttgaaatgaatgaagtgacatacgttattagtatatgatatttacttcgtgccaattcatgatgcacttcatttgatcatgaaccttttcaaatataaaaactcattttctataagcaaatataaaattcatttcaacctgttaatgatgtgaataaagtatggaaatcact

SEQ ID NO: 134288 - DNA, 202 bp, Glycine max
  Clone ID: PAT_MRT3847_92270C.1
aaaagggcctcccccaccggttggaaacaggaatcccccattttttaaaaagcccaagttggggccttgccgccatgccaaaaaaacccgcttggactatataaaccccgtcttttcccaagggaaaacaaaatatccggccttataccggagagcaccacataatttccttccgtaccgggggcgggaggccggaacatta

SEQ ID NO: 134289 - DNA, 423 bp, Glycine max
  Clone ID: PAT_MRT3847_92271C.1
tattttgcattacctacatccattcactgtgaaccaattggacagtttaaggtaccaagctatgaacattgtggtggttaggcttgggagagcagaaccaccccttaggaaagaggttgtggagtacatgcttgatgtggactctcacatatggagcatgagaagaagcaaagccaatttcttcagaattgtgtcactcttttctggtgcaatatctatgagcaagtggcttggtgaggtacaacagtggaagaatccagtgaccacaatcctagtgcatgtcctctttttcatcttgatatgttaccctgaactgatcctccccacaatgttcctctacatgtttctcattggaatatggaactttaggtttaggccaaggcacccttcacacatggacaccaaactttcttgggcagaagc

SEQ ID NO: 134290 - DNA, 355 bp, Glycine max
  Clone ID: PAT_MRT3847_92272C.1
gaatacaaatatcatacatcctggcttgactgctgcctgaactaacatactacgattgggtgcttcatatactagccacatggaaacataaagtcacagggacataaaaatctgacaggatgattcaacggagtaaaataacattagacctttaactcctgtacctcctcgaaagaggtgtagatactgcatactgattagctgtgcacagactacgagctgcataactaggccccatacacggacaatgccattcactattagatacgatagatagtgatgagcctacatcgagcaccaccagacaggatgatgtacaacaactactaatctaacacctaattgactttgctga

SEQ ID NO: 134291 - DNA, 527 bp, Glycine max
  Clone ID: PAT_MRT3847_92273C.1
gttcagtattgtatttaattagtttattaattgttgttcagtaatctctgcatgtgtggttaatcatgtcttctatgagtccactcacatttcacatatttcggaaacctaaaatgaggttctagatgaggtatattgtatagtgatcatgttcattgtgaggtagaaggttcaatgatgtagagtatgctggttctgtagaacagagaggaccttgggattgtaaacttgtcatggaaacctggtttcttggaagagtaggaagcaaaatgtagtggcatagtcaagtgtagaatcagattatcatgctacggctaagaatacttgcgaacttgtgtgggcatcacttgttggaatcaacttcagaagtactaagcatacacaagctagagtgatagacctgatgctgttcatattgtgtttagttctgtttttcatgagccgattgaacacaatgaagaagattgtcactgaggaacttcagcattggctcatttctacaagttatgcaaggaaagaggtctaaa

SEQ ID NO: 134292 - DNA, 202 bp, Glycine max
  Clone ID: PAT_MRT3847_92274C.1
ggaatatatcttgaagactatgaagttcaatctacaagacttattcgacaatggatagcaaaagcactagtaaaagataaagatggaaaaactttggaggatgttgcacaacaatatttaacaaagttgattggtagaagtttagtgcaagtgtcttcattttccatagatggagttgttgtgttcttgaaaaagtttagtg

SEQ ID NO: 134293 - DNA, 402 bp, Glycine max
  Clone ID: PAT_MRT3847_92275C.1
ggtactgcgtttcggaagcacacacagatggctcgcacgaagctaaccgatcgtaagttcacatgatgaaaggctcctaagaagcatcttgcaaccagaagctacacgttaaatctgcaccaactactggtggtgtgaaaaagccccaccgttatcgatctgttaccgtggctcttcgtgagattaggaaataccagaagagtcccgagcttttgatccgcaagctccccttacagaggctggttcgcgaaattactcaggacttcaatactgatctgcgtttacagatccaccccgggcttgcattgctagaagctgctgatgcatacctcgttgggctctttgaggacactcacctgtgtgccattcacgccaagcgtgtaaccattatgcccaatgata

SEQ ID NO: 134294 - DNA, 320 bp, Glycine max
  Clone ID: PAT_MRT3847_92276C.1
tttatttgtccggtaaaatctaacaggatggtgagctaaggtgctatctgcaacagctctgatgtctgaagggactacatatgggtttgctacggggcatgattggctatggcatacaaggccaggagagtgggtaataggaataaaggcggcaaccataaacaatatgtgaggatagggcttcaatcctaaaatcacagggttcaggaaagtgggaacgatcaaatagttcatgttacaaaaaagtgtttgaaaacagatgacaacagtgcgaacaccatgagaatttagaccctgggaagcagaggatctgaaacttt

SEQ ID NO: 134295 - DNA, 598 bp, Glycine max
  Clone ID: PAT_MRT3847_92277C.1
gcctcttgatttcaagtcaactagaggagaatttgagaagcttgccgggcaaataaatactcaccgaaggaatcaggatccatcttcaaaagacatgacagtggaagagattgcacttggctttgtggatgttgctaatgagacaatgtgtcgtcctataagacagttgactgaaatgaagggccatgagacaaagaaccattcacttgcttgctttggtggtgctggacctcagcatgcttgtgctatagctaggtcgttaggtatgaaagaagtgctcattcacagattttgtgggatcttaagtgcatatggaatggggttggcaaatgttgtggaagaggcacaggaaccttattctgcagtgtatggagttgaatctattgttgaggtctcacaacgagaagctgttttacttagacaggtaaagcagaaattgcaaattcaaggatttaaggaggaaaatatttcaacagagacatatttaaacttgagatatgaaggtacagacactgccatcatggtcaaaagacaagtagctgaagatggaaatttatgtgactatgctactgagtttgtgagattgttcaacaggaat

SEQ ID NO: 134296 - DNA, 462 bp, Glycine max
  Clone ID: PAT_MRT3847_92278C.1
ggaaaaaaaaaactacgtacacaatttcatcaacaaaaaaaaaccacatggattctattcatcatactgaaaagtgaaaatatgaacagcatactacttgtagcttcagcaacagcatgagcagcaagttagctgaaaggataatattgtctaaattgaggtatgatgttcaagacattaataagttctgtgttatcagctcaattacaatgagtatttaatctgataactgcggagccagtcttcacccttttcgaaataatccatcctactgaaagtttgtgtatggaattgtggggctgatgcaaacgctgcagccccaccccatgcatacataacaggatccagtgctctaactacttttattggtgctccacatggccgaatcatccggattccggcttcgaggcgttcaatgatgccagggaaaagagaactttcaccagtcacaagtatggagct

SEQ ID NO: 134297 - DNA, 189 bp, Glycine max
  Clone ID: PAT_MRT3847_92279C.1
aaaaaagataatgaacttcctgccttataaggaaagatagtttaccaaccgctccaaatatataaataaataaaagtcttcagttcattcccgagccgctagacaggatgctgtaaacccatacattttgaggttttaaacaggaaaggggtctgattaaaaatttgtcctatttaacactacgaatta

SEQ ID NO: 134298 - DNA, 2283 bp, Glycine max
  Clone ID: PAT_MRT3847_9227C.1
ccacgcgtccgcggacgcgtgggctgagattgaatttgcaaattcatcttagaaccctaatcccctttttctcaatcgaacaaatcattccatcatccgggtgcaagagggaatgataagagaggcaagctgcaccggattattgccaaattgaagcctccaagactccaaattccttcagtgaagaatctgggtgaaaaatgagcaagtatggcttgaaccttaggccgcctaagccaaagaagcagccgccaaggccttccctcgccaacccttttggctttaatgaagatgatgagaatgatgttgagagagaaattgctctccaggctagcaagaataaacgtctcaaggaagttgaggagcagcaaaagaaagccctggaggaagatccatctgtatttgattatgatggagtctatgaccaaatgaaagagaaagttgctcgtccattggtacaagatcgtgaagagagaaagccaaaatacatccaaaatctgattaaaaaagcaaaagagcgagagcagtatcgtgagattgtttatgagaaaaagattgccaaagagagaagcaaagatgaccatctgtatgctgacaaagacaaatttattactgaagcatatagaaagaagcttgctgaacgagagagacaaatggagctagaacgactgcgtgaactccaagaggaaagagacgatgttaccaagaagaaggactttttgcttgatttttatgctaacctagataaaaatgttgcttatggcgcgaaagatgctgaagcaaggaaacgtgaaaatcaggctgagcatagagttccagagacccatgagggagtgagccttgcatcaaatgagcacgaaaattgtaatgtgtcagaggaagtgcaacattcattgggcaactcaagttcaccagcggggtccccaagagtaaagcttgaggaggatcagggtgaagcttctaatccttctgatagaagtttcaatcccttggaaacgaagccaaatcctgaggcttctatggaggaaaagggttcagctgaactgccatcagattctcaaccaaagcccgatcatcacaaaagaagtcaagatgctgtggctgcagcaaaagagcgctttctggcacgtaagaaagcaaaggaacaatgaaatttttcctgcccttgttcagatgcctggtggttcatttggtctttagtttttcgtccttaatctaatatccatgaaccttgcttcaatgccaaatagctttatctgtgaaaatgtcatagaatgaactggaatactgtgttactatatttaatttggtgtcaattaattcataattagggatgacaaggcgggcggatttttgagatgattcgaggattacagcagttgggatggaaaaaagttgatgtcagctttcactcagcattctggcctttctttgctcataacaacattcatgtactgcatccatttaatctgtcggatgatgatggtatcactgatacagagtttttaacacgagtgcttgtctgattttcaggtgaaaaatgaatggtttcacaatgctggtgtaggagttattgctcatgtggccgaaagcttaagacagctagaagcatcatcatttttgtctgctagcttgtaactagtgtactagtatgtgattccactttgccgggaacatgcctaatgttgtctttggttcagagaataaaaatagagatgtaaattgaagagaattttttattattaaaataaggtgtaaaaggtatgggtccacatgagacccaccaaatttcttaaagggttcactcgtagcttcatcagattatccgcctaagcccgatcatcaagaagagagtcaattttttttggctgcagcaaaaaagcgctttctggcaattaagaatgaaaaggatcaatgaaatttttcctgcccttgttcagatgccacgtggttcatttggtctttagtttttcaaccttaatctaatatccatgagccttccttcaatgccaaatagctttatctgtcaaaatgtcatagaatgtgctcgggctgcagcaaaagatatttatttggcacgtaagaaagtcataattagggatgactttccctgcctttgttcagaagtttggtggttcatttggtctttagtttttcgtccttgatctaatatccatgaaccttgaatgccaaagagctttatctgttgaaatgaatgaagtgacatacgttattagtatatgatatttacttcgtgccaaaaaaaaaaaaaaaaaaaaaaaa

SEQ ID NO: 134299 - DNA, 361 bp, Glycine max
  Clone ID: PAT_MRT3847_92280C.1
tttttttttttaacttttttgtttgatacttcttttttttggtttatttgtttcgtttgatttagcacaaacattacacttccttgttgacgaaaaatgcatggtgtattattaccgaggaagcgatttgctaacaaatccctctaagtccgtatctatgttatttgaatgggctctggatagaaaataatagggataccctttggagagggtcaaaaggggtgggcccttcgatcggggctcattttcacaagctttacaccgttgaaaggacccaaaatgggatggaaaatgacacatgttttcaaaatgataatgcctgtgaaatgaaggggaccagggcaaagataccaccctttgc

SEQ ID NO: 134300 - DNA, 1612 bp, Glycine max
  Clone ID: PAT_MRT3847_92281C.1
acgcgacacagtctcgcatgtgcaaccattagccaaaagacctattcacacatgtgctagtggaaccaataaccaaaccccaacacacacataacacaaacaacacagatcaagtttctcattccctagacagatcccaacaacaacatagacaacacagagaatgcacgcaaagacagactcagaggtaacaagcctcgccgcgtcttcccccacgcgctcccctccacgccgtcctctctactatgttcagtctccctcacgagactctcacgacggcgagaaaaccgcaacgacgtcgtttcactcaacgcccgttctcagcccctctgcctctcctcctcactcgcgccactcctcctccacgcgcttctccaagaaagaccatagccacagcctcaagccgtggaagcaaatcgatgttattgaagaagaagggcttcttcaaggggatgatcaccataacgggcttccacgtcggtgctactttctcgcgttcgttgttgggtttttggttctcttctccttcttctcgcttatcctttggggggctagtaggcccatgaagcccaagatcaacatcaagagcataaagtttgatcatgttagggtccaagcaggttcggatgcaacaggggtagccaccgatatgattacattgaattccactttgaaattcgcataccgcaacacaggcacattttttggggtccatgtcacatccacacccgtggaactgtcctattcagacattgtaattgcttcgggaaatatgaagaagttttatcaatctaggaggagccaaagtgtggtgagtgtagcagttgatggttaaagtggtgctagcataagtagcacaacgggtgtgccaacactgcctgtgccattgaacctcagctttgtgctacgatctagggcttatgtgcttgggaaattggtaagtgctaaggaaattaaaaccattaaatgtttcatcacattggatctgatacagctcaatggtgctataaaaaacaagaatgctgcgatttccctcaagaaatcttgcacatatgattgatacatgtgacggagagcaagtgggaattatttgaaaaataataataataataaaaatattgttttatgattaatgtgttcttttgatgtgaggaaagaaatggtacagccagagggcagtgtgccaaggacgcgtttttgggactgcttgggctgcccaaattgcctcaaattgcggtaagacaaagacatgcatgttgggttcggtagagaaatgtaatcttgtgattgatcatttcatgaagacatttttttgggttgattatttgtccgattttaatttattaattgtaaaagtgacaggtaatttgaattcattcaatctcagtgttgtaattgcatctttctccatgtaattatggtgtaattatagccatataaatttcgctttttaattgagttgtttctatctgttaggtaaggtccatggtgagagtgcatgttcaggatcaggtcaacgggtcatgaattgatttcattcactatgtttttcaaaattaacattattcttacgttaatttgtaggaaaaaaaaatggatgattttgcccaac

SEQ ID NO: 134301 - DNA, 424 bp, Glycine max
  Clone ID: PAT_MRT3847_92282C.1
cttgattggaaaaaggatagaagaatgggaatctgccttagatcagtatcaaagaattcctaataaagatattcaagacatacttaaagtaagttgtgattctttagaggaatatgaacagaaaatttttcttgatattgtctgttgcttcaaaggatatcgtttgttagaagtcaaagaaatactttttagtcatcacggtttctgcccacaatatggtataggagtgttgatcgacaaatctctcataaagattgattgctttggtaacgtgacattgcatgacttgattgaagacatgggtaaagaaattgtccgaagggaatcaccagaagagcctgaatatcgcagtaggttatggtgtcctgaagatatagttcaagtcttagaagaaaattagggtactagtagaattcaaatgata

SEQ ID NO: 134302 - DNA, 473 bp, Glycine max
  unsure (1)..(473): unsure at all n locations
  Clone ID: PAT_MRT3847_92283C.1
attcggctcgagcacgcatgtgcaaccattagccaataaccaaaccccccaacacacatatcagaacacacagcacaacacagttcaagtttctcgtttccctaaacagatcctaacaacacaacacaaacacggagaaacaaaaatgcacgcaaagacagactcagaggtaacaagcctcgccgcgtcttcccccacgcgctcccctccacgccgtcctctttactacgttcagtctccctcgcgagattctcacgacggcgagaaaaccgcaacgacgtcgtttcactccacgcccgttctcagcccctctgcttcccctcctcactcgcgccactcctcttccacgcgcttctcgaagaaggaccatagccatagtcttaagccgtggaagcaaatcgatgttattgaagaagaagggcttcttaaggggatgatcgccgcaacgggcttcacgtcggngctactttctt

SEQ ID NO: 134303 - DNA, 485 bp, Glycine max
  Clone ID: PAT_MRT3847_92284C.1
gatctgaaaccaaccactaattaagagagaaaacttcttccatcaattgtttcaaaagatactgaacatacccttgttttctccaaatcaccattgatccttgtggttgcatgtaaattgatggttatcctttggttgttggagtgttcccatttgagctttccatttccagagatcgtagtttctctataatctacgtcatttgagcttttcactccttagctcctcattgcactgctccatctcatccatcaccctagcttgggagcatttcctataaagatgctgcgtaaacacttttccttcttaattactattctctatacagaaaacattgttagcatcaaagagaaggattaaaaaagaaacataatatcaattatgaaaatattttatccaagtattcaatatttaaagatatcccccacatcttaacactagaatctccctcttaggtttggttaacattcattccaaggtagcat

SEQ ID NO: 134304 - DNA, 329 bp, Glycine max
  Clone ID: PAT_MRT3847_92285C.1
tacgcaagaactctccaaggatcctccttcccacgtatactcacttttttctcattttctcctcatatacatatacatatacaactacatacatatacttatatgttttgtgttttgtgtgtgttttaagttggttctttcaattgattcaatttaataattatctcctactcatgctctgtgtcattctcttcactataaaattggctttggaagtggtaaaatcaagtgaaggtgatagtaagcactaaattttttcaggggttaatttacttattggtgggcaaattacaaccaagagctgctatttcctcttgttctgtccatca

SEQ ID NO: 134305 - DNA, 283 bp, Glycine max
  Clone ID: PAT_MRT3847_92286C.1
ggaaccacaagagcggccgtcccccccccgaataaacaaccccaaaacgagaagggaccaaaaggggcccaaaacgggaggaacgcggggaaaccaaaccaggcacggctacaaaaccggagcaaaagcagacacaccgaaccaagaaaagacccaaaaccaaaaaaagatatggacaaaggggatcacaccaaaagaacaaacgacggacacgaggaagccaaagaagcagaaaaagagggagacagaccgcggcaaaagaaacaccaaagcggcgaagacc

SEQ ID NO: 134306 - DNA, 478 bp, Glycine max
  Clone ID: PAT_MRT3847_92287C.1
tgtagatccctctgctgaaatcacacaagaaatcaaagaccctcaagattcaaaggaaatgtcttcagccaaatctctccaacagtcgctcctcatttctggagaaaagtctgtttgtgaagaatttggtccttcaagtaaaggaagtaataggcttgataaagttagccggccaaaacttatgtgcatctccactggtgatgacaaattcatggtgagggaaagactgtcatcagtggatgaaactgctccttcgattatctctactaaaatttcaagccagaaagttttgcaagaagagaaaggaatggttttacagaatccagcaccagaaaggccagctgttggccatcttcctccagcttttgatgatgtcattcatgtcatacgccatagcagttaccgcgtggggagtgagcagccagggaaggaatctgtggagaatggagttcaaaatgtagattgtcggaagtttatc

SEQ ID NO: 134307 - DNA, 150 bp, Glycine max
  Clone ID: PAT_MRT3847_92288C.1
gtgtcaggaattatttcctataccaacaatgataatcaaaccattactgtccatagataaaattatttcctataccaataatgaaaattcatgtgacaggaattttatgatacaaaaatgcaaagcaaaaatggttacattttaacctta

SEQ ID NO: 134308 - DNA, 432 bp, Glycine max
  Clone ID: PAT_MRT3847_92289C.1
aaaagggaaaggaaggggggatatttttgaaccctcaacccccaaaaaaattctaaatcacccactggggcccctaggaagctaatcctgcaaacgggggccatcgaattaggatccctccccccactccgcgcttgttttaaagggcccaggggggaaaagaatctgggcttttttaacctcctccccaagcccatcaacgattggaaacccaccttcaatgattaccatgaactcacttaacaccccaaaattcgtccttcaaaacactacgatggctctcttaggcaaaaagctccccttgaaatcgggttccaaaggaaaggtcggactccccccctggattgggatgaaggaatagttatcttgaggaacttggaggaggcgaccaatgtacaacatgctgaaacagatagaggccaaaaacttttg

SEQ ID NO: 134309 - DNA, 265 bp, Glycine max
  Clone ID: PAT_MRT3847_9228C.1
aaccaagatcgtgtgctgtctgggtcccttatcacggtcgtggcccaatgatcaatcaaggttctgcacagcatgtatgagcgtgattttcttcgacttctcccatggggaccacaagtaccaccgggaaaccctcgacaacctccgagccgtcatggagaacaccggaattctctgcgccgccatgctcgactccaatgcgcctgagattcgaactggctttctcgaggatggtaagactatccaactgatgactagtcatgat

SEQ ID NO: 134310 - DNA, 390 bp, Glycine max
  Clone ID: PAT_MRT3847_92290C.1
agggggcctgaaaataaatcttttaaaaaacccctataaaaggagggggcccccccaaaaccccgacccgggaaaaccccaagaaagaatcctttgaatcgggcccaaacttgggaaacttaagccaaaagaaaccccatgcccctggaaatggaaaaacccccaagggggggccgccgcccattttcgcgggaaaataatgggccccccaaacctgaaaaaaaaaacccttccacaactttcccaaagacctggttttttcaggcccctttttcaacaccctggccccagccctttgaaaaaccccccgggtcacggggaccctccggtccctcaagggaaacattccacctttggggcaaacagcccttagttcaacccccgaggccc

SEQ ID NO: 134311 - DNA, 479 bp, Glycine max
  Clone ID: PAT_MRT3847_92291C.1
aattgattacaaaagtttatgtagaaggctagacagagaattggacaaactcactatggaatatgaaaggcagcagaaggtatttgaggatgatattgaaagattgaccacagaagcacaacattgcatattagaggcccaacagaattattcggattcgttggagaaggaaagattgaaataccagaaagactataaagaatcaattaagaggcttgaagagaaggtaatggagaataaaaaaaagtacgaggaattttgtatgacatctactggagaaggctttggttcttgttgaggaagtagtaattttgaaaaaaatacctcagaaagagaccttttgagaaaaggttgccaaagggaagataaatcatctaaaaaatcaaatggcagaactgaaaatgttggaggcatcaagagaatcagatatcttaaaacttcgtaagatgttggaagatgaggcacatcagaaagagaaa

SEQ ID NO: 134312 - DNA, 323 bp, Glycine max
  Clone ID: PAT_MRT3847_92292C.1
ctttaagccggccccctttggttttttttttttttttttgaattaaataacattatattacagcatggcaaatcaattaaaatatacggcttattttccatagggtaaaatggggggggaaaaattccaaggcgtagttagtatctagaatttgtttcttgatagaagaatgcagttttaccgagcttttgtactccttacttccgaggtttttgaggagcgaattttttagccggcaagctcgacagaatggcaagggcatcgctagggggcactatgaggttaaaggggacatgggcaggggatcatggaggtggggtctt

SEQ ID NO: 134313 - DNA, 423 bp, Glycine max
  Clone ID: PAT_MRT3847_92293C.1
cccatgcgtccgcggacgcgtggggaggatttgttaagaagctgcaactgttgcccaaagggatgtcagttccatcaaatcccctgccggatcagtccgcctccattggcaatctgagcattgggccgggtgcaaaatacgcagaaattgtcgatggcagcggcggttccgcactgaatctgttgctgttgatcacactggccaagtcgatcagttccgcgggcaaagtgtcaaaactgagtgacaccgtactccgcatggactacgagcaccgtaaccgacccgtgcagctgacggtcaattgggacgcggtgacgcacgacaaattggacttttaccacttccattggacaaagccggaggacgaagtgttggatcatttggaggatgccctaggaattggtaccgaaagcgatggcacat

SEQ ID NO: 134314 - DNA, 117 bp, Glycine max
  Clone ID: PAT_MRT3847_92294C.1
cccaggcgtccgattttaactgtgtgtgtgttacaattgtgaaaagtactccaaactatgagggtaaggtaactttgctaatgggcatctactattccactgacaagcttaacttgc

SEQ ID NO: 134315 - DNA, 302 bp, Glycine max
  Clone ID: PAT_MRT3847_92295C.1
ccttaaatgacttctggggccttgtaatggcagcttggaaatcttggaagttccaggagggggggccctttaaagcttccttttaaaaagttttgaaaaaataggacccttggaaaatattttggaagggcctccagggttgaacctttggaccaccaaattgggaaaaaattgcctggggatttttttgagcctgggattgcccaacttcccattgccccatttttttgtttcccttttgattgccaccgatggaattccttgttgacttttaaaagtttttttaaacattgggctcaagt

SEQ ID NO: 134316 - DNA, 415 bp, Glycine max
  Clone ID: PAT_MRT3847_92296C.1
aattctgctcaaggctcttaatactgtgaactatggaatcctgcttgctcaaatgcaatgactgtgtcatttaatccagacccatgatcagatacatggaggatgcaatttctgaagcagactctgatgcctgcagatgagatcatcagcctcactggatggactgccaccccaatgcaggatgttcaagttacaattgatggctatatttgctctcaggaatctgtgcccaggacctattgcgttataaatccacaaaatcctttagcgcaaacaagtgcatgggaaaactgactttccctagggcactttccgaagtgataagagaatgcctcattctatagggggaggactctggagcaaacaatgcaattcctatgaatatgccaaatgctgaactttcaatgtagagata

SEQ ID NO: 134317 - DNA, 554 bp, Glycine max
  Clone ID: PAT_MRT3847_92297C.1
aaacaacttctctccagcgattgaaggttgttttggttgctctctctctttcctccgtttcgatcttcctccgtctcatcgttcccgattctagggttttcgctccgataacgattccttctattcaatttggggcagagcgctagggtttttgcgctgccagatccgttttcggatttccagtttcttgattctgagtcctttcgtcagaaattcaccatgttttggcgcatggctggtttgtccacggcgtctccggtggaaaccattttggataaggagaattttactttggatgaactacttgatgaggatgaaattattcaggaatgcaaagctcttaacagtcgccttataaattttttgtctggaagagcacaggtggaacaattgatacgttacattattgaagaagctcctgaggatgctgaaaagaagcgatcttttaagttggttgctcaaattggagattttgattaagttcctgttagctggatatttgcagtgatatcttattgctattaatttgtaacaggtttccttttattgcatgc

SEQ ID NO: 134318 - DNA, 254 bp, Glycine max
  Clone ID: PAT_MRT3847_92298C.1
cttagacgaagtcacaattcgcaatcgtcgtcttcgaattcctctccttcgtcgtcgtcgtcgcaatcgtcgtcgtcgtcgtcttcctcctcttcgtggatccatttgcggtcggttctaatcgttgtcactttctccttcacaagctcttggatggcctctgatcgggggtcgtcttaaatcaccatgtcaacccaggaaaagaaaccattcctttcaactcaagcaagggaaagcgtggtttacccaggttg

SEQ ID NO: 134319 - DNA, 403 bp, Glycine max
  Clone ID: PAT_MRT3847_92299C.1
ctctggctctagcctattctttttgttgtttattttctttacacttttctttctttctagccttaggatattgcttcggggaactgcatcactttacctaacgtgctagagcttcgctggggggaagtaacaagctaaaccctctgtcatggcgagccatgatgctacacagaaggggttaccggaaacaatgggatcgtcctccaaggcctccggaaaattctgggtacactcgacacccacactaatgtgactgaacaagcagcacacgaccctgattcctgagagatatagctctacgaccaactaactcttagaagccctactctcattctcatattatgggacaccccaaatttgctgcccgtgggtatccatgccatttggctgggcaacagtcctt

SEQ ID NO: 134320 - DNA, 644 bp, Glycine max
  Clone ID: PAT_MRT3847_9229C.1
caggataaataattgcttatattttttcaaactagttttaaatcagatgccataaaaaaatttagattaattcctagtgacaatgcctttctaatctcaagctgtccaattaatcatttgaagataataagaaaaaaaatacatcaactatctatatcaattttctcaactttcttcctttcgttgaacttaactgaaggaaggtgtgacaatataacttaatatactaactcaacttatgaacccattaaggcttgagcaatagtgtgaaaccaaacttgggactcttgtccaaatcctttgtttcaaaagcactcgagattgtcaagaatgacttacgtgttagctcatgctgcaataaggccccaaggttgccgtgattgttcagctttgccttcaaagctgtctgagaatcaaccacatataaacatccaactgtcaatgtgttctcatttgtagagaaccttctgctaatctctcccacaacagctcccccattcaatctttctagctggtataaatatgacaccttcatggagtctcccttatcacctctttgtattttgtaaacttgcccatccttgtggagaagctgattcaatctttctagctggtgtaattatgactgcctcatggagtctccc

SEQ ID NO: 134321 - DNA, 437 bp, Glycine max
  unsure (1)..(437): unsure at all n locations
  Clone ID: PAT_MRT3847_922C.1
ttacatgcccatttttttttgtgtctaacttgttttcatgttttatatatggtttgcagggtgattatgagtgctttggatcgttgttgagaggggaaatgagatgttttggctttgaaatttgaatagcattcggcagagacagagggattacgtttaatttctgtacacacggcaacacagattccaaattccaaaagggaatcatcaatcatatcataatatggtcttttttcagcagattgagccaatgcttcatgggattctgcggatgtagaggagtagagacagcttctgtatatttgtatatatggttttaacttgtttttcgttttctgagtttttggctgttgtaaatatgaattctgtactctgaaatctctatcagttgaaatcaatgaagcttgaaagtagttattntgaannaaaaaatntat

SEQ ID NO: 134322 - DNA, 458 bp, Glycine max
  Clone ID: PAT_MRT3847_92300C.1
gcccccggggggctccgccccatttccctggggcttcccacgcgcgcctcctgctgcaagacgacaacagggggggacgggcgagtttgttgagatagggcgaagcaataacacgaaaccgaaagcgcttgtgttgtcacctgctaccggtttggtatgcataagaacgccatggctgacactaccccatgttccctctccaaatgcaaactggaataggcgggcaatacagcaatgaggaggcatgagccatgtggaggcttggcctggactcaaacaccggggccaagtgccaaactggtcctggagcttgccgaaagcacatagctgactacggtctaagagaccaatgtaaatccctatttcaacacagagaaccaacaagcctatgtctatgctaaacccctgaaactcgcccacagagatggccttgtctcggaccgttgacaacactactc

SEQ ID NO: 134323 - DNA, 1501 bp, Glycine max
  Clone ID: PAT_MRT3847_92301C.1
tctcaatgatgatgcaacttctcaatgctacagcaaaggcatttattgcacacttcatcagcttgaaactcgctgatcatacttacaagcaagcaagcccccatccaaaatgccacctcaaatcaaccttttagcatcccaagtccttcactatttatttatgttctctttgcattgagtgcctcaagtgtgcctttggggtgtttctgtagtgttggaaatataaaagaggagtgtggactttaaaagggtactctataagtttgttgcttgtgatatttgtactttgttcatgtgctgtggtgtgtgttgttgttgagagagtttgagaaagaataatgggaagaacaccatgttgtgacaagaagggtttgaagaaaggaccttggacagctgaagaggatgaaattctttctagttatatcaagaaaaatggtggtcatggaagctggcgttctcttccaaggatggcaggtcttcttcgttgtggcaagagttgcaggcttaggtggacaaactatctgagaccagacattaagcgtggtccctttactcttgaggaagaaaaactagtcatacagcttcatggcatcctaggaaataggtgggctgcaatagcctctcagttaccagggagaacagacaatgagataaagaacttatggaacacccacttgaagaagcgtctcaaaagcatggggcttgaccccaaaactcatgaaccattggcctcatcaacttacccttttcacaaggcacctgcatctgtctccacacgccacatggctcagtgggagagtgctaggctcgaagccgaggccagactctcgaacgagtcgtcaaggttcagccacaacaccaccaacaattccaactctgataacaacaaaaccactgattctgactactttctccgcatttggaactctgaagttggagaggcatttcgcaatgttcatcatcacaaagctgatgatgacaacaacaacaacaaaatcactactaatactcctactagttcctgccacagtcctctttctacagggtcatcttccaacaagtgtgagtcaattgctacaaatgcagacttggcttctaatgcaccagaaattatcacaccctctagcattgtgaaacaagagtttgagtgggggactcgtggttccgactcgtcaagctctaatgacatggaagactcatcagacactgctttgcagctcttgttggattttcctataaacaatgacatgagcttcttggaaggaaactcttttgtgtgtccactttagtgcatgtggaagcatgagtgatattttgtgtcatgcagctttttgtgttggtgttttgtaatattgctatctatataagcagttgaagaagtaggagaatgacatgacttggaaattggttgaatatggtcattattaatcagcataggtgtgacaattattgtggatttttttttatagttcaagtctgattatgaatatagtaaatgtta

SEQ ID NO: 134324 - DNA, 179 bp, Glycine max
  Clone ID: PAT_MRT3847_92302C.1
caaacatcatcaagatcttgaggcatgacattggtgccactgtccatgagctttcacgagataagaagaaagacacagtgccctggttcccaagaaccattcaagagctggacagatttgccaatcagattctcagctatggagcggaactggatgctgaccaccctggttataaagat

SEQ ID NO: 134325 - DNA, 641 bp, Glycine max
  Clone ID: PAT_MRT3847_92303C.1
gctaaaaagtttggaaattaaactgtatatataatgtacaacaacagagtctacagactagccaaccatgtgagcatacatataccaactacgtatgcactcaaatatatattgaactatcaacaaatctaagtagacctacatgcctcccctcaattggcccaaaaaagagatggaggcaaaaaaaaaaaaacaaaggaatgatctcctagcagtttaaaatttaagatatccccaaatgtcagtaaagaccactaatgagaccattacaaaggcagaaagtacaaaaacagaagagcacttggtgcgatttgaggaagcctttgaaatgtgaggcacccttctgagcaagaaaaggtctttcaaccccaaggtggagcctgcttttgtaacttgttgagaaatctttcttttgccggttgactcgggtgtcttctgcagttcattcccatcattagtaagagtagcactttcatcagaagcatgattttctgaacctttctcccccacagcaatgactctttttgcataaagcaaggatcttcttgtgcacaacttacacttaacgtcttatttgagccatgtgtagccattgacaaacgaattctcctctgtgcagtaccttgtgttgagtttatgct

SEQ ID NO: 134326 - DNA, 690 bp, Glycine max
  Clone ID: PAT_MRT3847_92304C.1
tttttttttttttttttttttttttttttttttttttttttttttttttttttttttttttttttttttttttttttttttggaaaaaaaactgtatatataatgtacaagaacagagtctacagactagccaaccatgtgagcatacatataccaactacgtatgcactcaaatatatattgaactatcaacaaatctaagtagacctacatgcctcccctcaattggcccaaaaaagagatggaggcaaaaaaaaaaaaacaaaggaatgatctcctagcagtttaaaatttaagatttctcaacaagttacaaaagcaggctccaccttggggttgaaagaccttttcttgctcagaagggtgcctcacatttcaaaggcttcctcaaatcgcaccaagtgctcttctgtttttgtactttctgcctttgtaatggtctcattagtggtctttactgacatttggggatatcttaaattttaaactgctaggagatcattcctttgttttttttttttgcctccatctcttttttgggccaattgaggggaggcatgtaggtctacttagatttgttgatagttcaatatatatttgagtgcatacgtagttggtatatgtatgctcacatggttggctagtctgtagactctgttcttgtacattatatatacagttttttttcca

SEQ ID NO: 134327 - DNA, 773 bp, Glycine max
  Clone ID: PAT_MRT3847_92305C.1
gcactcgtcacagtctgactagtaatgcggctctagtggtcccgacaagtaaatagcagtttcccatcccagcctcattctcctccattaatgccaatgcacagacacagagagagagaaagagaaagagtaactgagttgtattcaatattcacaatttctacctccaaagattaaaaagagagaaagaaaaaaaaagaagcctacacacctttctccctattccttctacttctggcgccatttgcaccttcaaaactccatcttttttctttctctccttccatttctggaaacaccctcatggaaccaacaacaacattgaacaacatcatcaacaacaacaacactgttcctgcagggtcaccaccaccaccaccaccaccctcagtgcctcagccaatgaacatgaatgtcaacatgaacatgaacgtgggaaacacagaaggaacaacaccagcagttccaacaccaacacccgcgccaacaccagcaccaacaacaatggttcctgcagtgccagctccaaccacaacaacaccggggagtttggatttgtttgggaagaagaagagagggaggcccagaaagtatgatgcagatgggaacctgagagtgagtgcaacaccaccaccaccaccgggtttcactttgtccacaccttcttctgagttctcctcttccaaaagagggcgtggtaaacacaacacaacttttggcaacaacaactaccaacaactctattcttcttttggtgaggtgtttgcaaacac

SEQ ID NO: 134328 - DNA, 1041 bp, Glycine max
  Clone ID: PAT_MRT3847_92306C.1
ggctcgagctcctctcacagtcacagggtctgtttgttagggtttccttttttttccatttcccccctttctcccacactatctctttccgcattttcccaattagggtttgttctttctttcgcttgttacccattctctcttccttcttcttctgttcttcattcattcattattattgttattttgtggcgcagatgtgtcattgagacagaagaagaagaagaaattggagggggtgtgtgatcgggtcctcaggtgaagatctgaggctgttggtgtctcttttcttttctccgagttccaaagatgagcgcttctaggttcatcaagtgcgtcactgttggggatggtgctgtgggcaaaacctgtttgcttatttcctacaccagcaacacttttcccaccgattatgtgccgactgtttttgacaatttcagcgcaaatgtggttgtcaatgggagcattgtgaatctgggtttgtgggatactgctggacaagaggattataacagattaagacctttgagttaccgtggtgccgatgttttcatactggctttctctctcataagcaaggccagttatgaaaatgtctctaaaaagtggattccggagttgaagcattatgctcctggtgtccccattattctggttggcacaaagcttgaccttcgggatgataagcagttctgcattgaccatcctggtgccgtacctattaccacagctcagttcaaaaacacaggagaacgtgaaggcagtctttgatgcagccataagagttgtccttcaaccacctaagcagaagaaaaagaagggtaaagcacaaaaggcctgttcgatattgtgattcactaggtgttaacatttgactgccctttgttctccctgtattaccctccccttctttatttttatcatttccttgctattgaagaagttgtagtttatgtgggtgttcctcagacaaatactctagatctccttgaagcataacttgccttaatgctttccctttttttgaattattggaaaact

SEQ ID NO: 134329 - DNA, 1217 bp, Glycine max
  Clone ID: PAT_MRT3847_92307C.1
ggttgtatgagcggttcaacaagaaaatcccccgccttctcctctcacagtcacagggtctgtttgttagggtttcctttttttccatttcccccctttctcccgctctacaggaaaatctcgcgggcctaaaaagatgtgtcattgagacagaagaagaagaagaaattggagggggtgtgtgatcgggtcctcaggtgaagatctgaggctgttggtgtctcttttcttttctccgagttccaaagatgagcgcttctaggttcatcaagtgcgtcactgttggggatggtgctgtgggcaaaacctgtttgcttatttcctacaccagcaacacttttcccaccgattatgtgccgactgtttttgacaatttcagcgcaaatgtggttgtcaatgggagcattgtgaatctgggtttgtgggatactgctggacaagaggattataacagattaagacctttgagttaccgtggtgccgatgttttcatactggctttctctctcataagcaaggccagttatgaaaatgtctctaaaaagtggattccggagttgaagcattatgctcctggtgtccccattattctggttggcacaaagcttgaccttcgggatgataagcagttctgcattgaccatcctggtgccgtacctattaccacagctcagggagaagagcttaggaagctgattaatgcgccagcttacattgaatgcagttcaaaaacacaggagaacgtgaaggcagtctttgatgcagccataagagttgtccttcaaccacctaagcagaagaaaaagaagggtaaagcacaaaaggcctgttcgatattgtgattcactaggtgttaacatttgactgccctttgttctccctgtattaccctccccttctttatttttatcatttccttgctattgaagaagttgtagtttatgtgggtgttcctcagacaaatactctagatctccttgaagcataagttggcttaatgctttcctttctttgaattattgtaaactctaatagtcaaatttgcatttcatgattcccacctttttttcttgtaactttcgttttgatttatgtattaatagactggaatatccagttaggataacgaccttgtttgcttgaagatatatatttaaattatattatttttcaattcgaagtatattattgtgcaaaaaaaagaataaaaaaaaaaa

SEQ ID NO: 134330 - DNA, 753 bp, Glycine max
  Clone ID: PAT_MRT3847_92308C.1
ttttgttataagacgacagaagggggttgtatgagcggttcaacaggaaaatctcgcccacgcgtccgcggttcaacaggaaaatctcgcgggccaaaaaagatgtgtaattgagacagaagaagaagaagaagaagaagaagaagacgaagaagaagaagaaatttgagggggtgtgtgatcgggtcctcaggtgaagatctgaggctgttggtgtctcttttcttttctccgagttccaaagatgagcgcttctaggttcatcaagtgcgtcactgttggggatggtgctgtgggcaaaacctgcttgcttatttcctacaccagcaacactttccccaccgattatgtgccgactgtctttgacaatttcagtgcaaatgtggttgtcaatgggagcattgtgaatctgggtttgtgggatactgctggacaagaggattacaacagattaagacctttgagttaccgtggtgccgatgttttcatattggctttctctctcataagcaaggccagttatgaaaatgtctctaaaaagtggattccagagttgaagcattatgcacctggtgtccccattattctggttggcacaaagcttgaccttcgggatgataagcagttctgcatcgaccatcctggtgccgtacctattaccacagctcagggagaagagcttaggaagctgattaatgcaccagcttacattgaatgcagttcaaaaacacaggagaacgtgaaggcagtctt

SEQ ID NO: 134331 - DNA, 385 bp, Glycine max
  Clone ID: PAT_MRT3847_92309C.1
atggaactttctccagaaagcagcagcttcagccttagacatgggcgaaacagccttggtctcccacgagcggcaacacccactccccaaaaccgccgacccgcgtgtccaaatcgctggcaacttcgcccccgagccggtttttttggagcatcagtccctcccggagaccggaaaaatccccaaatgcattgagggagtctacggccgcaacggcgcgaacccactctacgagcccgtcgatgggcagaacatcgtcgacggagacggcatggacaacaaagagaagattcactcgggagccgccaggtacgcctgcagacttaacgagaccgaacgcatggtaccagagaaaagcctcggcccgacaagtgtccccaaaagc

SEQ ID NO: 134332 - DNA, 276 bp, Glycine max
  unsure (1)..(276): unsure at all n locations
  Clone ID: PAT_MRT3847_9230C.1
gtngcangcngcgtacgtnagcncggaattcggnncgnggncagtagnccncgcagcngncgnncngangtnggngtggggannanatnnnnctatggcagnnaggnngnncgngcngnnnggtncggnaggnggtcgngntggnagnaganngggannnggtcnanganngncaggtnggngancngagggnngncnganggnanggngngagcgggnnggnnnaagnngggggnnnggannnnggnnnnggaggnagnngacacagnanagggg

SEQ ID NO: 134333 - DNA, 675 bp, Glycine max
  Clone ID: PAT_MRT3847_92310C.1
gagacacgcaacaccgaagaaccagaaacaacaccagagaaataaacactaaaaacacttgcttgcacgttctcttcccactggtcccttctctttttcattcttcttcttcttcttcttcccttcactttactcaaccctactttttttcttttcttattatttttttcctttctggttaagaaccaccctttgtttctctcaaaacatcaaggattgttgtcctgaatcttattctgctcatctgcatatctcatctcccatatgatggccaatgaaagtggtgaattaccagtgaccccagaagttactgagtcacctggggttgaaataagaggacattcagatggcaaggctagttctggaactagtgttgaaaaagttgttcccaattatctcagagcttccactggttcttgtcatgatttttgtaaatacgggaggaaacatgcatttgattcgaaagaaagatgttctatacctaatagagctacaagaaaacagcttcaccacagttcagaaggtagtgttggtgggacaatgatgtcatttgctaggctcagtgcatctgtggattctactaagccgacacagatgtcaacggtcaaactcaaacacataggtgatttcaagacctggatttttgatcctttgaacctacagcgggaactgcca

SEQ ID NO: 134334 - DNA, 689 bp, Glycine max
  Clone ID: PAT_MRT3847_92311C.1
cgcgactcctcccctcgctcccgcgaccccgacgccgacaacaacaacaaccaccaccaccaccgccgccagccttccttggacgacgcccctcccaaggtcaagctcatgtgcagcttcggtggcagcatccagccccgcccccacgacaaccacctcacctacgtctccggcgacaccaagatcctcgccgtcgaccgccacgtcaagttcccctccctcatcgccaagctctcctccctcgccaacaacaccccctccaacctctccttcttcaagtaccagctccccggggaagatctcgacgccttgatctccgtcaccaacgacgacgacctccaccagatgatgatcgagtacgatcgcctctcccgcgcctcacctagacctgcgcgcctccgtctcttcctcttccctctccacaacaactgcaatttcgctccaaccgaatccaaatccgagcgccagtggttcgtcgacgctctcaattccgttcacgttccagaagattctccgccgccgcctccggcgacggcgaatccggattttctgttcggactcgacaagccggcggcggaggatgctctggcgaaggactcggagtgttttcccgaggatcgtgaagccgaacctcagattgagaatgagaacaacagtaaacaacttctgcaacggataatgaagataga

SEQ ID NO: 134335 - DNA, 328 bp, Glycine max
  Clone ID: PAT_MRT3847_92312C.1
ggtgttggaaatacctccatatttgcattaccaaacaaattatagccaaactgttctaacaactttttttttttttaaatcatagacataaaccaattttgtcacaagcccatgccctaaaaatccatattgtagcaataaccttggggaagaatcagaggttaaaatgagtgaggggcttgccaccttggggggcaatccttgttttatgggcttaactcctaataaagggatgtatgagtggtcacccacctttcttgaaatgggatggcctaacttctgcagggataaatgatcctgtcccaacacctggagggctttgatttcc

SEQ ID NO: 134336 - DNA, 510 bp, Glycine max
  Clone ID: PAT_MRT3847_92313C.1
ggaatgaggcacggaccgggacctgcctgcggaccaaaaaatggtattgggcgtcgccatggatctcgtcgtcacattcgtgattggcgaggcctgtgagaaagtgccatccgcccacagaagcacgcagggatagaatgaggaagaccgaaaccaaacacgcctgctccggaaggccatggttcagtccaaaccgtggcaaggacttgacgcgcattctctggcgagcccacatcctacctgactggcgagttaacaagtgactacagctgcgacactggtgggctttcggacgacccacaaaccttggccagaaaccgagagctcgaactgatccactccaggtgggccatgctcggtgccttgggctgagtcttacccaaactgttgacccgcaacggggtcaagttgggaaaatctgtgtggatcaaggccgggtgccagatattaaacgagggtgggctggactacttgggcaacccaagccttgtacacgcacagagcatcctc

SEQ ID NO: 134337 - DNA, 187 bp, Glycine max
  Clone ID: PAT_MRT3847_92314C.1
tttgtctaatatgatggcagttgatccatcttctagaaagagtgagctgtttcaagctgcacagaatgggttgagggaggctgggatagatttcaaatttagtaagcttcttggagatgggaaggttgcagcttcatatgacaagtcagatacaacggaaaaacaagaggatgaaatatattccttg

SEQ ID NO: 134338 - DNA, 948 bp, Glycine max
  Clone ID: PAT_MRT3847_92315C.1
acgagcaccattagctctgccatttctcccgccggcgccgcgcgcccgacgcggtcttctcacgaggtgccggtcgtgctcgtcccctttctgtcgccattctcggcgatccgaagcgcaaaacaaccgcaatcccttcgaatttcgtgtctcgatccctaacctcaagctggaagcgatgcattggatacagcgcaagatctaccgttacaatgtgtcttttgggctgtatatgttggactggtgcgagcgttgtaccttcaatattgtggtgcttgttttaatagtgttccgtgcttcgatctgttgctcaggcctacccaactaatggccgtagacgacccaaaggggttaccatttgtgatttgtgagttcctacgcagtgttctctttcgttgttgttggtcgtgctcgtcctcctttctctcggcgatccgaagcgcaaaaccaccgcaatccctacgaatttcgtgtctcgatcccgaatctcaagctggaagagatgaattggattcagcgcaagatctacctttacaatgtgacttttgggctgtatatgttggactggtgggagcgttgtaccttcaatattgtggtgattatattaatgtgtttcgttctacgatacgttactcagttcttcaagaggtatgtttggtaagaagcaaaaccattgtcacgggaagaagcaaatgtagattggtgtagctgaatagggaatatcttgatatagcctgacttggaatttcttaaagctacccaaaaattgagcttttgatgccccaactatacaccgtcatgaatcttatttgaacatttattttcatataagcttgtatgggatgccaattagcattctttacattgtaataattgttgggaatgctcagtactaagcgttttgactttttgaatagtggaaagtgtgagctcctccgtaatgccatc

SEQ ID NO: 134339 - DNA, 614 bp, Glycine max
  Clone ID: PAT_MRT3847_92316C.1
tccgggaaaaactagaaattgttaccatttgtgatttgtgagtttcctacgtagtgttctcattcgttgttggtcgtgctcgtcctctttctgtcgccattctcggcgatccgaagcgcaaaacaaccgcaatcccttcgaatttcgtgtctcgatccctaacctcaagctggaagagatgaattggatacagcgcaagatctacctttacaatgtgacttttgggctgtatatgttggactggtgggagcgttgtaccttcaatattgtggtgattgtattaatgtgtttcgttctacgatatgttactcagttcttcaagaggtatgtttggtaagaagcaaaaccattgtcacgggaagaagcaaatgtagattgttacttgggggttaatattacttgcagccggtgtatttggtatagatgactagggaatatcttgatatagcctgacttggaatttctttaagctacccagaaattgcccttttgatgccaaatatacaccgtcatgaatcttatttaaacatcttataagcttgtataggatgccaattagcattctttacattgtaataattgttgggaatgttcaatactaagcgttttttgag

SEQ ID NO: 134340 - DNA, 224 bp, Glycine max
  unsure (1)..(224): unsure at all n locations
  Clone ID: PAT_MRT3847_92317C.1
gcgagggattgatagtgtgtccaatatattacaaatgcttgtagacagtcagaagttttgcgtggcaatttgtttccactttatgtgcgaccaggccanatttagctactgggtacgttgggaaaacaaacaaacctctaacacacaaaaatactactagtatcaaatttaagaacccgagaccaagagtactagaaaaataaaataaaacactacatattaaa

SEQ ID NO: 134341 - DNA, 800 bp, Glycine max
  Clone ID: PAT_MRT3847_92318C.1
ggctcgaggcgcgaaacgatgttttggcgcaacatgttgctcttcaacagccatgttgatgttactgtaacctttcttcttcttctgttcctatctctatttggaattggatcatcctcagcagcacccttttacatcgatacttactgcccaaagaacgcatcgtacaattccaacgtaacattcgaaaccaatctcaaagtcctcctcgcaactctcgtctccaacgtttccatgtccggcttctactacaccttcatgggcttgggaaccacaagcgtcgccaacggccagttcctctgccgcggcgacgcctccgccgccacgtgtcaggactgcatcgccaccgccgccaaagagataactcgactctgccccaacaaaacagagtccataatatggtacgacgagtgcacgctctatttcacaaaccactacttctcccgcaccggcatcgaaccgcgagccatgttgtcggacgacaggaacatctctgcctccgacttggacagcttcaaccgcacgttgttcagcttgttgaacgatttggcggaagaagccgcgaattctcagtcggcgaagaaattcgccaccggccaaagccgattcgacgggtcctcgccgcagagaactgtgtatgccctggcagagtgcgcgcccaccgaaacgagtactcagtgtgaagagtgtttgaaaaatgccatttcaactcttccttcgtgttgcggaggaaaacagggagcgagggctctgcttgcgcattgcgatgttagataccgaatggtcctctttacaatact

SEQ ID NO: 134342 - DNA, 472 bp, Glycine max
  Clone ID: PAT_MRT3847_92319C.1
gatatattacaagacagttttaataatgttctgatatctattggtttatgtaatgcttattttcatgttgcatagctatattgtttgatttatgcatttcttttatcactttcagtgtcaaattactaagttattctgtttattagtccataaaagtttttacatcattggtccatttttggcatgttgccacttctatgctgcttattggttgagggcttgagggttagaatatttactcacatatgataatatgaatagttgagtcgagaagaagatttttcttctttttttgggagaataagaaaaactgttaaaaatattttccataaaagaaaaaaaaacacttgaagtggttattttgtgcataaatatgatagtttaacaatcacttgactcattgttgtttattttggtaaatactttttttaagttttacttttttgttcccatttggtggggtggattggag

SEQ ID NO: 134343 - DNA, 223 bp, Glycine max
  Clone ID: PAT_MRT3847_9231C.1
gacgacataatgggactgtatttcgtcggcggtgacggaatggaaaggggaagaagatgcgttgtttcggagagttcgaagatgtcggtcgttaccaacaacaacgaggaagacatgaagccaaccgatcagggagcacacatcaaccttagtgtttaaggggcaggttgggtatgaagttttttttatgatcatgagaagcactctattgaagaagcttatg

SEQ ID NO: 134344 - DNA, 2447 bp, Glycine max
  Clone ID: PAT_MRT3847_92320C.1
tttggaacactggtgctattaatgggcatatctcccatatgaaaaaggtgcatattatctttaagacacagactgcctggaaaattagggaaggaaggttatattggtaaaattttgtaattcttttttctaattttttggtgaaaaagttctagtctcaaatgtcccatctacatatgtctatttcaaatataggtatactgtatataccagtgttttaataatgttctgatgtctattggtttatattatgattaatttcatgttgcatagaacatgttagatatattacaagacagttttaataatgttctgatatctattggtttatgtaatgcttattttcatgttgcatagctatattgtttgatttatgcatttcttttatcactttcagtgtcaaattactaagttattctgtttattagtccataaaagtttttacatcattggtccatttttggcatgttgccacttctatgctgcttattggttgagggcttgagggttagaatatttactcacatatactacaatttcaatcttatgaaccctcctttctctgtctttacttttgatgcatcaattaactgactggatgtcctagtattcattatactggcatgtttggctcacttctgattcaactggatgtcctaatgctttatgctttctttcttcaactgactaatatctcctttgaggcatatgataatatgaatagttgagtcgagaagaagatttttcttctttttttgggagaataagaaaaactgttaaaaatattttccataaaagaaaaaaaaacacttgaagtggttattttgtgcataaatatgatagtttaacaatcacttgactcattgttgtttattttggtaaatactttttttaagttttacttttttgttcccatttggtggggtggattggagccttgcagggaagtaggaggatacatggttatggacttggtttttatagcacacactctcagaaaagattgacctgatcctgactcacctccaagggggtctagtcatcaggtttatgaactagattgccttcaaatttttgttaggctgattctttagatgcaaagtccatcccttgttgtatttcagttataattttgacctgacatttattagtttaaatctcttgctctacacaataaatattatttttaataggatgaacatatggattgatttaattgttttgattcttctggcacgtaactaacaaaataacttgacgcttcttcaaaactaacatgtcaaagatgtttagtgtaaaaaattttaggttttccatgactagttttaaaactgcagcatgttacttgaatttcttcttcacaggcttgtctgaagaaaggtactgctataattggacttgttatgtttgatgatcaaattggctgcctcatttatctactgttcaccagttttgaaactcatttgtttggatcaggattcaatagaggtatgccttaaaagcataaccatttattagtgccattgtcatcatggaggttagtttgccgttgattgtggttttctatcaagtagtttaggaaagggtaaacagaaaaaagggagaaaaaaatgcagaagacatgtctcatgtctattgtccagtttatatgttatctgcctactatgaaaaacatccacttatgtggcatttccccccggttcaagaggccatttttcttgcttaacaatttgtatgttttcacaggcgtcaactagaagcagagttgaaattaatagaagaagagactgcaaagagagttgaagaagcaatacgtaagagagttgaagaaagcttgaaatctgaggaggttcaggtggagattgaaaggcggttggaagagggacggaagagacttaatgatgaagttgcagctcaacttgaaaaagaaaaagaagctgcccttattgaggctaaacagaaggaggagcaagcccgtaaagagaaagaagatcttgaaaggatgcttgaggagaaccggaggaaggttgaagaagctcagagaagggaagctttagagcagcaaagaagggaggaagaacgatataaagagctggaagagatgcaaagacagaaggaagaagccatgcgaaaaaagaaacaggaggaggagcaagaacgtctaaaccaaataaagttgttgggtaaaaacaaatcccgaccaaaattgtcatttgcttttggatccaaatgaccattggcttgggcaacctgtgtctatttatttagtctaaagtgtgtttgggcttaattccctatttgtgtctgtaatttgaggaaaatcaggaaattatacacagcctcctcaactataatgtgacagcgttgttaccgttttcagtttgcattagatttcattgtttatcattgccccaaaaaaaaaaaaaaaattaaaaaaacacaacccc

SEQ ID NO: 134345 - DNA, 586 bp, Glycine max
  Clone ID: PAT_MRT3847_92321C.1
cggcaatgaagcgtgaaacaaaggctcctacctgcttaaaataatatggcattcattaattgttagacactgctatatatattttgcgcagaactgcaatatcaaaggctcctacctgccacatgatcgaagaaatctccaggagatcattgtacgctaaccacagcgttgataatatctcggcaaggagcttcgtcaattgttggtctcaacatatttgaagaatctgaagatggaatacctaggatattatggaaaatcttccggaaggatacataatcaggtgcagtctgaagggattattaatttgcttaataaattaagattcgcataaaggtatgtatattttttaataggaaccattgatccaccgttatatgattgagatttatgagaattgttcttgtattttataacattatatagcggggctgcccctgtcctttgtggttgattagcataggtaccattgaccaatgatcacacgcttgtgctacagagctttagacggtggcctgatgtactgttttatagccgagttgatgactgtttcttatcatttgtattattaaaattgtctagtcta

SEQ ID NO: 134346 - DNA, 334 bp, Glycine max
  unsure (1)..(334): unsure at all n locations
  Clone ID: PAT_MRT3847_92322C.1
ggggaaaaaaaaaaaaaaggttcattattaaaaagttggggaccaaagcacctttttttcccccccttttcccatccatgaaacttttattttgggcaaaaccctggagagggaaaacaaaagcgtgaaaagaaaaagttaagagccccccttggaatattttgagatgttatgcccccttttggggcccctttttttggggtgttggtaagcacccctttggccaccctgaaaaaaggggggtcataagcgggggggtcccttgggtaggggggcttcccaaagcgggggttgtaacccggaggttttaccaagggggttttntatggggggt

SEQ ID NO: 134347 - DNA, 318 bp, Glycine max
  Clone ID: PAT_MRT3847_92323C.1
cgttcgtccacgcgggcgcccacgcgtccgtgaaatcttagattagtgctcccactcttctatctggtatcggactacacgggtagacaattctatttctctcctttctttcactctgttcttctcaccgatccggattgccgctgaaagaggtcttatttgaaaaacacttgggcgctggcgcaaatgcttgcttacataattgtctctggagacaacaggctcactgagaaaacagtttttacttgcagagatttggacatcttgggtgtgtattatacaatagccacccaacttaagaaatctctacccgagtac

SEQ ID NO: 134348 - DNA, 794 bp, Glycine max
  Clone ID: PAT_MRT3847_92324C.1
tgcatgcactgcagattttctgccttggcaaccctgaaaggaattaaagctttgactgaagtttgtgctgaagattctgtgtgtcaggacatgatagttgactttgggattttatgtttgctgaggcgctttttgctgagtgatgattatgagaaactggctgctattgaggcttatgatgcatcatctagagcacatgaggggaaggaacggatatcaaatgtagatggggaaccggctacaccaaatgtaaatgatccagccagtgtccgagttcctcctactgctcatatccgcaagcatgcagctcggttgttgaccatcctctcactgcttcccagagtcaagaaggtaatcacagctgatgaaacttggtgcaaatggcttgatgattgtgctaatgggcggattccaggttgcagtgaccttaaaatgcaaagctatgccagggcagcacttttaaatatgttttgcaatgaccagcctaatcgaaaatctgaaagtggaagtggaggcccttctgatggtggtgtaccaaattataggaactcttgtcctcgttatgatgacatgatattcttgataaattctcatcttccccactggaaatgtcccaaagaaacagatcaacaagaagctttctcagaggagatatctctgtttacttctactgaaatgggggatggaacagaatctgtgaatgacagcaacggttctatttctaatgattcaactaaaagcagcccagatgcagattgtcctccactagacatagtttttgtccatggactacg

SEQ ID NO: 134349 - DNA, 410 bp, Glycine max
  Clone ID: PAT_MRT3847_92325C.1
ggctcgagctcaggctcaaccagcaatagctaatatagttttcgaagcgtaagctaagaaatgggacactcgggatgaatgcgggaccaataacataacacacgcctatatgcttctgcacatgccaggtgcggcacttgcgaggggatatgagtccgctgacgacgatagtcaagccggcgacgcaagaaaggaccacgtaattcgtggacaccaacagcaggaatggaagacaaagaagctgccgcttggcaattaacaccagatcaatgtttttgcaaagccacttgacaggatatgcttaagggattcaggatgagaggtctaccactgtcagtagcgtcctgaggcagataccaatgtaactgatcagacattggctgcgggaacgggattcaatatgcatgaca

SEQ ID NO: 134350 - DNA, 620 bp, Glycine max
  unsure (1)..(620): unsure at all n locations
  Clone ID: PAT_MRT3847_92326C.1
aaagcggcacaggatgcaggaggtgatcttcgagtttatctaaaagggctggctaaggccgagaatgtgcaaaactacgtgtcagaaaatccgtttggccaacggcccataagagaagcaaatccatcttgggtttactatcgtagagttatagagtcacttaaaagaagccaaaatgcagggtcctcattaccactctgatgaatgaatagctgttgagttttggttggtaaggtgtctgaaatagatcagtcttgtatacttgctacttaaagcaagactagctgggcacatgattctactgtgattaacgccttcttcatggtagtgcctaaactgtattctgttcattattttttggccttcaaacgtgattgatttcacgttggaaactgttgaccaatgaatgcgagtttagagtcggtcaaaattgattttgtctttgactattgtttttcgcacttctcaaacctgtattaactgaataaactagaatctgatttgaagctnncnnaaaaaaaaaaaaatttttaaacaaaaaaatttaaaaaattttaaaaatatacacatcttttatataaaacccaaaaaaaccccccttaatttttttacctttttaa

SEQ ID NO: 134351 - DNA, 541 bp, Glycine max
  Clone ID: PAT_MRT3847_92327C.1
ggctcgaggttagttgaagactcccaccttgacatactatcacgtattctcagaagcaaaggtgctgctaggaggtccatccagtatagctataagcatggcttctctggattcgttgcagttttaagtcagtctcacgctaagctcattgcaggatgtggcagcatcaacttatgttgaggatacactggccattggctcttttcatgctgtagccaaaggaatttctgtgtatgctctggtggcaattctagtccatatccccaaactgtcataaacactgccccttggcttattaccgtttctgccagaaccattgatagagaatttccatctaggattatcatgggaaacaatcaaactctacagggtcagagtttatatacagggaaagatctgagcaagttttatcgtattgtgtttggagaagacatagcagcttcagatgctgatgaaaaaagtgcaaggagctgcaattcagggagcctgaatgccaccttagcaaaaggaaaagcaattctttgtttccagtctcggtcac

SEQ ID NO: 134352 - DNA, 442 bp, Glycine max
  Clone ID: PAT_MRT3847_92328C.1
aggacgcgtgggagaagattattcgttaattgattttgtctattcgatttcaaaagctttgttctttattgaaaaatctatgactcgctatttttctgaaatatatgttttaaagcattgaagaaattctagaacgatatgttaatctttcggagggtgaacacggaaggtaagagcttgtgtatttttaacttctgatacctgatactagttaatcagtttatcctaatgttgccacctttgatttatcgaccatgtgggcttaatttaaactcttgttgccgtgaaactctaaaagatgcataataaagagcaaaatcaaaagttgcttagtaagttgaaagatgaagctggtcaaatatgtcaagcccctagctcaatgacttcagattcccaaattgaggatcttcgaagagaaattttcacttgcaagtctcaattg

SEQ ID NO: 134353 - DNA, 564 bp, Glycine max
  unsure (1)..(564): unsure at all n locations
  Clone ID: PAT_MRT3847_92329C.1
tcgatctatcgctagnaatgtaccagataccgtacatgcacaactgaagaacagcaaaagcaaacgctggcggggcgggcggctgatacggggccgactagagcaagcttagcctgtacatgattacaacggtttgtgttaaagcaaaatgcccgggccgccctaagatactaagcaccgcctagcgcttacggccacctggcctcgccaactaaataatcgacgtaacgcctaaatgcggttgctactggctccacacgatagactgcatgatcggtgaccacattaagagacagtacaggttaaaatacggaattaataactggagggtgagctgaaagtttgtaaatgtattaataaacagcgtgggcgtggccatcggcatcatatgatgtgtgtgaagtgttacgaggggctgaattagccagggccgcgccaattatataagatcatcctcgggaacaatgcccggtggcagcctcacctaggtctatgcttacacatgtggaaaagcgataatagatgcggcctgtgtcctagtaacaggcgagggtgagtacaaac

SEQ ID NO: 134354 - DNA, 161 bp, Glycine max
  Clone ID: PAT_MRT3847_9232C.1
gcgccgtaagctaggaatccgaattcgggtagagggaataaatggctatggattactgcaactgaacatgagaactggcccttggtactgatgtttcttttgacaccgagattggtgagttaactggatggaatgctggattgaacttcacaaagatgatt

SEQ ID NO: 134355 - DNA, 184 bp, Glycine max
  Clone ID: PAT_MRT3847_92330C.1
gtttcagacacacccagatgctcccagttggggttgggcagccatggaaactggaataatccctggaccttggggattccgctctctatacaaatgggatgtatgcagcattactggggcccttaccgggtgttgtgaccttgttggggccctgacaggagctatggttggggctataaccgct

SEQ ID NO: 134356 - DNA, 236 bp, Glycine max
  Clone ID: PAT_MRT3847_92331C.1
tacacgagaagaccaaagagtgctacggctcctacatgaccacaaagagggacacaagtgagcaggatacgatatccatagcatcctgagaaatgacgagtacattggtcgacctctttctactttgtgccgtgagctcttactctacctgcagacaccggtggtgatgtggacgacactgatgataatactgctgaagatggaggcacatactgtgtgttgacgactataatatt

SEQ ID NO: 134357 - DNA, 396 bp, Glycine max
  Clone ID: PAT_MRT3847_92332C.1
aaaaaaaaaaaccgcccccccttaaaaaatttttttttgcgtttttaaaaaaaaagggcattgccacccgggcttgggccatccctttaaatccctataatttagacccccctttttttaggctcctttaccctttttttttccccaaattttaaaaaaaaagggggaatcaaacaagatctttgacaattaacccatttttgacccctccaagtgtccaaaaaattttggaacccatgttaacaatttagcccaaatttttttttttttaaacccctattaaaatagaactttttaatcgcaaaaagggagagggatcctttataccaacccccaccccaattttttttttaactttggagaaaaaaaatttttttttcacagttttggccaaaa

SEQ ID NO: 134358 - DNA, 1173 bp, Glycine max
  Clone ID: PAT_MRT3847_92333C.1
gtcgacccacgcgtccgatttctgcccccagtaaggatgcccccatgtttgttgttggtgttaacgagcacgagtacaagccagagcttgacattatttccaatgctagctgcacaaccaactgccttgccccgctcgccaaggttatcaatgacaggtttggcattgttgagggtttgatgaccactgttcattccatcactgctacccagaagactgttgatgggccatcagccaaagactggagaggtggaagagctgcttcatttaacatcattcctagcagcactggagctgccaaggctgttggaaaagtcctccctgctttgaatggaaaattgactggtatggcattccgtgttcccactgtggatgtctctgttgttgacctcacagtgaggctggagaaggaagcctcctacgatgaaattaaaaatgctatcaaggaggaatcagagggcaagttgaagggaattcttggttacactgaagatgatgtggtctccaccgactttgtgggcgatagcagatcaagtatttttgatgcaaaggctggaattgcattgaataagaactttgtgaagcttgtttcttggtacgacaacgagtggggatacagctcacgtgtcattgacctgcttgtattcgttgccaagaagtctttttaaggtggtgtactgcaaagttgcttgtctacacattatgtgcttgtctagttgcgatttagtgtcttgctcgtgcaaaaaatgagaggtctgaataaatcggtttctggaaccagtggatttaccttgttaggagcattagctctattttggactttgcctcttgtggaggaggatggagtttttggatttttatatatttgctaatgtacttgtcgttattgattgttatagtagatatttggccgtcctctatttttccacgtggttctcgtatacttgtccatgttaagacagattccagtaatgacgtttcggtggtttatcgaaactaatggttacatggaccttttaattaaccttacactttcaataagttgcggtattatttgaccctcttctctttgccttcctctctttctccccgtgaaaatcatgttgcagattgtcaacaatccattttgaataaccttttgtagagaaataataagacccatacctttttgct

SEQ ID NO: 134359 - DNA, 801 bp, Glycine max
  Clone ID: PAT_MRT3847_92334C.1
agactgttgatgggccatcagccaaagactggagaggtggaagagctgcttcatttaacatcattcctagcagcactggagctgccaaggctgtcggaaaagtcctccctgctttgaacggaaaattgactggtatggcattccgtgttcccaccgtggatgtctctgttgttgacctcacagtgaggctggagaaggaagcctcctacgatgaaattaaaaatgctatcaaggaggaatcagagggcaagttgaagggaattcttggttacactgaagatgatgtggtctccaccgactttgtgggcgatagcagatcaagtatttttgatgcaaaggctggaattgcattgaataagaactttgtgaagcttgtctcttggtatgacaacgagtggggatacagctcacgtgtcattgacctgcttgtattcgttgccaagaagtctttttaaggtggtactgaaaaaaaagtagcttgtctagacattatgtgctggtgtctagctgcgatttagtgtcttgctcgggcagaaatgagaagtatgaataaatcggtttcgggaactggtgttgttaccctgttaggagcattaagcttttttttgttgtctcttctgtgtaggggatggagtttttggattattatatacttgctgatgtactcggctctttgttgattctgattgccgccccaaaaaaaaaaaattaacaaaaaaaaaaaagaaaaaaaaaattttaaattagggcggccgctataaaggccgcccgctgtaaagggatcccaagcgaaacgtacgc

SEQ ID NO: 134360 - DNA, 278 bp, Glycine max
  Clone ID: PAT_MRT3847_92335C.1
atcaacacatgggaactaatcgaacgacttgaagacacaacaagccctttcagatcaccaaagcacttcaagagcttctcttttgatgtcaatgtcaacaggcatgttgatgttgctgatgttgatccacccttaattcagaatggcaatgattcagccaaaccaatatcggtttcagattctgatgatgagcctcaagagaatcaagagagcatggacagaaaaaggttcttctctattgaggaagagatgatcagtgatgatgttgtttcttcatt

SEQ ID NO: 134361 - DNA, 203 bp, Glycine max
  Clone ID: PAT_MRT3847_92336C.1
aatattctccgaggcatgagacaagcgaattccatttccattcatgaacacatacaaataaatattcatccattttagacttttatgtgataaaaacaagtgagacaacagaaataaagacaaaggatgcaattgattttacaggtaacaatatcattggacaaagccattttcagctgacgaaggagcgacctgtttgatag

SEQ ID NO: 134362 - DNA, 585 bp, Glycine max
  Clone ID: PAT_MRT3847_92337C.1
ggctcgggcaactacactatggcgactaatcttcctgcaacgaagtccaccacgacgacgtcgtctcaggagaaacgacaccgttcgatcttcgaagttccaccgaacttcttcgactcttgtcgtcttctcccttctcctcactcatccgtttccgaccaccacagcgtaggccaaacccaaatcatcgaaacatcctcaaacgacgacttcgttttggatgcccctcaaaacgccgtcgtttccgcgcctaggtggacctgcaatacctgcaagactcaattcgattcccttcaggaccagcgttcccatttcaaatccgacattcatcgattcaatgtgaagctgacaattgctggaaagaatattgtgaaggaagaagattttgaggttctaacatctgaatttgtcaaagactatgatgtgtcaagtatatcgggatcagaaagtgacgatgatagtgaaaccgagtctcagagtcaaagtgcattgcatgacaaattgagcgaaagttttaaacataaactattcttccgtcttcagacagggcagagagtttctgtctggaagtgcttgattatgaat

SEQ ID NO: 134363 - DNA, 358 bp, Glycine max
  Clone ID: PAT_MRT3847_92338C.1
cgccgccctcaccatggcccttgccgccctcggcaacagcgccccgaagaagtacgacgagatcgacgccgccccctcaccgtccgcgccgccgcggcaagttcgagcgcaagaagccccacgtgaacatcggcaccatcggccacgtggaccacggcaagaccaccctgaccgccaccgtcgagtacgagaccgagaaccgccactacgcccacgtggactgccccggccacgccgactacgtcaagaacatgatcaccggcgccgtccagatggacggcgccatccttgtcgtctccggcgccgacggccccatgccccaaaccaaagaacacatccttcttagccaagcaagtcg

SEQ ID NO: 134364 - DNA, 740 bp, Glycine max
  unsure (1)..(740): unsure at all n locations
  Clone ID: PAT_MRT3847_92339C.1
atcatattcgagttaaggcaactactggagacactcacctcggaggagaggacttcgataacaatatggtgacttactgtgtgaaagagtttaagagaaagaataaaatggacattagtggaaacaaaagagcccttaggaggttgaggactgcttgtgagaaagcaaagaggatactctcatgctctacaatgaccaccattgaggtagactctttgtatgatggtattgatttccactcatcaataagtcgcgcaaagtttgaggaactcaacaaggactaccttaacaagtgtattgagtttgtagggaagtgtctgatagatgctaagatggacaagagtagtgttcatgatgttgtcctcgcaggtggatctactaggattcccaaattgcagcaactattaagtgacttctttgatgggaaggatctctgcaaatgcatcaatgctgatgaggccgttgcatatggtgctgctgtccatgcttatatgcttaatggtgagtccagtgagaaggttcaaaacgcttcactttgggaagtcactcctctttcccttgggttgcaagaagattgaggtatcatgaaagtaatcattcctaggaatactagcattcctacaaagatggaagatgtactcagaacacattntgataaccaaaccaatatcttgattcatgtatacgagggtgagaggaaaagaactagagacaacaacttgttggggtaagtttgtgct

SEQ ID NO: 134365 - DNA, 239 bp, Glycine max
  unsure (1)..(239): unsure at all n locations
  Clone ID: PAT_MRT3847_9233C.1
ggcganaaacttcaataggcgaaaataaattaaactctaaaatggttgtaagaaaaacgacccgaacataaaccacaattattttcttgcacaagggcgttgactagggggatcccaagaaaccaggagaaatttcatttgcctgcctggtcatatcaagggggaggatgagaggtgctccccccaacaaaaccaccggcaccaaagggacctcccaatactcccaacccaactattcc

SEQ ID NO: 134366 - DNA, 408 bp, Glycine max
  Clone ID: PAT_MRT3847_92340C.1
ttgctcttagagagaaaaaaaagaaaagaaaaagatgtgattcggggcgtccctccaaaattgaggcagaaagaggatagaagtgatatgaggtccttttttatccatccatccacacactaccactagataacacaacactaaacaatttacattactcactaccaccaccttcccgggccgtcccctcaccgttcgcgccgtccgcggcaagttcgagcgcaagaagccccacgtgaacatcggcaccatcggccacgtggaccacggcaagaccaccctgaccgccgccctcaccatggcccttgccgccctcggcaacagcgccccgaagaagtacgacgagatcgacgccgccccggaggaacgcgcccgcggcattaccatcaacaccgtcaccgttgagta

SEQ ID NO: 134367 - DNA, 269 bp, Glycine max
  Clone ID: PAT_MRT3847_92341C.1
cgataaaattatttttctatgatataatttgtaaatgtaaattattccgatctgacatatctgcattataataataggagaatagaagaactggtagccacagtggtgaaattggaaagagaactttcttcctgaaacctttgtcttaaaaatactcagctttcaatgtatcaaagatacaattaaataaaattttcaagcttctttaaaaaaaaaaaaaaaaaaaaaaaaaaaaaaaaaaaaaaaaaaaaaaaaggtgggggagtatt

SEQ ID NO: 134368 - DNA, 1962 bp, Glycine max
  Clone ID: PAT_MRT3847_92342C.1
caggagagaaaaattttcccattttatcccttcagcttgcttcatttgcattcgacttgggttaacagtgacctagagagagaaaaaaaagaaaagaaaaagatgtgatccggtgcgtccctccaaaattgaggcagaaagaggatagaagtgatatgaggtcctcttttatccatccatccacacactaccactagataacacaacactaaacaatttacattactcattacactaactcaatcctcagtctatccaaattctccagccatggcagtttcttctgcatctgcttcctccaaacttatactattcccccatgcttcatcttcttcccttatctccacacccttccgttcctccaccaacacccacaaactatcccctctctcctcctccttcctccaccccaccaccgtcctccgccgcaccccctcctccaccactaccaccacctccccgcgccgccccctcaccgtccgcgccgcccgcggcaagttcgagcgcaagaagccccacgtgaacatcggcaccatcggccacgtggaccacggcaagaccaccctgaccgccgccctcaccatggcccttgccgccctcggcaacagcgccccgaagaagtacgacgagatcgacgccgccccggaggaacgcgcccgcggcatcaccatcaacaccgccaccgtcgagtacgagaccgagaaccgccactacgcccacgtggactgccccggccacgccgactacgtcaagaacatgatcaccggcgccgcccagatggacggcgccatccttgtcgtctccggcgccgacggccccatgccccaaaccaaagaacacatcctcttagccaagcaagtcggtgtccccaacatggtcgtcttcctcaacaagcaagaccaagtcgacgacgaagagcttctccaactagtcgaactcgaagttcgcgaccttcttacctcctacgaattccccggtgacgatacccccatcgtctccggctccgcactcttagccctagaagcccttatggcgaaccctgccatcaaacgcggcgacaacgagtgggtcgacaaaatctacaaactcatggacgaagtcgacgactacattcccatcccccagcgccagaccgacctcccattcctcctcgccgtcgaagacgttttctccatcaccggccgtgggaccgtcgccaccggccgcgtagagcgtggcaccgtcaaagtaggggaaactgttgaccttgtaggattgagagagacaagaaacacaacggtcacaggtgtggaaatgttccagaagattctagacgaagccctcgccggggacaacgtggggctgttgctgagaggggttcaaaagacggacatccagagagggatggtgttggcgaagcctggcacgattacgccgcacaccaagttctcagcgattgtgtatgttttgaagaaggaagaaggtgggagacattcacctttctttgcagggtataggcctcagttttacatgaggaccaccgatgtgactgggaaggttacggctatcaccaacgatagggatgaagagtcgcagatggtgatgcccggtgaccgtgtgaagatggtggtggagctcattgtgcctgtggcttgcgaacagggaatgaggtttgctattagggaaggtggcaagaccgttggtgcaggtgttatccaatccatcattgagtgaaaattgcctcacttcatttttaattaattaatttttgccgttttatacagcttctctactttgcttgccctttttcttatactttaattgtatttgtaggatgcctattattggataataatatttttctatcccaaatgaaaatgtctttgtttgttattagtgtttcacttgcttctcttttgctgttgagttccttcaattgcaatcaatgatgaagtttatattgaaggatgaatgattttcttc

SEQ ID NO: 134369 - DNA, 666 bp, Glycine max
  Clone ID: PAT_MRT3847_92343C.1
gtacattgaaacggggccccctgaaagttcagagtgacatgtgaagtttggtgtagtcctatatgagatcctcacaggaaggaggtcattggaaagaaaccgtcccacagcagaacaaaagcttttagattgggtcaaacaataccctgctgacaccagccgattcgtcatcataatggaccctcgtctcagaaaccagtattctcttcctgcagctcgcaaaatagccaagttggctgatagctgcttgaagaagaatccagaagatagaccctccatgagtcagatagtggaatccttgaatcaagcattgcaatattcagacacttctctagacattgctgaatcctcctcctcctcctcatctcggtctaaattggtccgaaaaaagtaaatattgagttcttatttttgaaggacttttgggaaatttagcagtttaaggcataagttgatgagatcatctatgtattccattgaggtagttttctggtcaatcttggaagtcagttttgaggattttacttgtttgtttggcctagttcaaacaaaaccaagtcatttattttgtcaactgttggcttttaatacagtttagatgtcattgtagaaaattattctttacttctaagttaaattattcaactattggccattcccataagg

SEQ ID NO: 134370 - DNA, 1780 bp, Glycine max
  unsure (1)..(1780): unsure at all n locations
  Clone ID: PAT_MRT3847_92344C.1
ctcgagccgaatcggctcgagaatacacaatttttacattactcaatacactacactaacacaatccccttccctcttctctttctatccaaattctccaccagccatggcagtttcttcagcaacagcttcctccaaactcatactattcccccatgcatcatcatcctcttcccttaattccacacccttccgctcctccaccaccaacacccacaaactaacccctctctcctcctccttcctccaccccaccaccgtcctccgccgcaccccttcttccaccaccaccccgcgtcgcaccttcaccgtccgcgccgcccgcggcaaattcgagcgcaagaagccccacgtgaacatcggcaccatcggccacgtcgaccacggcaagaccacccttaccgccgccctgaccatggctcttgccgccctaggcaacagcgcccccaaaaaatacgacgagatcgacgccgccccggaggaacgcgcccgaggcatcaccatcaacaccgccaccgtggagtacgagaccgagaaccgccactacgccccacgtggactgccccggccacgctgactacgtgaaaaacatgatcaccggcgcagcccaaatggacggcgccatattagtcgtctccggcgccgacggccccatgccccaaaccaaagaacacatcctcttagcgaaacaagtcggtgtccccaacatggtcgtgttcttaaacaagcaagaccaagtcgacgacgaagagcttctccaactagtggagctcgaagtccgcgaccttttgagctcctacgaattccccggtgacgatacccccattgtctcgggctccgcgctcttagccctagaagcactcatggccaaccctgcaatcaaacgcggcgacaacgagtgggtcgacaagattttccaactcatggacgaggtcgacaactacattcccatcccccagcgccagaccgacctccccttcctcctcgccgtcgaagacgtcttttccatcaccggccgtggcaccgtcgccactggccgtgtagagcgtggcaccatcaaagtaggggaaactgttgaccttgtaggtttgagagaaacaaggaacacaaccgtcacaggtgtagaaatgttccagaagattctagacgaagccctggctggagacaacgtggggctgttgcttagaggggttcagaagactgacattcagaggggaatggtgttggctaaaccaggcacgattacgccgcacaccaagttctcagcgattgtttatgttttgaagaaagaagaaggtggtaggcattcacctttctttgcagggtataggcctcagttttacatgaggaccaccgatgtgactgggaaggttacgtctatcatgaatgataaggatgaggagtccacgatggtgctgcccggtgaccgtgtcaagatggtggtggagcttattgttcctgtggcttgcgaacagggaatgaggtttgctattagggaaggtgggaagaccgttggtgctggtgttatccaatccattattgagtgaaaattctgtcactttatttttaattaattaattttttccgttttatacagcttctgtactttgctttccctttttcttatactttaattgcacttttaggatggatattattggataataatatttttctgtcccaaatgaaaatgtctttgttgttcttgtnactgttttacttcattttcttttgcngctgaattgcaatcaatgacgaaggatgaacgattttcctgttt

SEQ ID NO: 134371 - DNA, 390 bp, Glycine max
  Clone ID: PAT_MRT3847_92345C.1
gggaacaaaaaaatcccaatttttttttttttttttttcaaccgggcttttggacaaaaaaaactttttttttttaggttcgggggggccaaacccccccaaggaaatttttgaaaaaagaaaaaaaaaaaaaggttgtcctaaaaaaaatggcccccccccctccctcccttgggaaagccccaaatgggaaatttcttttggggggcccccccctttgggcaagggcaaaattccctggggggaaacaacggcccccttgtttcctttggcccaaagtttttacacaccctaccaaaacgggtcccccccggggacccccaagggtttttcccggccccccccgattttttgtggccccagttggttgggccttcttgggcccggggg

SEQ ID NO: 134372 - DNA, 148 bp, Glycine max
  Clone ID: PAT_MRT3847_92346C.1
tctgagcatgatatccgcgaaggacatgaggaagtggaagctgttctgcaagatggacggatgcgccggcgatgctctctacggtgacccgtgccaccctcgaggcgccaccacccacgtgcacaaagactccggcgacaaccccacg

SEQ ID NO: 134373 - DNA, 268 bp, Glycine max
  Clone ID: PAT_MRT3847_92347C.1
cggctcgaggtgggccctgcaggtcctacccctcggccttgaagctccctcgggctgcggactctgcctcctgggtctgagcattagaaccaggagaggggtgtccctgggcagagccaggggtgcaaacagcctgcagccatctggccttttaagtatagtgtgtcgcatttccgggtaggaaggtagcatttcaagttcaaagagaggtcaagtcctgcaaccatctttcctccagcacttttggggtaaggaggacagtttttgt

SEQ ID NO: 134374 - DNA, 1927 bp, Glycine max
  Clone ID: PAT_MRT3847_92348C.1
cccacgcgtccgtacggctgcgagaagacgacagaatagcacaacacagcagttacgcaaggtctttatttgttcttcctcaagcaccggcaacgcaaacggatgcattacaaaaaataaaatgagataagaaattaaaagaagacgacgttctctctcggttttgattcccaatggcaacgcgaaagctgattcgtgatttgttactctccaaacgatcccttcttcaccaccagggttggagtaggagtagaaggttacctttggtttgggaagataggcgtagatacagtgtcttcaatgagttctctaagaacattaaaggccaagctgttagaaaccaagaattccaacagtctgtcaaggagctgaaagaaaaagcagatgaacttaaaggggtaaaagaagagctgaaagaaagaacaaagcaaaaaactgagaagctgtacaaacaagtggatgaagcgtggacagaagctgaagctgctgcaaagaaggtttcttacaatgttaaagagaagatttcagctgcatcagaggaggtgaaggaaacttttgggataggaaagcaggattcttcaggatcaactgattcttcaacaaaacagggtgctgatgcaaatggaggaaatcagacatcacgtgaggaagagaaaaatcagcaatctgggtctagtaaggatgctgattcgttgtttggcaaatttaaatcaactatttcccctccaaatgtttctgctgccttccaaaaattaaaggatgcaaagttagttgacataaccaaaaaaggttatgacatagtaaaagaggagttaagtagtaccccgactaagagaaagcgagttccttttgcatcaagtggtgaaacaagtacaagaacagatcttgttgttatgccatctaaacaatcttggtggagtaagaagtttgatgagttcagggagaaggtgaaaggccatccagtatccaagcgattccttaagtatagtgacccagtgaagacaaagggccaggagatagtagaggacttgcgggaaagatatgagaccagtgacagccccattattcacaaaatacaggatatcaatgacagtatgtttcaagagacagatgctgcaatttcttacaaggaaatacgtcaacgggatccttatttttcattaccagaatttgttggggaagtacaggaggcaataaaaccagtgcttaatgcttacatcaagggagacgttgaaacattaaagaagtattgtagccctgagctgattgaacgttgtaaagcagagcataatgcttaccaaagtcatggtatattctttgataacaagattctgcatgtatctgatctggaaataagagagaccaagatgatgggctcatctccagtaattattgtaatgtttcaaactcagcaaatctattgtgtacgtgataggaatggggcaattacagaaggaggcaaggatacaatccacactgtattctatttttgggcattacaacaaatggaccaagaagatcgtggagaagatggtatttacctaatgtggagactcagagagatgcaacagcaaggcatccaagctctcatctagattttgtcatgattttcagggatttgtataattgaacctttatgtcatatactacatttactgatttcatttcttggggcaaagttgtatcccgatgatacatcctttaattttttttattactaactagaaaaataatttgcacttgagttcattgatgtatgttagatgagctagacaacgtttttattctgctctcaagccagaaatgacaaattgttaatatagtcacaagttatttatttataatagtaattactagtatccttcccgtacggtaagcatttttctttgtttaccaaaaggtttggatatgccgattaatatgtgcc

SEQ ID NO: 134375 - DNA, 350 bp, Glycine max
  Clone ID: PAT_MRT3847_92349C.1
tgatctcctatgatcagacttctatgtacccatccctccttgcttgtattatataatgcatccacacaatgcaaagattgatccatgtccaccaccggatctacaacctctgaagctagcatcaatgagagtaaagtcatacacataagcgagcaatatgatgatctcattcgcaggatgcccatgctagtcagtagacacaggagcatattctataatacctgcattgtagtgtctagtccccattgcacctacactaccttaacttggaatttccgttttgcgccactatttaactccgactatatacattggatatagcatgtgagtgattatgcgtgttctatata

SEQ ID NO: 134376 - DNA, 334 bp, Glycine max
  Clone ID: PAT_MRT3847_9234C.1
accggacaaccccaccctttatgggataaaaaaaccggggcctaaagcagcttttttgggctttccccccccaaaataatggtttaattttttggggccccaactttattaaaagagggggggttaactgggcttaccgaaaaacctggccaattccaaattaccaaggtaattggtgccttttccggaagaaaggggggggacaaattaatttgggttgggacaaccttttacaaaaccccaaaattttccttactgggaattttgggcatggggaggctttaaacccaatttaatggtttggggggggccataaaatgattacgaccttggg

SEQ ID NO: 134377 - DNA, 200 bp, Glycine max
  Clone ID: PAT_MRT3847_92350C.1
aagtgatgcatcgacgtaatcaaacctcatcagttattacatggcggacgggcttgaaaggtcaactatgcaaacttgacctaaccaaacggggctaaaggagagctactttataccacgcaggaaaatagcgttcctaattacaagagaaagaacactgctgaacaaccttagatatataccccaacagtcgaaaaata

SEQ ID NO: 134378 - DNA, 517 bp, Glycine max
  Clone ID: PAT_MRT3847_92351C.1
cttggtttgcgtttttttttaaaaaataaaacctgcactccatatgttgtatcattataaaatctcccagacatcattcgtaatccaatgaccaaatacataaaaactgatacatctttcttatgccacataactataacttgtaagagatcggccagaaagatgtgccacaccttgcaagtagggcaaactctgtaaagaacatcgactttacctctacaaacctacaacaacacaatataaaatgcatagtaatttttttggaaaatgaaaaatcctcaagctaaacatacctacaaataggtggagtgtataaagtaagaactaccatgttatttttgtaaggattgtaacaaagaataacaactattattattccgatagtgaataaaatctttcaaagtttccttctctaaaggagaaaacaaagggtatacccttgaattgtctagtttgcaatcagaatcagatccttcagtatcaggggagtgaactgaaagaatagaaatgtgtgttt

SEQ ID NO: 134379 - DNA, 269 bp, Glycine max
  Clone ID: PAT_MRT3847_92352C.1
cttgagcttctccttctctctaacctaatttctgctccgacgacaacaccaacaccgaagccaatgacggcggcggcgacaccaccgcaacctgctttcattcccaccaaaggattgggaagtgtagtttgagttgatttcagcttctcctgagcaacaatgcgaaacattcagcctcatcgattttccactcttatcgaaccacccaacaaaaccccaacctcgaagccattcttccttgccatacctcaccgaaccattcccgagcc

SEQ ID NO: 134380 - DNA, 195 bp, Glycine max
  Clone ID: PAT_MRT3847_92353C.1
ggagggttcttctggagtctctaagttctccgctcatgtatctcttacgggggcttctgccctgaccaaggctgagggcttacatcatgaactctaggtattatgcaatccgtgtgacgagtgtgtcgactctctttgccgtgtactgctattcctgtccgactgagtttggatcacactaccgctattgaccgt

SEQ ID NO: 134381 - DNA, 217 bp, Glycine max
  Clone ID: PAT_MRT3847_92354C.1
aaacccctaaaagttactattctctacttccacaatctcgcaactttcctaagccgaacctaaattctctcatcaaaccctcacttatccaatccccacccaaataacacaaatcaacctcactcacctaaaataaaccatcgcctgctctctcaccgacgaaatcatcgcatcgccgcctcccctacggtaggtatctgatgggacacattatact

SEQ ID NO: 134382 - DNA, 166 bp, Glycine max
  Clone ID: PAT_MRT3847_92355C.1
acgcccacgcgtccgcccacgcgtccgttattaacataattatccctctttacaattcagtgtgaattctgaccttccagtagtcctgtttctacttttgcaaaccccagtttagaatttgtgagccccaaacgtgaatactaaaaggtttcggatttaccttttc

SEQ ID NO: 134383 - DNA, 221 bp, Glycine max
  Clone ID: PAT_MRT3847_92356C.1
ctcacatatgagagatcaagctacgaatcactctctatcatgttcgcctaatcgcatccacaaagcttatgataagaggaatgcattgcagtctccatgatcgatgtgcatgtgtgactcttatgtatattttggactgtattagtccgaccttctgtcagtcgtgtatgctctctaaaagcacgcatagccgtcgtattcgtattaggagttatggtagt

SEQ ID NO: 134384 - DNA, 1929 bp, Glycine max
  Clone ID: PAT_MRT3847_92357C.1
accagccttatgacaattggacaccaccaaaaaaagatcattttaaaaacattccctctcttccaaaaacaccctcgaaacattccatatttacaaaacaggaccatccttcaaattctcccccaccaccattggccccgcttcattcattttcattccaaactcacaaattctcaaatccaaatccaattccaattccaattcccaatcttctcaaaccctaattcctcatcttgaaaatgagagaaatcttgcacatccagggagggcaatgcgggaaccagatcggagcgaagttctgggaggtgatatgcgacgagcacggcatcgaccacaccggaaagtacagtggcgactctgaactccaattggaacgcatcaatgtttattacaacgaagcgagtggcggaaggtacgttccacgcgccgtcctcatggatctagagcccggcaccatggactccgtcagatccggcccctacggccagatcttccgccccgacaacttcgtcttcggccagtccggcgccggaaacaactgggccaaaggtcactacaccgaaggcgctgagctcattgactccgttctcgacgtcgttcgcaaagaagccgagaattgcgactgcttgcaagggtttcaagtgtgccattctcttggtggaggaacgggttctggcatggggacgcttctgatctccaagattcgggaggagtatccggatcggatgatgttgactttttccgtgtttccttcgcctaaggtttcggataccgttgtggagccttacaacgctaccctctctgttcaccagcttgttgagaatgctgatgagtgtatggttttggacaatgaggctctctatgacatctgtttcaggactttgaagctcgccacgccgacatttggtgaccttaaccacctgatatctgccaccatgagtggagttacttgttgtctacgtttccctgggcaattgaactctgatcttcgcaagcttgctgtcaatcttatcccattccctcggctccatttcttcatggttgggtttgcgcccttgacatcaagaggatcccagcaataccgtgctttgactgttcctgaattgactcagcaaatgtgggatgccaagaacatgatgtgtgctgctgaccctcgtcacggtcgttatttgactgcttcagctatgttccgtggtaagatgagcacaaaagaggtggatgaacagatgatcaatgtgcaaaacaagaactcttcatactttgtcgaatggatacctaataatgtgaagtccagcgtgtgtgatatcccacctaagggtcttaaaatggcatccactttcattggtaactcgacttcaatccaggagatgttcaggagagttagtgagcagttcacggctatgttcaggcgcaaggctttcttgcactggtacaccggggaaggaatggatgaaatggaattcaccgaggccgagagtaacatgaacgatcttgttgctgagtatcagcagtaccaggatgctactgctgacgaggacgagtatgaggaggaggaagaggaagaagagattgctgcttaaggcgcctctcttatttgtcaaaaattgtttcaaatatcgatatggttggctttgaacgagtggtgtaagtttaaattgtggtgcagtcaaattagattgactcgttaatgtgtatgcttatcgttgattgttgacattgtataaactgggttttgttgacaatgcttatgttcttgagagatcaagtcatggatgtttgtaatagttaatgactggtctcgttttcttccccccttttgatatcttgattatagtaagttacctctgaattaaaaatacaagtgtctatgaaattgtatgggtggagtattttgctttttgaaatataaaagccttttagttttttatt

SEQ ID NO: 134385 - DNA, 110 bp, Glycine max
  Clone ID: PAT_MRT3847_92358C.1
tcgctcacgcgttcgatgcgaccgaaactggatccaacgtaggctcgacacgggtgacagaacatgtccaatgaccaaagtaccgattgccgaccaccccaacctctcta

SEQ ID NO: 134386 - DNA, 1791 bp, Glycine max
  Clone ID: PAT_MRT3847_92359C.1
atcaaaaccacaaaacacaactcgtcacatcacatcacatcacatctattttcattacttcattcattttcattccaaaaacacacacacacacaaattctcaaacccaaatcccaagtctcctaaaaccctaattcgcagtgaaaatgagagaaatcttgcacatccagggagggcaatgcggtaaccagatcggagcgaagttctgggaggtgatatgcgacgagcacggcatcgaccacaccggaaagtacagcggcgactccgagctccaattggagcgcatcaatgtttattacaatgaagccagcggcggaaggtacgttccacgcgccgtcctcatggatctggagcccggcaccatggactccgtcagatccggcccctacggccagatcttccgccccgacaactttgtctttggacagtccggcgccggcaacaactgggccaaaggtcactacaccgaaggcgccgagctcatcgactccgtcctcgacgtcgtacgcaaagaagccgagaattgcgactgcttgcaagggtttcaagtgtgccattcgcttggtggaggaacgggttccggcatggggacgcttctgatctcgaagattcgggaggagtatccggatcggatgatgttgactttttccgtgtttccttctcccaaggtttctgataccgttgtggagccttacaatgctactctttctgttcaccagcttgttgagaatgctgatgagtgtatggttttggacaatgaggctctctatgacatctgtttcaggactctcaagctcgctacgcccacgtttggtgaccttaaccacctgatatctgccaccatgagtggagttacttgttgtctacgtttccctgggcaactgaactctgatcttcgcaagcttgctgttaatcttatcccattcccccggctccatttcttcatggttgggtttgcacccttgacatcaagaggatcccagcagtaccgggctttgactgttcccgaattgactcagcaaatgtgggatgctaagaacatgatgtgtgctgctgatcctcgtcatggtcgttatttgactgcttcggccatgttccgtggtaagatgagcacaaaggaggtggatgaacagatgatcaatgtgcaaaacaagaactcctcatactttgtcgagtggatacctaacaatgtgaagtccagcgtgtgtgatatcccacctaagggtcttaaaatggcatccacttttattggtaactcgacctcaatccaggagatgttcaggagagtcagtgagcagttcacggccatgttcaggcgcaaggctttcttgcactggtacaccggggaaggaatggacgaaatggaattcaccgaggctgagagtaacatgaacgatcttgttgctgagtatcagcaataccaggatgctactgctgatgaggaggagtatgaggaagaggaggaagaagaggagattggtgcttaaggcatctctcttatttgtcaaaaattgtttcaaatatcaatatgggttggctttgaacgagtggtgtaagtttaaaattgtgatgcagtcaaattagattgactcgttaatgtgtatgcttattgttgattgttgacattgtataaactgggttttgttgacaatgcttatgttcttgagagatcaagtcttggattgtttgtaagagttaatgactggtcctctttttttctccccttttgataatttgattatatagtaagttgcctctgaattaaacaataataatgtttttttgggtttc

SEQ ID NO: 134387 - DNA, 486 bp, Glycine max
  Clone ID: PAT_MRT3847_9235C.1
taataacaatcaaatgctaatacatacactgaacattttacaactatcatctggacatgtgatttttcatgtttactaagaaactaatagttatggcttccacatcaacagacatggaatcttaaatcctgaacaggacatacatgtatctaaaagctatcctcaacagacaaattgatcatcaatttcgctacaagtaaaacatgaggagggcaaactattttacagtcaacaactacaatagtattatatatagtactaactcactcactcttatacacaagccacgagaactaagaagttgcagcatccgcgaaaggagtcctatctatcccacaatcaagtttgagcaactagaattgtgtttattctccctcgactcacctcaaaccttcaaaagctgcatcttgttggcaaaagcaatggcaatccattcgggctgcacggcagaccactgcagctggttaatttcacagccagcagaat

SEQ ID NO: 134388 - DNA, 1505 bp, Glycine max
  Clone ID: PAT_MRT3847_92360C.1
gagagtgacaatagaattcctcttgatttcatatccccaaaaccatcaaccacatgtgaaatcaaatgccggaatgaaaacataatgtccaaatagatggtataaaattcgtgaaaagatttttttttccataatgaaatgccgcagtacctgtgatccacaatgtacaaatttaaataaccattcaggacaataaagatgaccttatacttctactcaacctccatagcagaatttgctttgtctaagaagctctttagttcctttactctttgccgggttaacgcagcacaatcctggatagcagaagtgtaggcaagaactggcccaccaggcttgtaaagagatattagttgaccggatgtatccaaaactactgttacatgggtttccataatggattcttcttctgcagtaggatcagccaatatgtaattcttgtgaagtatgcaagttaatgagaatggaatgcttcttaatgtaagcttcctcttctccttattgactggctcctgttctcgcttttgtccatcttcttcagacacgagtactattttgccatcatcattcatggcaacaacaggaatttgcaaatgagataaggaagcaacggcagaaagtaatgcagcatcaaaaagagcaccatcggcatccaaacagtagatatccaggtaagccatccatgcagcttttccactgaccaaggacaattctttcaaatcaatcattttggaactagaaatggtgtcagacaactgctttgacaccaccggtgatgcttcagctggcctgccaggcctaactattggagaacaaattggaggcatgtggaaatcaatagctagacagccctcatccggtgactccaaggacggagtcataacttccattttaatagcagtcaatatagtagttgatccaatcttcactagagccgacccattagcagacgcaacagcaccaagaaaaatacttgtttctctagcttttccaagtggtctaccatcaggccttatagattcagcaagatgacgctcaaaatatcgaagtggaaaaaggcgtctaaaggcatcaacctccatctctgatgacaagtcctcagaaacatttggtaatcccatctcttttcagttcggaggccctcccaagaaccgaggtggggtgaggcagctagggaaagggtgaagagaagccttggtcgttccactgtgtcgagagacaacttcaaattaggaacacttcggtcgtcatcttcaccatcatcctcatcttcgtcatcctcatcttcatcaatatcctgaacatcaaaaatagggagctcctcatcttccgattcttcagcatcatcatttatgtcaagggggacaatgtccctctgcttatgaaaagtatcaatatcgtcgtccatgtcatcactggaataagcaccatggcgagaacttgttttacttttcgagcttttggcatctttcttttgataacttgtacaatattattccccatcg

SEQ ID NO: 134389 - DNA, 1284 bp, Glycine max
  Clone ID: PAT_MRT3847_92361C.1
gaacagaattatatcccaaaaaccatccgccatatatgtgaaatcaaatgccgaaatgacaacaaattaatgttccaatagatggaataaattcgtaaaataatttcttttatagtgaaaggccacagtacctgtgatcctgattcctgaatgtacaaatactataataatttaaacaaccattcaggacaaaaaagattactgtgtaattaataattctactcaaaccaccacctccatagcagaattttctttgtctaagtagctctttagttcctttactctttgccccgttagcccgacacaatcctggatagcagaagtataggcaagagctggcccaccaggcttgtaaagagatattagttgaccggatgtatccaaaactattgtcacatgggtttccataatagattcttcttcagcagtaggatctgccaagatgtaattcttgtgaagtatgcatgttaatgagaatggaatgcttcttaatgtaagcttcctcttctccttattgactggcttttgtccatcttcgccagacacgagtactattttgccatcatcattcatggcaacagcaggaatttgcaaatgagataaggcagcaactgcagaaattaatgcagcatcaaaaagagcaccatcagcatccaaacaatagatatcctgcatgatagagaaggcagcattcaggtaagccatccatgcagcttttccaccaaccaaggacaattctttcaaatcaatcattctagaacttgaaatggtgtcagacaactgctttgataccaccggtgatgcttcagcaggcctgccaggcctaacaatcggagaacaaattggaggcatgtggaaatcaatagctagacagccctcatctggagactccaaggagggagtcatgacttccattttaatagcagtcaacatagtagttgatccaatcttcacaagagccgacccattagcagacgcaacagcaccaagaaaaatacttgtttctctagcttttccaagtggtctaccatctggccttatagattcagcaagatgacgctcaaaatatcgaagtggaaaaaggcgtctaaaggcatcaacctccatctctgatgacaaatcctcagaagcattcgacaatcccatctattttctatgttctgcaacaaaaagaaagtgtaggtcctgtctagaacggtggtagggatacgcagctagggcgaaggatgagtgaagagaaacctcgatctttctttcctgtgtcgcgaaagagaacttcaaaac

SEQ ID NO: 134390 - DNA, 159 bp, Glycine max
  Clone ID: PAT_MRT3847_92362C.1
ttcagcgctagatcactctagactccatactaagcccgagagagcttgattgacattcgcaatgtcgattggctccacttccaactccctcattcgccgcaaatgtttaatcccccggtgccaccccctcattcccaacatcaggcccgggctccggac

SEQ ID NO: 134391 - DNA, 340 bp, Glycine max
  Clone ID: PAT_MRT3847_92363C.1
aaaaaaaaaaaaaagcccccgtttatatgacaggccggaaaatatagcttttttttttttaaaaaaatgggttttggaaaacttttttattacattggaaacataatggggggggatagggaaaaaactccaaagatttttttaaatacagagcataccctttttagggggttcggccctgaaaatctggcataaaggggggggccaaggggctcaatttttttccagtctttccggcaagggttttaagggaaaagagatcctggtgggcctggaaagaaatcgattgaggggggcaccagcagtaaaaacaagggggggggcttttgagcccccaaaa

SEQ ID NO: 134392 - DNA, 250 bp, Glycine max
  Clone ID: PAT_MRT3847_92364C.1
ggattgatctacttatactatcatatatgtttactatgacgttggctatctttactttgctatcgcttctgctcgtgatgccgtctctgtgacatggaatatcgttcacgagggaggcaggaccttgatctcatactttatttgtgttctgtttgtgatcgttacgttcgtgcgttatggtgatccaggtcatctcttaggtcacatcgtggttctcgctctgttcgcttggactcactcctttgctgcc

SEQ ID NO: 134393 - DNA, 300 bp, Glycine max
  Clone ID: PAT_MRT3847_92365C.1
cccacgcgtccgctgacacgagctataggcactactgattcagagactcacaggcatagagagaatgacaaccaccgtggcgacggtggatggactcgggggcgcataactggcagccacctaatgtggcataacctgatggttcgtgacaaccgacgcagagtgctatgataccctagaggaccgctgtagcattggcatacgggacggttacaagcacactgaggaagtggctgctggcacatgaccgggtgattgcgctcggaacgattggtgggctaggaccatcaagcgtacagg

SEQ ID NO: 134394 - DNA, 399 bp, Glycine max
  Clone ID: PAT_MRT3847_92366C.1
acggctgcgagaagacgacagaaggggcccttgttattttctccactgttttgggtgcctattgtaaagtatccattatccagcaaagtttttggtaaaagacatctcatttcagcttctgtaaacataaaacaaagaaacaaaaagtgtaattacagaaggatgaaattttagtatacataaccagtcttccttttgtgtattcttcagggtgactgtatttcctgggaatctcacttttggtatcttaatcatagcaaagctcaaggcttacaatctctcctagaatatgtcaatctttcatttgtcacagttaggagaatttggattctggacccttctaagggggactctaatttggattctttcatggcttaactcaatttcctattgagaaaa

SEQ ID NO: 134395 - DNA, 161 bp, Glycine max
  Clone ID: PAT_MRT3847_92367C.1
gtgaacacctatatcactaaaatcataaaccacagcctttgtggccaccctctcatagctaaaataaaaagaccagtccattgacacaaaggactaaactagtaccctccccagtcaaaaactggggggggagcagaactaaggcacacaccacctatcca

SEQ ID NO: 134396 - DNA, 589 bp, Glycine max
  unsure (1)..(589): unsure at all n locations
  Clone ID: PAT_MRT3847_92368C.1
ggctcgagcaacaaagaaagaaaaggaaaatgaaataccaaaacacaaaaagcaccctctccttcctctcctccccctttctttttctctcttcactctcacccttatctcctccattgcagcttctgctttttcttcaaatcaacaaacaaacaaaaccatccccatttcatttcagaagaaacccttttctttcccaagcacaactgtttcttcctacggtggaacattgaccatttgaaatagttgtgcaacagcttccattatttggaaaaaaaaaaaagggtcttttgattctttgaagcgagaagatgcagaggcctccaccagaagattttctgttgaaggagaccaaaccccaccttggagggggaaaagtctctggcgacaagctcactagcacttatgacctagtcgagcaaatgcagtatctctatgtgagggttgtgaaagctaaggacttacctgcaaaggatgtcactggcagttgtgacccttatactgaagtcaagctggggaactacaaaggcaccactncgcacttcgacaagaagtctaatcccgaatggaaccaggtttttgctttctc

SEQ ID NO: 134397 - DNA, 442 bp, Glycine max
  unsure (1)..(442): unsure at all n locations
  Clone ID: PAT_MRT3847_92369C.1
attccctctacgccgacncatactctctatctttctttcctaacataatcaattaataatcttctattnttattcnaaatcagagatgttctaatatatatcaaatcacttactccaatctccaaatttgtatctcatattcattttaatttctttaaatacttctctctccaaacctactcctatgttacactctctccaactatatagtacaaacctcaccttcccattgttaacctatataaaattttttattctaaaccctgttctctttcctttcccctttactcacccctcataatttaaaaaccttattatcacttcatcaatcctttaattcttaaactcattctgttttatattaagcatatcaattcaaattctttttcctaatttttataccaaaaaatcatttctcaactttataaaccttccatttatt

SEQ ID NO: 134398 - DNA, 516 bp, Glycine max
  Clone ID: PAT_MRT3847_9236C.1
caacctggtttcaatttcggaaacaatgagcttccagtcccatctggtggattcaacttcagctgaagatattttccttagaaaggacttgttggacgaagtagggtttatgccgggtgggcgttgggataaagtctggagggtcagttattgccccctgtgtccttcgtggttcatgaggtgccggggagggtcagttttcgctaccaagtccaagtaaaaagggactggtggattcaacagcagcataatgatcttttcagccgtgtttgttgtacttaaaatacataaagctggtggaaggttgtatatgttgcagtggcagggacccgggtatatggcgaggggtttttttctttaatgcggctttgaatgctgttttttatttgagtcctagttttattggtatgatttattgggtcagtatttgatttgggtaaatatatcatttccaaaccaattttatggtctattccaaattccaatcgaagaattagtgctatttttgtgcgtcca

SEQ ID NO: 134399 - DNA, 801 bp, Glycine max
  Clone ID: PAT_MRT3847_92370C.1
aaatgaaataccaaaacacaaaaagcaccctctccttcctctcctccccctttctttttctctcttcactctcacccttatctcctccattgcagcttctgctttttcttcaaatcaacaaacaaacaaaaccatccccatttcatttcagaagaaacccttttctttcccaagttgtgcaacagcttccattatttgtattataaaaaaagggtcttctgattctttgaagcgagaagatgcagaggcctccaccagaagattttctgttgaaggagaccaaaccccaccttggagggggaaaagtctctggcgacaagctcactagcacttatgacctagtcgagcaaatgcagtatctctatgtgagggttgtgaaagctaaggacttacctgcaaaggatgtcactggcagttgtgacccttatactgaagtcaagctggggaactacaaaggcaccactcggcacttcgacaagaagtctaatcccgaatggaaccaggtttttgctttctccaaagaccgcattcaggcttccatactggaggtcactgtgaaggacaaggatgtcgtgaaagatgacttcattggtcgtgtcttatttgacctcaatgagatcccaaagcgtgttccaccagacagtcccttggcaccgcagtggtataggctggaggacagaaagggtgacaaggcgaagggggagctgatgctggctgtttggatgggtacacaagctgatgaggcgttttccgaagcgtggcactcggatgctgcaaccgttagcgggactgatgctcttg

SEQ ID NO: 134400 - DNA, 1093 bp, Glycine max
  unsure (1)..(1093): unsure at all n locations
  Clone ID: PAT_MRT3847_92371C.1
gtttggcagcaaattatggattcccatgatgaggagcatgctgccaaactacttagagctcaaacccacatatggaatcacatatttagcttcataaactccatgtcccttaaatgtgtggttgacttaggcataccagatatcatacacaactatggccaacccatgccactctcaaacctcattgcttcactaccaatccacccatccaaaacttgctttgtccatcgcttgatgcgaatcatgatccattctggcttcttctctcaacaaaatcatgacatggagaatcagctagatgccaagtatgtgcttaccgatgcatctgtactattgcttaagaaccatccgatgagtggacccccccaccaccaacaaagaaagggaaaaagaaataccaaaacacaaaaagcaccctcctctcttctccttcccctttttctctcttcttcactctcacccttatctttttcttcaaatccagaaacaaaccatccccatttcatttcagaagaaacccttttctctccaaggctcctcggaaccgttgtgcttttttatttcttttaaagcacaactgttcctgcggtggaacattgaccatttgaaaatagttgtacaatagcttccattatttggaaaaaaaaaaaaaggggtcttctgattctttgaagcgagaagatgcagaggcctccaccagaagattttctgttaaaggagaccaaaccccaccttggagggggaaaggtctctggggacaagctcactagcacttatgacctagttgagcaaatgcagtatctctatgtgagggttgtgaaggctaaggacttgccagcaaaggatgtcactggcagttgtgacccttatactgaagtcaagctggggaactacaaaggcactactcggcacttcgagaagaagtctaatcctgaatggaatcaggtttttgctttctccaaagaccgcattcaggcctncatactggaagncactgtgaaggacaaggatgtcgtgaaggatgacttcattggtcgtgtcttgtttgacctaatgagatcccgagcgtgttccccggcagggcttgggaccg

SEQ ID NO: 134401 - DNA, 355 bp, Glycine max
  Clone ID: PAT_MRT3847_92372C.1
gaaccaaaaccacaatatgaaacttgttattaatttataaaggcggatttcatctcacatcccaattaaatttttaaaaacagggggtacgcaatttacttatttcccggaaaacattcattaatgtcccccaaaactgggtttaaatccaaaaatccagatgggacgtgtagtgaatccgcgcgaaaaaagtggcccgggggtggtaagggcgggtgcgtcttgtggcaggcacattggagggcttggaaaccttggggggccatccttgggacggaggctcaaacgctttctatgttctctttttcccacctgtattgggagccaacacccccacttttattttaaccacccc

SEQ ID NO: 134402 - DNA, 888 bp, Glycine max
  unsure (1)..(888): unsure at all n locations
  Clone ID: PAT_MRT3847_92373C.1
cggtccggnaattcccgcggtcgacccacgccgtccgggnaaaaagaaataccaaaacacaaaaagcaccctctccttcctctcctccccctttctttttctctcttcactctcacccttatctcctccattgcagcttctgctttttcttcaaatcaacaaacaaacaaaaccatccccatttcatttcagaagaaacccttttctttcccaaggctcctgaaccgttgtgctttttttttttttttaatttcttttaaagcacaactgtttcttcctacggtggaacattgaccatttgaaatagttgtgcaacagcttccattatttggaagaaaaaaaaagggtcttttgattctttgaagcgagaagatgcagaggcctccaccagaagattttctgttgaaggagaccaaaccccaccttggagggggaaaagtctctggcgacaagctcactagcacttatgacctagtcgagcaaatgcagtatctctatgtgagggttgtgaaagctagtttcttacctgcaaaggatgtcactggcagttgtgacccttatactgaagtcacgctggggaactacataagcaccactaaaaacattgacagccaagggaatggcgaatggatagggtgtttttcctttctccaaagcaccaattcatccaagcatactcgcagtgttctttgtgagccccaccacggcgtgtttggaacttgtgtatgcatgtgatgctacaccacntatgcttccacaaacacttgcagtgttaactatgcttcctcttctagcagggatcattacccttgcggcgtgctttgttcccagaaagacaccaaataggttaacgttgatcaattcctcaaaatttgaatttgtgttgtt

SEQ ID NO: 134403 - DNA, 606 bp, Glycine max
  Clone ID: PAT_MRT3847_92374C.1
ccacgcgtccgcttgtctaaacagtcaaaaacctaatacttgttagatgaaggtaagtacttgttaatccttcttcatcttcaacaaagtctcttctcgatctcgcgagcatggctttgcggcttttggtatcgcaggttgcaagacgacagattaaaagtgtgtttgctacaagctatttttctgtcaataagtttggagatcgtgcaggcttttgggtgcccaagagagatttcagtctagctaccttagtagcatagctcgtcgagcacgtgatgcggatgaagcctctgaagttgcatatctcaaagaactttaccatcaaaatgatcctgaggctgtgattagagtatttgaaagccagccatctctgcataatagtccctcagctctatctgaatatgtaaaagcattggtgaaagttgataggcttgatgaaagtcaattactgaagacactaaggagaggcatgtccaactcagtgagtgaggaagaaactttagctggtctttctgctttaagaaatacgagaaaatcagaaaaagacaatactattggaactgctagtaatccaatctatatggtggctagagacggcgggaatat

SEQ ID NO: 134404 - DNA, 314 bp, Glycine max
  Clone ID: PAT_MRT3847_92375C.1
atatatctacagcaacactacactggcccatcggcggaaaaaaactatggccatggttatgtcgctacttcacttgttaatcactagcgtttacgctaagtgggggggcgcagccttcactgggagagatgctactatctgtggggagctgagagaattgaactaaccaaccgaacaaaacatgaggcctgtgagaatgaataaaaatatgatttggcattagaatatacacatgacgagttacaacgttggtggatttgatagacgataaacacaatgtaaaataatggatatgagtcactagcactaaaaac

SEQ ID NO: 134405 - DNA, 903 bp, Glycine max
  Clone ID: PAT_MRT3847_92376C.1
ccacgcgtccgagagagagagagagatagctcgatctcgtgagcatggctttgcggctttgggtatcgcaggttgcaagacgacagattaaaagtgtgtttgctacaagctatttttctgtcaataagcttggagatcgtgcaggaaatagacttttgggtgctcaagagagatttcaatctagtttccttggcagtgttgctcgtggaggcttttgggtgcccatgaaggttttcattctagctaccttagcagtatggctcgtcgagcacgtgatgcggatgaagccgctgaagttgcatatctcaaagaactttaccatcaaaatgatcctgaggctgtgattagagtatttgaaagccagccatctctgcagagtagtccctcagctctatctgaataggtaaaagcattggtgaaagttgataggcttgatgaaagttaattactgaatacactaaggagaggcatgaccaaatcagagaatgaggaaaaatctttataatgtctttctactttaagaaataagggaaaatcaaaaaaagacaatactattggaactgctagtaatccaattgatatggcctttttcaagatttctggtgtaggagcactcattgaagataaaggtattagtaaacagtgtcctttttcatgatttctggtgtaggagcacttattgaagataaaggaattagtaaaggacttggtataagtgaagaagtgcaacctagcatggaatcaagtacaaaatttagtgatgtaaaaggtgtcggatgaggcaaaggaagagctggaagaaattgttcactactttcgagatccaaagcgctttactcgtctttggtgggaagcttccgaaaggagttttactttggtgggtccacctggcactgggaaaac

SEQ ID NO: 134406 - DNA, 697 bp, Glycine max
  Clone ID: PAT_MRT3847_92377C.1
gggtaagtgggtttcttggtgcttgtgcaagctccaactaggggcgcacacacacaaagatcatataccacatactcatagtccctctctaattatagatatattaaggaagaaagtgctatttatatcatcattaacatatatattagaactctctaagtgagagcaaaagaaggaaattaaattcaatggaggctaggactaagatgtctgaagtgctaccattcatagtgatggtgattatggaaggttggaccataggactcacgatttttgcaaaaactgcaataactaatggaatgagtccatttgtgttcattgtttataccaatgctctggccactataatactgttcccttgtttctttttaccacaccaagaggacagaaaggagaggccatcttttactttctctttgttcatgcggttcttgttcctcggttttatagggatgacgatgactcaggcctttttattcctgggtctaagctatagttcgccaatacttgtgtgtgccatgagccacttgatcccaacgtttaattttctgctctctctcattctcaggaagacagagttgaatctgagaagccctggtatccaagtgcaagtgattgggatcttggtatcaataatgggaagcagtgttagctgaattctgtaatggaccacttgtaagaccctgttctgaccacc

SEQ ID NO: 134407 - DNA, 278 bp, Glycine max
  Clone ID: PAT_MRT3847_92378C.1
gcattgacgaaaaaaaaccaaatgtaaagaattactacctaacaacattgtcaaccaacatggtttggttatgattagcatatatattcctgtctttaaaatatgttgttgatactcatgtttgtgtaaatgaaaagtatttgtagaaaaaataaaactcttaaatgggtcttatccggtcaaaggacaccctcgtgagctcaccaattaatgtaatcaagcaaataaattaccattaacgtaagcttacaagtcgtaagctcagtgttattatctac

SEQ ID NO: 134408 - DNA, 251 bp, Glycine max
  Clone ID: PAT_MRT3847_92379C.1
atcagacccgagtgccgccacgtacctctcgaaccgagcagcagcgtacatgtcctcgggcgactttacctctgcgctcgcagactgcaaagccgccgactcgcttgatccgcgaaacgaaaagaccctcctccgcatggctcggatccacacatctctcggtgatcccgacgctgcgctcaaaatcttcgacactctgccctctgacctggccgccaaggaccgcctgccggcaacaaacatgcagaatt

SEQ ID NO: 134409 - DNA, 326 bp, Glycine max
  Clone ID: PAT_MRT3847_9237C.1
ctgccctccgacggacagcgcattgtctatgagggcagtgtacattatgcacaggcgctgtatgaagggcggactcttccttgcattcagacgacgtacctacatgtaagctggggcctgggcagccaaactcatgagctaacacgcgagattttctgctgtgagaccgaaagcttactgaaaacttttcactactattatgccgatgacccggttcattatccacgagacctatgcctcttcgaaaagcccacatgggtgacattacagcgagactataagtcctacattgacaagtggctagaacctctatgccgatgcttaag

SEQ ID NO: 134410 - DNA, 315 bp, Glycine max
  Clone ID: PAT_MRT3847_92380C.1
tttttactctttgggctctgggaagggccaggcagagtgcaaggtgtccacatgaggggtaagcagataggagctacagggggctgcagtcctagtaccctgttggggaggactgaaggatggtgagtttggtctccggagggggctccaatcctggtgcccaattctgacacctgccccttctgaattcacactggagtccttgcagtcctgaaaccacaaggccttgctgaaccctgggtcatgaaaaaaacacttggggaagggaaaagaccgggtgggcttcccatgaccggtctgaattctttctggggc

SEQ ID NO: 134411 - DNA, 385 bp, Glycine max
  Clone ID: PAT_MRT3847_92381C.1
gagattttgttttgctaaattttggtcctttttatttatagaagcttcatattatgggggcgaggcatttattggcctattcaaaacttcatactatgttgaaggttgcaccagaagcattcgatagttacagttactagttaggactgacaacagtcagttagttggaagttagttcttggaagccttaccccctgtacgccaacacacatgtatatttctgtattttctgacaactgtaacaattcaatactcataataagaatttcagtttcagaaacaggatccctctcaaatctctcatttcttctttgtatctttctttctaatataacataataaaacaaagctgtacgtattaattcttatcaatatagactaacat

SEQ ID NO: 134412 - DNA, 423 bp, Glycine max
  Clone ID: PAT_MRT3847_92382C.1
acggctgcgagaagacgacagaagggtacggctgcgagaagacgacagaagggtacggctccgagaagacgacagaagggcaaaccttacatttatcataccttgaacaatatacaaatcagaagattatttattattgcacttctttaaacttttattcttaattttctaaagaaacgcctttttataaataaaaaaatcaattattgaaatttctaaagtgttttaggtaatcttttttcaagggtaaaaaaataatcagatttatgctttttagtagcaaataggacctgctgttctggaaattcagtttttgtagaagaaagatatcaattttcttctttttattatcctccatttgtttaaacatttttcatcaaataatcacttatataaggatctcaaaaaaaaaaaaaaaaagaa

SEQ ID NO: 134413 - DNA, 181 bp, Glycine max
  Clone ID: PAT_MRT3847_92383C.1
ttttattttgtttcttttcggagcggaagcgcaactttcagatcagctttcatatgagacctcatcccaaaccaatcgttgactaccaaatggacatgtttacacacaatattatgtggacccaactgaccatggtgatccaattacactgctccataaagaagacagaacgctgaactta

SEQ ID NO: 134414 - DNA, 507 bp, Glycine max
  unsure (1)..(507): unsure at all n locations
  Clone ID: PAT_MRT3847_92384C.1
gttagatttggtatgcgattttgttcctatagatgtcaaaatgtgcacaatgatacccgttgcttgaaatttgtagcctgatacattgcccataaaattgtgcacaagtattgaatacatactactgtaatttgttatatatcagtattcactagcactgtgtgaaagcaatttctttgctcaactttccctcttttgttgcttttttgactagtgtttcagttagtcagttacaatgctgaaaactgcataacctgacccctattagatcctgctgatctaggtaaccttgttaaagattgaccccccatagttattagaatcttataattcacgatttgaatcctatgattcaatatgatttggttacctattgatttgtatcataagatgaatctcaaatgactttgtatcttcttacaattcatgaatgaatatgtgcaatttcgtactattggtacaaggtcaaaaaaaaaaaaaaaaannnaannnnnnnnnnnnnnnnaa

SEQ ID NO: 134415 - DNA, 479 bp, Glycine max
  Clone ID: PAT_MRT3847_92385C.1
accacgcgtacgcccacgcgtacggccacgcgtccgaaaagtcacaaatatttttgtagttgaattcatcaatggctaagggaatcagaaacctaagttcgtggatggaggttgccccggcaccaataattttcccaacaaagccttctaattcgcctgctttggagaccatcacagaagaagttgctgaggaacacaatgatgaagcttcaatgaatacccttctcaagtagtaaatgttgcaagattaattatgaagccacttttgaaggttttatgaagattgaagaggatcaagctgaggtaataatcactagtagtagttattcgcaacaactttgtatagtcaattttgtgaaatatgtagttcgcttttaattttcttcttctgggatgatttaattttaatccatgcatccctgcctttgttttggcaggggttggtttaagaaatggcacattgcagtttctcgttgttt

SEQ ID NO: 134416 - DNA, 453 bp, Glycine max
  unsure (1)..(453): unsure at all n locations
  Clone ID: PAT_MRT3847_92386C.1
aaaaaaaacttttttatttttagtataaaaaccggcaagacaacaataaaatttgttactctaaaactggacaaaaaaaggcataaacttttttttggggaacaaaaggcaaaaaacaaaaacgggcggaccctggccttggcctgcatccggggctaaactaaaaccggggaaaccggaatattaaaaaaaaaaaaaaattggaacccctcaacaacgcccccgaggaacaacaagaaaaaaaccccccccccaaaaccaaggggaaggactccggggaaacaaatttcaagcccatatataaaaccccgggttttaattattttccccaggaggaacaggagcagcagcagcaactttttcagccacaaaggaaaacaggggccgcaaaaaaaactttttgtcaaaggggcaaacaaggccaggggccaaaaccgttgttgggttgncggg

SEQ ID NO: 134417 - DNA, 575 bp, Glycine max
  unsure (1)..(575): unsure at all n locations
  Clone ID: PAT_MRT3847_92387C.1
ggctcgaggtaacattagtacctctggtactcccatttatatatatataatacttttgctgataaaaaaaacaggagattgagtttcccacagctggactcgggtctgtgccaggttctacatgtttcagtttcatttttttggtttgagccctgttttatcattgtttcaatctaaatggaaattgattcatctcactcattacatcacaggtgatggggaaggtggaattgaaatgactgagagcatgcaattgattcgtgaattttgtgaccgcttcattagttcagagaaagccacacgaacaagaatagtaatcttcttgatttaaagaattgttcttctttgtgcccctggaatgtgtttctggatgaaaagctttctctacatgtaaaaaagggtttttgtgctccttgcatttttcaaataactaggaactttttgttgttttagttntctttttcttagcatacaatctaactatgtttaatggtagttacaagtctcttgctgtataattccaactcagcatatatacatcaattatgatcgatacacctggatgccaagattta

SEQ ID NO: 134418 - DNA, 491 bp, Glycine max
  Clone ID: PAT_MRT3847_92388C.1
ggctcgaggaggcgaagaagatgggtgtgcagatggagtgaggcttgttcagcttctaatagcatgtgcggaagcggtggcttgtcgtgacaaatcacacgcttccatattactatccgaacttaaagcgaatgctttagtgttcggatcctcattccaaagagttgcttcctgtttcgtccaaggcctgatcgagaggctcaatctgattcagcccatcgggcctgctggccccatgatgccctccatgatgaacatcatggacgtggcctcagacgaaatggaggaagcattcaggttggtttatgaactgtgtccgcacatccagttcggacactatttggctaattccacaatattggaagcctttgagggtgagagttttgtccatgtcgtggacctaggcatgagcctgggtctacgacacggacaccaatggagaggtctgatccagaatcttgccggtcgtgtaagcggcgaacgtgttcgtc

SEQ ID NO: 134419 - DNA, 712 bp, Glycine max
  Clone ID: PAT_MRT3847_92389C.1
agacagttgggtatatagctccagaagtgtggaacagaaactttggaggggtgtcatataagtctgatgtctatagttatggaatgatgattttggaaatggtcggaggaaggcaaagtatcagtattgaagcaagtcattcaagtgagacatattttcctgattggatatacaagcatgttgagttgggaagcaatttagcatgggatgaaggtatgaccacagatgaaaatgaaatttgtaagaaaatgattattgtgggattgtggtgcatacaaacaatcccatctgacaggcctgctatgagtaaggtggttgaaatgttagaaggaagcatagatcagttgcaaattccaccaaagccattcatatttagtcctaccaaaacccaagtggatatttgcaccactactagtagctctgattgattcttaatttctgattactagaactccggagaatttttatataacaattttcccttttgaaaggtaattcaccaatgccttttaatcatttcagtacataacacgaacagcgtagggaagggagtatttgggacttggattgataatacctattcttttagccatacataaaaatcttagtttttgttagttcatttagaggtttaaatttacaatttcctctgcagctttttaaccaatttttgagagaccaatttaatgacaaattaaatcttcgagagatt

SEQ ID NO: 134420 - DNA, 316 bp, Glycine max
  Clone ID: PAT_MRT3847_9238C.1
cttgaggtctcttgctctactaaacggttattttcactctgaaataaaaatcttcgtgtattctacttagagatctagcatcatgggagagcctacaacacaagaaatcattgatattgctaataattttctgctttcgagccctcctggagagtttatggaagttgttacagacgttagagctctcttacctaacgagtccatgatcaatgagagcgctcctagaacgttcagagagtacaatactgtgcatataattaaagcctactgttcgcgacattttaacgttcatattttagcttcatggaaaaaagaa

SEQ ID NO: 134421 - DNA, 393 bp, Glycine max
  Clone ID: PAT_MRT3847_92390C.1
acgtacgcatgcacggcgctgcgtacagctggtatgctctagagacgagccggccttgggttttttttttgatacacacatctaatgattaacaattaattaaatcgactatcaacagccagatatattggtcagaaacaagaaccagggagacacaaagacatacatatactatacactgacacacaacctaacataactgagcgtgattataaacactagttaacgacatacagcatgcatttgaactaattaagcaggacaaccgacagttggggatggagcaaggaaggttctttgccaacacacatgcaggcggatagcaacgaggctggctgtggaaaagaaggggttttattagaacagacgtgtagccggaatgaaagaggaggg

SEQ ID NO: 134422 - DNA, 221 bp, Glycine max
  Clone ID: PAT_MRT3847_92391C.1
caatgatatcctttgatccatacagatgatttaacctaacaagacaaggctttttttttttttgtttatttgtcagaattgggtctaagattcacttttaaatttaattgatgattaattgcatttaacagatgtattaatattgttagtagtaaggtaaacggaattgagattctatctaaaatacaaaattatattcatgtatttataaaaaaaaaaaa

SEQ ID NO: 134423 - DNA, 132 bp, Glycine max
  Clone ID: PAT_MRT3847_92392C.1
cccacgcgttcagatacacatcgtataactcctgtgtctcagatacaaccttacgggaccacttggaacactgatttggttatttatattgccacctattttcagtttcatttgcaccactctaaaagcatc

SEQ ID NO: 134424 - DNA, 341 bp, Glycine max
  Clone ID: PAT_MRT3847_92393C.1
ggggcaacccgggaaaccccggggggttcccggggggaacccgggtgggccaaaagggggccaaaaaaaaacttgaaaaaaacatgaaaaaaatgtggccggggaaaaatggttttcccaatcccgggtcaaaacaaatttccccccaaaatcttaaagggaaaaccagggggggccaaaggggggaacaaaggggggttaaagggggggggaataacggccctttttcggggggggaaaccgggggggaaactgggtaaaaaaattgtaaaaaacttgaaaaaaagacttgcaaaatcgggggaaaagggggttttctttttgccccttttgtggggcaa

SEQ ID NO: 134425 - DNA, 484 bp, Glycine max
  Clone ID: PAT_MRT3847_92394C.1
ggggtggagctcgagccgcggctgcgagaagacgacagaagggtacataatgaaatctaatgaagaagggaccttctcaaatggagatctcgtaccatttggaaccgttcaaatcgaaccacattctactgttttaaattacggacaaggattatttgagggcatgaaggcctacagaagagcagatggtgaggtgcagatatttcgaccagaacaaaatgctatgcgcatgcagatgggagcagagaggttgctaatggtggcaccttctgttgagcagtacgttgatgctgtcaaacaagttgttcatgcaaataagcgttgggtgcctcctcatggaaaaggagcgttgtacattaggcctttattatttggaagtggatctggtatgggtattgcacctgcaccacattgcacctttctaatatacactaatccaatttccaacgcttacaaaggacgacatactaattcaaccttgagc

SEQ ID NO: 134426 - DNA, 268 bp, Glycine max
  Clone ID: PAT_MRT3847_92395C.1
tgatctgactggtgcattaatgcgaaggtgcgtttgtggaaacccatggtggtagacatggaccagcaagaacgcaaagaggccgtaggggcagtagatgagagggaggggaaccaaagcagtagcaacaacagtggccaccaattggcacaaactccaagaccctcaaccaccgcatcgacggcaacagcgccaccaccagcaacaacgacaccaccaactggaaaaagatccgattctgaaagcgacccttcacttgcaccattaa

SEQ ID NO: 134427 - DNA, 1162 bp, Glycine max
  Clone ID: PAT_MRT3847_92396C.1
ccacgcgtccggtccctcccttctggtcagaaaaggaacagggtatatttgatgctattcttcgtggccatattgatttcgcatcagatccttggccttccatatcgagtagtgccaaagatctggttaagaagatgttacgagctgaccccaaacaaagactctcagcagttgaagttcttaatcatccttggatgagagaagatggagcatctgataaacctctagatgttgctgttttatccagaatgaaacaatttagggcaatgaacaagctaaagaaagttgctctgaaggttattgctgaaaacctttctgaagaagaaatcattggtttgaaggaaatgtttaaatccatggacacagataacagtggaacaatcacttttgaagagttgaaagctggtctccgagaactgggtactaaactttccgagtctgaagtaaggcaattgatggaagcggctgatgtagatggaaatggaaccattgattacattgaatttataactgctaccatgcacatgaatagaatggaaagagaggatcacctatataaagcctttgaatattttgacaatgataagagcgggtacatcacaatggaagagttggaatctgcccttaagaaatataatatgggtgatgagaaaacaataaaggagatcattgctgaagttgatacagacaatgatggaagaattaactatgatgagtttgtagccatgatgaggaaaggcaacccagacataacgcacataacccaaagacgtcgcaaataagctatgctttgtggtttgttgggttcagagtgtctacacgttttagtattacggcctgctatttgattaggcacttgcatgatatttgtgggtctagactctagttggacaagtttatttctactgcttgagcagacacgaatgggtacaaatcaaaggaaaaacagaacaatcctttttttcacaagtgaggcacattttattcagttcgtctcttggtttatgcagagtgttaacattgtaattaaattaatcgttcctaataattcaccaatatgtcaatcatgacatgtactgtgagaatatggatatgcatattttggctgcagaggtacagagaaacataatgagccaaagcaaaacagtttttgttctgtgat

SEQ ID NO: 134428 - DNA, 277 bp, Glycine max
  Clone ID: PAT_MRT3847_92397C.1
cttggtgacatccaccttgctctttctttctttcactttatcatgtgctatttacacctccaccatcaccaactacaccaacaataaagtcatgaccatatacaaagagtagttggtaaatcaccaaaaagtatacaataagttgagagagaaagacaagaaattccaaatgttcaaatacaacttgggattgatgcaagagcacaacatcgaccacaacggcacttacaaacttaagttaaaccagtttgctaacatgacaaagtgaaaataccgg

SEQ ID NO: 134429 - DNA, 385 bp, Glycine max
  Clone ID: PAT_MRT3847_92398C.1
ggctcgagctcccaccgcaacacagaacccatggagcagagccccaacccgactctcagttcatgtacagtccatactgtttgaaccttaggaacgcctcttccactctgcagaattctctatcttaattgttcttgacactgcggatctcgatgaccgtgctgtaattgccaagtctaatgctgatcataatgagcttgagccacttgactgttacgaggaagcacaaccctatctctatggctctgtctgagctgcgctgattctgcgctgcagctgaccagcacgaccatgcaaagatggctacgattccgtactagctttgccctataccttaccaggattcactcatggcacttgaatctgagatacagcacgctactgc

SEQ ID NO: 134430 - DNA, 931 bp, Glycine max
  Clone ID: PAT_MRT3847_92399C.1
cggctcgagtacggcacgacagagggggatgatattagttttaacgttaagcttaggaagaaatctgtgtaagtagcctagtcatactctgtatcatttcatttcgataatcatccatagttactgaagaaaatggcaaccatctccgctgctatcacaaccccatcgatcacccgcgcatgtctagtgcaaaaacgttctcttgggttctcatctcccgttcttggtttgccagcaatgggtaaggtgggaagagtgagttgctccatggaggaaaagccttcttctgtgaaggaaagcagctcaagcatgttggggatgggggcatctttgatggcagcggccagcgccgcagccatgtcaggcccagccatggccttggtggatgagagacttagcactgaaggaaccgggctacccttcggcctcagcaacaaccttctcggttggatcctgttcggcgtcttcggactcatctgggctctttattttgtctacacttcctctcttgaagaggatgaagaatcaggactgtccctttaaaatatcctgggttgtagggtgggtgatgatgatgatgatggattctagaaatcgcaaagagtccactcatcttctgtgttgttaaaaaaaaaccagtgtggttaatttcctcttctttctttcaactcccaatcttctttgcttctacttgtttcagttgtttgttttaaattcataacactaacacgcaatgtgccgatacctagcaaatggacgagtagaaaaagcaattgtgatgcttaagccttaaagaatctatatatgagttccccaaaacacaattaaccaagaatcgagttaaagtacaagccaagtattttgtattcgtcctcccaatcactagaccaattgcatctgtttttctggattaaaaaaaaaaaaaaaaaac

SEQ ID NO: 134431 - DNA, 373 bp, Glycine max
  Clone ID: PAT_MRT3847_9239C.1
ctttacgcgtgcgagctgactcctttatctttcaactaaactgcgctgcgtgagacttacttgtttttttctgcaaacgatgtcgtgccacatttattccttttctcattattgaacgccacacagacaccgttgatgaagctatctatgagtcctccggcttgaacagctttcctgatcagtaacgaatggcggttgcaggccccagacaacaccagccaaaaaatcaacacagtgaggataagatagagttctcaagatactcccaacattccagaactgtgcagaggagagctgacaaaatccctgcgtatgggcacaataaacaagcactaaaaggggatgaaactatgagatgtttaaagaaaaataa

SEQ ID NO: 134432 - DNA, 949 bp, Glycine max
  Clone ID: PAT_MRT3847_923C.1
ggacacaaggaaaaaagaaaaaaaaagtcttaaattgtttcttgttttctctgtcgtttcgttcccttaatctttgatctctgagttacaagttataacaaaagaaataaacaacacatataaatatttgtaagaaaatatatatatgatcatgggttttcttcacaaactatgggacgaaacgttggcgggtccagcaccggaaacgggtctggggaagctccgaaagtacaactcgttctccggcggaagctccgtccggtcaacggtggcggagcatgttccgataagtcgcagcatcaccattgttcgctcccaatctggtttcggaaccaccaccaccacctctgctccttctgcgcctaccacccctcgcacccccttgactccggaggcaccaggcggtgatttcaagaagctcacgaggagaaaatcgtcaacagtggagagtgccgataatacataatagaaggtgattatgagtgctttggatcgttgttgagaggggaaatgagatgttttggctttgaaatttgaatagcattcggcagagacagagggattacgtttaatttctgtacacacggcaacacagattccaaattccaaaagggaatcatcaatcatatcataatatgtatggcaacttattataatgtatagtattatatagtatatagtatatagtacatagtactatcatattatgtaaatatgagtacctaccaataaaatggctcggatgatgcagggtcttttttcagcagattgagccaatgcttcatgggattctgcggatgtaaaggagtagagacagcttctgtatatttgtatatatggttttaacttgtttttcgttttctgagtttttggctgttgtaaatatgaattctgtactctgaaatctctatcagttgaaatcaatgaagcttgaaagtagatataatat

SEQ ID NO: 134433 - DNA, 682 bp, Glycine max
  Clone ID: PAT_MRT3847_92400C.1
tggagctaatgtattgacttataccctcaggatatctaaagaagaaatcagctgtattaatcatacattaaagaggttgagtagtctatatttacgtgttgaatctatccttaaagaaagttcagctttgccatccaatttcctagttgaacttgggaaagtattaagtagcacctccatcaatggagcttcctgcagtccacttcagtttgaagcatgtctcaagttcttctccctaaagcagtttgtgtttcatggaccaatcaaacatgtaaaggcagaactaagtgttcccaatattgactttgaacatcctcttccctttgtttcaggactacccgttggtatacaatgtgaaatcactctccataatattttaagtgagagtcggttgtggctaaggatgactttggatgatggtttcatacaatatttctttttagatttggactgttctgaaggctctgaagaggtaagaaaatgtacatttgttgcgccgttctacagaacagcagaagctgattgtcttatattgaaggtttgcattggttcagaatgtttgtttgaaaatgttagtccagtccaaaggtttgggggaccgaaacgtgaactagtacttctttgtaatgaaaaacaagtttatctttccaaggttagtaaagcttaattttttttctttctt

SEQ ID NO: 134434 - DNA, 260 bp, Glycine max
  Clone ID: PAT_MRT3847_92401C.1
ttctccccatgcgactcacgtcattccccgccacattcctcacgctccaccactcacaccttccattcacaacctcacccaccaccatctccatttccatccggttctgaaaatacacataatccccaacccaatgcacctcaatggaccccaccacaccccaacaacaacaacaacaatccccttcacccattactaacctcaccaccatctccttcggaatcgctcctatttcctcacaccaataccttaaccctaac

SEQ ID NO: 134435 - DNA, 237 bp, Glycine max
  Clone ID: PAT_MRT3847_92402C.1
ggcatatatactctgcatccaagcagattagtgctgcaatatctccagatcaaaataccactgcctttaaagatgtagcaattctccgtcacccgcgagtaggtgaatatacgtatgggcacttcactcaactgttactctacagcaagatcatggcgatgaagcgcttcgtggtgttctagtacctacgcaccatctctctattggtgatatatttatggttaattccagagatat

SEQ ID NO: 134436 - DNA, 412 bp, Glycine max
  Clone ID: PAT_MRT3847_92403C.1
gtatagccctacctttccgttcaagatgcacatcttcgtcaagacgctcaccgtcaagaccattacccttgaggtggaaagctctgacaccatagacaacgtcatggcctagatccatgactaggaacgaatacctccggaccatcaacgattcattttgaccgtatagcatctagatgacgggcgtacctttgctgactactacattcagaaggagagctctcttgaccttgtgctgcgtctgctcggaggcatgcataccttcggtaagacactcaccggcaagaccataaccctagaggctgaaagctacgacaccatcgatgacgtgaaggccatgatccaggacaagggaggtatccccccggaccagcaacgtctcatcttcgccggaaagcagctcgaggacggc

SEQ ID NO: 134437 - DNA, 472 bp, Glycine max
  Clone ID: PAT_MRT3847_92404C.1
tcatgctagcattaaagagaagacattggtggaacttccagcacacttaattgactttctcaggttcttgcaaacaaaccagagcacattcttcctttctacttatcatgttgcagaaggtattgagaacagcaccaacaaacaaggagactaggcttgtggacaacaattgtttttgctatgtacatagtttcacagagctgctgctgtatacaatgcttgtcacaattgcagtttactttcttcatcaaaatgatgtgaaatcagatttggtaagtgtataacttagctttgggaactcaatgttttcagggttcagggagtgtaacttctacggaaggaatatgcaccgaccctcaattttaaacaccagttggttttctgaaattttagatttaatatgtttttcacagtccaaccaaccaaccaaattctatcgatgaaatcttagttcaatttaatattgttttaa

SEQ ID NO: 134438 - DNA, 425 bp, Glycine max
  Clone ID: PAT_MRT3847_92405C.1
gcaccatctttgaagggtatgtaagagcaactaaatttctaattttacgaaactgagtagaatagtaaaagtaaaattgtacggttaaagagaagagttggtattaaatggaagggaatgagcttgtggcgtttcaccacaaaaaaaaaaaaaaaaccgatttttccttcaaaattaaactttcaatcgcaagcgatgttctttcagaatccaacattttagatctcaacacccgatgtcgatattatcaagcatggacatgcctaccattgatgtggaccttgggcctgaaaagcttgaagatgagaaacagggaggtcccttgttgcattgtgatctttgtgatacagaagtagttcacaagttggctcaaatgttccttccaggtctagccagtgcttgtgttgataacacatcgggagatc

SEQ ID NO: 134439 - DNA, 844 bp, Glycine max
  Clone ID: PAT_MRT3847_92406C.1
cttgatgcctgcagtgctgtaattaggggagactttcatactttatgagttaacaagagtgtggaaacgtggactgaagtaatcggacagggtaaacagagggcctaaatcatatggatttaaaaagcggtgcacaacagccagctccaaaactgctagggtttatactataagctaagcacacacgagctaacagatgccaaggaacattaaggaaaaaaaatcaaaatagtgacctctttcaaaagtagggaaacaccttgagaaaacagaacaggtgaggcaacactgccacatcagaaaacaaaaacagaatgaaacaaagaagagagaaaacacaatatagagatgctgaggtggaaaaaagaacagatgcctctcatgaagagaccaaaaggaagttgtggagtgatgcataaaagaggttgggtcagagacaacaccggaccagagtgctgcaagctggccagaaacactgctggagagctgggtcagtgtaaggagtcttatcaaatcagaaaaacgtgctttctgatgtaaaacatcaggaaatggcttcttcaatgatgcataaaacaagatggcatggtaaatgggggattttgccgtgtgtaagaacagggcagaagtagcaagcaccataattttccaggatagcaggaacgattggaagctgcttttctgactacctcaaaacactctgcaaaagtagattaacaggggcctgaggcactctgcatccttcctccacaatagtcgcaactatgatatgtattggtctctaaagtctactaataataaactcctttaaagaaggtaacttttgaaaaaggcatgtacctaa

SEQ ID NO: 134440 - DNA, 472 bp, Glycine max
  Clone ID: PAT_MRT3847_92407C.1
tttgtagactttttttttttttttttttttttttttttttttttttttttttttttttggacccgaaaaagccttgaccctaaattactggcaacaaaccaaaattttccaatcttttaaagcttttgaaacctaaatttggggcacccgggccctccaaaaacataattccccccaaagccaaaaattgcgatacttaaaatttttaatttgtaaatgtaaaaagggcccaaggaaagggggccaggtaatttggggttttgttaaaaaaaccttgcctttaccataaaagggtttaaggctttaaggggccctttttactaaaagttgttaaacactttcaatgatgcttggtggccaaaagccggaggacactctgtcccatgttgggggggtggggaggaaaacggacccctggcccgcgggggggggaagaaaaccttgggggggggctttggggggggtttacccc

SEQ ID NO: 134441 - DNA, 210 bp, Glycine max
  Clone ID: PAT_MRT3847_92408C.1
gagaaagaacattttgttctatagcagtgcccttgctgggaagcagacagacaagggtacatataccaagttatgggactggaattgaaggaaaattggatactatggaaacaacttacgtggaaagctcataatgaatttgtggaagatgaaaacgcatggggattgaattgtctgggggggaacaatgggtgcaatcggatggaaaat

SEQ ID NO: 134442 - DNA, 277 bp, Glycine max
  Clone ID: PAT_MRT3847_92409C.1
cgtacctgaagcgaattggtagcaaagcagcagctggagagccgcagttctagcctcatcattacgatgtttcccttggtcaaaagtgcactaaatcgtctacaagttgcgaagcattcaggccacacatggccatgcagagtcacagaagagtacacctgaattctatgacaaatacggtaatgctgtattagctactggagccaattgctgtattgttacatggacatatgtagtaccacaagtcggacctagatggaggctgtcccctgttggc

SEQ ID NO: 134443 - DNA, 421 bp, Glycine max
  Clone ID: PAT_MRT3847_9240C.1
gaacaacggaagctcccgagaaatttaaatggtcataactattcactaggatttccgattcaggtgcataatatttcaagacattggtcattgaacaatggaaaatcccgagaaattaaaattgtcataacttttcactcggatgtctaatttaggcacatcacatattgagacgctcaaaattgaacaacgttagctgacgagaaattcaaatggtcataacttttcacacggatgttcgactcaagcgcatcatatatcgagacgctcgaaattgaacaacggaaggtctcgagaaattaaaatggtcataacttttcatacggaagtccgattcagctgcatagtatatcgagacgttggttaattaacaacgaatgctctcgagaaattcaagtgcataatatatccagacgctgga

SEQ ID NO: 134444 - DNA, 371 bp, Glycine max
  Clone ID: PAT_MRT3847_92410C.1
tcgcttcaaggtcctttggttcaccagtggcaacttcttgttccaaattgggggtgctcgactgaaatcctaaacgttcatgctaccaacagacagttacacgctgatgaagctcttgaagtgatagccatgacaacacctgactatagtggagctgatctcgcaaatctgtagaatgaaactgctatattagctagtcgccagctatagacaactattctatataaagaaattgatgattatatcgatacgaatgtcgctagaatggaacgaacaacgatgacagatcaggaagagcagaagtttactggcatatcatgaattacatcatgctatatgtgaaactatgactgctgatcatgatgctgtgc

SEQ ID NO: 134445 - DNA, 509 bp, Glycine max
  unsure (1)..(509): unsure at all n locations
  Clone ID: PAT_MRT3847_92411C.1
tccaatgaaggtttcccgtcatcactgtatgacgtcctccgtctttgggggggggggggggcggaagtacaagatggtagcacaaacaagggcggaaggtaatctaaattaaagaccgaataaggtatagtgtggtgataatacaatccacaaaaaaaaaacaagtggatagagtggctgacttggtacatgtggagtgtaatagattaaacaaaccaaaatataaaaataacagacagaaaaccagccgaaacacgaccaaagcaaacggttgtaattatgacagccgagggggcgacgagggcgagaaagacgaagggtttgccgttagtgggtatatgttagcgaggagaatggacaactagggttgcgcgatcagggagcgcgttacaggtagtagatgtgcttggcntaagttatagtgcggccaaccgcgtgcacgcaacgttaacaccgagttggtaagttacatatgcggatggttgtgtgcgccgctgataattggaagg

SEQ ID NO: 134446 - DNA, 145 bp, Glycine max
  Clone ID: PAT_MRT3847_92412C.1
gctaacactaaccaatttgactataccacagcttcccactaaagatatgcatatactaatgtttattgatcactctggtcttaagaccaccattgtgcacattcactcacttagatatattgacaccaccattcccaccattgct

SEQ ID NO: 134447 - DNA, 379 bp, Glycine max
  Clone ID: PAT_MRT3847_92413C.1
aaaaaaaaaaaaccccatttttctttttttattaaacgggttccaaaaccccaaaaaggaaaaatgggggggaaaaaattccctgccaacttgttttggtccaaaaagggaatattttagggccttggcctttggggggggctgccaattttttaaatgatgaaaaggcccccttgttttgccctttaatgactttaaaagccccccaaaagtgccccaaggggaaatttgcttgaaatttttgaaaggacaaaaagttaaggggttttttttcccttttttgggcccaaaaaaattttttgggggtttttttttaaaaagggggaatcagcaggcccaagcttatgcaatccgtggaagggtttttgccccctttttt

SEQ ID NO: 134448 - DNA, 630 bp, Glycine max
  unsure (1)..(630): unsure at all n locations
  Clone ID: PAT_MRT3847_92414C.1
aaatcttcactaaaagnnnataagaccttgattatcaaaagtttagtcaggctaagctgtgccatttacacaaactttcacatattgcaccagataattaagagattttgataaaatgagtgaaatgaaacagactagcccagggtttaaaggtcgtaaatgtcaaactaaacatgtactaacaatggaagggaaaaaaaatcataagttaagcaagctattcagcttttcaagaccagggttttgacatgcgaggaacatgcttcaaatgagcaccggattccacatcgattaaacatcagactgaagccaaaaagtttcacagaacacgcacatatctttgaccaactgaaagatatttggccatccaaaactgatatccaaggtctccagctcttgtgtcatttcggctttaatgtggccatgttcttccaagagccatttggaccttgtgctattgatcattgctgagcattgattcactagccacaaagcaatgacaactttcatgtgtaagcttacaaccataaaattgaaaacaatgttcacgtaacttgtaaagtagtaaatgcacaagtactggaacagcattgttcaaagcagtcatggcaggtactggatgatctgaaa

SEQ ID NO: 134449 - DNA, 225 bp, Glycine max
  unsure (1)..(225): unsure at all n locations
  Clone ID: PAT_MRT3847_92415C.1
ggctcaagancanccaagagaganccnaagacacacaacacanactcacaccngagagacaagagaaatcancatggcatcagcnncancngggttcnganacactnaatnnngcagctgccgcacaaacncaagggggcatgncacacaaganacactctanncgtgnaagcngaataccncacgcgaccncacgcaacccactgactnacaacaacacactat

SEQ ID NO: 134450 - DNA, 303 bp, Glycine max
  Clone ID: PAT_MRT3847_92416C.1
gggccaaggaattaacttgcctctggtggatttgaaaagaatttacttggtgttcaaccggtgaagggttattatttttccttcccaggggtccagccttatttggatttatcccacttacctattcttttttttgacccggttaaaacctattcaaggtttaaaaaaaaacctgacccttttaaaaaaccacttttcttaactttttgcaattaatggacccctccaccagaaaattaaatggaagggttaccaaagcctaaattcaaggggttccattttgcatggcttggtttccaaaca

SEQ ID NO: 134451 - DNA, 495 bp, Glycine max
  Clone ID: PAT_MRT3847_92417C.1
tttttttttttttttttttttttttttttttttttaaaaaaacccttccctttacccttattacaacaaaaaaaaaaaggggggaaattttcaaaaaggcggaacctactcaaaagggggggcatgccttattttctttttttaaaaaaaccacccaaccaacgaaaaaaaaaacttcttccaaaacatgcgggggattcctttttttaaaaaaaatttgtagatgccgggggaaaaaaaaaagcttgcaaaaaaataataccccccatttaaaaaatttggaaaaatcccaaaaaaaaaaaaaaaactggtgactggttgggcttgttaaaaaagaaacccaaattgccgcttgtttggttttcccccctctgacccccccttttcaaaacatttttatgacccccttctttttttgggaaaaataattcccagggagggtggtcttattttttgcaactacatgcatcaaaaaggttcggcctggtggtggtt

SEQ ID NO: 134452 - DNA, 447 bp, Glycine max
  Clone ID: PAT_MRT3847_92418C.1
cttcttactatcttacgttaattcttcgttgactatgatggcattgtatatgattgatgtcgagaccaggacgagggtggaagaagaaaatggcgcggtacatgaagcagctttcgctggttaaaacagcatggagcatctcattcgcttgctttctccttcttcttctatccacaacaacctaaagaaatgcaatctgatccacctggactgctccgaaatcaccgggttcactgtctacaagtacaaacaacgtcatgaaccttgtgaaccgcaccgatcacgctcgattccgccgctgtacatcccacgcccaagcccaaggccaaactaatcctgaaccacaacctcaaatgcaacaacaagggttcatgggagatttcgagaagcccaccattctaaactcagagcccatcaacaaagacgaatttgactctctcaacaacc

SEQ ID NO: 134453 - DNA, 594 bp, Glycine max
  unsure (1)..(594): unsure at all n locations
  Clone ID: PAT_MRT3847_9241C.1
tcctctangcggccgcttttttttttttttttttttttttttttttgcttactaaaaaaacttgtcattccaaataatataacaattgctaattataaaactaccgttaaagaaccggctcctaataaaaacccggaacttaactgaaactataaaaaaccctgaccctataagaaacgctaaaccaggaaattctgtaaaagtcgaaaccttttaagcccctgaactgcctaaggggggcgccctcactgttgagggcataaacagccttcatggcagcgacctcattgcagggaacaggctcacgaatgacgacctcgaggaaaatgacgttaacaccgaagattttttgaacaatgagaccttttttacacttgacaccactgattctcttaagaccgccaattgtgggcagacggataaccggaatgttatccctgccaaccatgcggtgcctcaaaacttcaccgtgtccgagacctttgccttttttgagaccttcggacatgtttacggttccacacatggcgatgggattcaaccttccggccaaattgaatctagacgccaatttgattgtaaaggccaattatg

SEQ ID NO: 134454 - DNA, 341 bp, Glycine max
  Clone ID: PAT_MRT3847_92421C.1
acacgacacactactctaaactttacctactgcactttttatcacgcatcctgttcctaataacgaattggttcttaattacagtccagatatcgattcttccaagttgcctgaaccacctgatgcgtatctgcttctggatttgtatattccttcatatacactacgcctctgagggcccatgattcaggtgctttaattcaacatattcaagggttcctccgtgggcatgcatttcgcgtgcaatcactttcaggaatggatttagatcaatgtgtatctataaagcacgcaattcaggcggaatagattgtatggaaggttcaatcttgcatcatgcg

SEQ ID NO: 134455 - DNA, 2471 bp, Glycine max
  Clone ID: PAT_MRT3847_92422C.1
ggctcgaggcgttcttcaatttattttctttctgcttctcatggatctctcctcactctcttcataccgcactgtcggagtaacaccttctgatcctcgaaaatcacttcctcaatggggtcttcatttcctctcctacactcacaggctcaaccagattaagaaaaggtcaagtggggtatatgcatcactatccgagagagagagaggagagtattattcccagagaccgccaactccgctactagacaccgtcaactatcctattcatatgaaaaatctctctaccaatcgcggatgaactgcgttctgatgttattttcagtgtttctagaactgggggccatttgggctcaagccttggtgtggtggaactcactgttgcacttcactatgtcttcaatgcccctcaggacaagatactgtgggacgttggtcaccaggttggttttcaacttccttgctgctttttgctttacttgttctaaactaaattggacaaccttgtatgaatttgcagtcttacccgcataagatactcaccggtagaagggaccagatgcataccatgaggcagacaaatggcttatctggcttcaccaaacgttctgagagtgaatttgattgttttggcactggtcacagcgaaaccaccatttcagcgatacttggaatggctgttgggatggatctgctgttatcggaagtggtgctatgacggctggtcaagcttatgaagccatgaacaacgctggatatcttgattccgacatgattgttattctaaatgacaacaagcaggtctccctaccaactgctaatctcgatggtcccataccacctgtaggtgctttgagtagtgctctcagtaagttacaatcaaacagacctcttagagaactcagagaggttgctaaggtgagcaatacaattctcatgtctctctatgaaggacttgcacagttattaaatgagatttttgcagggagtcactaaacagctgcaaaagttgacgagtatgctcgtggcatgatcagtggttctggatcatcactttttgaagagcttggactctactatattggtcctgttgatggtcataacataaatgatcttgttgccattctcaatgaagttaaaagcactaacacaaccggtcctgtattgatccatgttatcactgaaaaaggccgtggatacccatatgcagaaaaggcagctgacaaataccatggggttaccaagtttgatccaccaactgggaagcaattcaaatccaaggctaccactcggtcttatacaacatactttgctgaagctttgattgcagaagccgaagctgacaaagacgttgttgcaatccatgctgctatgggaggtggaactggcatgaatctcttccatcgccgtttcccaacaagatgctttgatgtggggatagcagaacagcatgctgttacatttgctgcaggtctggcttgtgaaggtcttaaacctttctgtgcaatttactcatcattcatgcagagggcttatgaccaggtggtgcatgatgtggatttgcagaagctgcctgtaagatttgcaatggacagggctggattagttggagcagatggtcccacacattgtggttcttttgatgtcacatttatggcatgcctgcctaacatggtggtgatggctccttctgatgaagccgaacttttccacatggttgccactgcagcagccattaatgatcgacctagttgtttccgatatccaaggggaaatggcattggtgttcaactaccaactggaaataaaggaactcctcttgaggtaaagtcaggattatatccccatacacatcctcgtagagactattaggaatagttttgcaaatccatttgatgtttttgttatcatattgtatcagattgggaaaggtaggatattgattgaaggggaaagagtggctctcttgggctatggatcagctgttcagaactgtttggctgcagcttccttagtggaacatcatggtttgcgtgtaacagttgctgatgcacgtttctgcaaaccactggatcgttccctgattcgcagcctggcaaaatcacatgaggttttgattacagttgaagaaggatcaattggaggatttggttctcatgttgctcagttcatggcccttgatggccttatagatggcaaattgaagtggaggccaatagttcttccggatcgttatatcgaccatggatcacctgctgaccaattgtctttagccggtcttacaccatctcacatagcagcaacagtgttcaacatactaggacaaacaagagaggcactagaggtcatgtcttagaaatattaaggggttcaatttttcactttacacgatgtacaatgcataacatgattcaccacgtgtaatataatatgaaaaagtaatgtaatactgtgaaattttgaagtaaaaa

SEQ ID NO: 134456 - DNA, 3257 bp, Glycine max
  Clone ID: PAT_MRT3847_92423C.1
ttccaataaatcctccaaacttttaggccaatcagcacacgcacgcgaacgtaaaattcgaattgagctcggcgcgttcttcaatttattttctttctgcttctcatggatctctcctcactctcatcataccgcactctcgggaagtaacatcttctgacctctcactctcaatggggtctccatttcctcgcctacgctcaccgcctccaccagatgaagaaaaggccatgtggggtatatgcatccctctccgagagaggagagtattattcccaccgaccgccaactcccctactagacaccgtcaactatcctattcatatgaagaatctctctaccaaggagctgaaacaactcgcggatgaactgcgttctgatgttattttcagtgtttctagaactgggggccatttgggctcaagccttggtgtggtggaactcactgttgcacttcactatgtcttcaatgcccctcaggacaagatactgtgggacgttggtcaccagtcttacccgcataagatactcaccggtagaagggaccagatgcataccatgaggcagacaaatggcttatctggcttcaccaaacgttctgagagtgaatttgattgttttggcactggtcacagctccaccaccatttcggcaggacttggaatggctgttgggagggatctgaagggaagaaagaataacgtggttgctgttataggcgatggtgccatgacagcagggcaagcttatgaagccatgaacaatgctggatatcttgattctgacatgattgttattctaaatgacaacaagcaggtttctttaccaactgctactcttgatggacccataccacctgtaggagccttgagtagcgctctcagtagattacaatcaaataggcctcttagagaattgagagaggttgccaagggagttactaaacgaattggaggtcctatgcatgaattggctgcaaaagttgacgagtatgctcgtggcatgatcagtggttctggatcatcactttttgaagagcttggactctactatattggtcctgttgatggtcataacataaatgatcttgttgccattctcaacgaagttaaaagtactaaaacaaccggtcctgtattgatccatgttatcactgaaaaaggccgtggatacccatatgcagaaaaggcagcagacaaataccatggggttaccaagtttgatccaccaactggaaagcaattcaaatccaaggctaccactcagtcttacacaacatactttgctgaagactttgattgcagaagcggaacctgacaaagaaagcaattcaaatccaaggctaccactcggtcttatacaacatactttgctgaagctttgattgcagaagccgaagctgacaaagacgttgttgcaatccatgctgctatgggaggtggaactggcatgaatctcttccatcgccgtttcccaacaagatgctttgatgtggggatagcagaacagcatgctgttacatttgctgcaggtctggcttgtgaaggtcttaaacctttctgtgcaatttactcatcattcatgcagagggcttatgaccaggtggtgcatgatgtggatttgcagaagctgcctgtaagatttgcaatggacagggctggattagttggagcagatggtcccacacattggtggttcttttgatgcattaatgatggcatgcctgcctaacatggtggtgatggctaaatcgcattggtgttcactttccaacttggattaaagggaagcagccagagatggggaaaggtaggatattgattgaaggggaaagagtggctctcttgggctatggatcagctgttcagaactgtttggctgcagcttccttagtggaatgtcatggcttgcgcttaacagttgctgatgcacgtttctgcaaaccactggatcggtccctgattcgcagcctggcaaaatcacatgaggttttaatcacagttgaagaaggatcaattggaggatttggttctcatgttgctcagttcatggcccttgatggccttctagatggcaaattgaagtggcggccaatagttcttccggatcgttatatcgatcatggatcacctgctgaccaattgtctttagccggtcttacaccatctcacatagcagcaacagtgttcaatgtactaggacaaacaagagaggcactagaggtcatgtcatagaaatattaaggggttcaatttttcacttcacacgatgtacaaagtataacatgattcaccatgtgtaatatgaaaaagtaatgtaatattgtgaaattttgaagtgtatgatgtagattgtcatatagtaaaacgactagttataaaagagaatgaaaaaaaaatgttaaactattaaataaaaaagaatatgatactattcttctttttttataacaactagtaaagaatttagctgaagggaacttttatgcgaatttaaaactatgagaggactcttgaatgtgaatgtcgaagaaaaaaatgaaatgccattacatcttagtcattgaaaatgtccctaagaggtccacctaaacatttgcattacgttctagtggaaaaagtaaagtccaaaaaaattattatcctcatggcaaacagcttttggtaatttaagatatcgaatttcctcattctttctgtgtagctcttgtagaattttgtaacttcatttatggcactaccatggttgaatttttcatcaatttcccatggcttcaagtcttccattattatcctttgtgtttcaaaggtggtaggcagaccagtatctcttacccaagggcaaaatataaattttatggcttgaagtcttccatcatttatggcactaccatgctttattccaagtcaaaaaaaaacatctataatatcaattttgccaagggcaaaatatagtttgtaccaaggatgattaaccaagttccaccatggtacttgtccggaatctgaaagaaactttagccatcaataaaagctaattaccaacccaacccttctttcgagtggttctgtgttgcttcatttcacgtgtatctacaatggaatcattgttaagcttcaaactctcttctgcttcttttttcattgtcattggttgcttaacgcgctccctacgtttctccatcttggctaatgaatcaagaatcctttgactgtcgtaaccacctatatattggtcagaactattttcattttgtg

SEQ ID NO: 134457 - DNA, 249 bp, Glycine max
  unsure (1)..(249): unsure at all n locations
  Clone ID: PAT_MRT3847_92424C.1
ttgttcttctaccacaaacaaacacatgctgcttcctcatcaagctatggnnnanaanaacnntggggggactctccgtaattaaaccatggcaccagggcaccactcacaatcaaatctcaacatcttcctctctcacaatctctatcctcaattcaacccaattctaactttatccatcacaatacaaccatggagcgagctaaatcatttcacataatataatatatagctagtgtaagatatatt

SEQ ID NO: 134458 - DNA, 625 bp, Glycine max
  Clone ID: PAT_MRT3847_92425C.1
ccacgcgtccgctttgtgtggcatcctccgaacctggcaccatcgaccaggcgtgagtcgcttgacggccagggaaagttggtgctcgaagaactctctgaatctatatgcatggaagagccgtccttgctcagtggtgttgaactcaagctagttgatcctggaaatattcgtaatgtgaaggggatggctaagcttattcttaattttctttcttcttctagcctaaaaatggaaccaagcaagaggccagaagctgttcaagggctactcaacttgagtttgtttgagacataggaagcatacaatgtaagtcacagtttgtcactatcatgcggggccatcattaccaaaaaggcagacagaatggtaccgtggcaagggcaaagttccaagctttctactctaactaactggagcagaggaaatgcgagtttaatacaatatgctacatatttctcacaagccatcttacaaggtgttccgcgtgagaatcatgatcatgttcctgcactctctgagctcatgacattggcttttgtgctgagattcagcaatgagacaactgaatttcttatggagtccaagagcttgcactgcgaggatgaggagttcctcagttctg

SEQ ID NO: 134459 - DNA, 341 bp, Glycine max
  Clone ID: PAT_MRT3847_92426C.1
gaaaggtaaaagaattaatttgtgaagaagaagaaaaaaagagagtccatattgtcaattgtaagaaaacattctctgttggacgtctataaataaaatgtattatatttcctaaaaaaaaaaaaaaaaaaaaaaaaaaaaaaaaaaaaagaaaaaaaaaaaaaaaaaaaaaaaaaaaaaaaaaagaaaatgaaaaaaaaaaaaaaattaaaaaaaaaacaaaaaaaggcaagaaaatataaaggagtccttaccttacgtgcgcagggcgtgaaaccccgtgagctcccccaaaataaacacctgtggaagaatttactttttcttccccttgtgggggg

SEQ ID NO: 134460 - DNA, 310 bp, Glycine max
  Clone ID: PAT_MRT3847_92427C.1
gagaacacacacgagaactagagcagataaacagtgtgtctgctctagaagacattttagtgccattaggagagaagaaccttgccttttcacattagaactagaacaaaaccagaaatgctgcttagagaaaccattcgcaagaccagggttttatttcacaagactctccgaagcttcaagtctgtcatctttggagggtatcaaaaactacccatatctctctccttcaatccgtatctcggtcgcagtggcattgcaagaacttacagttgcgagcaattctactacgagtttgatgacatgctgc

SEQ ID NO: 134461 - DNA, 278 bp, Glycine max
  Clone ID: PAT_MRT3847_92428C.1
gaaaaaaggctgcttataccattttgggggcagtgagcgccccccgattagagccaacctccgcgataatgggccatgttgtgaattgggttaatcggcactactaagccatggctggtgactattaggccctggatgttctaccacctgaggtggatgggtaaccaattgttccagcactacgggacttttttgatgatgcacttaattatccggccagggaacttaactcaaaaacactagtggatggcctgggaaacgtttgggatcaatttcca

SEQ ID NO: 134462 - DNA, 376 bp, Glycine max
  Clone ID: PAT_MRT3847_92429C.1
ccacgcgtccggcattgtgtcttggacataataatagcgggacttgcgatgcatggttgtggagaagaggcaatacagctttttcatgagatggaagaatccgaagttaggccagatggtattacttttatatcgctactgtatgcttgtagccatagtggcttggttgaggaagggtgtggttgattttctacgatgaagaattagtatggtattgagcctgccatggagcattatggttgcatggttggtctgtatggtcgagctgctaggttgcagaaggcctatgagttatatgtgaaatgccagtttctcctaatgcaatcatttggaaaactctccttggggcttgtagcattcatggtaaatttgaaat

SEQ ID NO: 134463 - DNA, 746 bp, Glycine max
  unsure (1)..(746): unsure at all n locations
  Clone ID: PAT_MRT3847_9242C.1
caacaagtataaaaaaaacctattatcgaagcggtcttttcccttctctttcatattttcctttaacttttcctttatcaacttttccattcatctattcaaaatggttgccattactccagcccttctcaccagcctgtccatcctggggatggttcagagtgccatcgccaactccgccacggaggccgattccttggccgttgtgcgaggcatctcggacacggtgtccgacgaggtttaccacgacaagcgtgccacgggtaagcttcctaagcctatccgcaaggctggacaagccgccatcaaggtcggccaaaagcttccaagtcccgtcaagaagcaaatcaaggctgccgctggcggtgccgagaagaaggtcgtcaaggcagcaatctctgcctcaagtgcaaagaacaagatcaagaagaagcttggaaagcgtgacctcgaagatctggaggtctactacaacacgcgggccaccggcaagcttcccaagcctatccgcaaggctggacaagccgccatcaaggtcggcaaaaaacttccaagtcccatcaagaagcaacttaagaatgccgctggcggcgccgagaagaaggtcgtgaaggcagccattggcgcttccaaagtgaagaacagcatcaagaagaagcttgngaagaaggaccttgagtccggcgatattgagatcctcgtgagccgtgacgtgatttccgacctcatcgctcgcttcgtcgccg

SEQ ID NO: 134464 - DNA, 273 bp, Glycine max
  unsure (1)..(273): unsure at all n locations
  Clone ID: PAT_MRT3847_92430C.1
ctttccatagtctttcatacatggtggatcttctctaaaaaatgggatcttgtttgcatcaaaacttccactcctgttgcaataaactaaccatctccatttccagaaactgtacaaatatacgctacctattgtcaccggactgagcttatttaccattcattttgttttctatcattggtaactctctcattggaaaggtactgatccaaacctatagtgctctttagccatgcatattagctcatncgtaatttgcatgctaaatcatta

SEQ ID NO: 134465 - DNA, 679 bp, Glycine max
  Clone ID: PAT_MRT3847_92431C.1
ggagactcaatacgacctcaactcactctccatcttcccatatccaaatcttcctctcccgcacgtactctctcaaagtgatggctttcaattccaaaagggcaccaatatcaagttcaaaagccctagctgatgcagcttcatggtgctgtgcatgtcttcttgtgtctcttctattgctatgcatattcagagacagttctgcccttcatgatgatcaagggaacttgatgatcagaagcagccatgtcttgtccaagccatgtgatgaaatatatgtggttggagaaggagagacacttcacacaatcagtgacaagtgcggtgacccctttattgtggaaaagaaccctcacatccatgaccctgatgatgtcttcccgggccttgttatcaagattacaccctcataaacaacatagctagaataatatttgaaagttaattcctatacttgtatgtatctttcttcaatatagaacaaggaaaaaaagatttccttatgggcacccctaaagtttttagtagttttggtttgcttgctgtatttactacacttgcttaacaaggaaaaagaagtcccttgtactcttttggattgtgttgtacatcttataaatcaatgtgaaaaaagtctactaaaaaaaaatacccccaccatcctgacccactaaccaaa

SEQ ID NO: 134466 - DNA, 447 bp, Glycine max
  Clone ID: PAT_MRT3847_92432C.1
ggccaaagtcaaataaaataaatctataacatccgttataaaccaggcacttagaatatagcagcaacctacaagtagctgtaaaaaaagtatttaagacaaaaagaaaggaagcataaaatagacaaaaattggatactgcgtaaaactctacctaaagagttaagcagggatatcatttaagcacttcttattatatcaaatctgggcattggagagttttgaagcaagtactccactgctcgggttactttctcatcagatgtgtttttggtagataaagggttgcccaccttcactttcaacgactccaatctaacaaacttcggaggttgagttctgatagaagtgggatttaagagatcatgtagtattgtttgaatggcacacaaaccaattgtcaatatctttacatttgcaagcactcccagccattttatgatgatt

SEQ ID NO: 134467 - DNA, 631 bp, Glycine max
  unsure (1)..(631): unsure at all n locations
  Clone ID: PAT_MRT3847_92433C.1
ggctcgaggatggatcgcagtggtatagtatggggcgccaccaacgctatcatgcgccggggtgcgctactctgggacgaagctctgaaatcctccgcaaagccacatccgcactcaactctgtgccaaaaaatgcgcatctccgtcgggaactgggtcaagcttctctccatttggcaatactcgatccccttcctcatcaacctctccgcctccgccactttctttgccatcctctccgacgccccgctctccctcgccgtccccgtcaccaacgccaccaccttcgccgccaccgccgtcttcggcatcctcctcggcgaacgcacccacctaccccgcgctttcttcggtacagctctcatcgtcctcggtctctgcttctgtattcatacctagcttttctacaatctctataaaatcattttttctcttaatttttctgttcccttagttctgagactcgaattcttccatttgcaaatttctgtattggacaatttatttattcttccatagataagagaattcagcattattcagtacatcgtgagtcaacaagaatggacgaatcacccagaacgtgacanatagcanacgaatgtggcatgaaaaagaaaacacttgagct

SEQ ID NO: 134468 - DNA, 322 bp, Glycine max
  Clone ID: PAT_MRT3847_92434C.1
agttgcgctttctaatgtaataaaagatatgcttttggtttgagattctctaaaaaaaaaaaaaaaaaaaaaaaaaaaaaaaaaaaaaaaaaaaaaaaaaaaaaaaaaactcaagggggggcccggagcccaattccccccatagggggcctttttaccccccctaactggccgtctttttacaatgtcctaactggtaaaaccctggagaacccaatttaaccgccttgcgtcacattccactttccccagctggggtaatttcgaaaaggcccgaacagatcgcccttccaaacaattgccccccctgatgggcaattgg

SEQ ID NO: 134469 - DNA, 332 bp, Glycine max
  Clone ID: PAT_MRT3847_92435C.1
gacaactccacgggctggggcctcaccatcggcttgcgcacaggcgtactcttcctttttgtgcccctttttcttctcgggccccttttctttctttttataaaaaacacaaagggcttgtgcatctttatcaatagcacaataaaccatttgccccctaactcaatctggtgaaggggtatatgtgttgggtggggggataagacctccacctccttttttttggggcccgtgatatacgcttatattgggcgcttcctttggggaacccccaaaacgacccccctctttgtctctaaagggcctcaaaagcgctctaaacttatatctgt

SEQ ID NO: 134470 - DNA, 303 bp, Glycine max
  Clone ID: PAT_MRT3847_92436C.1
ctcgagcctaatcggctcgagttcggcaatatggcggaaaatggttcaattgagctgaacaagtttgtgttgttttgtttggtgctgctaatacaagaggcctgttttgaactcatccttgtagagcgacacgctgatgtataatgaaggacttgcaagctcgcattcagatacctaagacttggccgatgcgcctccttctaccactccgctcttaaatcgcgcatggtgccagatcccacaggtattgacacatcgctagttgacttagactctaacgtttttgcgaaggtgccagttttc

SEQ ID NO: 134471 - DNA, 253 bp, Glycine max
  Clone ID: PAT_MRT3847_92437C.1
atggagaacagcggtatttcgagcactgatgagaattatgctgaaaaaactggagatgatatcttgtttgaggatggcgttctgattgagaatgggttagccactgcttatgaacatgatttgcttggggttggaaggccctgcagcagctgctgatgagcctgggtttcaaaatggatacaacatgaaaaaggcataatctattgccatatatctaatgttcgtatgtcgcaattcggatgcaatggtgttg

SEQ ID NO: 134472 - DNA, 1119 bp, Glycine max
  unsure (1)..(1119): unsure at all n locations
  Clone ID: PAT_MRT3847_92438C.1
aaagtaggtggtctttttctcataaccaaactcatgtgatccaaattaaatacaagagagccattaaatacacgtaaaaaaaaaaagccttaaatacaaagaatgaggctcaatcaaacccaacacaattccttttgtccgtagaagaagaagaagaaaaaaaaagataaaaattcacaaatgaagtgatggagagtaaaagaaaaagatgaaaaacacgagacacaagttatctgatgatcaatggagagcttctatgcaaatcaaggcaagtccaacgacaagtccaaaagccacattcctcccattggcagcattagtatccttcttatcaccatgaggagaaggagcgccaccagccttacccacgctgggaatctcaggagtactcttagaacccttaggagaaggagcctcagaagaatgagtggtcttggtggttccaaagagctccaacggcaacagcaccttgtccacctggtacaccgccagaggaaacttctccctcagcgcgttgttgagctgcgtctgcaccacgcccgtggagatgttcacctggttaccgccttggccggtaaagttcagcccccaagtcccttcctcctcggtggcctgcgtcctcacggggttgctaacagttaacagatcggagatggtgtagtacttgggcgtgacgtggaagagaatgagcttcaccttcttgtcatcgctcaggtcgtttagggcaccgggtttgaggctctggaaggcattgtcagtgggtgcgaagagagtgaagccttgtgagtttgatttgagctgggactcgatctgagtgagttgttgtgtgtcctttaggagtttgattagggtggtgtactggccacccttttccaggatcgcggtgaggttcaccgcgcctgagggggccggtgcgggagcttgggcttgggtttgggccatgaggaatgtggtgaggatgaggagaatgagggtgaaggatttggaggccatgtttgagcttgagccgaattcctgcagcccgggggatccactagttctagagcggccgccaccgcggtggagctccagcttttgttccctttagtgagggttaatttcgagcttggcgtaatnatg

SEQ ID NO: 134473 - DNA, 326 bp, Glycine max
  Clone ID: PAT_MRT3847_92439C.1
actgctgagagcgctttacagagacatggccgggtataatcagatggaaacccgatatgaggcccaagaagaaacagggcggaaacttgatcatggagatatctttaggccaccagtccatacatatctgttttgcgtttatgaccgtactggtgttcagatctttgcaacgacacttgtgacattgatatttgctctgctagggcatttgtattcatataatcgtggaggtctcatgactgctaccgctcagctgtgggtctataaggacttattaactggctactcctcaacacgtttgtacacgatgttcactgacacagaat

SEQ ID NO: 134474 - DNA, 1163 bp, Glycine max
  Clone ID: PAT_MRT3847_9243C.1
attggtggtgaagacttgcttcagaatatgatgcatcatctgctaccaaattctgaaaatctatttaagaaccatggggtcaaagaaattaaacagatgggcctgcttcgagttgcaacccaggatgcaattcgccagctttcctctcagaccatcgttcaggttgatgtagacctgggagatggtttgaagatatgcaaggctgttaaccgggaggagtttgaggaggtaaacagaaaggtgtttgagaaatgtgaaagccttatcatacagtgtttgcaagatgccaaggtagaagttgaagaagtaaatgatgtgataattgtaggcggatgttcttacatcccgagggtgaaaaatcttgttactaacgtatgtaaaggcaaggaactttataaaggcatgaatcctttagaagctgctgtttgcggtgcagcagtggaaggagctattgcttcaggcgtcaatgatccctttgggaacttggacttgttaactatccaagctacacctcttgccattgggattcgagctgatgggaacaagtttgtccctgtaattccgagggatactacaatgccagcacggaaggagctagttttcacaactactcatgacaatcaaactgaggcgttgatccttgtctatgaaggagagggtgaaaaggcagaagaaaaccacctattgggatatttcaagataatgggaatacctgctgctcctaaaggagttccagaaatcaatgtgtgcatggacatagacgctgcaaacgtgctaagagttttagctggtgttgtgatgcctggttctcgccaacctgcgattcctgttatggaggtaaggatgccaacggtggatgatgggcatggttggtgcgccgaggctctaaatagaacctatggtgccacactggatttagttactctccagaagaaggcatgaagtgatacactactacacaacatcattgtatttgtacctttttttttagttgttttcttgtgtttgtttcggcaaatagaagttgatgtacatggcatgtctgatgtttgtattttgtacctagaataatggaaacaatgcgttccaaaagccttaagatcaaaaaaaaaacaaaggaaattttaaaacatgatgacggtagttgggaaaccttcaacttc

SEQ ID NO: 134475 - DNA, 270 bp, Glycine max
  unsure (1)..(270): unsure at all n locations
  Clone ID: PAT_MRT3847_92440C.1
ttccaataacctctccagctgttacaattgctctgttgctggtaatggtaatgatctaccatacaagatggaagcagaagcaaaatccgaccaatcaacagattaagatctttttggaaagacagggaccccttcaaactaagcggtatgattattctgagataaagaaagtgaccaactccttcagaaacaaattaggccaagggggattcggaagtgtatacaaaggaaaattaccagatggaccntatgttgcggtgaagatcctaa

SEQ ID NO: 134476 - DNA, 317 bp, Glycine max
  Clone ID: PAT_MRT3847_92441C.1
cttgtactctttttatttactaaaacagcatatgatattcaggtggagttcttaccaagtccattttggatgatggtcatgatttctcttgctgaaaaaggtattaaaaatgagtccacacaagaagactctcttaacaagagccctttgttcctcaaaatgaaccccccttacaagaaaaaccccgatctcatacacaattacgcacacacttttgaataactcgatgctattcaaaacacttaggaaatctctaatgacccaaatccctagttgacttctgacacttatcacaaagctcatactaaatatttggc

SEQ ID NO: 134477 - DNA, 500 bp, Glycine max
  Clone ID: PAT_MRT3847_92442C.1
ccgaacgcgggggccaacccggaaatcccggaccggacccgggaggggaaccagtttccccaaaagggaggcgaaaaaaagctgggggaaaaaagggaaaaagcggttcccgggggaaaatggtaacccgctaaaaatcccacaaaaaaaacaagccggaagaaaaaagggaaaagccgggggggccaaaggagggaccaaacccaaataaaggggggggggccaacggcccgttttcaagggggaaaaccgggggggccagcggaaaaaaaaaaccgcccaaccccggggaaaagggggttggcgaatgggcccccaggggggttttttttttcaccagggaaaggggaaaaaggggagggcccttaaccgccgggccctgaaaaagtggaaaaaagcggcccaccctggttggcccaaacgggcaaaaatccgggtggaggggggtaaacgggggaaaaaaaaaggagcgggcttggggtagggggagcccccccccc

SEQ ID NO: 134478 - DNA, 579 bp, Glycine max
  Clone ID: PAT_MRT3847_92443C.1
gattcttcacatggatattttactgagattaccaaacaagggattgtaatgcttacatgtagctttcaatcggattaccaaacaatcttactgaggaatagtaggcatcaactatggcacattgagagatcttttccttctctaggagaagaggaaagacaacatttactacaatatacatctgttcagatgcttgagttacaagaagtcagagacctactaatgacagaaaagacaccattcactacaaattaatgattcggtttttgctgtatgtgatcctctatgtgtccaataggcatatcagaaaaattacatcaccaatcatcaacattaaggatcatgcatcagcaccatcagaggctttagcagcaaaaggatcatgagttggaccaacatcctggccaatgtggcgctgcacgaggcgctgcagatcagccataaccttgtgctcccttttagccttctcttcatagttaaacatagccaaagcacgcttatcctcagcactataaacctggttttctttcctaatacgaatggcattcatcctctgatgtctactaccactcatcacat

SEQ ID NO: 134479 - DNA, 1328 bp, Glycine max
  Clone ID: PAT_MRT3847_92444C.1
aggcatccccaccaccaactcacactaaagtgtttctagccacaaataccctctggttctctttccctacatatgatgttacactcttccacatatttctctaaaccagtaagttatcttctagtatttttcaagtaacttaaggtttcaaacctaggaagttggaagtcatggcagcaacattgatggcagcaacaacaagttctggcactcttaaagcaactcctttcctaggccaaggcaagggtgccaatgccaatgctcttagggatgttgtctccatgggaactgggaagtacaccatgggcaatgatttgtggtatggaccagacagagtgaaatacttgggacccttttcagctcagaccccttcatacttgaaaggagaattccctggggattatggatgggacactgctggcttatctgctgacccggaagcatttgccaagaacagggctcttgatatgatccatgggagatgggccatgcttggagcactaggatgcatcaccccagaggtgctagagaagtggttgagagtggacttcaaggagccagtgtggttcaaagctggagcccaaatattctccgaaggtgggcttgactatttgggaaacccaaaccttgtccatgcacaaagcatcctggcagtgctgggcttccaagttatcctaatgggccttgttgaagggtaccgcatcaatgggcttgatggggtgggagagggcaatgacctctaccctgggggccagtactttgacccactgggccttgctgatgacccagtcacttttgctgagctcaaagtcaaggagatcaagaatggaaggttggccatgttctctatgtttggattctttgttcaagctattgtcactggataaggcccattggagaacctcttggaccaccttgacaaccctgtggccaacaatgcttgggtctatgccactaagttttccccagggtcttaaaatgtatatgacttcttcttccctaatccctatgatcccatcccttgtgcttacctttgtgatttatgtgtagattatatgatcataataattgttggattagtgtacttcttaaggactaaggttcaatttaaacctgggatgtctcttgtttgttgatctagttttgtctgaagcaaccaatgagaaagctatagcaatgttgaagtcgggatgcaatgtttaaagagaatttgatactctcttttaacactttcaattattgattggtgtttatatgaattctattaattcaaaaaaaaaaaaaaaaaaaaaaaaaaaaaaaaactcgaactagttctctctctctcc

SEQ ID NO: 134480 - DNA, 460 bp, Glycine max
  Clone ID: PAT_MRT3847_92445C.1
gaagagaaggaatggtttaacaaaaaattacccaaccgtggaatgatctggcgtaaaaaaagtacacattgataagggctaacaaaaccagccgaacataaactgaaggggatagaacgttcttgaaagaagaaatcaattgaaccacaaccctcatcaccaataataaaagaaaataaacctccctagggcattaaataacaaaagaaattccatttgtgagaacggttccatgcactttaatataccactgaaggttgataactgaaaaaaaaaaaaaggttcaagaaatcaattggctaggaacacacggaaaaggcaaaagttaaaaatggaggttgaccaggaaaaacctccttggaataatactgtttaaaaaaaggccgcctttctgagaaaaataaggcggatactcttgaatcataaacactaatggatacaagcgaggaactaatatccg

SEQ ID NO: 134481 - DNA, 661 bp, Glycine max
  unsure (1)..(661): unsure at all n locations
  Clone ID: PAT_MRT3847_92446C.1
cgtaagnctcggnaattcggcttcgagggggaagagttccggaaagccaaagccagctccacaggcagcttcacagcacctgatcccggcctgaagcgcaagtcccctcctgaggccctgtcagggtccttacccccagccaccacctgccccgcctcgtccacgcctgcgcccactatcatccctgctccagctgcccccgggaagccagcctccgcagccaccgtgaagaggaagcggaagagccggtgggggcctgaagaggataaggtagagctcccacctgctgaactggtgcagagggacgtggatgcctctccctcgcctctgtcagttcaggacctcaaggggctcggctatgagaaggggaagcctgtgggtctagtgggcgtcacagagctttcagacgcccagaagaagcagctgaaggagcagcaggagatgcagcagatgtacgacatgatcatgcagcacaagcgggccatgcaggacatgcagctgctgtgggagaaggcagtccaacagcaccagcacggctatgacagtgatgaggaggtggacagcgagctgggcacctgtgagcaccagctgcggcgcatggagatggataagaccagtgaatgggccgagcagctgacaaagatgggccggggcaagcact

SEQ ID NO: 134482 - DNA, 265 bp, Glycine max
  Clone ID: PAT_MRT3847_92447C.1
cgcgaaccaagtctcagaagtgaggggcaaaatagtaatgtgggatggttcggtgcaggaaatagagcaacctttgacagtggcagagttgatgctggagcacccagagcaagttgtggttaagttgcattcagcagtgacgcagacaagggcaacaccattgccagcagatcacaagttagagacacacaaggtgtatcgtgtgcttcccattaagcgacggaagcgcgttggattaagcggcgaagacactcggcgcattctc

SEQ ID NO: 134483 - DNA, 307 bp, Glycine max
  unsure (1)..(307): unsure at all n locations
  Clone ID: PAT_MRT3847_92448C.1
aaatgatgaccaccancgcccanatgggataaaccaacagaantattatgccaatggaatttaatataccggaagctttagtgaaagaatttctaaaaccaccagagacccnaatatgtggttgcagcaaataacatgcgataataaagcacactaccacccggacagtgttatctctaaaagtacttacaagtagagaagaagctgcaacaataacaaaaatgatatcaccatccagtgccagccgatcaagtaatagggtgtggagggaaagacaggaggcaaagagaactgcgcgaatccattt

SEQ ID NO: 134484 - DNA, 925 bp, Glycine max
  unsure (1)..(925): unsure at all n locations
  Clone ID: PAT_MRT3847_92449C.1
ccacgcgtccggttttgaaaaagtccatgtcatgcaacaagagagagagagattgatgaaaagggaagaaggagaagacgtagccaagggacaagaagagtatcactctagaaggtagccttaaacactccgaacaagtttgtaacgttggcagtactacactacacaccagtgtcccctattattgcccatgattaccctgccaccaacatagagaatccttccccactcactgcaatcacaatcaccgccaccacttctgattctatcaccatgtctagggtttctgcgaattcttctccttcacgcttagtctccatggcttccatcgtcagagcctacacgctccctattcttctcttcgccggagccatgttctaccagctcttccttattcccaatgcctttcctccttctcattacgatgttctgcaaattgagagctatagttcagtcgagaaagtgaaggaggcctacgacaaacttgaatctaaatggaattctgccgtggaagtttttgatattcatgagtttttaaagattcgatatgcttatgagttgctgacaaatcctttatggaaaagagactatgacatatttggtattgatgaacaacttcatattgttgagagtgccagcaagcgttatgcagggaaacatatttcagaattgggatttccctttactacaggcccccttctggatctatagatcattcttctaaagtcattacagctagtgacttccagtatatatttccagatcaaagccattggctaattagttggattcatcaggagtgaacgttggctcaattttcaggcatggaatagaatgctcttantggaggttttgccacatggtatgggggacttggtganaagggacttgcctatacctggtggttgaagaacaccgggaaacc

SEQ ID NO: 134485 - DNA, 496 bp, Glycine max
  Clone ID: PAT_MRT3847_9244C.1
gactgcttttaaagtagtttagaagatgaaccctcacagcctcttggcttctgcagcgatagacataggcttggccttggtgactctgcctctgttctccgtgctcaagaagcagccttccaacgctcccatctactacgctcgtcctctctctcgccgccaccacctccccttcgacgactcttcttcttctctcaaccgtttccttccttccctcgcttggctttctcgcgcgttccgtgtcaccgaagatgagatcgtccaagatcatggcctcgacgctctcgtcatcatcaggctcttcaaatttggcattaagtttttcacagtgtgttctcttgttgggttggtggtacttctccctactaattatggtgcccaggaggttcaaaatgggagctactttacaatggattcttttacaatatctaatgttaaaagaggttctaataggctttgggtgcattttgcattcctgtgttttatatctttgtac

SEQ ID NO: 134486 - DNA, 261 bp, Glycine max
  Clone ID: PAT_MRT3847_92450C.1
cacgcgtacgaaaacacccggggcggctcgagcaagagtttaacatttattgaggtcttgtgttgaactcttaaaaccctcatggctgctttttttaaggccgggcggcccaataacccttcttaccataatttgttgcggaaaccttttaacactcattgataatttttgtgaaaagaccgcagaacatcaatcaagccactctctttaatatcccacccttttcaaaacctttttatcaacaacttaggtaacaaaaac

SEQ ID NO: 134487 - DNA, 900 bp, Glycine max
  Clone ID: PAT_MRT3847_92451C.1
taatacgaggggccgccctttaaataacctcttttttttttttttttttttttgaaggaaagctaaaatttaaatttaacctgatggatactatacttcatagtacaaaacaaagattcccacataacaccacagaccaagataaatcaaatactaacatcgataactaaagaagtctaactcaattaaaggagatgagccgtttaatttcttaaacgtggaaaattctataacaaaattatttctctaatcatccataactttaacctaaaattcgaatgggtataattgacgtcactcgctaaattataactacatatacacggacaaaaatgtgcccatactacgacaataaaatcgacgacaaaatttcctaccaaagattaagaagtgatgagcatcatgtatgatgaaaaatagtttatgctaatctcttggaatgcttgatagaagcatcttcaatgtctcatatgtcataaagacaatgcccaggcttggaacaaccttgtagtactcaggcaaaatacctctatacaagcctcgtaccccttcattctgaattatgtgcttgaatgtcccaaacaaactggtattgtagacacgtgctcgaccaccagcaccctccaactgcttcctgcgccttacaagatccaaagggaatgttgctgttgatgatgcaactcctgaaagactgccacaagcaagactgatcatgacagtagaatcatctggccttcgggactgccaaaaagaacgtaggctctcataaactgaaaagcttatagctatatcgggaccaacacccaacaatgtagctccaagtcctttgtagagacccaagaacccttcgtctctgcaaatggtagtaaaagcatgtgagatgcccctgtagtatgtgga

SEQ ID NO: 134488 - DNA, 1046 bp, Glycine max
  Clone ID: PAT_MRT3847_92452C.1
cccctgtattattcttgcttgcaattagcacattttttactaatttttataattaaagatttaactcttattataactcaccaattttgaatgttcagcataatttatccgactaattaacaagagacataatttatccatactcttattataaactctctctcacattattcttgattatgatgatggtatattgatttctaaagtgagtgggagagaatagagtatatactgggaatatgccttatggcacattacatggttggatccaagcataactaaccaagacagtcgattccaaatcctaatcaatctggttccagtttgagttgcgattatggcaaaccaggcagtgtattcggtgtgggcgattccaccggaagacgtgggcgccagatgcgctaacctcatgaccgccctccgatccgagttcggcgggccccacttccacccccacatcaccgtcgtcggagccatcaaactcaccccggaagacgccgtgaccaagctccgatcggcgtgccaagccctgaggcccttccacgtcaccgtggaccgcgtggccgccggcagcttcttctaccagtgcgtgtatctcctcctccgccccgaccctcacctcctcgaaaccagcgcacactgctgcacccacttcggttacaccaattccactccttacatgccacacttgagtcttctatacggagatttgagcgatgaagagaagcggaaggcgcaagagagggctaatgctatcgatgacacgctcggtggcttgacctttcagattacgcgccttgccttatacaaaacggacactgaagacaaaacgctcaaatcttgggagaaaattgctgaatgcactctcactccaaattagtaacttcttaacttcaatattagcaaaatccacaactctgatttaagtttttggttttctacactctctagctgtcttcttagtctttctgagtgctactgctatgtgcttactgcttaccaatttccaaactctatatataataatgtcaaataataaggcacta

SEQ ID NO: 134489 - DNA, 365 bp, Glycine max
  Clone ID: PAT_MRT3847_92453C.1
accaggtaacacgtcatgtcaggcacagagcaagtatccaatacataccatcatgcatccaatatctcaagacctgttgggaattttgagtacagcatggatagctcaagtcaccattcttctttcatataaaatgcagattcttatgcaaattttctataacacgagaggcagttgagggactatataacccaataatttctagttggatcagcccacctcccttgtttctagctttaaaatgttaaccatatatctttacatacctatatctaagattttttgaagtacaatatctccttacccataacttaccaggccaggaactcatactttcacctgtggagcaagcgacaaggcatcaa

SEQ ID NO: 134490 - DNA, 242 bp, Glycine max
  unsure (1)..(242): unsure at all n locations
  Clone ID: PAT_MRT3847_92454C.1
agcacatgagangactgttcacactgatgtcttgatgggcttgcnaaaaaatgtacaacttgcncggtcaagttctgtaagtngtggtcagggccttattttnggaaacaagantatgaataagttgttggagaaagaaaatgatcaaagtggcagttttcttaaaaagcncacatgagaagttgtccntgagtattacatgctgnagctnatccgtctcttggattgggtgcaactgtcna

SEQ ID NO: 134491 - DNA, 501 bp, Glycine max
  Clone ID: PAT_MRT3847_92455C.1
ggttttgaaaatgaaaacagttttcaagaaatgaaaacagaaaatgaaaatgcaaaccaaatacacccttaaattttaaatttttctgcttctcagatatgcagagaaagagaaggccaatgattgattacatggacaaagttcagaaacaagttacgacaactatgaggacaatattggtggattggttggtagaggtagctgaggagtacaagcttctctccgatacccttcatctatctgtttcgtacatcgataggtttttgtctgttaatcctgttagcaaatcaagacttcagttactgggtgtttcatccatgctcattgctgccaagtatgaggaagttgacccaccccgtgttgacccgttctgcaacatcactgataacacataccacaaggcagaggttgtaaagatggaagctgacatgctcacgaccctaaagtttgagatgggaaatccaactgtaaacacctttctaaggtaaggactttatattg

SEQ ID NO: 134492 - DNA, 521 bp, Glycine max
  Clone ID: PAT_MRT3847_92456C.1
ggaaccccccggaagggaatatttttaaaaaattgcccccccggaaaagagggaaaacatcatcgtcatcaaacagggaaaattttcgcaacaaactcagccaaaacaagggggttaaaaactacaggaaacaaaatatactttgtttcagggggggggaggaaaaggtttaaaaaacaagggaattgccatgaccgaggagttaaagactaccccaaaaccgagagggctttggaaaagggacggtttttccttgttctggcggggaaaaaaaaggagggacaaaactctttttcaaacaaaccctttaaatcttgaaaaggaggccaccatgggtagcaaaaaggggagcaaacccaaaaaactcacccgccttgagcttaaaaaggaggttaagggaaggcccaaaggtatcctttaaagggcctccaagggggtcaccaaaaacaggtgccttgggacaatctgacccttttggaccaaggctttttgcatgctcaaaagaccagcctcaagggact

SEQ ID NO: 134493 - DNA, 317 bp, Glycine max
  Clone ID: PAT_MRT3847_92457C.1
ggctcgcgaggtttacggctaccacaccgatggcccactcaagctcccgtgctccgtcgacgatttcctccatctccggtggcgaatcgagaaagagtctgctccaaaccaaaaccaccataaccacagccaccatcgccttccacacgctttgcacttccactcttgttaggggctgtgacccttcttttcagtcaatgtttgtgtgtggatatcatagtagtgctaattagggaattcacgccgctctgtgttttaatgtccagagggaaatttataacaacaacggagagaattaattactctctgcttccggt

SEQ ID NO: 134494 - DNA, 546 bp, Glycine max
  Clone ID: PAT_MRT3847_92458C.1
cggtcgccctttttgttgtcgaattttcccggactgggaatgcacaggagtcggagcagtatttaatagggaaataacaaataaaaacacgccaagccgcaacccacgggtggaaactacaaacagtcgcggggagaagaaccctaagatagagcgccagatctagaaagagatctcccctcccgggtaaaatacagcccaggccctacccccctttaaaaagaaaaagaagggaccaatgaccgctaatcagagttagaaagcaactgggacagagacgagcccattgcccaagtctaaaacgcaaccataaggggcaaacccgagccgagaaccccaaaggtcgaaggagacccggagcccttgcggttggaagccaccaattatggacaaaccgctaatagttcccgcaaaccccaaccagatggacccacggggatccaccagaaacaagtaatccctacccggcaatgacacgtacatgcctcagaaaggcaccaccagcgcgggcaccttgacctgggtgagcccggacaggccgaaaca

SEQ ID NO: 134495 - DNA, 418 bp, Glycine max
  Clone ID: PAT_MRT3847_92459C.1
cccagatctatttcattaccaacattctttaactggccttactccattaatggtgtttgctggaaaaggtagagtgggtgatatgtgcatgctcttatcttgtggggcagattgccatttaagggccaaagatggaatgactgcattggagattgctgaaagggaaaaccaaccagaagcagccgaaatattgaagaagcacatggataatgatttttccaactccatagaagagaagaaattacttgataaatacctggcaacagtcaacccagaacttgttgatgatgttttgatagagcagctgataagaaaaatatgtattgattcaacagatggagggatccttgtttttcttccgggctgggatgatataaatagaacacgtgagagattgcttgcatcaccttttttcaga

SEQ ID NO: 134496 - DNA, 264 bp, Glycine max
  unsure (1)..(264): unsure at all n locations
  Clone ID: PAT_MRT3847_9245C.1
ccgacacgttncgttcagtntngctgttgnaagtgntgggnnttttgntgngtaggtggtgcggtttgngganctatnggtggnctctnngagggancgcaagaggngaaagcctgaatctgcctncaattgcaatggcggngccaagaaanctaggcctncaacgnactcctttccaactggttgaggnngcaaancgnagccangcacnaagtttttcagcacctccggctgtccattgggtganggatgccacggcctgca

SEQ ID NO: 134497 - DNA, 1542 bp, Glycine max
  Clone ID: PAT_MRT3847_92460C.1
ttttttattaaagaaaatataccattaaaatatataaaaataaataactttttcaaaacactcaagctaacaaaaataaactgaaccaaacatgtagttattgtgagactcgtaatagacatgtaatataatcacgcatcattgttcttagtaacattaaaaactgatgataagcctaaatcctttgaattatttccagaaagttcgtgcaagagacatctatgccttgaagttgaatgaactacatttggaagatatataaaactacaatcatgccaccaataccagatgaacgcaaaatcataatgcgaacttctgaactggcatgtgattcagcaaaaacaggagctgccaacttttaatgaccataaacatccagttcttcctcggactcagctggtagccactgagtcactgactattttggtctcattcttcagctctagaatcagcaaccaatcaagctagcggtaaatccataaataaccaacattggtgacagcctcaatttgaattcagaaactcgctaacggtgacaaacaaggaggcaggttcaattgaccatactcaaactgtacaacgagacatactggggatttataaaagacagtataccctcaaagaacaataatgatgacaaagataaaaaaaatgtcaaccaacttgcctccagataattatttacggtatacaatgagcagatgtacataaccattaagaagccatcataacgaagaataatcaaaacaactatcgctacgacgtaaacgagtatgcagcagcagcaactacaataaacgcctgtattgaattatattaacaagttgtgcctattatactgtgaaccacaagagatgcaatttccccaacatggctgccaggagcttttctgactacacttcgtcttgaccatgactggtacttttcaagatgttgtacttgcagagggggcaagtagcattgatatgcagccatttgtccacacaggcacagtgaaaatggtggctacaaggaagttttctaagttcaaccccatcatcataagcagaaaggcagatgcaacattccgcatcctcgtcagaaagaacatgttcaatgggagaatcagcatcgcattcaatcattattcctccagcagctccttgtgtattcccagcatgtttctcattagtttcagttctttggaacttgaattttgacaactgctcaatgtcttcttttgatgccccttcctggtctgcaactgcatacaggagtgcaatgataccggacggacggtcgcaaacagcaataccaacgatgcatgctagtgccatacagaaaacgacaaagaaaacatcaaaacccaggaaggctatacataaccagtagagcaggggagaatctcggaccaaagattcactatcagctgacacccaatagaatccaacaacccaccaaataaacgaaaacattgtgttggctgattccaaatgctttgccatacttataccatcgtcgtcgaactgcgccaacgacacgtagtgtccagagccgtccatc

SEQ ID NO: 134498 - DNA, 256 bp, Glycine max
  unsure (1)..(256): unsure at all n locations
  Clone ID: PAT_MRT3847_92461C.1
agagaaagaattttattatacattgtgacttgtgaattgtgattccaagattaatagtattcatgtactttattcgaaatgagtaacgtctaattcctcttagttaggtgggaaacagagtctctcaatttgcgtcttcatcctcaaagattatgggacatgtcttgacttccaaactgggcccttcaacgatgctctggaaagaaacaaaaaacaaatcacanaaagactttggatcaaaatcaaggagattaat

SEQ ID NO: 134499 - DNA, 1022 bp, Glycine max
  Clone ID: PAT_MRT3847_92462C.1
tgagatcacctttctgcttattcaaaagaaccccttagtttttctctgaggttgaagattgctctaggatcagccaaaggtcttttatatctacacacagaagctaatcctccaatattccaccgagatgtgaaggccagcaatatattattggactctaggtacacagcaaaagttgctgattttggactttcacgacttgccccagttccagatactgaaggaaatgtacctggtcatgtatcaacagtggtaaaggggaccccgggttatcttgatccagagtacttcttgactcgcaatttgactgacaaaagtgatgtttatagtcttggtgttgtacttctggaacttctgactgggaggccaccaatctttcatggtgaaaatattattagacaggttaatatggcatacaattctggtggaatatctttggttgttgataaacgtattgagtcttatcctactgagtgcgcggagaaatttttggctttagccttaaagtgttgcaaagataccccagatgagaggcctaaaatgtcagaagtggctagagagcttgaatacatctgttctatgttacctgagtcagatacgaaaggacatgattatgtcattacaagtgactcttctggtacaatattcagttcagaaccttcatcttctgttataaaaactccttttatttcaggagatgtttcaggtagtgaccttgttagtggaagtataccaaccatcaagccaagatagaagttgaaaagtatatgtggtttagaaaatatagttgattgatgtttgtgaatgttaagtagtaccctgtaaattgaagaattattgtgaactgaagagtgaaaccatatttaataattttcatttattctttttgtactacttgtaagataaattgatagaggactgacttgttagttgaatatatcgattttgtaacagtgacatattgtagtttatgatggagcattccaagtacttttgaagtaccaatgacgtgtttttaggct

SEQ ID NO: 134500 - DNA, 198 bp, Glycine max
  Clone ID: PAT_MRT3847_92463C.1
gacccacgcgtaccccaggcatcctccaacacctcccactttttctctctaaactctttctcacccgctattgtttcattttcaacgcatcttgaacatacaacctcttcttaacatttccatacaaaattctcttatagaatagaactatattattaatgaaaactataataataacaaatctgaagcgcatttaac

SEQ ID NO: 134501 - DNA, 285 bp, Glycine max
  Clone ID: PAT_MRT3847_92464C.1
cgtgatctgacacgtgtgggtaggggggtgtaatatcaatgtaactggtgctgcttatttattgaatgacagtaatagccttggctggctgctaacaggatcgaatgctgttcgccttctgtgataccaactactacacgggtggactcgcttccgcaccattgttgtctataacttcaccaaatggctgcaatttatttaacagatccagtgtcctattgtcctgaggatgcctcctaagacacctactttgcttgagattgaatgcgacgttgtttgtaccat

SEQ ID NO: 134502 - DNA, 190 bp, Glycine max
  Clone ID: PAT_MRT3847_92465C.1
gtgttaccaggttttgagtgccacagtagttctgagtttcataggagaaaaaaaatgacatgatgaacaaaccaaaactggttgagtcagaatcaggaacaaacaccacctgcttgctgcagatacttgacaggttcctccccgccgctgaggctgttcatgttcctgaggctgcaaaggatgtgactgc

SEQ ID NO: 134503 - DNA, 379 bp, Glycine max
  unsure (1)..(379): unsure at all n locations
  Clone ID: PAT_MRT3847_92466C.1
gggaaagcagggacgccngccgggaccggaccggaacgcccgggccgacccaccccaccggtcctataacgcgaggggaaaaggaaagaggcggggggggngacagcagcaagccgggccaccaccccgcaggggcccngngccgggagcggngcggccccccggacgaagcaaagcaccagcgccaggcacacgccgcagcgcacaacgcccacagaaacacccgcaagacaagggggcaccccccacacccaancanacagcaagacanggaggcnccncccnccccccccaccccccccacgcccccacacaaacacgcccaacaccgccccccccccgcgccgacacccaccgaaacccgcggcacccaccacca

SEQ ID NO: 134504 - DNA, 486 bp, Glycine max
  unsure (1)..(486): unsure at all n locations
  Clone ID: PAT_MRT3847_92467C.1
tacggctgcgagaagacgacagaaggggagtgtcaatagaacatattagcacaaaccttataataattgatcctttgacaaagggattacccccaagacatttatagaacatgttgaaagtatagacattattgttattgatgatcattaagtgtaatttaacttatggattttactaacactctgagtttatttatgatatgtctctaattatctgttctttatgtttgtatgcttatttgtattagagtaatgttaacagattttgttttgaataaagacattatgttggactaattatgtactcctaactaatgatcatattaaggagaagactaattcgtagtagatgaaaggaactatgtcgattaagtgatgtacaaccatcatgacttanattggttcttgttcttaatcatgaaattatgttgtacttaatgtatagaacagtttagtcattntaatgcacattatgttagtttaatc

SEQ ID NO: 134505 - DNA, 491 bp, Glycine max
  Clone ID: PAT_MRT3847_92468C.1
tttgtatatccctgcaaaaatgtaacgggttttttaatccatgttataaacatagtgattcttttaatctctacaaacaatataacggtcatgtataactaaaagcaaaaaccactattttacaaatacgtaaattggaggatgtataactatatattaatagacgagtttgatttgaacacttgacataaaaatgaaagttcaaatgcacctccttttctttttcatcttctagatttacttaaccaaaacatttttttaaaattaatggatgtgtgatggctatagaaacatgtttattaataagagataatgaataaattttaaaaaaattgaaccaatttgatatatcaagtagacaagtactaactttagcgtaagcaatttgcagattcatccaatccttactgaaccaaattgggtgataaatgcaatccagcttaatgacaccaatatatttagatactacagagaataacaccactagacgt

SEQ ID NO: 134506 - DNA, 569 bp, Glycine max
  Clone ID: PAT_MRT3847_92469C.1
ataaaagccctagttagaagagttggtcgaatgagggatagctcaataattaatgtagaggaaaactcttaagtgcctttgaagactattaaaaggattcgttttttacataaaaaaaaaaaaaaaaaaaaaaaaaaaaaaaaaaaaaaaaaaaaaaaaaaaaaaaataaaaaaaaaaaaaaaaagcttaaagaagcctggccgtcgacgtcatatgtttttttatagggccaactaaattaaattcgctggtccgttgtccaacaacgataaagactgaaaaaccccctgtcaccacccaacttagtggaatagcacatcatccccctttcaccagctgaagaaataaaaaagaggcccccactgatcgttcttaccaacagtggcccaccctgaatgacgaatccaaccccccctgtagcgaatcattaaggggggcgggtctggtgcctacccacaaaccgaccgcatctcttggcacccccctaccgcccccttctttctttttcttcccttccttccccgccacttccgttttttctccccattaagcaataaatcggcggctt

SEQ ID NO: 134507 - DNA, 445 bp, Glycine max
  Clone ID: PAT_MRT3847_9246C.1
attcggcttatagacaaagcttttacccccattgcattcttccacactgattacaacacgcacgcgggggggttgactctagatcacttgctatcccctgcaaatgatcctaaatacaagattttcctcgaatatgccaagcctcctgctacctctgtagacggttatagtgggccctggaaccacagaggagtcacctgcagttgatgcccatccgagaaacacatctgccaaaatcaccatacgtgctacagaactatgcaagaagaaatccttctaagacgtaccagcggaagtgctaaaatgataacctaaaaaagtactattcgaggcactgcaaaagcaccaaactctaatgttggcagagggtagtcactgccatgggactttaaaaaaagcggctatagaccatgccaataactattggactcatcatgctcactgc

SEQ ID NO: 134508 - DNA, 349 bp, Glycine max
  Clone ID: PAT_MRT3847_92470C.1
acccaacatatttaattttattatagaggctttgctttgtattaaaacctcactccttaattacccagcttaaacaatacaatgataataaataagggggggaataaagtttttgggaaatggtgaatcaataatccaataagaaacttatgggggcaaccataaacatagtactacatgggaatttaaatggcacggttttttttacattcagggggaaactgagggtagcggtttttgtcaaggcaaaaattgtaaatggggtatttcctgggcacccacctgagccatctcctttgagaagcatcaagatcatgatactgggcttgaacccaccaccttttgcctt

SEQ ID NO: 134509 - DNA, 512 bp, Glycine max
  Clone ID: PAT_MRT3847_92471C.1
cctcgagccgattcggctcgagttttcataagcacttataatagaaggaaataagaaaaaaaaaattaagggaaaatcaattgagcttatctcaatttaagatcaacttatacatctcaacttaaccgctattataaaagttaaaattttagtttatggagaagttgaattcattttaccttttattttcttctacaactgagaagtttatcggaatagtctgttactggttcaatgttgtggaagctgaaatgtcttttcttttatgctagatgagtggtaggtagcacatctggtaacttgcgaatgtgtagttgatactagttacaagttttctatttttgggcttattttgaatagacagaggatgcagcttattagaatttaatgtacctaggattctttgttttagatagggaaaggccgaagtgagtggtgagatctttctgggtgttagtgctagtagttggttagagtctgatttgatttctgattcttctcatctattttat

SEQ ID NO: 134510 - DNA, 661 bp, Glycine max
  Clone ID: PAT_MRT3847_92472C.1
cacgcgtccgccttcatctacccacccgagtgaggcagagttaggtggtgtgagcgtggtcaactttgggaactcaaactcaacaaccagtcaaccacccatctaaagctttaactttcaagttttggtaagtgcggagacataacacagagagagagagagatggagaagagcgtgagggagttgggagtgcaggacttggtgaatgcaggaggtttaacacttgcagaagccaatgaattataccatgttttgactgatattctgtctcagtctcagtctccctcacacatatggcaccaaattgtgactcggagattgctcaaaccatccttcccacactctttgcatcagcttctctattactctgtttatcactctgcttttcattctcaacatgcttccctcccacactattggttcccttctatagagcaatccaaacgcaccaacctgggccgtctcatggaaactcatgcccctaaacttttaggagcttcctacaaagaccccatcaccagttttcatctctttcacaagttctccgttcacaccctcaggtgtattggtcccttattctaaggaactttcagtttcctttgttgagcctccaaagtgcattttagatacttcttctgacccttccaacatggagggactt

SEQ ID NO: 134511 - DNA, 182 bp, Glycine max
  Clone ID: PAT_MRT3847_92473C.1
aagagcttttgttcaaactttctttgttctccattaaggctcacaaattaggggagttgtttcagagatatctccaccaatacaagagaccgttgtaggtaaacacagactaccgtggccacccctgatcgttagtttagacgggaacacatatagcactgctatctaccgatatgttattg

SEQ ID NO: 134512 - DNA, 390 bp, Glycine max
  Clone ID: PAT_MRT3847_92474C.1
tcaatagtaccattttattgcaatcttgaggttcatattagtttttagttcgttctcaatggccagtgctagaggtactacaagggttggagtaagaacaagggcacgaactccagttgtggaagagatagtacctaattctggatggacagaggactctgcgggccattaccttctagtggatcttcccgatttcaggaaggaggagatgaagctccaggttaatagctatggccgtattgttgtatcaagagagaggaacttaaatgagtggaaacatgttcattttcggctgacttttccagcaccgctgaactctgatatggataagatagctggaaagtttgatggtggaatcctttatgtcactgtccccaagcaagtgacaca

SEQ ID NO: 134513 - DNA, 492 bp, Glycine max
  Clone ID: PAT_MRT3847_92475C.1
cccacgctttagatttatccaattatctttctatagaataatacaattttctggattgagattatgtacggtctcctgaaaattttagatgaactttataaaacatatatttgccttgtctaggaaggatagaggagaggttgatcttgtttttggttgattcagtggtaaattctctccaaggtgcacgtgcatctcagcaactgaatcattcatctcagttgataaaagaaaaacttcactgtaacaaagatgtacaaaaggtctaatgaagaaaaggatgtaagtagtaagaaggttagaaattgtgatacagcagaaagcaatattcaaagcgcgattgtcgatggcgaggacacatctgagattccatcattcccattaggaaatttgagtactagttggtgctcactggtttgtaaaccggctgctattaagacagccaacagatacttcttgcttcaaaaagtaactcagtcctggccttcccct

SEQ ID NO: 134514 - DNA, 1048 bp, Glycine max
  Clone ID: PAT_MRT3847_92476C.1
accagactctgggttgcgggggaatgatcttatgcaccgcgatcaaccactgcctatgcgacggcatcggtacgtcgcagtttctacacgcttgggcagaactcaccagaaagcccgaaagcgagttgagcaccatgcccttccactggcgccacgtgttgaaacccagagagcccgcgcatgtaaagttccatcacgcgggctacaccggaccatacccaacccctcaagtggacctcctcaagtttatacaatcacagccggtagtacccgtatccttcgccttcaccccttcgcatgtccttcgcctcaagaaacactgtgtcccttctctcaagtgcacatccttcgaaaccgttgcggctcacacgtggcgctcttggattcgatcactaaaccaatccctaccctccaaactcatcgtgaagctccttttctcagtcaacgttagagcaatagttgaccttccacaaggttattacggaaacgggtttttgctagcgtgcgctgatagcaccgtagaggagttagtggagggtaacttgcgccacggtgtgaagcttgtgcaggaagctaaagtgaggttgaaggataaagagtatataaggtcaatggttgacttgttggaggacaaaacggtaaaaacggatctttcgactagtttggttatttcgcagtggtctaaactggggttagaagaggtggattttggagaggggaaacctttgcatatgggtcctttgactagtgatatttactgcttgtttttaccggttactggtgatgctaatgccgtgagagtgctcgtgtctgtgcccgaaagtatggtggaacgtttccagtatcacatgaatgaaagttggcaaggaaaagaagaaaatgggaatcatcatgatgttcaacatcataacgaaaatggattcttctgaatgccctagtttctttttatttatttatttatatcttttcagcttttgttccccatgtgtagtccaatttctacttacatatgaatatgattatataatgtaaacttttactgaaaaaa

SEQ ID NO: 134515 - DNA, 223 bp, Glycine max
  Clone ID: PAT_MRT3847_92477C.1
attatctaacttttacctttatttttttagcactttctttcattcctagcatttgtcaatcttttataacttctattatcatattgtagatattttcagattttgttgctacctttgttcatggatagttcttccaattcagtgatggaggttgaatttgagtcatcatccttgcatttagtcctatcatttgcattatacaacatcctttattgagattatg

SEQ ID NO: 134516 - DNA, 331 bp, Glycine max
  Clone ID: PAT_MRT3847_92478C.1
cgggtccgggattccccgggtgcgacccacgcgtccgctttcgcaaaaacgcactgtgtttctctctttccgcggcgtagattctgagcagtttgggaaaccctaacctgctctcacacactctctttggtttttttcctctccgatcagccacctctttcgacgcccttaggccatggcaggacttgcacccgagggcatacacacgcttgatgctcgccaatatgataccaagatgactgagttgcttacatctgatggacaaggattttatcacatcttatgatgaggtccatgacatctttagatgctatgggcttgcaggagaatc

SEQ ID NO: 134517 - DNA, 455 bp, Glycine max
  unsure (1)..(455): unsure at all n locations
  Clone ID: PAT_MRT3847_92479C.1
tacggctgcgagaagacgacagaagggatgtgtaatggccacatcttcttcaccgctctttcatgcatattttattattttaaccttttttcatatcaagtgttaatttacttccaataaagtctaataattgatgtgaataatgaggtgttgctttcgattccgcatcctactacatttagatccagaagatgcaaatggctctcatctaaccataggatagggaagggatattgaataaactcgtccttaattacttttctttctaaaagttgaaggatttgttgatcttcatataaatgctatcacatgaataatagtcataaacagtaacaaaagcatgaaaatgaatttcacaataaatagaataccagacaaagatttgaaggagtgaaaataattatcctcgcatcttctgggtttattttacanattgaaaagtcagaaaatataca

SEQ ID NO: 134518 - DNA, 528 bp, Glycine max
  Clone ID: PAT_MRT3847_9247C.1
ggctcgagcaaaggtcaaaaaccatttccgattggaattttcatttattcgcacactccccaactaccggatggtcagagtcacgtttttttcattcttccctccatccctctccctcacaatggcgaaaaacccgttactctgctcgatcgtcctcctcgccgtgctcgccggagccacctcagacgacggcgccgagctcgactactcgaagctctccggcattataatccccggcttcgcgtccactcagctccgagcatggtccattctcgactgtccttactctccgctcgatttcaaccctctcgacttggtctggctcgacacaaccaaacttctttctgctgtcaattgctggcttaagtgcatggtgttggatccttacaaccagacagatcatcctgattgcaagtcccgtccggatagtggtctttctggcattacagaacttgatccaggttatataacaagacctctttcattcagtttggaaagaatggattaagtggtgtattgaatttggca

SEQ ID NO: 134519 - DNA, 428 bp, Glycine max
  Clone ID: PAT_MRT3847_92480C.1
atatttattttttttttttttttaccttttaattttttttttttttttttaggcttactattttttctatttttatttttattatatcttggtgttttaccaccacccccggtacccgcgggaaattggagccgggcacaaggggacaaaccatattccccggaaagagagaaaataaaacccgggcgcaaacaaagccaacccacttacaggaaaaaaaaagcgcgcaccgccaaatgccaaaaaaaaaaacacccaaagccaaaaggggaaacgccgggggccccaaagggagagaggaacccccattaattggacgcaaccaacacccccccttaaaaaaggaaaacggcaaccgcccgccggaaaaaaaaatcctccaacccggagaaaagggggaggcgataacgccccccaggggggccttc

SEQ ID NO: 134520 - DNA, 229 bp, Glycine max
  Clone ID: PAT_MRT3847_92481C.1
agctcgaaattcagcacgagtctttcaaacacttcactttactctacactctctgacagctaaaatacaaggaagcatgagatcatatatgacacatgaaaatgtacttaaaaatgctgaaatacaacacgtgcacatagtaagacccataataacaacaattgacacttcacggtttgaatatgttaacgcctgatacacttgcaaagactggtattgagagcaccac

SEQ ID NO: 134521 - DNA, 355 bp, Glycine max
  Clone ID: PAT_MRT3847_92482C.1
cggttatttgtcctcaatgcagagggggaaactgtcttttccccacagcacttcccaaagtgtttaaagaatgcctctatacatctgggggggagctggtgcaactaatgctattttaatgaatatgccaaatgctgaaatacacatgtggagataccatgctggagatcgagcttttgacgaatctaagatcactggtccctacattaacaggacaggatctgtattgatctcatctggtaaaaggactgatgacaccatcagccacaagggttatccccacaaactcatgcatatcatagagctgcactataaagaggtctttaaaggggcacaccaggaattttttacacac

SEQ ID NO: 134522 - DNA, 722 bp, Glycine max
  unsure (1)..(722): unsure at all n locations
  Clone ID: PAT_MRT3847_92483C.1
gatctaaacagggcaattttgaatataatagggttaatggaatcagcaagaccggccatgtgggagatatctccccagttcaactgaagaatcttcttatggaaaaagctagaaaagaaattagcaataaactcaggcaagttcagtcaaatgctgttgataaaactgcgatgaaagagaatggaaatgacttccaagaagtgagtgagaaaggagaaaaatgttccagaaactctgagatgtgtgctcaggataacattgagaagtcagaagatagaaaaagcggatcccgagccatcaagccatttgcaggttctacaattgctaaagttagccgaaaatttttggaaacaacacctgtagatgtactatatcctgatttccatgatttttgcaaagatcgaactgaaggatcttttggtgaaaatcaagtatgggccgtgtatgataacgatgatgggatgcctcgatgttatgtgctgattcgccgcatcatctccctgaatccgttcaagatgcagatcagttggctcaacccaaataccaacagtgaactgggccccctaaaatgggttgcttcaggctnttcanaaatttgtggggatttcagaacaagcagacctgaaatttgtggttctaccaattttttctcccataaggttaggtggaggactggtgctganggagccatttgtatatatccgaggaaaagtgatgtttgg

SEQ ID NO: 134523 - DNA, 466 bp, Glycine max
  Clone ID: PAT_MRT3847_92484C.1
gcgagaagacgacagaagggagcatcaattaattaaactcttttcaaaattcttgagattgttatcattcgattttgccaaatattttttttttatatagatcacaagaaacaaacttactaaaatatggtagaactactggattttgtcggatatgttgatggcttaatttagtaccttgaaaatttatttatttaatatattttactttaaacgttataattcatataaagtattaacatattataccaaaataagtattaacatacaaaattagattgatggtaaaaaagtggaagatgattaacctttttctatttaggtataattatatgattataatttattattctaaaaatgtaaatattttgtatttgagatgtctcacgcatcactctctatacatatatgtacgcatcattttttttacggtatgtacgcataaattgaacattttaatcattat

SEQ ID NO: 134524 - DNA, 220 bp, Glycine max
  Clone ID: PAT_MRT3847_92485C.1
cttattataggaataattgacttcagtgtgacaacatgtgcgcgagcttgctatgtattgggtaccggccggtgacatcaaaactctgcctttgttaatctaaagggtgtgtcattagatttgtgtctgcacagaccagaggaagctcgccaattgagagggcgggcgccctctagtgtgctctggcacccgaaagttaatgtggcacccatacctgaaa

SEQ ID NO: 134525 - DNA, 1765 bp, Glycine max
  Clone ID: PAT_MRT3847_92486C.1
cgaccgtcttaccctctatccccaccccaaatgaaaaactcttctccttgatcgaacaaattaagcttcgcactcacgcgccactcctctacgtgtacaagccacaccccgatcacgatgcatcaacctttgttaacaccttgaggcactctcttagccaagctttgaccatctattaccctcttgcgggtaggttgagttcgatcgaaggtggaaaatgggagcttcattgcaatgccaagggagcacaactcttggaagccaattgcaaagatttaaacttggatgatttgggtgattttgtgcctacccatttggtgtcacaactcatacccaacattgactacaatgtcctagttgaggacatacctttgttggttgtgcaactaacgaggttcccttgtggcggtgttaccattggggtggccttgtgtcgttgcacaatcgacggaaccgcgtccatgcggttcatgaccacgtgggccaagttggctaggaaggaaaatttggaccacgtggaaatgatgccgtgctgtgatcgaaataagttgaattcgtacaaggttgatgattcgaggtcccacgaccattcggagtttcgcactcctccgaattggttaggttcattaggaggcagagacactaatgttgtggttgcaatagtgaagctcacagatgcacaagtgaagaagctcaagcacaaggtaaattacgttaacataattaacactactagagctagtagtacttcacgaccttattcaacttttgaggttgttgctgggtatttgtggaagtgtgtgagtaaagcacgttatgaggggaaaagtgaccaacctacgaggttgtctactttggttaattgtaggaaccgaataactccaccacttcctaatgggtatgcgggaaatgcagcatttcccaccgtgacacccacatgctcctttggtgaaatcatgcaaaaacctttgggttatgcagttgggaacgttagggtggcacttgaaagggtgacaagggagtttgtggggtcagcacttgatcccatagcaaaggagaaagacatgaatttggtgaggtacaattttcactacccaacctcaagtgtgcataagggaccttacaaggggaatccgaacctttttgttgttagttggatgaatttttcgtataaggatgcggattttggatttgggaagcctttgtattttggccctgggttcatggatgctgaagggaaggcatttgttatgaataaggctaatggggatggcctcattgtggcaatttctttggaggcatctcacatggatgctttcaagaaattcttttacggtgacatccaagaggaggaatttcctatttccaaactgtgattgttaaaatctcaaattttgactaggatactttcttgcttgtgcggcctccttggactgaattgatttttcaaatacggatactgagacatggtgaaataatttgatttggtcttgattggttgatttggcagcagggaaagaaagttattatggcaacatctttgaaaagaagtacccttgtttatttaattttttttaccatgttttcagagctatatttggatttgaggaaatgagatgtataatggaaaaagatgaagtgaaatagatttaaggtttattgtttggattgaaaaataaaataaaataacggaatgaaaagtaatgaagtttattctatctgattatttaatttttgaaaaaacgaatccataaaaaacagagcg

SEQ ID NO: 134526 - DNA, 149 bp, Glycine max
  Clone ID: PAT_MRT3847_92487C.1
ttcgagctgagtcggatcgagcgcgtccaaggttgaggaactttgtgcacactacttaattcagatattggtttgtaccacctccttgacttgcggtgtgaatcatccagatcatctaaagattatcactgggacagaatactatgatg

SEQ ID NO: 134527 - DNA, 538 bp, Glycine max
  Clone ID: PAT_MRT3847_92488C.1
gaagaagaagaagaagaagaagaagaagaaaaatcaaatatccttgagccagacatgtacaggaacgctgcttcacgtcttagggtcatcagtgttagttactatctttcttctccttcccaaattctattcatattttctgtgtctttcatttattattatcgcgccctagatctcaccatactctgcacttttcattacaacgctggtttttattcaattgattagtcccgatgcaaattccactgctactctttcctgtattctctgagttgtgtttaacaactactgcattacgattcgaaattcttgttaaccactttagctagtgtagtacctcaggctgaaagtctaaaacaatttatattctatgattctgtgcttctgctgattttttttttttgttcaaacgttatcacttaatttactgtgcctagaaaattattttaatccccgttttagattttgagcttgattgtctgatagttttggattttggataggcccgttcgtgcagcagcagcaggatacctgccag

SEQ ID NO: 134528 - DNA, 435 bp, Glycine max
  Clone ID: PAT_MRT3847_92489C.1
ctcggctcgaggctaaagctgatccatgggcctcttagcctcttccatttactctcattaattcatcatcaacgccacggctactactgcatgtgcatcttttccttctacatcatcacttaccacttggctttacgctttaaacctccacagcaagtgttactctaaggccaatgcctccactttcactctcacatgctcagcatcatcgaccacaaccatgatggactttgactagtatgaccttctgggcatcgacagctcttgctcacaggcccaggtcacagttgcctatcgctactatcacaagcgctgtcaccctgacattgctgctcctgatgaccatgacatgaccatcatactcaacgaagcttattccatgatctctgaccccactgcacgcattgcctaggacaaggagcacgctgacagttc

SEQ ID NO: 134529 - DNA, 811 bp, Glycine max
  Clone ID: PAT_MRT3847_9248C.1
accaaccacactcatagaactaaagcaaagtgactcaccaattcacacacataataaactcactgctcttctctctacccctccgaaacccgacccgaaaatgcgatccaaatcggatcccccggtgccccctccctcctcctccggcggaagcgactcctcctccggcgcatccatcgatccgatcttccacctcctccgcgtcctccccttcagcttcctccgcccccctcgcctccgcctcaagcttccctccttcaccctcccctccccgaacgccgtcttcgccctcctcctcctcacctacttcatggtcgtctccggcattgtttacgacatcatcgtcgagccccccggcatcggctccactcaggacccctacaccggcgccgtccgccccgtcgtcttcatgtccggccgcgtcaacggccagtacatcatcgagggcctctcctccggattcatgttcgtcctcggtggcatcggcatcattctcctcgacctcgccctcgatcgcaaccgcgcgaaatccgtcaaggtttcctacgcctccgccggcgtttcctccgtcgtgctagcttacgtcatgagcatgctcttcatccgcatcaagatccccgcttatcttagatgaataatggatccacgagattcctgagttttaattaatttgtagtttgactgaggttttcgttttcgcgttttctagggttgttgaattgaatatggatatagtaattggatctgatttggcgttatttatgtgaagtgcacttttttgaagtaaaattcccgtggttatgagtggacc

SEQ ID NO: 134530 - DNA, 269 bp, Glycine max
  Clone ID: PAT_MRT3847_92490C.1
tttctataaacttacaacagattttcaaattggtcacgtgtatgctgagtgcagggtgaaattctcgccacacatactgaatctgatggaatcttactcctatgatatgacagagttattttgtcacattatgttgggggaaccaatggtgagtaggtattatcaccacactgagttagcggtaggagtggatatgaacgtgcctgtcgagggacttatggctagcactggatgggatgaacttgtttatttttgagaatatggaactg

SEQ ID NO: 134531 - DNA, 303 bp, Glycine max
  Clone ID: PAT_MRT3847_92491C.1
gttggggaaaacccaactggttctgggtttaatgtttgccctcttaattaggccaacggggaaaacttatggttccccagaattgttcgttggagccgtgtttgtccctaaaaaaacaagccctttttgttttttacccttccggttaaaaggggggggggatcaacttttcgatgagcctttaatggggggcgaccccagggtttttgtttcctttttgggggggggtgaagggaaattatttatcccacacactgttaataaattcgccgtggttctttgagcccaaatgtgaccattttt

SEQ ID NO: 134532 - DNA, 376 bp, Glycine max
  Clone ID: PAT_MRT3847_92492C.1
attaaatggtatgtaaattgagaaagacgcattcctcaaaacagggggggcatcacagtgaatccaggggggggagaggggccgtatgcctgcagtttaacaccaggaggacgagaataataacagggggggggggatacaaaaaagagacccttgacatcctggaaaaaactcctaaaacaagccagattaacaaggacaggaaaaaaacttaacaagcttcgaaacccacccaagacccggaagcaaaacacgaggcggcgagtgaaatctactagcggagcgccccaaacaaaataggccggatacccctccaagactgcagcctctacataaccggttcctgctaaaaactctcatcccaaacatcaaaaca

SEQ ID NO: 134533 - DNA, 386 bp, Glycine max
  Clone ID: PAT_MRT3847_92493C.1
ctgtccgttgttccgagcaaacaatggtatgtaccgaaccggatcccagaccgggctcggtccataccattccagctgttccaagaaagccgtgaaccggttagactagatagcccaacgctcgcgtctggtcctagatgtcggctttgtggtcttcggtgacggccaagacacagaagatttaggtcgaggccctaaacggaggggcccattctctgcgacggagcagtcactgccaggtgcattacacgccgcagtggataaccggcccactagggcccaatacactttggaacgctggaggagttcggctcaagtccggtcgactttttcgagagtgtagaccatcctgtggcccaactgtttgtgacgatcttcactgcaac

SEQ ID NO: 134534 - DNA, 451 bp, Glycine max
  Clone ID: PAT_MRT3847_92494C.1
cccagaaaacatttaatttttttaataaaagggggggcaataaacacccaaccaaaacccttttttttttttccagacccaaaagagaaaaaaaggaccccccccccagggggagaaggcacctggaaaagcagaaagggggccgaaaaacttaaaattaagggggggaaaaccaggcttttgggttttggtttcagggtttcaaagggcccaggggaaaaaaaccgccccccaaggggggggaagaccgcaaaaaggggtttcccagcatttgggggccttttggctatttaaaggggagaaggggcgggggccccaaaggatttccccaccagcaaactttttttaaaagaaggaggttaaccagttcaagggggttcttccctggaaattggaacacctccttcagggaaatggacccccaaaaccccgggggggaagccggccccat

SEQ ID NO: 134535 - DNA, 685 bp, Glycine max
  unsure (1)..(685): unsure at all n locations
  Clone ID: PAT_MRT3847_92495C.1
cgcaagcaagcaaaaacctcgaagatttagggtttcgcattgctacttcgcgttcgttcatctctctctcacgcctcaagattttcaagaacacattccaatctggatttctttccattttgtacagccttggataggagtaaacctttgcagatatgggacaaagaaggctgtcactcgggtaaagccctacattgcactatgccactgagaatgatgaggggtggaatcaaatccagtttaacctggctgatttcaccaagagagcatatggtactaattatgtggagacactgcaagttcaggtccatgcaaactgtcgcctgagaaggatttacttctctgaccgcctctactctgaagaggaactccctccagagttcaaattgtaccttccaatgcagaaatcatgaaaaaatggggagtttggaagttgtagcctggagaaattgatgtgattttatatgcgtactactagttgattttattctaaactttgtaattattgttgtgctagattaatattggctcgttccagtacattaaggttgtgttctgatgcttgtctctatattcatgtctttggatgggtagtttctaacccangnnaaaaaaaaaaaaanaaaaannggggggacannaactagaaagatnagnagaacaggaaataaaataagaggggggc

SEQ ID NO: 134536 - DNA, 976 bp, Glycine max
  Clone ID: PAT_MRT3847_92496C.1
gcacaagtcgcagaaacgacgctgcgtcaaatgcgtgcagtttttttgtgttcttatttgttagtccttcctgacagctgaatttcccggcaaacaaaaacaggtttttgtggtgttgaagatgttcaagaacacattccaatctggatttctttccattttatacagccttgggagtaaacctttgcagatatgggacaaagaagttgttgatggccacattaaacgactacaggatgaagacatacagtccaatgtactagaaataattggatcaaatattcagtccacatacattacttgcccagctgacccagcgacaacgcttggtataaagcttccattcttggttattattgtcaagaatctaaagaagtatttcacatttgagattcaagttttggatgataagaatgtcagacgacgatttcgagcttcaaattttcaagctgtcactcgagtaaagccctacatttgcactatgccactgagaatggatgagggatggaatcaaatccagtttaacctggttgatttcaccaagagagcttatggtactaattatgtggagacactgcgagtacaggtccatgcaaactgtcgcctgagaaggatatacttctctgatcgcctgtactctgaggaggaactcccaccggagtttaaattgtaccttccgatgcagaaatcatgaaaatgttgtgggaggaaggaattgggttcacgagagttggatgtttttatttatatatgtactacgtacaattctgcctgttggcttctttatctatgttatgcctgaactaataagaacatttgcaactgttcattctagtcacattcagctggatgatgttctgatgcttgtctctgtaatattggatgtcaattttgataatggtttttgtgcttttacatgatagtgtcttacagaagatagaggatgataatgttttaagtgcactgcattcttaat

SEQ ID NO: 134537 - DNA, 395 bp, Glycine max
  Clone ID: PAT_MRT3847_92497C.1
ataatatattcgcgtctttgcgtatctctgcctaagaggagaaccttcttctgtgcttcttacgattgacaaatggctcaagcattcagcctgctacctagtcgatcagtcaaatgtgggtatcaaggagcattgtggagaatctgatgatgtcctacagccaggatatcactgcctgccttgacgtcttgcgcaccagatcgctgacattctgctgctgcgagtgcagcaaggtgatgtacgaggtgagacgaagaccagggtccatgactatgtcactgtggatgcacatgatcaataccgagctccgtgtcggaaagaatctgatgcattctataggcttaccaacacaagggagcagatctcatcgtatgctttagatgtcttctgggtca

SEQ ID NO: 134538 - DNA, 866 bp, Glycine max
  Clone ID: PAT_MRT3847_92498C.1
aagcaagcaaaaacctcgaagatttagggtttcgcattgctacttcgcgttcgtttatctctctctcacgcctcaagattttcaagaacacattccaatctggatttctttccattttgtacagccttggataggagtaaacctttgcagatatgggacaaagaagttgtgaatgcccatgttaaacgaccacaggatgaagacatacaatccaatgtactggaaataattggatcaaatattcagtccacatacattacatgcccagctgacccagctgcaacacttggtataaaacttccattcttggttttgattgtcaagaatctaaagaagtatttcacatttgagattcaagttttggatgataagaatgtcagacgacgatttcaagcctcaaattttcaagtgtgctgtcactcgggtaaagccctacattgcactatgccactgagaatgatgaggggtggaatcaaatccagtttaacctggctgatttcaccaagagagcatatggtactaattatgtggagacactgcaagttcaggtccatgcaaactgtcgcctgagaaggatttacttctctgaccgcctctactctgaagaggaactccctccagagttcaaattgtaccttccaatgcagaaatcatgaaaaaatgggagtttggagttgtagcctggagaaattgatgtgattttatatgcgtactactagttgattttattctaaactttgtaattatgttgtgctagattaatattgctcgttccagtaacattaagttgtgttctgatgcttgtctctaatattcatgtctttgtatgttagtttctaaccaaagaaaggatgatagtgttataa

SEQ ID NO: 134539 - DNA, 248 bp, Glycine max
  unsure (1)..(248): unsure at all n locations
  Clone ID: PAT_MRT3847_92499C.1
ccgnncntgaaccnnnanngttgcgngcagcgtacgnnagcgaangcattcggctnnagcangacnagcncgttcacgagantncannnncnccnnngcactnnncgncggcgnnngnncnaangngngananntngnnncgagncgnannngaggggnggcagnngaggncacangnngatgnaggnnnggannnganggggnagaagnnaacgncancgangaangnggcgnaantnanntggncn

SEQ ID NO: 134540 - DNA, 654 bp, Glycine max
  Clone ID: PAT_MRT3847_9249C.1
ccctcgcgttcgctcattctgaatcttgcgccgtttccctctcccactcgccagtgaggtgatttgatttgatttgtcagtgctgcggatttttttttttccatttccagcacaatcgattcgtcggtacaacttgtcgtttagcacgttcatgttcatgtttgattcgtgtgttgcattggtttgatagtgttgcggaattttttagaagtgtgaatgttcgttcatgcatgagcggctcttaaagttgccttgcggattcgattgcgatatattgagactgcgatggcctcagccgtcgtgaatttcttgaacgcgacgttggattgggtgacgtttgcgtcggatggtccttctgcgcgagctgtagttttcggagtccatatcggtggacatttgtttatcgaagtgtttttgctagttgtcatacttttcttgctttcacagaaaagttacaagcctcctaaaaggcctttaacaaataaggaaattgatgagttatgtgacgaatgggttccagaaccccttattccttctcttaataaagagttgcagtatgaaccaccagtgctggagagtgctgctgggccacataccataattaatgacaaagaaggtgacaattttgctataaggaactatcgttggggtgat

SEQ ID NO: 134541 - DNA, 989 bp, Glycine max
  Clone ID: PAT_MRT3847_924C.1
gcgcccacgcgtccgacggctcgagaagacgacagaaggggacaccaaaaaaaaaaattcggctcgagaaaaaaagtcttaatttgtttcttgttcttcttcttctctctgtcgtttgttctcttgatctttgatctctgtgttatatgttgtagcaaaagaagtaaacaacacacacatatataaatatttgtaagatatatatatatatatatatgatcatgggttttcttcacaagctttgggacgaaacgctggcgggtccggcaccggaaacggggtctggggaagctccgaaagtacaattcgttctccggcggaatctccgtccggtcaacggtggcggaggcagttccgataagtcgcagcatcaccattgttcggtcccagtctggtttcggaagcaccaccacctctgcttcttcttctccttctggatctaccacccctcgctcccccttaactccggaggcaccaggcggtgatttcaacaagttcacgaggagaaaatcttcaacagtggagagtgccgataatacataatagtggagagtgccgagaatagaaggtgattatgagtgctttggatcgttgttgatgggggaaatgagatgttttggctttgaaatttgaatatcattcggcagagacagagggattacgtttaatttctgtacaaacggcaacacagattccaatttccaaaagggaatcatcaatcatatcataatatctggcatattattattatatagtatatgtaaatatcaataaaatggctcggatgcagggtcttttcagcagattgaaccaatgcttcatggaattctgaggatgtaaaggagtagaaatccagcttctgtatattagtatatatggttttaacttgtttttccttttgaattttttggctgttgtaaatacgaattctgtactctgaaatctctatgatcagttgaaatcaatgaagcttgaaagtagttattata

SEQ ID NO: 134542 - DNA, 260 bp, Glycine max
  Clone ID: PAT_MRT3847_92500C.1
ctcatttcttgtgagtagtagtacactggcatgaaaccagttgaggcaataagtcatgcttaattgttagattattgcttctctttcattaacatgatgatgatgtttatcttcatatttgtttgttccctttctatatattacattcaaaaagaaaatgctgtcatttctgaaaaaccatataattgcaagagagtttgctataatagactatgaaaggcctcttttgacaaaaattgatattatctagagagataata

SEQ ID NO: 134543 - DNA, 318 bp, Glycine max
  Clone ID: PAT_MRT3847_92501C.1
aattcggctcgagctctagccgaaactctcaaaccacaggcctatttatcccatcctgtctttctggtgtgcctctctagcgtatcggatccaactggaccaccgtacattggtgcgttgtggcatgatgctaacatatccttagcccctgccgtgctgacgacgccattggagactaataccatatattgagactaaaggctctcatcattgctaagctccagccaccaaatactatggtcatgcacaccacacgtcatcctactactgctcagatgccagggcgtgactattttagccgacaaataatgcatagcg

SEQ ID NO: 134544 - DNA, 312 bp, Glycine max
  unsure (1)..(312): unsure at all n locations
  Clone ID: PAT_MRT3847_92502C.1
tcgcatgcacgcgtacgtaagctcggaattcggctcgagnacngancntananctggcttnagnagaatccatgggcnnaacaccaagctgcactnnntgctgctggngggtcttgnacngtgtgctagcatntacaatgggttgcagnnnntnactacannctggacaatgantncnntccaacncacactgnatttcacagngnnntgntnctannnnnggacgnnatcgnnnngtngncgantatgccgacnanggcnncaggcgatcnnnagccggataccnaaangnctncncagcagctnnctant

SEQ ID NO: 134545 - DNA, 311 bp, Glycine max
  unsure (1)..(311): unsure at all n locations
  Clone ID: PAT_MRT3847_92503C.1
aatnatatnnangcntangtaagctcngaattcngctcgagtgaaatattaccagttttgtgcaaaaaaaaaaaaaaaaangnngnccncaaattattaanctcttaaaccngnaantnanttcnnaacgnnnacttnaaggntnaaaatttttccntanattaattnntatnaaantttggagnaataatggnaananntttttcntntntaaaattttnatccgttaaaanttcaaaaaaaaaaaaatnnntaaaaaaaaaaaanannnnnnannnnannnnnnnnnannnnnnnnnnnannnnnnnnt

SEQ ID NO: 134546 - DNA, 285 bp, Glycine max
  Clone ID: PAT_MRT3847_92504C.1
agagaatggctcccaagggtttaacctttctggctgtgttaatatgcgtttcagcactgtcactgagtccttctgttgcgggggaagggcaaaataatggccttgttatgaacttctacaaggaatcatgccctcatggctgtaagacatgcatcacaggaacaagtgcaagctatctgctacaatgcgccacatagaacactagctattctacctgagctgcagggaacatgcttccgatgacttgtgctgttgcagagttgctgatggcttcactagttgctg

SEQ ID NO: 134547 - DNA, 341 bp, Glycine max
  Clone ID: PAT_MRT3847_92505C.1
ctgtccataatcggattttgatgcatttgatatgatatgggtgtggtgtttgaccagtcctaaatgggtagtccccattataataccacatttgttcccattagagtttgggctttatgacaacttgaaaatggatgcacctaccaacaacacttcttttaatacccatgctgctgccaatgtctgtttactgtgtcccaatacagcagcgcaacaagggtagttctgtcattttacactttttgtggagggaggttttgtagtagggtcacatgcccccaaagtgattcacccaaatccaaaaatgagccttaaattctggcctaatttggttaattggt

SEQ ID NO: 134548 - DNA, 429 bp, Glycine max
  Clone ID: PAT_MRT3847_92506C.1
gggacttcagatttgggctcaaagtatatcatcatgtttgcgcagagagatacctctgcttggaagacgcagagcttcggtactaccacaacgctagagaccattatactagctgtggatagctataacaccgataacgacgtcatagcgtcagatccgactcgctgagcgagtaaccacggatcagcggcaccgaatataaagacaacaggacctcgacgacgggcgtaccctccacggctacaacataaccaaggagcgtaccctgcagcttgatcttcatatccatggtgacgagcagaacactgttactactgttactggcgctgccgtaaccctagaagtggatagctctgacgccaatgacaacgttaatgcccatattcaagacaagggagcaattcctccacaccaacatcgtattatatt

SEQ ID NO: 134549 - DNA, 110 bp, Glycine max
  Clone ID: PAT_MRT3847_92507C.1
tttttggacaagagaccacactccttatagtacagaggaagcaaaggctagaatcatccttaccatctgaagccagatctgcattactttaactatgtcaaaatcccata

SEQ ID NO: 134550 - DNA, 724 bp, Glycine max
  Clone ID: PAT_MRT3847_92508C.1
cttcaatcaccatggttgaagaaaataataattagtagcataataattaagccaaagtgttcatagatatggagggtcttctgcctcttgtttataaagcaatcaagagaaacaaaacacgaaggcaatacgagtgtctttcatcaggaacttctctagggtacaacatcagcatggccgagatgtaccctcaaactcaggaacatgtccttcagaaccagacacatgcccagaaagtgtttcaccaccaccataatgaaagtcacaaaattggtcacaggagatataactctgttggtgatcatttcgattatgggttccaatcttctcagatgagaacaggtgttgatgctccctcttcgaacaaactcgttaggtttaggagtcaaagaatgttttcatgtatcactggtgtttaaggtatatatatgtcaatttatatatatcctatgatattagttttcccatgtcatatatatgatgttgcacaatgttgtggccttgattcaaatgatgttgtgattcttgatttgttccgtggcttggcttggttaattagttctgtacattgaaaggtagtattgtgcttcttttttttttttttgggcgtcaagattctttggttcatccttgagtctttgaagctctctactttgtttaggggcatgaattgtaaagcttaatttttaaaaggaaaataatactttttcaagagctttgtaag

SEQ ID NO: 134551 - DNA, 233 bp, Glycine max
  Clone ID: PAT_MRT3847_92509C.1
atttactgcgtcttgacggaatcccacttaggagtcgatctccgtactcgtcgcagctgctacatagcactacttccatttcatatgtgtatggacctctatatatacatagacacatgtggatggatggaatgcaaggtaagttatgtaccagctagcacatagtctatttaatcagttatatgccatctcatcagtaggcatattagctagttcggtaggtatagtagttg

SEQ ID NO: 134552 - DNA, 300 bp, Glycine max
  Clone ID: PAT_MRT3847_9250C.1
tcggtattctcctcattcggctctagcacggtaccaaaaccctaaacccttcttctctgatatttaaaacctctctcaacaccttcacctatctctatttcctttctgatcaatcaatctcctcttctcttccagccatggcctccttcctccgctctctccgccgccgcgatgtcgcctccgcctccctctctgcttatcgctcgtcaacgggcagcaccaagccagcatatgtagctcacaactggtctagtttgtctcgaccattcagttcaaggcctgctggcaacgatgtcattg

SEQ ID NO: 134553 - DNA, 972 bp, Glycine max
  Clone ID: PAT_MRT3847_92510C.1
ctttccaatcaagtgggataaagcttggaactttcaaatctgtaaatgagtccttgactagagttgctgtttatatttctttaatagcattgtattgtcttggaggaagcaaggttaaggcccgtgtcgaccctgcgtccgcatgtcatcttttattggatatacttcactttaacattcgctgttcaaggattggttaacacttttggagatcttcgtggaacttttgctgctgttgagaggatcaactctgttttatctggagctcaagttgatgatgcccttgcctatggcttaaaaagagaactgagacaaaaaacactggatgatgaaaactataaattgatcttatcaaatatttctactgagaataaccaaaaacattatttgcattacatgtcagctctcaaaacatcaagcaatttgtttagcttagcatggtctggagatatttgtcttgaagatgtatatttctcctatcctttaaggccagatgtggaaatcttgcgtggcttaaatttaagactaaaatttggaactgtaactgcactggtcggtcctagtggtgcaggcaaaagtactgtagtacagctattatctcgtttttatgagccaacaagtggctgtataacagttgcaggagaggatgtccgaacatttgataagagtgaatgggctcgggttgtatcgattgtaaatcaagagcctgttctgtttacagtttctgttgcttatgtttgatcatataggctttgctataaagattttcctataatagatattattaaagcagcgaaagcttcaaatgctcatgactttataatttcacttccacagggctatgatacacttgttggtgagcgtggaggcctactgagtggaggacaaagacagagaattgctattgcccgggctctcctaaagaatgctcctatccttatacttgatgaggctaccagtgcccttgatgct

SEQ ID NO: 134554 - DNA, 422 bp, Glycine max
  Clone ID: PAT_MRT3847_92511C.1
ctggaattataaaataccatctcatatcatctatgggcgatattcatgaatttcatgtcccccaaaatttattatttgctgcagataatggtaaacttagaaaatctctcctaaaaccaccgtctgttttacaaatgccttctttgttacatgatacgcctacacaaggcaaagagctaaaaaggtttgctgctggaaatggtgatcatcaaatcataaaaaggggctctcctttattcatatacttggggttcctcatgagcagggtctgtctggcagaatttctcctatgggtctccactgcctgctttacctgcccctggccgcttgcttggtactaggtgggccaaatgcaccacactttggctgccaccccatttattgtcctacccagcgacctccttaaccatgtgatctaccat

SEQ ID NO: 134555 - DNA, 494 bp, Glycine max
  Clone ID: PAT_MRT3847_92512C.1
gatacttacatactgaaaccaaggagcatacctatctttgtttcaaacctgtgagagtgatgctagacacagcactgttagccggaactgtcgggctgatgcggccactctatgctgagtctgtgactataaggctcatgcaacgccagggttcttagtggacctccgacaggtgctctgagagaagagagagcaaggacccgctcctgtgatctagtaagtctagaacagaaacctcagaccagtgggatgtctagagctcatatgggacataataatacacagtctgaaggggctcactggcttatttctgctgttggagctcgtgcagataccctatccattctcctcggttacaagttaaagcaggtagttgactcccagccgaactaatatgcgactactggaaaaggaagaaccaggcccacaaaagactgcatacatagctcaaagcagacttaaggatatttccaaacgcaagataatcatagatg

SEQ ID NO: 134556 - DNA, 138 bp, Glycine max
  Clone ID: PAT_MRT3847_92513C.1
cttcattttacggttatttttctcccgaaaaccttttacataggggcggatttatttccatgacgggggggcctacaaattcaaatgtcctcccacggctatccaagaaccttttttatatgctccattcctcttcaa

SEQ ID NO: 134557 - DNA, 246 bp, Glycine max
  Clone ID: PAT_MRT3847_92514C.1
cgctcacagcctcccagctgtggttctgttcctcaagcggcgacagggatattgactgcactcagaccgggtggagcaccacaggaacactcacaaaatagtggcactaaccatggcatatgccgcattccctagatgtactacctcacaccatgcagagcttcaatgcctcctgacggattcgacaacaaccccagggaagattggcctgaactattcgggatccccaaaaatgggctggtgtat

SEQ ID NO: 134558 - DNA, 356 bp, Glycine max
  Clone ID: PAT_MRT3847_92515C.1
tgctcgacctgtcttcctttttttgattaatgaaaacatccttgtcaaatgctttcgcagaagaaagtatgtcataaacccgggactttttgctttgactatgaaattcgaatgcccgcgagctgacggagaaatcattactcccttcctgttggccatctcattacgatctgaaatctgatgtgggatcccatgctaatttccacagcttttatgcacagctttgtgtacgcccaattgttattctttcttcacccatttgtactatcttggctgacaaggactggtgcgtattgaagaccgtagggactagccatctgttgtaaagaaatatatgaacttgcgacccaaaattt

SEQ ID NO: 134559 - DNA, 120 bp, Glycine max
  unsure (1)..(120): unsure at all n locations
  Clone ID: PAT_MRT3847_92516C.1
cccttctcttctcanccncacactccnatctcacacactcctacncatccaacaatgtctctcaccattccctcnaanctntcnaancncgtcgcactctgntcgnaactnancccaaag

SEQ ID NO: 134560 - DNA, 377 bp, Glycine max
  Clone ID: PAT_MRT3847_92517C.1
cttctttttttttttttttttttttttttggggggtttttttaaattttccacggggcaaacgacccggggggcgacccgggaaccccgaaccggggcccggaagcggaccagcttcccccatagcgagtagcattaaagcttggagcaaggacggacaaaggtgattcctgggtgaaaagggaaaacggtaacaattccaaacaacatacgaaccgggaacataaaaggtaaaacctggggcgccgaaggagtaaaccaaccaacaataaatgtgtattgcttactgcccacttcccaattgggaaaccggaaacgccaggtgcaataatgaataagacaaaccgcagggggaggcgggttgcggattgggcccca

SEQ ID NO: 134561 - DNA, 182 bp, Glycine max
  unsure (1)..(182): unsure at all n locations
  Clone ID: PAT_MRT3847_92518C.1
gncgccgcttgtgccgccgcnatgtccctagtgatccccgagaagtttcancacatcctgcgagnactcaacaccnacatcgatgngcggcggaaaatanccttcgctatcactgccattnanggtgtggngcggngatacgctcatgtggtgttgangaaagcagacattgacctcaccaa

SEQ ID NO: 134562 - DNA, 232 bp, Glycine max
  Clone ID: PAT_MRT3847_92519C.1
cctcgctctatttctcaatctctgtgtttacggctgacgattccgcacgagtgcaattcttcgaatctcgcaaagtttaagtcatcatgggtatggtccaggttcacatgaacattgtcgtcattggacacgtcgactctgggaagtcaactaccaccggtcacttgatctacaagctcggaggtattgacaagcgtgtgattgagatgttcgagaaggcggctaccgagat

SEQ ID NO: 134563 - DNA, 307 bp, Glycine max
  Clone ID: PAT_MRT3847_9251C.1
gggggccgaaatcaagtctggccctttgcttaaaaaatccgggtcaataattcaataattagctctcagggaagggctaatctcccacgggtcttaggggggccccaaccaatttaaagctccagaggggggccttggtttttaattttaaggggggggaccccaaataagccggtttcgataatcatttttcaatatattccgggaagggttctggaggggaccttggggcaatattgtttccaggacttgccatacttggatctgcaacgaacaatatctggttttgctcgcccaaagaaaaggg

SEQ ID NO: 134564 - DNA, 341 bp, Glycine max
  Clone ID: PAT_MRT3847_92520C.1
gctgcgagaagacgacagaaggggcccttcatataactcaagggctgcatcaactctaaattttaaaagattttgtgtcctttagtcactgttccgtccacatgcaccttcccactaaggattccacttgcaaagccatttaaggccgtttcatgtgggattggctgtatgctgatatgttattattatataaaccctttttggaattaatgcacacacataaactatgatttgtgggatgagtgatgacctactatttcttttggttgactagtgaagaccgggccctaaccgcgctggcaaacctaacctaacctcgcattgcaacaagagaagcttaa

SEQ ID NO: 134565 - DNA, 412 bp, Glycine max
  Clone ID: PAT_MRT3847_92521C.1
caggtacctgtcacagggagccagtatatcggttgcttaatttggctatatactgattgtatagaaatgagtcaactgggccggatggggtgtgcgagaacacggaaaattatacgggggtaatcgggggaaatttttagtaacggcaaaatgtaacgtgaccaggggccggagaatacgcaggtaaagggtaaattagctgcgcaaggtggggattttgctacgcgaggtaacgggttaatggctggtaggtggggttaaccgacggccaggcacgcatggctgggtagttgcctgccgacagccgctagcgcagaaagggcacccataaagcggcggataaccgggaagcccccgcgatcacatgccactgccccttagacgtagcggggctaaggccaggccgctgggc

SEQ ID NO: 134566 - DNA, 890 bp, Glycine max
  Clone ID: PAT_MRT3847_92522C.1
cttgatctcaacaacaatgagcggagtaacgtgctgtctccgcttcccagggcagctgaactccgacctccgcaaactcgccgtgaacctcatccccttccctcgcctccacttcttcatggtcggcttcgcgcccctcacatcccgcggctcccagcagtatcggtccctcacaatcccggaactcacccagcaaatgtgggacgcccggaacatgatgtgcgccgccgatccccgccacggcaggtacctgacggcgtccgccatgttccgcggcaagatgagcaccaaggaagtggaccagcagatgatcaacgtacagaacaagaactcctcctacttcgtggagtggatcccgaacaacgtcaagtccagcgtctgcgacatccctcccacgggtttgtccatgtcctccaccttcatggggaactccacctccattcaggagatgtttcgccgcgtctccgagcagttcacggtcatgttcaagagaaaggccttcttgcattggtacactggcgagggaatggatgagatggagtttactgaggctgagagcaacatgaatgacttggtggccgagtatcaacagtatcaagatgccaccgccgtcgatgaccacgaggacgaggacgaggacgaagccatggctgcatgagaaaaccctttgtatatgccatacggtgtgttatatatgtctatcttgcaaggtgtggtggcctcaagtcaaatttttacggattttctttctttcttatttgcttgttgtgggttttgtttgttaatgctactttatgacttttgttttgcaccttttatgtcttctcttgtccatgtcaatgattgatgtaattagtggaaaattaatcatatacaaaaattttaactat

SEQ ID NO: 134567 - DNA, 426 bp, Glycine max
  Clone ID: PAT_MRT3847_92523C.1
gaatttctaaaatcctttgcccgtttaatagcaaaaaaatccattagaaaaaacattaggagaaagcttgcaacgcacaaagtagtgagaaatacttctatcccaaagaattttgtgggtaaaaatctataatcgataattcttgctcagtgctcaatccaaattcaaatcaatcaagctaaaagagcatgctttcgcagttatgctcctttttaactccacaacctctaaaattaatagtcacaaacagcatatttacccgtagttgccaattactttcaaaagaaaaaaaaagaatagaaatcgtgaatctatttcacttcttgcgcttatcaataaatacccttttttgtcgatgaaaaagaaaaaactttcaaataacaaaaagaaaaaaagaaaagagagtgctagttcatttttaacacg

SEQ ID NO: 134568 - DNA, 1903 bp, Glycine max
  Clone ID: PAT_MRT3847_92524C.1
ggctcgagaagaaaggcaagtaccatttttatcaatcttatcacccttttgcattgcacctacaaaagggccaccccttcttcccttctcaacttgtacttcatctaattcaatactacaacttctgaatcacttagttgaattgaattatcttcaaaatgagagaaatccttcatgttcaagctggtcaatgtggcaaccaaattggaggcaagttttgggaggtgatgtgtgatgaacatgggattgatgccactggaaattacgtaggcaattcccatcttcaacttgagagggttaacgtgtactacaatgaagcaagtggaggacgctatgttcctcgagctgtgcttatggaccttgaaccagggaccatggatagcttgcgttctggtccttttggaaaaatattcagacctgataatttcgtgttcggccaaaatggagctggtaacaactgggctaaagggcattatactgagggagctgagcttattgattctgttcttgatgttgttcgaaaagaagctgagaactgtgactgcttgcaggggttccaaatttgtcactcactgggaggaggaactgggtctggaatgggtaccttgcttatctcaaagatcagagaagagtatccggataggatgatgttgactttctcagtgttcccgtctccaaaggtctctgacaccgtggttgaaccctacaatgccactctctctgttcatcaactagttgagaatgcggatgaatgcatggtccttgataacgaggcactctatgatatctgtttccgtacactcaagctcacaaatccaagttttggtgatctgaaccacttgatctcaacaacaatgagcggggtaacgtgctgcctccgcttccccgggcagctgaactccgacctccgcaaactcgccgtaaacctaatccctttccctcgcctccacttcttcatggtcggtttcgcgcccctcacatcccgcggctcccagcagtaccgctccctcaccatcccggaactcacccagcaaatgtgggacgcgcggaacatgatgtgcgccgccgatcctcggcacggcaggtacctgacggcgtccgccatgttccgcggcaagatgagcaccaaagaagtggaccagcagatgatcaacgtgcagaacaagaactcctcctacttcgtggagtggatccccaacaacgtcaagtccagcgtctgtgacatccctcccacgggcctctccatgtcctccaccttcatggggaactccacctccattcaggagatgtttcgccgcgtctccgagcagttcactgtcatgttcaagagaaaagccttcttgcattggtacactgccgagggaatggatgagatggagtttaccgaggctgagagcaacatgaatgacttggtggcagagtatcaacagtatcaagacgccgccgccagcgaagaaggcgagaacgagatcgatgacgaggaagccatggctgcatgagagcctcattaaagcctctccggaagaaattattatataatctagattaccacgtcatcatggtcgactcaattttcactgttacattaatcaaaatttttaatatacaataacaaattttgattagatgcaatgtgaagattgatcaaaattattactatttaatgatttctagtgatgtcatgagaaatgcaaatcaaaacacttggtatatgccatatggtgatggtaagggaaaggaaaggaaaggatgtgtttgtatagttaatgctaggtacatatgagatgtggggtgagtagtattttttacggattttgttttgatatttttctttcttattggcttcgttgtgggttttgtttgttattgttaatgctattatttcatggcgtttgttttgttt

SEQ ID NO: 134569 - DNA, 1527 bp, Glycine max
  Clone ID: PAT_MRT3847_92525C.1
tggtttccggcactgtcgccttgaagtcctttgacatagctggcggcgtatttcgcggccagtgttgggtcctcgccgggagtctcttggccacggccccaccgtgggtcacggaaaatgttcacattaggactccaatacgtcaaaccagcctgtccaccgttgtacattgctcttgcttcatcagacaccacccgtccaatttcctgccacagcgactgattgaacgaagcagcggtcgagatgacctgagggaacatggtggcgccggggaaggctccgccgaacttggtgccggggcccacattggagacgccgtggagagcctcggaccaccactcgtagccttggatgccgagcctgggcacggcgatggcattgttgaccacgagcctgatcttctccggcaatgtgagcctcgcaatgaggtcctgcaccctcacgtggattggcacgtgcgtgttgcaaaacttgaaacccctcgtgagaccgttcctagggtcgcatgcaaagggcaccctcccttctgtgacccttgggaagaaggacagggtgacacaaagtactagccctagggcaagtaataggcctttgttgttgttgtcattttcacaagccattttgaaaatgtgggctcgagccggaaaatggataagcaaattttgtttcttcttccccttctcatcatgtccctcttcactgtttcaatagccgctgaatcttccagctcatgccccatggatctcaactatgttgagacctttccatgggactcttcatcctgcagagaccctgttgacaagaaccactgctgccaagtcttgctaagtgtaattggcataggactttcccaacatctcaaacaaacttccttgtttcaacttcccaatgaaaccatttcctccaattgcttatccaatttccaagccaaactcacagccttgtcaattgacccatctttggtcaattcttgttttcccaactcctcccagtttgtcactaattcctccacttgtgcaggtattataaccattgatgattggaagcaaaaagtggggttgattagccccttagacacctcttgcaatggggacctgagtgatcaaactcgttgtagcatatgctccgatgctggcctcaaagtgacatcagggctcaacagtaactccacaagatgtttctacttcacaattctgtatgctgcagctattgttaaccagtttggtccaacaaatttaggcacggcaagttgcatactaggcatgccactttctgtaaaagggtcatcaaatagaggactagtgttgaagcttgttattgggctattgggtgcttttgttggtgttctgcttgcttttgtgttgattgttgtctatagaaagtgggataagagaaggaaggaagatatgcatcacagggaaattgaaagcggtgtgaggaacagtgttttgcctaacactggtgccaaatggtttcacatatcggagcttgagcgagccacaaagtaaatttctcagaggaacatgc

SEQ ID NO: 134570 - DNA, 173 bp, Glycine max
  Clone ID: PAT_MRT3847_92526C.1
aacatggaaacacacttatactgaaattacagaaaatagtgaaggaataaaaataacttggctagagagtacataaaaaggcataaacacatataagacaaactgcggatactaggaagacacaagatctcaacacgaatcgtaaaaacatatatgctttaaataggcccgag

SEQ ID NO: 134571 - DNA, 1102 bp, Glycine max
  Clone ID: PAT_MRT3847_92527C.1
gcgttatgaattttattatgtttattgatattgtgacaaattagaaacaaatgtgatcaataaaatctcaattgcagtggtactgatagaccgttttataaaaccttttaatgatatgcgtaataagaaagaagaagcaagatttgaaactaaattttcaaagaaaactcctgtcgcagtaacaatatacccataccccattgggtagtgtttatcagggtcagcacacgtgggcctgccattcacctgattgtaggagcacatcacacttgccacttgcccttccaacacgcacgctttaaatggtacatcataagtgtcctccaaatcctgtttactcaccttggcgttgaaatgaaacctgtccacaccattccaattatcaagatcataggcagtgtagtgtttacaacaagcagcaaccttgaggcgatttccggcaccatcgccttggagtcctttgacatagctggcggcgtattttgcggccaatgtcgggtcctcgccgggagtctcttggccacggccccaccgtgggtcacggaaaatgttcacattaggactccaatacgtcaaaccagcctgtccaccgttgtacattgctcttgcttcatcagacaccacccgtccaatttcctgccacagcgactgattaaacgaagcagcggttgagatgacttgagggaacatggtggcgccagggaaggccccaccgaacttggtgccggggcccacattggagacgccgtggagcgcctccgaccaccactcgtatccttggatgccgagcctgggcacggcgatggcattgttaacgacgagcctaattttttccggcaatgtgagcctcgctatgaggtcctgcaccctcacgtggatcggcacgtgcgtgttgcagaacttgaaccccctcgtgagcccgttcctagggtcgcatgcaaagggcaccctcccttcggtcacccttgggaagaaggtcagggtgacgcagagcactagccctagggcaagtaataggtggccttttttgtcattttcacaggccatgatgatcaaaattttaaaatgggcggggggggcccacgcgtccgcggacgcgtgg

SEQ ID NO: 134572 - DNA, 127 bp, Glycine max
  Clone ID: PAT_MRT3847_92528C.1
gctatgactttatttgggccaatgggtataattttccgataaccggctggaatcttaactaatattcaggcaatgtccactaggtggttaatgctggatgtaagataaaatgaattttcggaacctt

SEQ ID NO: 134573 - DNA, 328 bp, Glycine max
  Clone ID: PAT_MRT3847_92529C.1
ggctctcagcctcggaccacaccatactggccggatactcaagtgtgggctgtggcattctcattgaccgtgatgggcggtgatgataggcgcctgtgggaccgatcgggtaatcgagagaggggacaggacactgagctcatgacaaatgcataaaaggatgcttgtgtataacactttggataatacacgctgcttatttaataatatatatgcccattgagggatgattaaggataccaagtacctgatgtggagatgaacttcatcttactgttatcactttttaggtaatataaagagggtggcatatacgattcactcacct

SEQ ID NO: 134574 - DNA, 2084 bp, Glycine max
  Clone ID: PAT_MRT3847_9252C.1
ctctgatcattcatcaatccaaaaacacaatcaaatttccccacttgccattcttttccgttcttcacttctattctcttctctctccctcaaattcgcatctcattctgaatctcgcgccgtttcgctctcccactcgccagtgatttgattttgattttgattatatgcgagagtgttgcggaattttcgagaagtttgaatgttcgttcatgcatgagtggttctgaaagtttccttgggaattttcgattgcgatattgacactgtgatggcctcagccgtcgtgaatttcttgaacgcgacgttggattggatgacgttcgcgtcggatggtccttctgcgcgagctgtagttttcggagtccatatcggtggacatttgtttatcgaagtgtttttgctggtggtcatacttttcttgctttcacagaaaagctacaagcctcctaaaaggcctttaacaaataaggaaattgatgagttatgtgacgaatgggttccagaaccccttattccttctgttaataaagagttgcagtatgaaccaccagtgctggagagtgctgctgggccacataccataattaatggcaaagaagttgtcaattttgcttcagcaaactatcttgggtttataggtcatccaaagctacttgactcatgttcttctgctttagcgaaatacggtgttggttcttgtggtccccgtggattttatgggacaattgatgtccaccttgactgtgaagcaagaatagcaaaatttttaggaacccctgaatcaattctgtactcttatggactttccaccatgttcagtgcaattcccgctttctctaaaaaaggagatgtaattgtggcggatgagggagtccactggggaatacagaatggcctttatctttctagaagcacagtggtgtattttaagcacaatgacatggattctttaagagaaactttagagaacattactgccaaatataagaaggccaagaatttgaggcgttatattgttattgaagctgtctaccagaattctggggaaatagcacccttggacgagatcattaaattgaaggaaaaatatcgctttcgtgttttgctagatgagagcaactcattgggtgtgcttggaagttctggaagaggtctcactgaatactgtggagttccagttgagaagatagacattataactgcttctatgggacatgcattagccacagaaggaggattctgcactggaagtacaagagttatagatcaccaacgattgagcagctctggttatgtcttttctgcttctttgcccccatatcttgcaagcgctgctattacagctattgatgtcctggaggaaaatcccaatctgataaaaaagctgaagaaaaatattgcttttttaagaaaaggattgtcaaaaataccaggcatcacaattacaagtaatccagagtcacctattgtttatttgagattagagaaatcaagaggttccatgaaagatgacctgcatctgcttgaaaatatcgcggaacgggttttgaaagaagaatctgtatttgtggttgtttccaaaagatcaacattggacaaatgccgtttgcctgtgggaattagattgtttgtttctgctgggcattcagagtctgatctgctcaaggcatctgaatcattgaaaagggttgtagcatcagtcctgggtggtcagaattgaacgctctacatctttctttttcatctaatgtaccaaaacataagtttgattccatgttttaggtgagcaattttgaaaccaaggcgatagagaaagtcccgtagttcttaatttgtgcagtattttatgttctagtttagggtaacagtattttgtgcgtgttgctcattggttgtctaaagtggtagaataaggatgtaatgtttcttgtcatgagttggggaatatgcctatgaattacattccgatatcaaaagtatcaatgtttacatttttcattcgttagctgttcaacaataaagccggcgaaggtccttatcattgtttgaattcgtagtcaaagttgttttccttttgactc

SEQ ID NO: 134575 - DNA, 419 bp, Glycine max
  Clone ID: PAT_MRT3847_92530C.1
tgtttttttttttttttattattgttttttttttgactgtgtgcaactactgaatggggactattgcaggcaaacttttattgaggctgacagataaacaacaagcgcttaacatttctgaacctcgtcatcataacctagattgtggcccttaaaacagagagggtcgactgcggcaacatctagcgcgcatttttggattgcaaggcccataccaaagttaatagggaagggaataatgtattggcattcacaatgaaaccgaaggagcaggagacatttaaatcgcctatgagaccagggtttcggtggaagggaaaccatcggagaactcctttttaatcccacaatcggactggcattgttggaccttggaattaccgagatgttgccattctatgtgacacagatttgcaaaa

SEQ ID NO: 134576 - DNA, 484 bp, Glycine max
  unsure (1)..(484): unsure at all n locations
  Clone ID: PAT_MRT3847_92531C.1
gaagaattgaggactttcagcttggatcctattnnccaccctgctgagtgacaaccgctttcaagaccttatgcttcatataaaatgcgttatgaacacattgctacatgaggaccatatctctnnacgaccactcacctgactaggaacacacctctgttgtaaaaatatcttgatgtcttgataaacacnngtattgtaagannnnnctaattaacagtcctaattgttatatattacaccagtagtacattaccccgatagaagccttcattgaatgctgcatgtatacaaggaactgagtatacttataacaggcaacatttattagagccagagataactactgctcctcatggcgactcgtacataactccagcctnnctatattcgaggatgaccatctgatgctatgtnncacggacnntacatctaacttcacttctatataacctgaaccacttgaatacagcaccgatnncac

SEQ ID NO: 134577 - DNA, 257 bp, Glycine max
  Clone ID: PAT_MRT3847_92532C.1
acgagaaaacttcttgatggatagtattatattgtctttgtacataaaaaagaaacctaagccatagaaagagcctaataactcttgaagctgcagaagaccttcctgtttgtcttcgagctaaagcatacaaataaatttgtggggtgtaatacttgtattataggttaattttgttactgctttttaaattatggagacaatttataaaaaaaaaaaaaaaaaaactcgagtttttttttttttttttttttttt

SEQ ID NO: 134578 - DNA, 954 bp, Glycine max
  Clone ID: PAT_MRT3847_92533C.1
ggcggcggcgatgggcgccaatatataagaagatactactgcgaaggaaggcatgtgggggggatggagcagaagaaggcaaagatagtggcagagctccaagctgtgaagcacaacagtggcaagtcctacaatcagttagcggaggagactggactcaccaacgtctatgttgctcagcttctcaggagacaggctcagctcaatccccaaactgcccctctacttcgggcagcgctgcccgacctgccccaagaccttgtttctgagatgatgagaccccctttgaggtcttatgaccctaatctcatccaagaccccactgtctataggttgaatgaagctgttatgcattttggggagagcatcaaagaaataatcaatgaggagtttggtgatgggatcatgtcagcaatagatttctactgctcggttgataaaattaaaggagtagatgggaaggatcgtgtggtattgacatttgatgggaaatatttgccacattcagaacagaaatctgagcacatggtttcaagaacaaggccactgggaaaacagtgagtatcttcattggaggaccaactacgcaatcttcaacaccagtctacctgcacatgaattatcattgatctgtaacaaccacaagttgtatttgatcagtgctattttgtgttgtctatagaaaaacattggaagagaaaaataaaagtgtttaagatttataaataataaaaagtagttggccatgcatatttatacaatgttttatggctttggatatttcatgacacttgcaccatgtattttaatgccagttaattataagatggagaagcttgtattgtgcttggttgagcaagtcaaataaacataataatattcattttatccatcaaaaaaaaaaaaaaaggggagaggaggggggggggggaaaaaaaaaaaaaaaaaaaaaaa

SEQ ID NO: 134579 - DNA, 452 bp, Glycine max
  Clone ID: PAT_MRT3847_92534C.1
ggggttgtccattttatgttctctttttttttcttctagaggggaaaaacttctttctgcaattaaaattataaaaaaaagtcccgggggcaacgctaaaaaaaaaaaacttagactttgttactgtggtacagcctcccctcccaaataaagaaatccccactgttcgaaaagaatacaaggatggcggggccatgcgagcaagaagttataataccctggatgcccttatctcgacacgtgggataattgacacgtgggatatcttatgaattcgggaacagactctaccgcctccatggtgtcgggcgctagaacaacctcgcaatgaacggtccctggtacatttttttcgggaaaccctgaaatctaacctgaaaatttgatcgcttttcccttttggacggagggggggcttcccccccccaaattgttatttgacattggaaacc

SEQ ID NO: 134580 - DNA, 425 bp, Glycine max
  Clone ID: PAT_MRT3847_92535C.1
accagcttcaatctctccttctccatctccagccaccacagacaacttctagtagttgcattagacttaacatagtttcttcaaaatgaacaaggttggttttgtttttcttctagtaataactcaaatcattctgcttcaagccatggcactagagtctgaggctccaatgccaggactcaaccctttggaggttaaaattcaaagagaagttaaggtaagtgatcaaaagagagacaaagttgtagttcaaccagttgctgggtctagagggtcgtcatcatcacatgaagagggtgagtctaaagcagaagaagctgaggctccaagtattagaaagctaggaaaacatcattccgcagacaagtcagtggcaggtggaagtgtgatcttaggtggccttgttactgtcacttttgctgctg

SEQ ID NO: 134581 - DNA, 587 bp, Glycine max
  Clone ID: PAT_MRT3847_92536C.1
caaggatcaacactaggaagcggaacttaattggctacactcttttctccattagtactttgctagttcttgttttagatctagcaacatcagggaaagggggaattggaccttacattggtttgtgtgcactttctgcttgttttggagtcgcagatgctcatgtccaaggtggcatggttggagatttgtcttttatgtgtcctgagttcatccagtccttctttgctggtttggctgcctcaggagctctagcttctggtttgagacttctcaccaaagtgggttttgagaaatctgatcatggtcttcgaaaaggggctatgctattctttgcaatctctacactttttgaattcttctgcgtaattctctacgcaatatacttccctaagttgtccatagtaaagtattaccgttcaaaggcagcttcagaaggatcaaaaactgtgtcagctgatcttgcagctgccggcattcacaatgacaccaacctgcaagttggatttgatgctaaacagcaagaacggttgagcaataaacagctaattcttcagaacatggattatgcagctgatttgtttctg

SEQ ID NO: 134582 - DNA, 473 bp, Glycine max
  Clone ID: PAT_MRT3847_92537C.1
aattcggctcgagctccaatagtgtttttgatgatcttgtgcagcaatgtcgcacgacgaggtggttctgttggatgcatggggaagcatgtttgggatgagggcatggattgcattggaagaaaagggtgttaagtatgaacacaagatggaggatctcaacaacaagagctctttgcttatgcagatgaaccctatttacaagcaaattccagttctcatccataatggcaaaccaatttctgaatctgcaattatagtgcagtacatttatgaggtctggaatgacaacaaagctccaatcttgccctctgatccttatgagagagctcaagccagattctgggtagattacattgacaaaaaggtacgtagaagctggtttaatgtgtagatcatgtgatttcttttttgggtctactcaaatttggaaggttcaattcaaaatttgatgattgatatccacgctcaac

SEQ ID NO: 134583 - DNA, 532 bp, Glycine max
  Clone ID: PAT_MRT3847_92538C.1
ccatcccaaccccttttatttaaaaataaaaattatatccaaaggaaaaaaaaggattttaaaagaccccaattaaaaaaattgggaggggaaattaaaaggtttttaaaggaaaaaccaatttttttcccccgggcccgggaaaaaaaagaggcccatcgggcctggaaaagctcccttaaaagggacttcggctcccccagggaagggctgggaaaaaaaaaagattccttggaagggggggtaattcggggtaaagaaaccccggaccccaccaaaaaattcccttaccggcccaatttcaaaggaaacaagaaacccatccgccccagaaaaaaaaggaataatcgggccttccccggaaaaaggaccggatggggattgttaaaccaacccccccaatcggggccccctggctaaaggatttgggggggctttatcggaaccaaaagcgaatggggcaaaagcttcaaattcggcgaagggggctaatcccaaatttaattaccccgctactgggttcaggggttaa

SEQ ID NO: 134584 - DNA, 411 bp, Glycine max
  Clone ID: PAT_MRT3847_92539C.1
ctccaacagaatgttggctatcttctgctttgtgttgtttgacatgcagtgattaagcatgcttggtttttccttatagcaattttaatgtgtatattgttcttcaacagtctatcctctacaacaaccatagaaagagaatgtttaaatggagatggctttggaacttggggatagtaaaattaagtggaatttcccccttttcttacatatgaggttcaaagcaatactttgtttagaagagagatttctgcaccacttacatgaggggcttgtttaattagggtgccaagaaaagggtcagaagtttaatagtaagaggtttatcttgtaacaaaataagacttttatgtttggctcggattactaattggtatcagggaatagtaaaaaaaaaatgctgattttata

SEQ ID NO: 134585 - DNA, 351 bp, Glycine max
  Clone ID: PAT_MRT3847_9253C.1
tcgagcacaactacaatcttggtgaatgtgtttcttgatccactatgattatttgtgcaacttcacacccacacgcacgcactggttctatatctggcggggacgaaacacttgttgtggatattgctgtctgcgcatgcgccgataatgctctggcatgaacactgtggaactgaattgattgaggggacgacctatatgcgatttatagtatcatccatgtctctacacgactccttggttatgctattggacgaatgggaggctgatgttattctttttggataaattagaactgctctgctgatgatattgtatcatgaccttattggcttacacgctatcgacttg

SEQ ID NO: 134586 - DNA, 327 bp, Glycine max
  Clone ID: PAT_MRT3847_92540C.1
attcaaccaaaaatcaaactaacaaaatgaacacaaacaaggtctttacagtgtctgatatcatcaccccgagttcttctagttctgccgttgacccaccgacactgtccctggggctatccttttcatctgaccaaagacagacatcatcaagacattcagctttacatgccatacaatgtttcagcaatggagaaagcatcattagtgttgcttgagattatggtccttggattcacatattaattacatatactaatctttctctagtttcctgtctttttggtgggagaaagagaaagaggttgaaggaaagggtgatggatt

SEQ ID NO: 134587 - DNA, 550 bp, Glycine max
  Clone ID: PAT_MRT3847_92541C.1
ggggaataaaaaccacctaaatggagagtttgttacattatatatcaagatttactgtctgcacctcacaaatactccaaaaaaaggtaaagtatttgttctttttcaaaatgaatagcaactataagcaaaaaagtagaaacattttaccaaaatcatgtttaccccattctgggatcatcctttgttcataaatgcagtgccagattggcagacattcagttaaacaacgagaggatgctctttatctttgaccccagagagattcaatttagtccatttggcacgccttaagaaaaggaagagtgtcccaacttgacagagctgcccacaaattagaccaatccataaaccctatgtcataaagcaaattcaagacagacctactactgaaaaattacaaatgaaaaaaagactcagaatcaagatatcagattcttacaatgcgcaaaatatttaatataaacagttgagtgctgccagccacatcctctggccacccctcgtacacgaaacacaattctcacaccaagaatttaaagtgaatgat

SEQ ID NO: 134588 - DNA, 726 bp, Glycine max
  unsure (1)..(726): unsure at all n locations
  Clone ID: PAT_MRT3847_92542C.1
cagcagcaacgcttcagggtggatagttatgcctttgtgcatgncatggaataagaagaccaacagctttcaagaaccatctacctttcttctcgttaagtaaaaggatagaagtttgaaaacagcaaactgccaagaaaaatatatgctatagagtatgcccacatcacgtatccccatctagagtattttccaggatatgccattatatatgaagcaaaccaataaagtggagggctggcagacaagaaacgagttgaaacctgtacatgcatgatgaagaaagcagtgcatgccatgaatcccaagtgtaacacaaatggaagaacagaagcagacaagtatcctggccaaattgctgctggctcagattctaggtgaacattagcagcatctcccttgctcacattctttcttctcctaagattggaatgttctgcttctaccctaacagaggatttcttcacacttcgggcttctttggaccttgagagttcatctaataaaaacacaactccacggctcttttcttccataggagctaaaaaacccagtgagagaaagttttgaggccttgacttagcataatggacaactgagcaaagtgccagcggacgcattggggaagcaagaagaaagttaggcaactgtttcagctgaaaatatctcaagaaacctacaccccaataatgactttggatgtaattgtaaagtaatcggacgcgt

SEQ ID NO: 134589 - DNA, 421 bp, Glycine max
  Clone ID: PAT_MRT3847_92543C.1
ggacccaaagtagttaaatccgacctcaatatttccgagggggatcccaaaatcccttacccaatgggtttaaatctgaggccaattaatttattttaaacaattggaacaaacatagacaaaaacttttatgcttccatgttttttaatcagggaacacatttttttcccacgaggtttttttcaaggcccaaaaaaaatagaccttggggggttttttgagtttccttttagaagcccaaagaaaatagaccatcatttttgtttttgtttcgcacaggtaaatttgtatccatagcataccggcaaaattttaaaaacctgggatttgtatgaaatcaatttgaggggaatatttttttgcttataggggggccccaagctgttacttagggttagtccaagccccaaaggggaaagc

SEQ ID NO: 134590 - DNA, 2335 bp, Glycine max
  Clone ID: PAT_MRT3847_92544C.1
gaaatgccaatatataaagcatctataattatagtcaaccttcctttaggctaaacagatggtccgcataaattctgatagttaagatacactaactatccaacccaagtacattttattttgactatatcaggatacaaaaacaaacttcctgcaagaagtgaaaaagttgataacaacagaaaaaagaaagaggtccacatccagagaaggggaaggaaaacccaaggctgcataggcaaacaatagacccaaagtgcttaaaacaccaacaaaaagatgtgtcaaggcctgaagccaacactagggcaatgtttaaaaactgggaggaaaaataacttgagctaagaaactcaggttacatccatcctcccaatgactacaatgagccagaggagagcttcccccattcatcttggaaggagtgtagtgaaaattaaaaagaaaggtgctgatatttttcggtgccgttgacttgagttaaaccaacaattttatttgcatagtatacttgtgattcttttctttcactggtcccttttcacaaataatatctgtgagttaggatgatgctgatgaagattattcttcaaggttgtgtttgagtcctcatctgatcccgagttaagccgtaactcatatttttttagcaatgatgccaacactgaggcaacaagttggatgatgaatttctgtccaatgcaagcacgtgtaccagatccaaaaggaagaaatgctgcattttcatttggatcatttagtacacatgaactgactcctgtaatagaaaggtcttcagtagaacctgatccttttgtacccgttgacaaaaaatggtaaggattaaaatcacttgcatcactcccccaactagagtcatccttgtgtaccaattcgacaggtacaaccagtacagctccagcaggtatggttaaaccagttgcaaagcacaagtcatgtttcaaagaacacctctgcagcattggaccagtgggcagaaggcgtgcagattcataaattgtagcccaataacaaaggcatcctataaacattttcatgctcatattttgatgggtttcttcctacaatgctaatctccgaataaaccttatcctgtatttccagatgcatgacaagcctagtcaatacattggtgattaaagcagatgtagtttgacatccatgaaatatcacacgcatgatgttcccacaaggttcttctttaccatcttgatgatccttaagatcacgaaagaaaaagtaatcttggaagtcatcaccagaacagcattgtgcaccatctgctgacttcgtttctttgttggaactttcatttcgtacatcttggtcagtttggccaaatagtttgcagccttttctaaaatgttgaaggatgtcttgagttaagcatttcaactttgtgcataagcattgatacctccaaaattcatgtctccaaaaaggagttacattataggaggcccaaaagcaagcatctttagcaatcatcataaacagttcctcatatattgcagcctttggcgaagccaagaagccatctccaaagaatgtggctcccattattgtgaaagccatatgctgagaaaccaacctagaattgatacctcgtttggttctgatgttttctattttatctgttatgaagtctgcaaccttcataggaatcacatcgtcactcttcaacaatctttcatgtaattcatttgccaatagttcccttctcttttgcaccttttcaaaggaaggggcaaagaggcttgattccccaaaggcaagatgaaacacttttccggtaaaaggcaacttatccttggcctttataagcatctcttgaattagtgctggatccgtaacggacaccaacagctgagtaggacctaaccacagcttaacaataggtccatacttttgatgggattctgacaacacgtcagtgaaggtgaaattttgccgggaaaaaagcttgcagtgtccaaagaaagagggagagggtggcccaggaatggttttggccctatgccacagcctaaagagattgaagagtcttctgagcaaaagggtggtgacagcaacgagacatagccacagaaacgcattgaactctcttgtggcaaagtcccttagaagttcagagggagtgtgaacacaagaggaggatcttcctcgggagtggagaaagtgaagaacacccaacacagaggttggaagagaagagttagctgcagcagcagcacacgcgatgatgtcgttcataatcgttttcttgcgtgtcagaatgggagaagagaaatagtgggattttgcggacgcgtgg

SEQ ID NO: 134591 - DNA, 713 bp, Glycine max
  Clone ID: PAT_MRT3847_92545C.1
ggtgaatgtgcagtagttattatgatttcaccccatctcatcagagattacaacaacacatagtactggaaattagttatactaagcattaaatttaaaagaaaaaaaaaaagatataactaaggacaagttacattacttagaaccatgtttaccatactcttctactctatggagagcatccatgagaacatcagtcgtccaatccttcacgtcctccagacgcaacgattcgccggttcttattctggaattggggcgcgcaagcgtggactcaaacggagttctgggcctgacttctcgatactcctcccactcctctcgagtgagcattctaacactgccttgcccttcaggggcattctttatcttccgctccagcagctcttgggacctcgaatcatcgtacgtcatgaggagcttggcgaagagagcgattccgatggcggcgaagtacatggggatggtggcggtgtcgaggtaggagagggattcgggaactgtgacgatgaactggtccttgctcttcgagtgccgagtctttctcttcttctccaattccaacgcccttctcttcagtgttccagagggggcgtcgctgcgaagagtgtgcaacaatctacgcctcactgcgttcatcgtttaccgttcatcaaaattcaaacccagttgatgcggtggtgtttagtcccgccccgccggccctcgagcgg

SEQ ID NO: 134592 - DNA, 242 bp, Glycine max
  Clone ID: PAT_MRT3847_92546C.1
aatattcacgccaccggcccaccaagctttaaaggggcgcagcagtgcagacggagcatagactattaagcaatccgagcattaggcatacggcctacaaggcataacagaaaacggggcaggaatgaaaggagaaaaagctgaggcacactccagtagactttccgctctaaagagatgacctgaacgtggataaaaatgggatcagtgcattgcgtaccaaggtgtcccactcagaaacc

SEQ ID NO: 134593 - DNA, 517 bp, Glycine max
  unsure (1)..(517): unsure at all n locations
  Clone ID: PAT_MRT3847_92547C.1
aattaaagaaaaaagtttatttagtagattnataaaagattggagtataaagtaatatagaagataaagggtggtattgtgtaaaatttataaagaatttatgtaaanaattattatgagaaagttaagtaggaaaagaaaaagttttagaaaaagtaataaagaattaaagtgagtgatttaaaatttgattggtattgaagtgtatttgataaatgatatattttatgtaaaagtaggtatgtttttgagtaagggatnnagtggnttannaattgagtaaattatgaaggtaatttnagggaggttataagnatggagaatgtttgtgggataaaaanaaaatggtggtttttgaatgttgaaaaatatnntntggtagtngagagtnttgaantnatnnaagtgggttagaatggaaaggggatgtgaatattttgttggttnataggnatnnnaaanaanagtgagnttnttgagagtagtaggaattgtgggntgnaagtggataggatga

SEQ ID NO: 134594 - DNA, 140 bp, Glycine max
  unsure (1)..(140): unsure at all n locations
  Clone ID: PAT_MRT3847_92548C.1
gcggcnnncgcgcgtgcgtgagcncggnnttcggctcgngnangactccanccaactnaacccanngagctgnagtctttgtggttgcgcnagactnanactcntcgccgcttgtagnttnacttgcagcaannttgcnt

SEQ ID NO: 134595 - DNA, 536 bp, Glycine max
  Clone ID: PAT_MRT3847_92549C.1
aaagggtttcgcgtgatctccagtactgaggctgtaaaattcaccgttggaagtttcttggctgggggctcgtggattcctgggagtggcgtaccctttgatgcaggtttatgaaacaaaacggatgtgttgtgttgtggggcggaattgatttccaaaaaatggataacaagttgttgataaaatataggaaaatgaaattgtcatgtagtttgtgttgggtgctttcgagggtacacaaattgctgtactttcgtcttcccttgtccactgtctgcattccttttgtcgacggaacgaaggagctatagctggatccgatcgatgattcgattatagatagtagataggattataccaatattaattgattacatatcctgtactttttcattgtgacatgaagaatatcctgtatgtatagctataaataattgtttgtacaaaaaaaaaaacaattaattgttgtaaaatggcaccaaagtgtataaaagtctttgattcaagttattccatcttgtattaattaatttgtt

SEQ ID NO: 134596 - DNA, 414 bp, Glycine max
  unsure (1)..(414): unsure at all n locations
  Clone ID: PAT_MRT3847_9254C.1
ggtnaaaaaaaaaattttcccccccccggcttttttttttggaatctttttccccccttccaggggggaattccagccaggggaaggtccccccttccccctcattttaccttttaaaaaaaaaattggtccgggaaaaaaaaggggattcatgggtttttggagccaaaaactttgtttctggcccaatttttaatttttttaccttgggggggttttttaaaaacccctttgggaattgggctttaacctaattttttaaaattccaaaaatttcttaaaaaaaaaaaccggtggagtgcaaaaggggtttcctcccccaggccaaaaattggaactctggcccccttttgctccgggcccaagaacattggctcaaccctggcgggaatccctttggtcccttgggggatt

SEQ ID NO: 134597 - DNA, 192 bp, Glycine max
  Clone ID: PAT_MRT3847_92550C.1
gaaaggtgcagtgcaaattcaactaacaaaggttcagactactgacatgacgccagaagatacgattcaagcagatctgcaggaactggaccagctccttatacttatgtgccatatggtggagggccaagtatgtaccctggaaaagagtatgctgcgaatggaacatatggtgatcatgcacaacttaat

SEQ ID NO: 134598 - DNA, 642 bp, Glycine max
  Clone ID: PAT_MRT3847_92551C.1
cacgaggatttcttcaatcaatcagggttccgcgttcaactggttttgaatgaagtccacaatggcaggaagagtaaggtcttgtttgaatccacatgcagcctcatttgttccgctctttaaaagggatgatgatgaggcacctcctcaacctcatcagcatcagcacattcttgaatcttctttgcaattgaagaagaccaacccttcaccaccaccgcagctggatgtgacagagttgatagaggaagatgctgacttggacattgaattactgaagataatgtttcctgattttgctgaacaatcccttagagatgtttactttgttaactatgctgatctcaatgctgctattgacatgcttgaccatcttaagtttgattgtgatgagtcttctaagacactggatattggcagtgtttcagaatctgcaccatcagctggttccggttctccgaaactgaacaatacagcagctaaagctagtgcttcgtgaaatcccccataggcttcagccagcaagtgaataaatttgtaactcacattagtgcaaaagtgtacaaatagggaagttactattggacagcacacatgcatggttcgttttttgtggtttgtatagttctaaggtagctgcgc

SEQ ID NO: 134599 - DNA, 520 bp, Glycine max
  Clone ID: PAT_MRT3847_92552C.1
cgggtcgacccacgcgtccgcttccttttgaaatggtaatttcaaaatagtgggctactctagaatagctattccggaataggttttcaagctctggaatgtaaaacttactttttagaaagagataagtactccaaaaatattctgaaatgtaattttactttaaaaaatagctattctggaatagggtgataccccttgtgccctttgcctaatagatttatcttccatgccacaccacccccaacctatccttcatcaaaaccccacagctcccaagagaaaaccgcaacaacgttgtttcactcctcgcttgttctcaaccccattgcttcttcatcccacttgcaccactcttcttccacgtgcttctcgaagaaagtccacaactcaagccgtgggagaaaatcaaggttattgaagaagaagggcttcttcaaggggatggtcaccacaatggacttcttcgtcggtgctactttctcgtgttcgttggtgggtgaggtgtactggttttagt

SEQ ID NO: 134600 - DNA, 2329 bp, Glycine max
  Clone ID: PAT_MRT3847_92553C.1
atgaacatgtctgctacagttggaaaaaagagagatggagagaaaataaaaacgggaggacccatgaagcttattaagaggaatggctaatgagaacaaagtggctatgcttttatcccgagcaatgcttcttcttgcttggagaccccacatttggaacaggagaaactcatcatgaagattgaggaagatggaaatttatgaatgattgcagttgcacccacataaaaagtcatgtccactccacaagagggtttcagtaataggaataggagaatttctgcccctcaagaggaaagaaatagtcttcttggtatttgtgcacattcactgatgaaatccagccaaagttgctcattctggattttggtaactgatattataaagaatgtttgctggttccaaggctattccatctgaatttaatgaatgacagcactgcacttgttcccatacaccaagttttctgaaacggtggctcttgtcctttttttttttttttttttatgggatttcaaaaattgggtaagtagtaattaacgtggatctcactccaaatctgcattacattcctcatgtagaatttccaactatcttggcttgggtgcattcatgtttaacactactttgctccaaaatcaagatcacggacattgaagtttgacctatgtggtgattttcttaaatggccaaaaagaagagctggtttagtctggtgaagaggctctttatatgggacacacattccacacaagataagaaggagaaaagaaggaaatggatatttggaaggctaaagagcaagagaataccttcaattaaagctccactaccatcaaaagaaacaatactaagtgaagcagaggaagaacagagcaagcatgctttaacagtggccattgcctcagcagcagctgctgaagctgctgttactgttgctcatgctgctgcggaggttgttcgcctcactgggcaacgcaaggaaaactcagaagaatctcaacctgttaaaactaggaatggtgctcctcaatccacataccagtgccagagggagattaaagaatctgctgccgccatcaaaattcaaactgcatttcggggttacctggcaaagaaggctttgagggcattgaagggaatagtgaagcttcaagctatcattcgtggccgagcagtaagacgccaagctatgagtactcttaagtgcttacagtccattgtgagtatccagtcacaggtctgtgcgatgaaaatggagatggataaaaagagacttggttactctgaaaatgaactgatgaaagctactaaagactaaataattgtggttttggtaactgctaaaagaaagcttgttctagtctgttgaaggcacttttaggtagagacaaatatcaccagcaagatagaaggagcaaaagaataatcattgatccaaggaaggcccacatactaagtaatatctaaagtaaatggaagatggaggtactggcaagagaaattggtagatacacaactttcaaagagtaaagagcttgaagatttagactcagtttttagctcacattctagagctggggaggaatatggaggaaggcaacttaagctgagaagtaatattcagagacaaaatccagttgaaggattggattctccaatacttggttcaagaagatcttttcctcataggaggcagtgttcagtgggagaggaccactcatttttaagctctcctgcaactccagcatacatggctgcaacagaatcagcaaaagcaaaagcaagatcaacaagctccccaaaaataaggactggggggaatgtggacatgaactctgatagctattcaccatgcaagaaaaagctatccattgcatcttctattaacagtgaaatgcttagtaatggtagggtgggcaagctcagtgttaaccagcagcaaagatcaccaagctttaagggactttcagtgcctataaaatcaagccgaacaactatcaaggatctcagtattaattcagattgctcactccctaattgggatcgacaggctttcttcaaatgaatctatgaatgctgatgttactctttcttgcattaacacaattccttgtatcatgtgaaggcttggaaacaataactgtttataaatatgtatgatatactatatgctattggatgttattttggttgggaattgaacattaatgtgacagaaaatagttattctggagatataagatgaattgtatgattaagaaagaagagatataagatggattgtatgattaagaaagaaggaaaggaaaattagtattttaggaca

SEQ ID NO: 134601 - DNA, 1156 bp, Glycine max
  Clone ID: PAT_MRT3847_92554C.1
gaattttctgctcctcaagaggaaagaaataaagagtcttggtatttgtgcacattcactgatgaaatccagccaaagttgcacgttcttggttttggtaactgatattataaagaatgtttgctggttccaaggctattccatctgaatttaatgaatgacagcactgcacttgttccaatgcaccaagttctctgaaacggtggctcttgtcctttttcttttattatttttatgggatttcaaaaattgggtaagtagtaattaacttggatctcactccaaatctgcattacattcctcatgtagaatttccaactatcttggcttgggtgcattcatgtttaacactactttgctccaaaatcaaggttctgatacatgtacatgtgtttatgtttggcctttgctgtcactacttattcacataagaatctcaacctgttaaaactaggaatggtgctcctcaatccacataccagtgccagagggagattaaagaatctgctgccgccatcaaaattcaaactgcatttcggggttacctggcaaagaaggctttgagggcattgaagggaatagtgaagcttcaagctatcattcgtggccgagcagtaagacgccaagctatgagtactcttaagtgcttacagtccattgtgagtatccagtcacaggtctgtgcaaggaggctccaaatggttgaagggagatgtgattactctgaaaatgaagacatgcaagattctaaagacaaaataattaggatggactcgaacagtgaaagaaagtgggatgaaagcactgtattgaaggaagaggtagacacctcctgcactagcaagaaagaaacaattctcaagagagaaagaataaaagaatactcatttaaccatagaaggtcagcagagtcagaaagaagtaaggtaaatggaagatggaggtactggctagagcagtgggtagatacacaactttcaaagagtaaagagcttgaagatttagcctcagtttttagctcacattctgctggggaggaatatggaggaagacaacttaagctgacaagtattaacaatcagagacaaagtagttggtggattctcctacacttgttcggatcttttctcatttcgtctttttggacacgtctaac

SEQ ID NO: 134602 - DNA, 1009 bp, Glycine max
  unsure (1)..(1009): unsure at all n locations
  Clone ID: PAT_MRT3847_92555C.1
ggtgtttcttctgttttgaaatgtgcaaccagctggaagaagacagaagacttggcttacacaccagcaccatcattcgcatctcatctattctactcgatcaaacaataataaccgattattcccacttttccttttctttttcttttgatttgggctttcggtttcacgtaacataacgcaacgtttgcagaaaagccaagcttgtcttcagtttctctttgtcgctagtaacagaatattacaaagtaacggctttctgagtggagcgcttgatttcgtttggtgggtcaacttcaagtttcgattttgttcatttttctctcgtcgattgagaaggctcagttgcagagacagtgggggtgggacggttatggctttttgcccaattttttgttgcggaaatggttcggatcgcaaaggacgagggaagaaacaacctccatggcgggtgttttctttgaaggaattacactccgctactaataatttcaactatgataacaaacttggcgaagggggattcggcagtgtgtactggggccagctctgggatggatcgcaagtaggaccatactttgcttttttattctttgttcatcttaccaaatcagctttagtttatggttattcttgaccattctagttttgattacaattgctgtgttctttgtaatggttaatacagttaattcaaatgttatggctagttgatatcttagtgtcatattgagatctacttgctttgacagattgaaacatctcagaaaaataaaatcttatggaatcttgaaagactctagttatgatggttttatcatgtaacactgataaggatcaggttatgaaggatttgtgtggaggatttttttttctcgatcaaattagggatagagaggaaaaataacttacatccngtatctcctctggctttgtttcttttttttctattgcagcaatcccttcaatgtaagtacaaaagactgatggattagtgacttgaacgtaa

SEQ ID NO: 134603 - DNA, 1594 bp, Glycine max
  Clone ID: PAT_MRT3847_92556C.1
ggaagttcggccagaaagcaaatattgcctattcggcaatatggcggaaaatgcttcaattgagctgaacaagtttgtgttcttttgtttgttggtgctaatacaagtggcagtttctgaaatcatttttgaagagcgttttgatgatggatggcgaggtaggtgggtgaagtcagactggaaaagcagtgaaggcaaagcaggttcattcaagcacacagctggaaaatgggccggtgatccagatgataaaggtattcaaacatccagtgatgccaaacactttgccatctctgcaaaaataccagaattcacaaacaagaacagaacattggtccttcagtattctgtaaaatttgagcaagagattgaatgtggtggaggttacatcaagcttctctctggatttgttaatcaaaagaagtttggtggggatacaccatatattttaatgtttggaccagatttatgtggcacggatacaaagaagctccatgtgatactctcctaccacggtcaaaattaccccataaagaaggacctgcaatgtgaaactgacaggttaactcacttctacacattcattctcaggccagatgccacatacagtgtcctggttgacaatagagagagagattccggaagcatgtatacagattgggatattcttcctccacgaaaaatcaaagatgtcaaggccaaaaagcctaaagactgggaagaaagagaatacattgaagaccctaatgatgtcaaacctgagggatatgattcgatcccaagagaaattcctgacccaaatgctaaagagcctgaaaactgggatgaagaggaagatgggaaatggaaaccaccaaagataccaaatccagcatacaaaggaccatggaaaagaaagaaaatcaagaaccctaactacaaagggaaatggaaaactccatggatagataatccagaatttgaagacgaccctgatctttatgtgcttaagcctatcaagtatgtgggcattgaagtttggcaggttaaaggcggttcagtttttgacaatgttttgatttgtgatgaccctgattatgcaaaacaagttgttgaggaagtgtttgccaacagggagattgaaaaggaaggttttgaagaagcagagaaagtaaggaaagccaaagaggaggaggaggctcaaagagcaagagaagaaggtgaaaagcgtagacgagagagaggtcatgatcgacgataccgggacaaatatagagacaaatatagaaggcatcgccaccatgattacgatgatcatgacgagctttgatgggataaaacgtccttctcagttctcacttatttggttgacaagaatttcgagattgttatgaattatagttacgttgatagtccatctcatgttaatttccaagggaaacattttaattttaaataaaaagtagtctatttgctgcacaatataggattattcttctcttctcttctttcagttgtcatgcatttactacagactggggaatctaaacccaaacccaaacccaatttgccattgataagaagcttgcaacaagggctatagaaaaaaaaaaaa

SEQ ID NO: 134604 - DNA, 291 bp, Glycine max
  Clone ID: PAT_MRT3847_92557C.1
cttactctacttatatatccttatcactatcagaaaaaaatactctaccacatagaaacagaaaaagcgtgagtattagcgtcgaacgcacagcgtttttaaatattactctattgccttgctttaactacctcactttttcagtaacgaagcgcttacagagacgtatatacgggcatacccttctagatatgatagctactaatcagcgtcaggcacagagcctgagctcttgggtcccacgacatagtcacgggggtggcacttgcgcaaccactcgttcttgactac

SEQ ID NO: 134605 - DNA, 443 bp, Glycine max
  Clone ID: PAT_MRT3847_92558C.1
gttgagcactctaaaggaaaaccaaatggtttgaacaaaggtccatgtaaaataaaataggtgcaattaaaatagcatgggggagccttgctaactatatgtttcctctcctaatgaacactggatatggagcccgttctcttgtagtgaaatgcgcaagttgaaggcttgctgcggaagctcacaacatctttggctataaaaccattcctgaaccaagcgtaaaagcaacaaaggaatacatccttggctaacattatatatcagactacaaaacagttcaccaacaagcttacttttatgccatagacctaaaagtccattccaaggacacatttgtgatcaatataaatggcaccgtactctctaatattctctactatatatatcatttttattgtgtactaaatatcaactctatcttttatgatcaatgctttaac

SEQ ID NO: 134606 - DNA, 708 bp, Glycine max
  unsure (1)..(708): unsure at all n locations
  Clone ID: PAT_MRT3847_92559C.1
ctaatgcctacagattgtttctagcggcagcccacgcgtccgcaaacaaaaccctaagggttcttccaatcgccgccggattttaacccttacattgtcactctctcattccatcttgttgcacgaaccctcacctcaatttcacccttattactgatttcttttcactaattatgccgtgcttaaatttgttttcccaacctgactgattcttcagttagttttcgtttcagctctgcgaatgacctgggtataattttcatggccataatttattgtgactattattgttttgattttaagtttcgttcgcagcagttatgagtgagcacgcctgaagttgtgaatatggggcttacgcgatttggtgggaaaagtttgggtttttgagttgtttagcggtttagggtttgaggatagtgatcaggttgtggttggtgaaaccacgatgatcaaattgagtttttgataatgttgtctgaattggggacaagaccgatgcttggtggtaacgaaggttcctttggggatgaactggagaaggagatngggatgttgcttcgtgagcaacgaagacaggaggttgatgatcgtgaacgtgaactcaatctgtataggagtggatcggcgcctccaactgtggaaggttccctcagtgcagttggagggttgtttggagggcgggggcggtggcgctggcaccgccgc

SEQ ID NO: 134607 - DNA, 181 bp, Glycine max
  Clone ID: PAT_MRT3847_9255C.1
gatctcttgcccagctgtaaccactgtcaaccgtgcctgtgccggtatggtggcttcattgactggcctcacgtacatagctgccttcctcaccagaaagaccaacaatgacattagctgcattgctaggatcggtggaagaacgcagtgcatgctggtgtggccactggctggagtgaag

SEQ ID NO: 134608 - DNA, 174 bp, Glycine max
  Clone ID: PAT_MRT3847_92560C.1
gatattggcccactctttaaccaatctttttttctgaactgtattctaacctttaatcataggggaacctggactacaaacgcagaggtcaaaccctgttgcttacctgacgaagatctatacgcttttactggccaatattaatcttcactgccactgaaaaatggaaaggat

SEQ ID NO: 134609 - DNA, 422 bp, Glycine max
  Clone ID: PAT_MRT3847_92561C.1
acggctggtgcgccttggcttgccctatattggaccgcctgccgtggatggtgctcagtacttacggctgactgtcgcaatagatatgtcaggagcgttaatcggggatcaaccgtcggggacacgatgctaacctggacctactatcaatagcagagacagactactgggaagctgcacaccatacccaactggtaagcattccaaatgacacacttaggggagggccttaagaatgagcacatgttcacattatccacctgtgtgatccaagtgcttgcttagatctgattcatgaatctaagagtcatgagcgacagcatacgtgtagcgacttgggattaatacttagctttcacgtctgtggagataccgaatgacgatactcggtataagtgttccccacccattcgcgatgcata

SEQ ID NO: 134610 - DNA, 297 bp, Glycine max
  Clone ID: PAT_MRT3847_92562C.1
acgagacacaccctcatatatccccaacttggaagagtaagctagaggcacacacacacacccaatggcctccatttatgctccaacgagatcacttctcttcacccatacaaccaaatgcttcttccgtcccttcaaaccctcttcttctcccttccctctccactgcgccacaaaaaccacctgcagcaccctccacctccacctccccccacctccccccatcagcgacgataacgacgtcatcggtatcctcgaagagcgtggtctggtcgagtccatcaccagcgacgcgct

SEQ ID NO: 134611 - DNA, 322 bp, Glycine max
  Clone ID: PAT_MRT3847_92563C.1
cagagggggggggattttttgggtgccatcgttgttgctatgatcagccgcagctgcttttattcgcaccggacacagtgagccatggccgtcgtaaagaacaagcgcatctccaaggggaagaagggtggcaagaccaacgcagctgatccctttgccaagaaggatgcggatgacattaatgctccttctgtgtttcaagagaaaaatgttggcaaaaccctcgtttctcgtactgctggtaccaggattgctcttgaaggactcaagcatagcgtgtctgatgtctcctgggctgatcttcatggtgtctaggatcatg

SEQ ID NO: 134612 - DNA, 1384 bp, Glycine max
  unsure (1)..(1384): unsure at all n locations
  Clone ID: PAT_MRT3847_92564C.1
ccacgcgtccggtttgcattgaatcaagttgaagccctttgggaagagagagtatttcaaaaagaagagcttagagcgcgttgaagcgcacacacaaacacaacccacccaaccatggaagttccgaaggatcaaatcgccactcttctcgaacatggactatacaactccgctcagatgctcggttgttttcttgtttcttcacccgctgttaatgctgaatctgccccacacctcaaaactgagagcttggtgctacttggtgattctttcttccgtgaaagggagtatcgtagagccattcacacctacaagcaagctttgcaatgctacaagatgattccaaaacagaacatgacatcttctcggagttcattgtcatcgaaccggtcttcgtctccgaattcctgcaatggatcagtgatcaatgagaatgaggtgaagttcaaaattgcatcatgtcacagttttctgaacgagaataaagcagctccaggcgtgcgggaaggcattccaagtaaagctagaaatttaccaatgaatttgttattagggaggctctatcgaatttctagacatagccgagctgctgttgctatttacaaagaatgtctaagacattgtccttatgttcttgaggctatcacagctttagcagaacttgggtctactgcaaaggacatcatttcattgattcctcaggtttgattatccaaagctgaaaaagttagtgcatgatttattgaatagtgatcctgcaagaccagaggtttttgtagctttgctgtttatgggaaaggaaagatgagaaaaaagcttacaatatgtgagcagagccatttctttctcttctttaggcaattatgaactcagccacaaaaaagaaactttaccctgttggctgatgtgttctataatgctgagtatggaggatggtgtatttataatactcagtcctctgggttaacaaaagcactctccttaggtggattttggttcctttccttttattaattagatttattaggtggaaagaagaaggaacagctgttgacctaaatttgagattgctctgcctttggctcctatgtttcttctatttcaacatgtactttaacctcattggaattatctgttttgttcctgataacctttataatgtgataattctatgcatggagttactggaagctaaatacttgatgatcgagctcaatagaataccttatattgggacatttcttctgtatatgtaattgctggggatttatttataattcattaccttttatcatgaaactgtgtcaattctgtttcaatttgcanatttcagtttaattggtatacataatttggtgtgcaaacatttactttcagactctga

SEQ ID NO: 134613 - DNA, 1014 bp, Glycine max
  Clone ID: PAT_MRT3847_92565C.1
gacggagaaaacgaattcaattgtgtgtttggcttgcttgaaggtccacatcatttctcaacccacattgcatcccacttactccttgtagtaagggaataatgtaaattactgcataattaagcactatcctttaaatctatcaaggcaataatgactgattaggtacagtgcattatcatattatctgcaccattttactgtatttaagtatttgcatactaggcttaatgaagcagacaacaaaaccagcgggtatatatatagatatacatatctagggttaatgttatcagcgacgaaattaattgcaattaagtggcatagatcttgaagctgagaatcgcgtgcgccatgaatagaggtgaaagttcaggtggtggacagagctcgttggggtacctatttgggtcagaagagaagccaaatcagcctctgcccacaaggacagctccattaccaccctatggcattgacatcgataactccatgccccatcacggttctaactgccaacttgttgtctcaaacaaccgatctcaaggccaccacttgggaaacattgtaactgatcgtccgtcaacaaaagtcaaatcggtacctggtggtcattcatcgcttggatacttgtttggagataagtgatgtttctttctccgacattgattgatagcggtgttattctctgacaaggagaatccatactgcttatggtgtagctatatatgtgtggggtttgagtgaatcactaataatttgattttttagaatgaaaaaagaaaccaaaagataaatcaaataagagattaagttttccctttgttggattagcaaggatcagtttaaatctaaaagacaaattaactacgagtgtataatgtgggtgatatgagtgaaaaataaaccagtgtgtatttctctggtagtttgatcagtttgaattgaatgttgagtgtgttgttgttattttagttgtacttcaaataaataatagaagttatctaatttcatttc

SEQ ID NO: 134614 - DNA, 181 bp, Glycine max
  Clone ID: PAT_MRT3847_92566C.1
tttatttttatttttacaaatcatttttttctcagacacaactaaaaacgggcttgggctcacaataaatttgacgtataaatcctcccgctatctttcaaagggtcaactacacccgaacacaggccgaggttaaaggctccattgggaaatactaactaaaaccctttcaccacaaaaa

SEQ ID NO: 134615 - DNA, 488 bp, Glycine max
  Clone ID: PAT_MRT3847_92567C.1
gcttcgttcttaaccacaacttcaaagtcactgttctcgcggttacttcgcaaacctcacgcgccgaaactcagattctgaactcagccctcacaccctccctttgcaacgtcatcaacatcccttcaccagacctcaccggcctcatccaccaaaacgaccgcatgctcacgcgcctctgcgtcatgatgcgccaagccctacccaccatttaatccattctttccgaaattacccctcgcccctcagcactcatagttgacatattcggcaccgaggctattccaatagggaggaaactcaacattccaaactacgtctacgtggcatcacaggcttggttcctgtcgttgctcgtgtattctcctattctcgatgagaaaatagaaggggaatacgttgaccaaaaggaagcgttgaaaatccccggttgcaacccgggtcgacccggagacgtggtggaccagatgctagaccgaacgacagag

SEQ ID NO: 134616 - DNA, 502 bp, Glycine max
  Clone ID: PAT_MRT3847_92568C.1
aatcttcccaactgatggtgaacacgacccttaatttacctcctcctaaattcatatcatgttagttagtctgcatggctcacttatgaacaattcccacgacaaatgcttgctgcgctcaatcccatcttgatgtcttcgtcttaaggatttcccttctcgaagcacgctacatagccaattctattgcgatcatcctggttcagattactcataccatctcctcagagccctacttcttaatggctctctgaacatgactgcagtcctgaactagatattgcatcgtctggatcatcatgacccattcatgccatcttttaagccactataagcatcctccacacatgcttatgctaccacacccatcctttccctgaagaatgaccctacttctaagccacttgccatacaggagagatagccacattctcaaggagatcaatctgttgctttcgatcatcttcttctgctagctcaagaacgtgttgactgctctctg

SEQ ID NO: 134617 - DNA, 214 bp, Glycine max
  Clone ID: PAT_MRT3847_92569C.1
acacactcatgtagcacatcactgggtctccacactgccacactatcatgcaatggaggctacatacgccatgcaacccatttggggagagtattatcgggatgacgagactccatgcgtcaatgcaccgcggacagaggcaagagagtgtatgcatgtggagccagatcaaagtaccgagagcaaatgcgtattttggtgcagcaataagctg

SEQ ID NO: 134618 - DNA, 327 bp, Glycine max
  Clone ID: PAT_MRT3847_9256C.1
gttcataaataatgtttgtgtatgtgggacacattttttttgttgtaaaaaaggcgtgttcccaaaaatataaaaaacgggggttggccccccaaaatatggggggggcaatatttgggccccctttcttccaaactaagggggccccaaaagtgggggcattcccccgggggtttttaccctcttcaaagggggttttgttttagggggggtcccccttccctgggaaaaggagttttttttgtttttcaacccgccccaaaaataaaggggggggttaaagggtgttccaaggacaaacaaaatcattttttaagggccgttttt

SEQ ID NO: 134619 - DNA, 578 bp, Glycine max
  Clone ID: PAT_MRT3847_92570C.1
ggcttcttcgcctccatagtacataccgtcatgatctcaagatttacagctctgatgagggtcgtgtgcagatgtctgcagctgcttttgccaaaggtcttcttgacctagaggggcagctaactccaatcctggtttcccttgttagcaaggactactccatgttggatgggcttgaaaatgcaagttctgaaatgaaagaagccaaggcttggttgaatgaaattattacatctaatgcaaatacagttgatagcaatggatcacctgaatttccttggatggttgatggagcaggattgccacccaatgcatcagaattacttgccaatttggtaaagttgactaagaaggttaccaaacaagtaagattacttgcacaggatgaaaatgagaaacttgcagaaagaagcttatatgatgtaattcctccttatgaccaagcaacagcacttggtaagacaaatattgatgttgaccgaatagctgctggattaccttgtggtagtgaaggatttctattaatgtatgctcgatggaaaaagcttgaaacggatttgtataatgaacgcaaggat

SEQ ID NO: 134620 - DNA, 191 bp, Glycine max
  Clone ID: PAT_MRT3847_92571C.1
ctttgtttttctttttgtcaaagcaataataatccaatctatttgagaaacaggaatgggtgatgcaaaacttcacatttccaccaatggaaaagaagagaaaactgaaaccatgaaacttcgttaacacaatggtatcattaggtatgccaatgccactcttgccgactgggtaaaactggtgtcatccc

SEQ ID NO: 134621 - DNA, 587 bp, Glycine max
  unsure (1)..(587): unsure at all n locations
  Clone ID: PAT_MRT3847_92572C.1
ttctcattcactttcctactaagagacagaaaaagtggttggcttgttttagtttaccttggtgcccataacagtattgaaacaaacttggtgtgtaatgtaacacacacacacacacaaaggtcttatagttatatataccaaaccaaatcaaaagctcaacactgacccttgtatcttcttaggccagtccaatctaagagaaaaacatggatctagaactccctgctcatgctgcaactgtgaatgaatctcaacaacaaaagtttgctctacctgtggattctgaaaacaaggcaactgtgttcagattattttcctttgccaaaccccacatgagagcctttcacctatcatgggtctctttcttcgcatgctttgtgtctagctttgctgcaccacctcttctccccataatccgcgacaacctcaacctcacagccactgacattggaaatgccggtgtggcatcagtctcaggtgctgtctttgcaagaattgcaatgggaacagcctgtgacttggtcggaccgcgcctcgcctctgcatcattaatcctnctcacagcaccatttgtgtacttcact

SEQ ID NO: 134622 - DNA, 566 bp, Glycine max
  Clone ID: PAT_MRT3847_92573C.1
cacgcgtccgcttttccctttcaaattccgtcaccgttcaccgatcgattctcccaaaatgaacctcaaccaccacgacgctcccccttacgagcacatgctgaaggaatccatcaaccgcttcttcgccgaacatcgccgcggcgccaccgacttcgccgacttcacctccatcttctcccgcatgctccactccacccccgaaccccccctcccactcctctggttctacgcagccctcgaatttcgcgccacgcgcgaaccttctagaagagccagagacctcttccacttactcgcttcctgttccggtgcgcgcggctccaccaaacgaatcgctgcactcgcaccgttactctttgtattacaccgctcagtacttcttcggggagaggaattgttgttgaagagcgaggtggaggggttggtggaaggggttgtgagttactgcagcatctgttgcggcaacgagatttgccgcgaagatgacgtggcggtgttggagttcggggatttagttaaggtgtggacggtggatgatgatgaggattataacgagggtgggg

SEQ ID NO: 134623 - DNA, 512 bp, Glycine max
  unsure (1)..(512): unsure at all n locations
  Clone ID: PAT_MRT3847_92574C.1
ggtttccgatcatcactgtatgacgtcctccttctttggggggggggggggggaggaaccaataaggagcctggacttatgcaagaggaagtaggcaacgaggtacggttggggtagagagaatattaagatataaccaaaataccaaatatagattaaaagggaaataaaaaaccgaaaaaccaaacaaaggaagcctcgcgggcataaagaaaaggcaaacgctactgcttaaagccagtaatgtaatagccggctaattaacgtgagcgtacgtcatagtaatcgcgtgttattaacgtgaattatatgtatcgttttacagggaggtgcacgtgcagggcgggtggtggcagtcgttgtacaacacggagttggagtantgggcccacatggcgtaccacggcagccactgcaactgcgcagttggaggccggagaaacaaagtgacaccaacaactattggcgttatcgcagaaagttaacgggcggagtgcacgagatgatttcac

SEQ ID NO: 134624 - DNA, 280 bp, Glycine max
  unsure (1)..(280): unsure at all n locations
  Clone ID: PAT_MRT3847_92575C.1
ctggggttctgtttgttttattcaattttatctttttcgttcatagttcaaaaagtttaaacggtcttagatttaggagtattcttctaggaaaatactaaatcccaattcccatttccaacaacaatatgtatcgaactctctcacttttcggngcaggtccccttgttgtgtgtgacgctctcgcttgcatcagaacctactatataaacacagcgcgcgctcgaaaacttcttcaagtcaaaaaaaaaaaaaaccaaaatcactcaataggaagagg

SEQ ID NO: 134625 - DNA, 661 bp, Glycine max
  unsure (1)..(661): unsure at all n locations
  Clone ID: PAT_MRT3847_92576C.1
ttgattatgttccaatctgtatttcccatcttattactaatgaaatgaaatagtcttcttcgtctaaaaaaaaagtgtcagaaaatactatattcctaacattaatttggtgtgtgagaactacttttccatcggaatgacaaaatcacaatacaatggttacatgtaatagcaattgtctgcagcttcccgagaattggagacttgattgaggttaacgtttgagcacgtcaaatggcttgcacacactattgttcctaggagcacttaatatctgttttacattcaaagcctttggccatcggccaaaaaaattgttttggcaaaaatttggaacggtcttatggtaagaaaaaatcaattaatttttcatggtgaagctaatgcaacaagtagttatttataccttttcataatatcaccattattatgtggagtagaattgattgtgttatgatatggtgatttgcaggaagtgaaggcattgacaagcttttgtcttctgaaaaggttagtagagatggtggtgttggtagtagatgactttctccattgccaaatctcataaacgaggaatcatacagaacttcaaaacaaacattaactttgcttgnnnangcanncgcggattcacacacttacttaatgacttaatcagtga

SEQ ID NO: 134626 - DNA, 440 bp, Glycine max
  Clone ID: PAT_MRT3847_92577C.1
acatagagaaagggagaacaccctttattatatgaaaaccgagagcggtcatatactattgccgcaggagtcaaggcaattattacgcctatacattgcatcatgcctatgtccttcacaaccccaacatatggaacgcatccactaactctttacaattagattgggatactgaagggcttaacttggatagacaaccttttcttgcttgaccgacggagcgaagtgtatggaccatgaactggtgcaatacggaacataaaactaggattaatgtgccttgaatggatgttttcttctaatccatatttcccgcattacaaacctgaggaaatcttctaatgccttcatatgagtacttgaacactggatcctcactgtgtacactgatattttattagaagaatgccttgacgatctttatatcactgacagatcaa

SEQ ID NO: 134627 - DNA, 483 bp, Glycine max
  unsure (1)..(483): unsure at all n locations
  Clone ID: PAT_MRT3847_92578C.1
tacatatccagagaaaagtgaaccacagttcacggcgtgcgaggtatcnccggatagaacnacagcttgtcacacatcggcaaggcggcccttccaatgggtaaagctgcaactgaataggtacttcttgacttgagatcacaaaccagtaccaccttagccaccatctgagacttgaaggcatctaaggcagatatgatatgaaaagacgaaccatgaaccattaaagatgctgtagagtgagatgagaagcaacttacaaagcacgggtggaattatcgaaacgggtcactgggacaggcacagagaattctacagtgtgcaaagagaaagccggttttccaacgagcgaagacaaattatttctgtcgnccgagggaccttccgcacacatcgcttaacggagaatccgagaggatctctttgcattccctattgctgtttcgggggaggaaacctatttttcagctactggttcaatac

SEQ ID NO: 134628 - DNA, 563 bp, Glycine max
  Clone ID: PAT_MRT3847_92579C.1
gttgacccaggaagcggaagagatctaccagtttctgctcttgccatgagcttgttcctttaatttaagcaaatgagtcgcagctagggtcgttagaaataacgctcagtttgtgcacgatcacggatacatcatcaatggttcatgtcagcaatatcagaggtgctgatagaattacggcgtgctcaagtaccggagcgtcggtaatcacctagcttgtcttggcacggggagtggcgttaatgatcttggttccagaggcgaaagaatcataccgtgataaggtgtgtgccatggtacaataattcgggaaagggtgattcatgcgatgaaactagtatgcggtgtcgatgacgcacaacaaacacatgcgtaagcataaaaccttaagtctacttggccataagagggcgctacactacattacaatgagtgtcgcccacgtgatgagttcctaattgagatgcctactgtgccatatgatttaaagaaatgggaatatgcttttgtgtggcggattaagcatggtgcgcccctaccctgccttccctactgacacactg

SEQ ID NO: 134629 - DNA, 257 bp, Glycine max
  Clone ID: PAT_MRT3847_9257C.1
gttccaatatgcttcattattcatgtgtcttaaaaggttaaaaaaaggacaaaactttggttcattgcttttgtgtatgtgtagtttttttaattgaaattataattttacttgaataattagtacttaatcaccacctttgcaaaattttacccagataactagtgcttaatggtgattttttgttacttcaattatgtgtacaaaaagagtttacattaaaaattaacataggttattaaggtgaaattctatta

SEQ ID NO: 134630 - DNA, 419 bp, Glycine max
  Clone ID: PAT_MRT3847_92580C.1
tttttccaaagaaaaactaaagttccaaagtaaagcatgatataccttgtaaaatttacagaagtttgcttacccagacacatgatcatgatctatatggacacattgattcataaaaaaagttaaattcacaatcaaaccagtaattaattaacttgaagtatatatatatatatatatatatatatatatatatagaacacatagagagtactgtgacattaattagaaagccaacgaacatatatatgaataagtaaacttaattctagtgcttgatatgtacgtgcacgcatattgtagttgtagcagagaaacacagttccacgttacaagctagcaagaaactgtatttgcttgagaagaggggttagagtttccatgagcttctcgcacgggtggttgtgaattcccttgta

SEQ ID NO: 134631 - DNA, 426 bp, Glycine max
  Clone ID: PAT_MRT3847_92581C.1
aggggacctaagaagcatttgaagcgccttgtaaccccaaggcatggatgttggacaaattgggtggtgttttcgcaccacgaccaagcactggtccccacaagctcagggaatcacttcccttggtgatcttcttgaggaaccgccttaaatatgccctcacaaactgtgaagtcaagaagatcgtcatgcagcgcctcattaaagttgacggcaaggtccgaacggaccccaactaccctgctggttttatggatgtcatctccattgagaagaccaacgaaaacttccgtctcatctatgatgtcaagggtcgtttcaccatccaccgcatcactgctgatgaagccaaatacaagctttgcaaggtgaagagagttcaggttggtcccaggggcatcccattccttgtttcccatgatggcc

SEQ ID NO: 134632 - DNA, 238 bp, Glycine max
  Clone ID: PAT_MRT3847_92582C.1
aactcgagcgaccacacttcataagggaacttttaaatcttacatgcgtcaccccatcttgggtaaatggggtacgttttgcggcacaatgtagattcgtacctattatcgtttatatctcatatctaatatcccaatccgtaaattattcatcgaccgctatcaacataattcgaactgaattagtgacgtctattcctttatagtcctcactatattaatctttaaagtctcccta

SEQ ID NO: 134633 - DNA, 857 bp, Glycine max
  Clone ID: PAT_MRT3847_92583C.1
gtgactccgaatgtgcggggattggatcatgaaaattgaattgggatctttatccctcagaaacagaatgagagaaagaaaaaggatgagaaaaccatttcagaattcataatcatacctttttccactctgacgccattttattattcattcatattaatattaggctctcaccctccattccaattgctattatgattctgcttccatttttttttactctctaaacctcttcttcttcacttcctctttaatgtttgttacttcaattttgtgattcgttctttctggattcaattgagtaaaaatctgcgtggtttgagcaaatggatgttaaagctgcgccgaggttacaactttcagcggtggttcaacccgaaagtattggaagaagaccacccagcacatgtcgtttgggtgtgtctcgggaaccgcagagccttcgggtttttgtttcgtcaacgatgatgcgccgcagaacaaccgctttggaggtttcctgttcttacggcaacatttcagcttcaatattggaatctggaagtgttcgtgctcctcttgatgaagagctgattctaaagaatagatcgcaagagatccagccatatttaaatggacgctgtatttatcttgttggaatgatgggctctgggaaaacaacggtggggaagataatgtcacaagtgcttggttattcattttgtgatagtgatgcattggtggaggaggaggttggtggaaactctgtagctgatatattcaagcaacatggtgaaactttctttcgtaataaggagcatcctcgttgtcatccatcttcatattatctttatgttataagcagcggtggtgcttaa

SEQ ID NO: 134634 - DNA, 602 bp, Glycine max
  Clone ID: PAT_MRT3847_92584C.1
aattcggctcgagaccatttctcttcacaattatccctttttccactctgacgccatttaattattcattcatataaattaggctctctcatcttccattccaattactattagattctgcttccgttattttttctctcttcttcacttcctctttactattcgttcgttctggattcagttgagggaaaaaaactgcgtggtttgagcaatggatgttaaagctgcacagaggttacaactttcagcggtggttcaacccgaaaggtttgggagaagaccaccattcagtacatgtcgtttgggtgtgtctcgggaaccgcagagccttcgggtttttgtttcgccaatgatgatgcggcgcagaacaaccgctttggaggtttcctcttcttacgacaacatttcagcttcaattttggaatctgggagcgttcatgctcctcttgatgaagagctgattctaaagaatagatcacaagagacccagccatatttaaatggacgctgtatttatcttgttggaatgatgggctctgggaaaacaacagtgcggaagataatgtcgcaagtgcttggtattcattatgtgatagtgatgc

SEQ ID NO: 134635 - DNA, 723 bp, Glycine max
  unsure (1)..(723): unsure at all n locations
  Clone ID: PAT_MRT3847_92585C.1
agtcgttggttgggagacacaaaaagacgcacgctgtggcccacgagcccagccattgttcgagaaactctaacgaaagagcgagaaagcgaagacagccatggcgtcgtttcttcaatcgtttctggatccgaagaagaactggttcgccgctcagcacatgaaatccctctccaaacgcctccgcaaatatgggctccgatacgacgatttgtacgatccttactacgatctggatgtgaaggaggcgctgaatcggcttccgaaagaggtggtggacgctcgccacgcgcgtcttaaacgcgccatcgatctttccatgaagcacgagtacctccctgacaatctgcagtcaatgcaaacaccattcaggggctaccttcaggatatgctgactcttgtgaagagagagagagcagaacgtgaagcattgggaggtttgcccctatatcaacgatccattccttgagtgcatcaagtatttcatgaaggtattttgattgaagtgggaggtttaaattgtattgatcttgtggtagaatgttttcttataagaaaaaaatatggacagctttgttggtataaacttatatggaatgcattttttaatggtataaacttgcctcgggcattttctaataaatggcaacaacagactttttttgccttgaaaaaaaaaaaaaaaaaaaaaaaaggggnnnnngttaaaaaaaaaaaaaaaaa

SEQ ID NO: 134636 - DNA, 420 bp, Glycine max
  unsure (1)..(420): unsure at all n locations
  Clone ID: PAT_MRT3847_92586C.1
gaactttttaattagttctatcaacatgaactttaccattatcgaaagaaaaggaacccttcattggtatagtaaatcaacagaagagttctacaggtaatgcagctaagaaacgtgagtccacctagctcctatacagtaaaatttcccaaccaggacagaaaaaaatgtagcctgttgttctctttaacaaaaccataccaacattaatatanttggaaatcaacaagaagcaatccatgcagggctcattgatgttagcaaacaaaaaacctcataacatgtatcaaccaaccttgtgaagctggctcgttaatctgtatatcnnntatccaccatnnnncacatgctgacatagcctcaactctgccgagcttcgctgctttaccattacttttatgattcttccacttattacgg

SEQ ID NO: 134637 - DNA, 292 bp, Glycine max
  Clone ID: PAT_MRT3847_92587C.1
ggctcgaggaaacatgttaagactaaagaactatgtcgcattttcgccagcaaccaccgaaaaggggaagtgtgtgaacagaaactacaccttcccccttgaatatggcttatctttgaatatcaaccgctctcgcagtgagccagacatgctcagcactgcattgaaccctatctgcccgacacctatgaagtgaatccatcttggcgacccacgcaccaacataactaattccagactacaatccttaagaacagtgatcatgcacattggcaccggataccaacttaac

SEQ ID NO: 134638 - DNA, 403 bp, Glycine max
  Clone ID: PAT_MRT3847_92588C.1
tgagtagtgccagcttgctttgggggggggggggggaaacacgaaaatgaaggccgaagtaaagaaattcctataaggatttaaagactctagcgggggcataggtaagacgtgaggatacaaagtgatcccttcgtaaagttgtaagaggaaaaggaacgtcaaacgtggaaccgtaagaaaaccccagtaaattggaaatttaaagcggggggggcctgaaaccgaaggggatggcaaaaaatggcccgctttggttggaataggaggtaaaatggtaggaaggccgattagtaaaaccggatcccctaaaaggggccggggccggtggatgtgaatgcccaagttgctgactatgctctgggggcccctggggaggatctccacctaagccccattgcca

SEQ ID NO: 134639 - DNA, 343 bp, Glycine max
  Clone ID: PAT_MRT3847_92589C.1
ctaacaagattaggaaaaaccatcactgccatcatgcaaataacaagtgttggacggaacacagaattaactattcctcaatattttgcattacaaaagtgaagggtgaaaaggcaagtgatctgatcactattatgatcattgttttgtattaataaccacgaacatgacgatgacgatcaagatgatgataacaaatagtgcaacaagtgtaatggcaatgaagctaacctcaaccaaaattccatcttcactaacacaaacaatcccatcgtatttagtaatatctagcgaacgagcaacttcctttgcatggagcttgcgctcggttttttgaactggg

SEQ ID NO: 134640 - DNA, 464 bp, Glycine max
  Clone ID: PAT_MRT3847_9258C.1
gaaacacatattttagtaaaaaataacacacacttcacacatcattacgacaattaaaagaggagtggaaattttcagataggcagagcatactccacaagaggggcctgcctaatttcctttgttgaattaaactaacgaacaagcgaaagaaaacacaaattgcataccatgcagaggattccgaattttcaaaagatctgccagtagcctgtggagcaaaaaaagctggcctaagagtattaccagcactttcaaaatgttgagagattcccaagagaatatcaaaaactgtaaactgtttgggattggcaataaggaaactcaaatgccatgaagatagattcgcccactcaaaactccacatttcatagccattattaggaccacatatctctattgggaaaatcaattcccaggaatgtggttatgattttgcccacttacatgcataacaatgctct

SEQ ID NO: 134641 - DNA, 368 bp, Glycine max
  Clone ID: PAT_MRT3847_92590C.1
atcacacaaaagttaggtttcgactttaatctcttgtcatataaatggggacaaagataaacaaaaaataattcttctagtttcaaatatgtgcatgtgaacacataaaggtatggcttggtttggatgctccctaaccttttttgtaaagtgtgagtataaatgaaccagcctgaggttcgccaatcactgcgaacgaagctttctctataaccatttctttcttttaggagcaggcagtgccagaaacatactccctcttggatcatcttgccaaaaatctcacgcgtctaatattaaatcatcatccccgcctggtatatcctgaagcaccctgataacattatctacagaaaaaaaatcttctt

SEQ ID NO: 134642 - DNA, 271 bp, Glycine max
  Clone ID: PAT_MRT3847_92591C.1
aaaagaacaacaaaagggggtacacacgcgtttgcagatcaagtaccctatagccactgtaatgacatgtatggtcctctgaaatcatcgctgctacactggtggtagcatagcaatgtcatccgtactagatgttcccgtctccgaaatgaacacgggagtatagtgaccctactccggtgagtgacatcctcagattcgaagtctgctgtgaaagcacacgacatctttgactttgtgaccattcatgttgcgtgcgttggcacagcat

SEQ ID NO: 134643 - DNA, 438 bp, Glycine max
  Clone ID: PAT_MRT3847_92592C.1
gtgaaagcctaggtcctggcattcgtagataactttcattttcacgttggtgtgatgatgatggaaggatccatttggatcagcaattaggtaatgaagatgctggtgtagaagatgactccgattttgagttaccgtttcctgaaaagaatgagctgctgagcagatctttagatagagagagattctttcaccaaaagtttcagctgaggaatatgcaaatgaacggtattggtaccatggatgatgattctgttcatcggagaggtaatggatccgaaaagtatgtgtcttttgacattgaggataagtctgaaagaggaacaaaaggtgttgattcctacatttctgtgggaggtgatgggtcattgggaaaaagcttccagaatcctattcatgcagcaaatatattgaaaacattgtttttgatacttatgt

SEQ ID NO: 134644 - DNA, 518 bp, Glycine max
  Clone ID: PAT_MRT3847_92593C.1
aaatgaagcggatccgagaatgagggcagcttcaaaaaggcgtgggattttgataacttttatttcgaggccaatcaagccctctgatttcgttgactttgacctcattcttgctatggccaaacagaacaaagaggacatattggaggcctttaataggtggaaaggtagacattctctaccggatgattcacataaaaaggttaagttgatgtgctcgtattgtaaaaagcatgatgaaagtgaagtcccggatccttattatggtggacatcaagggtttgaaaaggtgttggatttgcttgaaaatgcttgcggatcattactggaaaccattttggcagaaaacaaacatgtccaagaatcctaatacctttattaatagccaaaacatccaatcctgtggtgaagtcataaaatcattggttttcatagatgtcaaagtaccttcatgtttcggtggtaccctaccctgaacccccgatatatatgtatatggaatttcgaaacttcttgcc

SEQ ID NO: 134645 - DNA, 1011 bp, Glycine max
  Clone ID: PAT_MRT3847_92594C.1
gtaaacgctgccaactaagttaatctgaattggagggtccgatgcggcggttggctttaactaataatatccgttattcgaacttatgattccaattgttagataagtatggcaagaagtttcgaaattccatatatataaatcgtgggtggttcagggtagtgaaccactgaaacaagaaggtactttgacatctatgaaaaccaatgattggatcttctggccattaataaaggtatcaggattgttgtacatgtttgttttctgccaaaatggtttccagtaatgatccgcaagcatcttcaagcaaatccaacaccttctcaaacccttgtggtccaccataataaggatccggaacttcactttcatcatgcttcttacagtacgagcacatcaacttaacctttttatgtgcgccatccggtaaagaatgtctatctttccatctattaaaggcctcaaatatgtcctctctgttctgtttgtccatagcaagaatgaggtcaaagtcaacgaaatcagagggcttgattggcctcgaaatagaagttatctgaatcccacgcctttttgaagctgccctcattctcgaatccgcttcatttccctcgtggtaattgatggtgccagcagagtcgattttgaacttcgaattgaggtcccttttgttgactaagtcagtgaagactccttcagcagcggggcttctgcagatgttgccgaggcacacgaagagaacagaaaacggctttgtttcggcgtctgtgatggagggtgaagccatggacgcgcgaattgaagaagagaaacgggttttgcaggaaatggcaaaaggggtcgttgggtttttctttctcagagttaactttgcagtttgcgaggaagaagagagcttcgggtttggtgagaggaggaggagttgggaacagtggcaaaatcgtaaattaatgacgctcattattccttcactccccttctgtcgtcttctcgcagccgtagagttggagg

SEQ ID NO: 134646 - DNA, 2035 bp, Glycine max
  unsure (1)..(2035): unsure at all n locations
  Clone ID: PAT_MRT3847_92595C.1
atttttcattatttacttctcccagaactaacttggttttgtctcctgtggacagagaatgccatgataagtgttacagatttcaaagtctgcgcgccgggtatcagatcttagactcagagataacccactgcaaaagatatggcaaggctcactaacaatcccagatttgtgcttctgtaacttgcactccttgattgtggacggctgccaatttttatcagatgcagtactacctttcaatttacttcgtttgttaactgaattggaaacattggaagttcgagactgcgattctgtgaaaaccatatttgatgtgaaatgtacaagacaagacagaataatgacaactatgggaccaaccatcttccccctcccttttcctctcaagaaattggttttacagcggctgccaaatctggagaacgtttggaatgacgaccctcatagaattctcaggatgcaacttctacagcaagtacatgttgagaaatgtgaaaaccttactagtgtatttcttgcaacagtagccaaagatattgtgaaacttacggctgcgagaagacgacagaaggggggattgatggctattgttgcagaggataatgcagatcccaacggaacaaatcttgagcttacattcctctgcctgacgtcactgacgatatgtgatttgccagagttaaagtgttttttgcagtgtgacatgttgaagacattttcacatgtagaaccaaatactaaaaatcaaatctgtattgaaaagcttacacccaatttgcagcacctgacactcggtgaaaatgaactgaagatgattccgcatggagaatttccaggaaacgtcttgcacaatttaaaagctcttattttgctgaacttcagcgttgagtcctatgaatttgcatatggatttctacaacaggtgcccaatattgagaagcttgaggtgtattgtagttccttcaaggagattttctgctttcaaagtcctaatgtggatgatactggactcctatcacagctgaaagtattaagcttggagtccctttcagagcttcaaaccataggttttgagaacactttgattgagccttttctcagaaatctagaaaccttggatgtaagcagttgttcagttttaagaaacttggcaccatcccccatatgtttccccaatctgatgtgtttgtttgtatttgagtgccatggggttggaaaacttgttcacatcctcaacagccaaaagtttgtctcggctccaaataatggaaataagaagctgtgaatcaattaaagagctagtgtctaaggagggggatggatcaaatgaagacgagataatatttcggcagcttctttatttgaatcttgaatctttaccaaatctcacaagcttttatacagggagattgagtttcccatccttgctgcaattgtcagtaatcaattgccactgtttggaaactttatctgctggtaccatagatgcagataagttgtatggagttaagtttcagaagaaatcagaagctatcacattggatattgatctcaattctaccattcggaatgcatttcaggcaacggttccagatgcttcaagtgccccctgaccatttgggttcgacaggaaatatgatgaagattaggaggttaaagtgttcttcattacctgttgattaagtctaatgttttatctaggttgagtccgtgtccgaactctaatattgcagtaagaagagattgacggaagaactgatgcagatgaataaagtagccttggtttcactaagtttgttaatttgtgtgttgaaaaaaacaataagagttatgcatgcgtgtggttctacatattcgatggtgaaatacattgttctattctttatattatgtaatgtgtgattttaagtgataaacggagttgaagaacaaagatgaagtattgactgtactgtttgtattttgtaagttatatttgttttgtttgtttatcccgaattttacctatgttnnnatgcttcaacgnnactct

SEQ ID NO: 134647 - DNA, 732 bp, Glycine max
  Clone ID: PAT_MRT3847_92596C.1
ccacgcgtccgcgaagtttcaagctcctgcttcttttccatactttttttacaagaaacctagcaatgaacaatacaatattgccaattgaaatgcaacggcacaataggtcaaatcttttaggatcaagttgcaccatcgaactatgaactgtaactagggacaaatgcaaaggaaaatatttcctgcatcctacaaaacataggactgagcagaatattattgttaattgtgccttggattaatgatggttgcatctttaaactatcgatattagagtaaataatgataatgttttgagtaattttaaattctgataatctattatttgtgtgttagagattattttcattgtatagcatttatgtggtcaggtgttccacacaactatcaacgattaatcactatgcccagaacattttacaataaattggtgatatcaattatattattgtgtatttcttaaataggatgtgacagatttctgattcgttgagttaaattgctgaagtttgattgaagattccttgttagggcataggcctatgctagtgttttgtactacacatttttagaacgattatatgacactttttaaccaccagaaatatactttaaaatataaaatagaaaatcaacttttggaggtgaaaagtcattacaaatttcttgtttcatttgactcatactatgcagaaggactaaaaagaatatattgtggatttcaagaag

SEQ ID NO: 134648 - DNA, 508 bp, Glycine max
  Clone ID: PAT_MRT3847_92597C.1
cagtgctctcttgttggggggttgaagaggttcatggtttttgttctgctcacattcatagtctgtggtgaaaaagaagagccttcagttgttgttgatcagcactaccagccacacaatatgacagagaaacaagaaaagccgaatcaacacctcaatccacgttacccttttggtgtttacttctcacagaagagaaaggttcccaatgcatcagatcctctccacaaccgttgagtcatgtgttgtttagttatttattgagtgagtcaaggtttaaaaaatgagcagattaagattgaggtttgaggttggttttattgtgtagaggtactttaagcaaattaaaatttttccatgcattttgtctactatgattggatgttatggggggaagaaatgaagagtgctgtttgcttctgaaaaaaaaaaaacgccaatgcttagtgcttagtactacttagcttgttcttcagttagcacttttttttttcttttctttcatatg

SEQ ID NO: 134649 - DNA, 479 bp, Glycine max
  Clone ID: PAT_MRT3847_92598C.1
acacaacaatctacaacttctccatttcatactcaatttttgactgataccagacccagatatagctataaatcagacagatcccggcggcgcattgaattattatctgcattacagttatggacattgccttcaaacccaattgaaagatcagatggttacgcatcccactaagtaaaatcctactacaattgagcaccaacatgtgctaaaccggattacatgagcacaatttcgagatgtcctataccggattacatgatcacaaatacacattgtctagtacgaggaccacaagatcaaagctagatgatgctcacccatgcatccagaattaccaatccgcatgactgccaaaagcattaagccttattggcaaagttgtgagaaagtccatacagaccttcctaaaggccctcccgagaggttgcacaggtgctgtgaatgtaccagtggcgctgtctgagagagcgtcaccc

SEQ ID NO: 134650 - DNA, 322 bp, Glycine max
  Clone ID: PAT_MRT3847_92599C.1
cgcccctatacctcagaattcagttcgaggtgaacgggactaaggttataattgaacagtgaggagctgatacaaatgatggcagtgaaagagattgggggttgtggtatggagttgcgatggatggtcgtatgtgtacaatagatgaacaacatgatgtgggaaacatgggcttgtttaagaaatggagaagaagcataagcaagagaaaaactgtactagcacatggtggtgtgccagaaaccattgttggttcatcaacattcagcattagcatgatgactactagagaagatgtaaccagtgtggctgtggaagatga

SEQ ID NO: 134651 - DNA, 1289 bp, Glycine max
  unsure (1)..(1289): unsure at all n locations
  Clone ID: PAT_MRT3847_9259C.1
atatgatatacccntaataaatgatttcacttagtacattagcatgaatcattcatatataccctccttgccaatataacattataagccttccgtggctaaagagctaatatgcaaccttaaggaattccaccatctatagctgcactatattatgagattatctatctatcattgctatattcaatccaatagtttatcaattcaccatggaagaaagggaaaacaaagagataaagatagccaggttttcaagttgtcgtggggttgcatttgaaatcaatccaaatagaagcaacccctttgcaattggatcaccaccaaagcaggaacggattggaacttggctatggcttccatggactcgaaacagttcattcaaagttcttcctcagcctcataccattagtccaactcggagccgtgccagcagccacttctgtgacattgacattgatgcaagtgattttgaggtagagttcatagccgaagttcaagatatagaaaaaccggataaagctaatgtggttaaggtgcaaaagctacttcccaaaagtgatccaccaaggaggtcaaggctctccataattttgcttgatcaagggttcacatgctacaaagggctatttctggtttgcatggccttgaatgtggtggcattggctctttcagcagcagggtgtttcccttatgccaagacaagagctgcattgttctctattgggaacattctagctctaacactgtgtagaagtgaggcagctttgagagttattttctggttgactgtgcagactcttggaaggccttgtgtctctcttagaatcaaaactgccaccacttcattccttcaaagtgttgggggaatccatagtggttgtggtgtttcttctatagcctggcttgcttattccctagttcttacattgaaaaacaaagacaaaacttccccagagataattggagttgcattcaccatcctctcactcattctactctcttccttcgcagctttccctcttatccgtcaccttcatcacaatgttttcgagagaattcaccgtttcgccgggtggatggctctcatccttctctggctattcattcttctctccataagctatgaaccttactcacacacctatgacttgaccatgtctaaggtggtcaagaagcaagagtgttggttcactttagccatcacaattctcattatcattccttggctgagtgttagaaaggtgcaagttaatgtatcatctgcttcaagccacgcctcgatcatcaag

SEQ ID NO: 134652 - DNA, 517 bp, Glycine max
  Clone ID: PAT_MRT3847_925C.1
cttggaattccatgattgcgggaatgatgttaaataaagagagtgagagagctgttgatatgtttcaaaggctggaatctgaagggttgaagcctgattcagctacttggaattccatgatcagtgggtttgcacaactaggggagtgtggggaagcttttaagtactttgggcaaatgcagtctgttggtgtggctccatgtttgaaaattgttactagccttttgtcagcatgtgcagattcatctatgttacagcatggaaaagagatacatgggttatctttaagaactgatatcaatagggatgattttttggtaactgctctggttgatatgtacatgaaatgtgggcttgcttcttgggcacgaggagtttttgatcagtatgatgcaaaaccagatgatccggcattttggaatgcaatgattggtgggtatggaagaaatggagactatgagtctgcctttgaaatctttgatgaaatgctggaagaaatggttcgaccaaacagtgc

SEQ ID NO: 134653 - DNA, 505 bp, Glycine max
  Clone ID: PAT_MRT3847_92600C.1
acatatataactaaagaatcttgtttggttctattatttggtattttatcatattctaatgaatctttattgtcctttttattattagttattagaatattctttattattagaaagaatgaatagaattggcgaaaataagaaaaaaattcaataaaatcaacattatcgcgggcgaatatttactctattattatcaatcaaattcagatgtaatgtagggcacaactgctaaaaaaaaggattgctttttggtttcttccgccatcccacctaatgaatcattcagatttgttattcattgaatcttaagtattcgcaggtttcgtacgtcccatcacttctagagtaatggttaggtctgaattccacaatggagcctttctcatatcttaagaagtataaactgatgtattttcgaatattgatttgattttttgtgaatcaatattctcagtttttattgattcagagctcttaatattgttacgtgataaattattca

SEQ ID NO: 134654 - DNA, 1220 bp, Glycine max
  Clone ID: PAT_MRT3847_92601C.1
aagacccggccatcactagccgcacccggtgaaataccgcgtcccaaacccgccctactgaacccccagcaccgctgtaagaagaacggcgcagcaactcgatcatcgatcttccccggtgatcttcaacgatccggcgaaaacacgattctcaccactcgcaaactcggacagggcacagaagatcgtgaaatcgtacgatcttacgagtcagatcgcggttttgagtaccatgaggtgaaagctttgttttttgaattgtgaggaagattgaccaaataaacagaggcaaaaatgaagatggtaactgctttcaacggcaacatgaagaaagctgctgctggacttagacgcattaatcttgatggtcttcgatggagggtttttgacgcaaagggccaggttcttgggaggttagcatctcaaatagctactgtagttcaaggaaaggataaaccaacttacacacctaatcgtgatgatggggatatgtgcattgttcttaatgcaaaagatatttgtgtgactgggagaaaacttacagacaaggtctactactggcatacagggtatattggccacctcaagcaaaggactctaaaggatcaaatggccaaagaccctactgaagtcattcgcaaagctgttctgcgtatgctgcctagaaacaaactacgtgatgacagggatcgaaaattaaggatctttcctggcagtgagcacccttttgttgatcgcccacttgaaccgtatgtgatgcctcctagaagcgtacgggaaatgaggccgcgagcaaggcgtgccatgattcgagcacagaagaaggcagagcagcaacaacagaaggctgatggaatgaagggcaaaaatggtgaagcacaggaagaaagtgcatgaagacgcaattttgctcaaaagatggcactgatcattggttatcattgaaatggaaagccatctgtctctgttagcaatcctacaatgccctattgaattgtgtttgaattttctttttttataagtcttttagtaagagcataattgattcacattataggcatttcttgcatccttttcagtgataattctgttaagttcatgcttagaagtttagactaactagcattttggtcctcagctacttccttcactgtcaaacagtgccacagtgcattcaagtattcaaaattgctttttgtgttttctctccctttgggctt

SEQ ID NO: 134655 - DNA, 436 bp, Glycine max
  unsure (1)..(436): unsure at all n locations
  Clone ID: PAT_MRT3847_92602C.1
aggacacatttttattttattttggcataaaacaatagagtcaagttttaggggtacaaacttacaggtcatcacttcattaaaatttcccctggntttttaagacttataatcacaaacatgacgtaataaatagaatagaacagggtatttcaccactaactatggagaccacacgcacaattcgttttttattcacaaacaaacaaatataataaaactgggccactttgtttttttttcggtaggcaccgggccacttaatttggtcatctcctctaaccattttctttttattgaatcaatctcctctaactctaatattggagtcattgccctggccagaaatgcctatcggttttgcatggcagaggtcagatcagtttccaatgggataaaaaacccttccaattggatatcatggctccattcgaaa

SEQ ID NO: 134656 - DNA, 249 bp, Glycine max
  Clone ID: PAT_MRT3847_92603C.1
ctcaaaatcaaaatttaaaatacaaacaacctccatctccaccgttaaaatattccatcaaacggcccagcgccttctgaggacaaagcgagggaacaaacgtgaaccgtggagtctcactataaaaatctcgctcactaactcttgttcttccaaaaccaattctctgcactcttcatcaagctccgctccaacacaggggaaaatgagggagatccttcacgtgcagggagggcaatgcgggaacca

SEQ ID NO: 134657 - DNA, 1471 bp, Glycine max
  Clone ID: PAT_MRT3847_92604C.1
ttttgtgtggcttttgcttttgaatggtaatgctgatggttcaaaagatgtttataaacttgctgagcttgaggaacaacatgtaaaagggttgggtcagaatgttagggctgccgcttgcgtgtccggagtctcccgggtcgacccacgcgtcctctttcacagtaccctagcaacacttactcgccattggggatggagccaactgggccagatagttttgtgaagaaaggtgaaaattcagctgaaaaggtctcagaactgagtttagaaaagggggaagaagtagctaaggcatctcatgaatctctggtttctgatgccaaatgggtatgtgaaagccccaaagctggcgtctcttcaacagcttcaggatggccttcctttaatgacatcaaagcacctcctctcacttattctctatctgcagaagagaaagcaactgtggcagtgctgcaattgcagcacaaagcattagaagcttgccagaagttcttagtcggggatgctggttctgatggtgacgaagatgacaaagatgatgaggatgaagacgaattggtagatgattatgattctaaagaatgtgaggagtacaagttctttgaaaaagtgtttgcagaagatggtgacttgaggagatattatgagagcaatcataaggaaggggattttcattgtttggtttgtggaggtatagggaagaaagcgtccgagaggtttaagaattgtaagacactaattcatcactccactgctatactaaggacaaaaaggaagagagctcacagggcctatgctcaggtcatctgcaaagtttttggttgggacattgatcaattgccagctattgtgttaaaggatttggattcctccttggcatgttcaaggaagcttgggttttgaaaaggaaagtgagaatctagaaggaaaggtcttggaactgagttcagaaaatggaggagaaatagttaaggaatctcatgaatctctggtttctggtgctgggtgggtaagtgaaagccccaatgctggtttctcttctacagcttcaggatggccttcttttgatgacatcaaatcatgttctctcacttattgtctgtcagccgaagagaaagcaactgtggcagtgctccaattgcagcacaaagcattagaagcttgccggaagttcttagttggcgatgctggttctgacggtgatgaagataacaatgattatgctggttctgacagggacgaagatgatgatgaggaggaggaggaggaggatgagctggtagataatgattctaaagaatgtgaggagtataagttctttgaaaaactgtttgcagaagatggtgacttgaggagatattatgagagcaatcataaagaaggggatttttattgtttggtttgtggaagtattgggaaaaaggtatggaaaagatttaaaggattgtgttggattaatttaccactt

SEQ ID NO: 134658 - DNA, 468 bp, Glycine max
  Clone ID: PAT_MRT3847_92605C.1
gggggccgggccccagaatcccggtctaccctcacgcccccattgttatatacacctgagcgcgagaaagagaaggggaggaatttgagagagctctggggctgttaacactggcgcccaagagaattggcaacaagatcaaccggaatgcgatcctttgtacacgcaggagcaggctattgaagaaagcttatgagctttccgttctctgtgactgccgagcttgctcccatcatctctctccaatcacaggaaagcagctacgactttcgcagtggttcaagcatgctcaacacgcgggagaggtgccagaaatgcacctatggaccgcctgaggacaatcgtggcaacaaaggcagccttgttattggagtcaagcactcaacaagaatacttggggctgcaagcactttaccgaactctactactggcttacaggcaccttatgggagaagaccttggtcccct

SEQ ID NO: 134659 - DNA, 326 bp, Glycine max
  Clone ID: PAT_MRT3847_92606C.1
catttccacatttatatgaacattggaggctccttagttcatatatagaagtgggaattgttatgttctcgttataaggcctatcctgaagcctaaggaattgagatcggacttctctgagggaattccaattccacatttttaagaacaaaggaggctacttgtttatagatgaagttggaattgtttgtttccttattatgcctatcccgaagccaaaggaaatgagatcggacttcctcgagaaattccccttccacatttttaataaacattgaggcctccttgtttctatatgaattggaattttttttttccttattaag

SEQ ID NO: 134660 - DNA, 237 bp, Glycine max
  Clone ID: PAT_MRT3847_92607C.1
ctcgtttttaactatgcatttattcactccaccatcaccaagctatacgtgactagaaacgtgtagatctcgaacttgcttgatctacgcaacgcctactagcgacagtatctgggtgtacgtaagccaccatgtaccccctacgcgcgcgagagccctgacctttcatagatgacacgcatgtgggttgacatctactgcaccgacatggtcgccatccgcgcatatgacgaacgc

SEQ ID NO: 134661 - DNA, 288 bp, Glycine max
  Clone ID: PAT_MRT3847_92608C.1
actaagagacaccaagtcttttcaaaaacggtggcacagtgggaagctcctctctgcctgggataggcaaacctcggaaaggcaggatgcctaacagaactcaccctttatttacccaagttgtgcttcaagatggagcaatgactagtttgtcaaagggttaccttaatctgtcaaggcaggttgtctctgtaatattatgtggaacgctcgaagttgccatatatgctaactcgcagtctggggctatcaaaggtgaagtatccatcaaggcccagtattgcaata

SEQ ID NO: 134662 - DNA, 530 bp, Glycine max
  Clone ID: PAT_MRT3847_92609C.1
aaaaaagacaaaaactacctccttatatgctgtgctgtgatatctatctcaaaaatggggagcacctatgaacctacgatggcagctgcaatgtagatgagctctaccatggctcaatctacaggttagttgcctattttgacccccacccacacgccggtggccactccacctaggagggctgatgcgtacgttcacactcctgtgctaacagcagattcacccgtcaccgtaatatttactatcgtgaccaactactgcttctgcttcgtaatccccactagcatcactggctacttccaacatttatcccttgaccatcattactcactcatttgaaggaccacactgtatacagaggcggattcaacaagttacgcgatatgatctgtttctcattccttatgcggctctactcacattaaacatctaatatgacattatcagatttattcgttctcatagttcgaactgcagtactattctttgactgcttagcctattgtctgtgtggaggagccattgatttg

SEQ ID NO: 134663 - DNA, 403 bp, Glycine max
  Clone ID: PAT_MRT3847_9260C.1
atggcaacagcaagaacaccattgaattttgattctagcacgcagagcttttgacaattttctatcgaccttctcgatggaggaattttagtggacaaaactggagattggattacacttatacaaaattctccaattcgtaacttggtgagagtcgctgattggaagacaggctgtttaatggtcaatattgtgatgcctgggaatgcaacagtaaaaaggagtgattgagcctcattgggacaagtgtttttaacatacagcagctgtacagagcattttgatgcatgtaagtggtcaaaatcagaaccacattcctgggaattgatcttcccaatcgaggtatgatggcctaataacggttttgaaatgtggagttctgagtgggcatatcaaacttcat

SEQ ID NO: 134664 - DNA, 218 bp, Glycine max
  unsure (1)..(218): unsure at all n locations
  Clone ID: PAT_MRT3847_92610C.1
tcgnaatcgctgttgtttctcagccgcttcgcgctaggttcggaaacagagaggcttctgttttcttttcgcgatgagggccaagtggaagaagaagcgtatgaggaggctgaagaggaagcgccgaaagatgagacagagatccaagtagtgcgttacacctagtttgtttccgttgcttttacaattgcttatgttcccccataggaccccccctt

SEQ ID NO: 134665 - DNA, 147 bp, Glycine max
  unsure (1)..(147): unsure at all n locations
  Clone ID: PAT_MRT3847_92611C.1
gggatatctatgaccactgnttcacncaaatcctntatttncgaaaaggtttataggtggactaccagtcatanttgcnaaaccanagacttattatgaantcaagtgntgaatntgttggggccataggttcatattacaagnntg

SEQ ID NO: 134666 - DNA, 229 bp, Glycine max
  Clone ID: PAT_MRT3847_92612C.1
atcacaggtatcctccacgagagacaatcctgttcaagtcaaaccattacgagcagtaaagctctccttccaaataattatcgcagcctacctactcaggactcaaactcgaaaccactagttaatctggaagacacttcaacttcatttttttcctttcttcttatcataacctgatttcaattttcagttttttcacacaaattcaaatccaacaacggacgcgtgg

SEQ ID NO: 134667 - DNA, 296 bp, Glycine max
  unsure (1)..(296): unsure at all n locations
  Clone ID: PAT_MRT3847_92613C.1
nancgnaanagtcgcangcacgcgtacgtaagctcggaattcggctcgagnttcccgnatagnagcangcaangcaangcgtgtgtcngnncagagcaggagtgaaggagnnaaggaccctgtncgtccagtncttattctnttntntcntcnctccctacangcaaccgncaattcctgaaccctaagctngcgccatngntgtacgnttcgcgangtgtcgaggacatntaagcgccnctncttantangagacgtntttaatggganancgacagcctgcnttgncaatantn

SEQ ID NO: 134668 - DNA, 199 bp, Glycine max
  Clone ID: PAT_MRT3847_92614C.1
gacatactatgtcggccgccgtcctttttttttttttttctaaaaacctacattcccatcgcaaattctttccatgtattatataataattgataacgggccaagaaagagtatgtgcttaaaacacctattcaatgtcactgtgagcgctaaatctgagaaagccagctgggatccactaagattaacccagcttttt

SEQ ID NO: 134669 - DNA, 164 bp, Glycine max
  unsure (1)..(164): unsure at all n locations
  Clone ID: PAT_MRT3847_92615C.1
acgnnaaatnnnngcacgcgtacgtaagcncggaattcggctcgagaacnnaacntgtncttcttgttgtngtnggngnngttcagtncttcgncctcgcttngaacaacanctcacaantcanacacctnngaangccggctcactcanaaancacaatgctc

SEQ ID NO: 134670 - DNA, 450 bp, Glycine max
  Clone ID: PAT_MRT3847_92616C.1
ctcactctgtagctatctccttccttcatccatttcctgaacgaaaccaacttcactttccttccgccatttgcatttctcactttctcttctgaatgggcactgcactgcacctctgcgttagtttcaatcctgctcaaggtagaaaatgcaagtacgaagcccaatcagtgagagcacttcctatacgtatattatcagtggggaagaagcgatcacgtggactgcaactcatggttgatgagtatgtggataagctcaggtactattgcagtgttgaggatgttcaaatacggccaaatcctcaaaatgcacgtgaccaaagggctcaggttgatgccgaagatgaggcagtgatgaaccttataaggtctgatgattgggtatagtctccaacatgcatgaatttgaattacagtagtaaatgatttttttcccttatttttactt

SEQ ID NO: 134671 - DNA, 2037 bp, Glycine max
  Clone ID: PAT_MRT3847_92617C.1
ccgcgagtgtgtccgggctcatcatggatcgtagctactatgcggccagcggccaactcgacgacgttgcgttcgatcgctcgtgcagccttcgttgttctggcgaatggggtcttcgtcggcctcggcatggacccctccgtgccccgccaacgcccattccttgcccggcgctccccctcgcgtcccaaatcagttcacgctcgtgtcatgtgcttctgtttctaggttcccccaactgacgcaagtagaaaaacttgaaaatttgaaacagaagcagaagaaggaaacacagacagaactgagagtgagtgagagcagaagaaggaacgtagcaacaatgggtccagcggcaaagacgacgacgatgcgttcgatctctcaagaagcgttcgaagaactggtgaatgagaacatcgacgacctcggcatggaccccaccgaggccctccaagacgcaatccaaaccctcactctccaaggcgtcgatctctcaggcatcgtcacgtgcgtccccggagaaaccaaccccgtcatcgagtgcttggaccgcttaagacaccttgaaaccgaaccggaccaaaacctaatcgcgcaagcgtttaacaccctccacgagttgtgcgcaaatccaaattctgattcaaattcaaatgtggctattgcaaccaaaaacggcgccgttgagctagcttgttcgctctgttccaaaatttctcttgccgccggatctcacgttgttccccttgtctccgcattaaacgcgttggcgtcgttgcttcacggttgtgactcgtttgattctgaatttctgaaacattattgccgttttgccgctgttctgaatttctcaagggactgattactgatttggtttctctgttggagggtgcagatgttcagagcacgggggcttttcatcgctgcgacgggccgaggattgtgatggcttttctggttgataataagggaaatgtggagcttttgagcagtggatttcgagttgtggcttcggcggccaccgggaatgagattgtgaaggaggcatttatggagttgaaggttgacgagctgattttggagatcatgtcgttgcataggcacaaggggatccagagtttgtatgacgctgtttgcgcgcttttgatgcccgacgacgatcgagttgtggcttctcaggtgagttcgggctgcttgaggatgtgtgttcatattagttgaagagaaggaagtatagatgtgataggtaatatgatgtgataagacaagagatagagagacatcactttggtgtcaattgagtgtttatgttgtagcgggagttcatatattagcactcttctttggttgtaaaaaacattacttgtttttcatggatgtgaacaaggctacaaaaatgaggtaaaagtatgttgctcattactttcaaagttagcaggaagtgacgcaaacaagagtgcaattgttgggaaaggaggtatggataagctaatcaaactttcagccagatttgctgatgacccttctgttttgcaagagattatgtctattatttcggtgctttctttaagatccccagacaatgcagcccgtgccattgaagctggtgctggtgaccttgctattcaagccatggagaaatttcctgcggcacaccaaatgcagagaaactcctgtcttatgatcagaaatcttgtagtgagaaatccagagaacagaactattctgcttaataatggaattgagaaatacataaggaaagcaaagcaaacacataccaactgtaaggatgctgctacagatgcgttgagggatctggggcttgataattacaacttgtagttgataatttgtttacctctgtattgtcttacaatgtaataatacccatcaatatttttttgttactgaagaaaaaaagtgagtgtatgactacatattttaatcgtctcgtctctattctctacgcgaatattggatttgaggaattcaatgtacaaactgaggttgaacctaatactatatttttttcttcct

SEQ ID NO: 134672 - DNA, 464 bp, Glycine max
  Clone ID: PAT_MRT3847_92618C.1
ctgagagtgagtgagagcagaagaaggaacgtagcaacaatgggtccagcggcaaagacgacgacgatgcgttcgatctctcaagaagcgttcgaagaactggtgaatgagaacatcgacgacctcggcatggaccccaccgaggccctccaagacgcaatccaaaccctcactctccaaggcgtcgatctctcaggtcaagttcttcttctcttctcttcttccttctcactctctctttctcctaatctcaaaacgccgtcgtttcgcaggcatcgtcacgtgcgtccccggagaaaccaaccccgtcatcgagtgcttggaccgcttaagacaccttgaaaccgaaccggaccaaaacctaatcgcgcaagcgtttaacaccctccacgagttgtgcgcaaatccaaattctgattcaaattcaaatgtggctattgcaaccaaaaacggcgccgttgagc

SEQ ID NO: 134673 - DNA, 1414 bp, Glycine max
  unsure (1)..(1414): unsure at all n locations
  Clone ID: PAT_MRT3847_92619C.1
gtccggnattcccgggtcgacccagcgtccgaagaagatagtggagagggggggttagtgaaggttgagccaaaacccagcaatggtttcacctcaaaagtggttgatttgttggagaaattggtggtgaagttcttgtatgattcttcactgccccatcactacctcactggtaattttgctcccgtgagtgagacccctccaaccaagaccttcctgtcaaagggtaccttccggattgcttgaatggggagtttgtcagagttgggcctaatccgaagtttgctcctgtagctggatatcactggtttgatggagatggaatgattcatggcttgcgcatcaaagatggaaaagctacatatgtttcccgttttgtgagaacttctcgccttaaacaagaagaatactttggaggctccaaatttatgaagattggagatctcaaaggtctattcggacttttaatggttaacatacatatgctgagaactaaatggaaagtgctggatgcttcttatggaactggaacagctaatactgctctcgtatatcaccatgggaaacttctagcactctcagaagcagataaaccctatgctattaaagtttttgaagatggtgatttgcagacacttggcatgctagattatgacaagagattgggccactccttcactgctcatccaaaagttgacccatttactggggagatgtttacatttggctatgcgcatacaccaccatatatcacatacagagtaatttcaaaggatggttatatgcatgatcctgtacccataacagtatcagatcccatcatgatgcacgactttgccatcacagagaattatgcaatatttttggatcttcctttgatttttaggccaaaggaaatggtgaagaataagacactgatattctcatttgattcaaccaagaaagctcgttttggtgtgctacctcggtatgctaaggatgaaaagcttattagatggtttgagttacccaactgcttcatattccacaatgccaatgcttgggaggaggaagatgaagttgttctgatcacatgccgccttcagaatccaaatttggatttggtcggtgggactgccaaggaaaagcttgaaaatttctcaaatgagctgtatgaaatgagatttaacatgaaaacgggtgaagcttctcaaaagaaactatcagcatctgctgtagattttcctagggtgaatgagagctacactggaaggaagcagcgatatgtatacggaaccacattagacagcattgcaaaagttactggcattattaaatttgatttgcatgctgaaccggataatggaaaaacaaaacttgaagtaggagaaaatgttcagggtctctatgacttgngaccagggaagtatggctc

SEQ ID NO: 134674 - DNA, 525 bp, Glycine max
  Clone ID: PAT_MRT3847_9261C.1
ttattcttccggcaatgctcttggttgatacttatcataccaatcctgaaaatgcagttcgtattatttttgttgcgcctttcagaggtggaaggcccattcgggtggttacatttccgaataccatcgtgcagattgaaccagacatgaattcaaggtttcagcttttgagtaccactaccaatggtgattttgttcaaggaaaagatctcgcaattggtaaagttaatgtagcattgtgctgctgttggcttgacattaagttacactccaactccattgttggaatctggtttgtaaaaagacagagggttaattgtggaattttttggaaggaagtcttaccttgctcattacgttaatcaagccccaaaaaaaggattgttggagggaatatttcctttgatattaatctcgctctagttggaaaaagttccctttacaaagcccatattgttagtggaaaacttttcactttgatttaattggtgcttgttcacattttttaaaaaattttcctgaaag

SEQ ID NO: 134675 - DNA, 277 bp, Glycine max
  Clone ID: PAT_MRT3847_92620C.1
agaaaatagaagccatgtttcgaacacctgtattacaggtacttcgtcagtttgtaagacatgagtccgaaacaactaccagtttggttcttgaaagatccctgaatcgtgtgcacttacttgggcgagtgggtcaggaccctgtcttgagacaggtggaaggataacatccagtcacaatattctctctagcaactaatgagatgtggcgatcaggggatagtgatgtctaccaactgggtgatgtcagtcaccagacaacatggcacagaatatc

SEQ ID NO: 134676 - DNA, 3314 bp, Glycine max
  Clone ID: PAT_MRT3847_92621C.1
gcccgtaaacactttcgtgtctgtgaagcatctcttcttttgcttgatcgtttcctcaaaacctctcttcttcttctgattgattccatcttgcgatttttcgattttctttgcttttcttcttttttggtttctgatctgaactcgagtcgattcgctattgccggaaaatgagtcctccggcaagtgtccggtgatgatcgctccctcgagaggttgttgaggttatcgttgttgttcttcgaattcatggtttcgatctgagaagtcatcagtgctaacagcgcgacgctgttgagttgaaatttcgctggttttgagttgctttgtgattaattttttttctcggcaaccaaaccggaggattcaaaatttgcactgattaattagtaaagttttggcgctctcgagttcgttttggtgaggattctgattaacgaaaatttttttttattcattcggaggagaagcgtctcaaactctctctctttctccatcgtagcatcatcatcatcaccataccttgtgcagattctgctcactttcaccacaacggctttactatttaccgcgtttcgttttcgtgtcaccgcaaatgactgaagttagatgttccctgtatggtgaactcccggcactgaaggcagagcaagaaaagactactctacaaaatcctcctcttcaagatcagatgctggatccagaatactcggaagctcaacaagctcaacatcaagcttcaaagtcaccagctgccattttatcagattctgagagtggagatgccaagttaaatacttcatcaaaggctactgatcatgagacgaacaaaacaattcccgagcacctagattccaacaaaacaaagcgcagaagttctttacaaagctggagaaagaggcccttgtaaagggtgttccaattggacaggctcttgatatagacattccccctccacggcccaaaagaaagccaaacaatccttatcctcggaagaccaggattggtaccacatcattacatagtggagcaaaggatggaaaactcaatttagttgaatcttcacatgttaatcaagcactggacttgaaaaaagaaccacttccagagaaacatgatttagacgaagggctaacaactgtaaaagaaaataaggatgagaaccacgcaaaagtatttactcttctccaggaggtaccctgttcctctgtatcttcagcaaatgagagttcaataacaatgtctgtgccactgggaaatccatgtgccttcaaggagattacaccttccgtgaaagaggtaatagcacgagatgaaaaaactgaatcttttgtcactgttgaacctgaaaatgggaagttggagatcaatgatggaaaacagactaatggcactagtaaagactccaggttagaggattctgatgctttacatatgaaattggttcaaaatgagaaaccagatggtcttgattgtgaattaacaatagatgggatgcaaggcaatcagaattaccctaggcatgttactgtgcacgttgttgatgggaaccttggaacaaatactcaaaatccatcacaagatatgttgtttcgagattccatgtttcagccaataggaggggttaacgggcaacgaaatgtttttaccaatacagctccatcgaacacaagtgaaagtcaaaataacactgcacgatcttctgttcatcaatcatttcttccttatcctcccttcacacaacacaaccaagacgattaccaatcatttcttcacatgtcttcaacattttcaaatcttattgtctctaccttgatgcaaaacccagcagctcatgctgctgcaagtttcgctgctacattttggccgtatgcaaatccagaaacttcagcaaattctcctaggtgctcccaaggaggttttacaaatagacaaattggttcccctccaagcgttgcagctattgcagctgctactgtagcagctgcaactgcatggtgggcagctcatggattgcttcctttgtgtgctcctcttcatacttcttttgcctgtcctgcatcagtgactacagttccatcaatgaataccggtgaagcaccggctctgaaggcagagcaagaaaaaactactctacaaaatcctcctcttcaagatcagatgctggatccagaatactcggaagctcaacaagctcaacattcagcttcaaagtcaccagctgccattttatcagattctgagagtggagatgccaagttaaatacttcatcaaaggttactgatcatgagacgaacaaaacaatttctgagcaccttgattccaacaaaacaaagggaagaaaaccggttgaccgttcctcatgtggttccaacacggacctctagcagcgatgtggaaactgatgcactagagaagggtgagaaagggaaggaagagcctgaaatacctgatgctaaccaattagccattgagtttagtaatcgtcgtagaagcgttagcaaccttactgattcttggaaagaggtttctgaagaggggagactggcctttcaggctctgttctccagagaggtgttgcctcaaagcttttcacctcctcatgctttgaagaatacggatcatcaaatggacaacgccaatgataacaagcaaaacatagatgacaaagatgaagatcttgacggcagcaagaaatgcagttctaattatgaagcgatgcagaaaaacctgctatttgtagaaaataacgagggactgttaaccatagggcttggacaaggaaagcttaagactcatcgaacaggttttaaaccctacaaaagatgttccatggaggccaaggaaaatagggttggagcaagcagcaatcaaggtgaagagcaaggttgtaagagaatacgtttggaaggggagacttcgacttgaggtttgatatatgcagtaacataaaggcaacctttggtttttgcatatcatttctttatccctccaacggtgtacctatattgtatgtttatttctaattctgcagctcacgaaacttgtcgtgtagatgtgtgtaccgtattaaattactgtgtacgctcttttactatctttgtatgatgttaatgctgtttaaaactccgctaaatagacttagataagaaacattaagtattgtttgagccatgaacatcaagtaatttatgatccttcattcagccactttccacgttttacatatcaactattttttcttttccttccttgtgcgcctctccttccatccttcccttgccgtgcacctctgcctactgctcctgcctgt

SEQ ID NO: 134677 - DNA, 648 bp, Glycine max
  unsure (1)..(648): unsure at all n locations
  Clone ID: PAT_MRT3847_92622C.1
ccactccttcactgctcatccaaaagttgacccatttactggggagatgtttacacatacagagtaatttcaaaggatggttatatgcatgatccggtacccataacagtatcagatcccatcatgatgcacgactttgccatcacagagaactacgcaatatttttggatcttcctttgatttttaggccaaaggtattccaggtgtttctgttcttatattctcgctaaagcttatattccaggttggaagcttcttttttgtgtgggggggagggttgtgtcaaggatggtatgatgatatagcatctattgactttgcacatcaattgatggctattaatgaatttggcattatggattgaaatccattctcaggaaatggtgaagaataagacactgatattctcatttgattcaaccaagaaagctcgttttggtgtgctacctcggtatgctaaggatgaaaagcttattagatggtttgagttacccaactgcttcatattccacaatggtggggtttgtttatttttgtttctacttaatataatatgnttgatcaatattctgcaatgatgttttttttgtgaaaaaaacactgtccatatgattggaagtgtatgatacaaaaaaagagttaaatat

SEQ ID NO: 134678 - DNA, 614 bp, Glycine max
  Clone ID: PAT_MRT3847_92623C.1
gcaaaacctctcttcttctgattgattcacttctcgatttttctgttttcgttttcattttcggtttccgatctaatatcgatgcgattcgccattgccggaaaatgagtcctccggcgagtgtccggtgatgatcgctctcgagagaggctgttgttgttgttcttcttcgacgtcatggttttgttctgagattctgctcactttcaccaaaacggctttactatttaccgcgtttcgctttcgtgtcaccaaaaataatgaaaggaggtgttccctgtatccactccttgtcagggaagatctgaagcagcgctagctgctcacgtcctgtaatggacgcatactcctccggcgaagaagtggttgttaagacgagaaaaccatatacaatcactaagcaaagggaacgatggacagaggaggagcataataggtttcttgaagctttgaaactacacgggcgagcatggcagcgcatagaagagcatataggaacaaagactgccgtgcatatcaggagtcacgcacaaaagttctttacaaagctggagaaagaggccctttgtaagggtgttccaattggaaaggctcttgatttagacattccccct

SEQ ID NO: 134679 - DNA, 1315 bp, Glycine max
  Clone ID: PAT_MRT3847_92624C.1
cacgtaataacaataaataatcataattttggcacactaattcaccagcgtccgcacccaactgcgtaaagctcaaagctttttgacagtttgagcatttcagacaaacatgggggatgatggaaagaagattagtggagagggggggttagtgaaggttgagccaaaacccagcaatggtttcacctcaaaagtggttgatttgttggagaaattggtggtgaagttcttgtatgattcttcactgccccatcactacctcactggtaattttgctcccgtgagtgagacccctccaaccaaggaccttcctgtcaaagggtaccttccggattgcttgaatggggagtttgtcagagttgggcctaatccgaagtttgctcctgtagctggatatcactggtttgatggagatggaatgattcatggcttgcgcatcaaagatggaaaagctacatatgtttcccgttttgtgagaacttctcgccttaaacaagaagaatactttggaggctccaaatttatgaagattggagatctcaaaggtctattcggacttttactggttaacatacatatgctgagaactcaaatgagctgtatgaaatgagatttggctcgagaacgggtgaagcttctcaaaagaaactatcagcatctgctgtagattttcctagggtgaatgagagctacactggaaggaagcagcgatatgtatacggaaccacattagacagcattgcaaaagttactggcattattaaatttgatttgcatgctgaaccggataatggaaaaacaaaacttgaagtaggaggaaatgttcagggtctctatgacttgggaccagggaagtatggctcggaagctgtttatgtccctcgtgtccctggtaccgattctgaagaagatgatggatacttgatttgttttgtacacgatgaaaataccggaaaatcatttgtgcatgtcatcaatgcaaaaacaatgtcagcagatcctgttgcagttgtcgaattgccgcatagagttccatatggtttccatgccttctttgtgacagaggaacaactgcaagagcagggtaaactgtgataattttggcagcctcactgtaccgtcctgcctcagtctttgtatacaacaaataatcgattgtaccatatatatccagtatctcattaaaccaatgtttttaaaaccggattggtagttgagtcaatggaggtattggttgaataacagtgattgaatcaataatgattaaatattatttttgtttttaatataatatattaagcaatttttttacagc

SEQ ID NO: 134680 - DNA, 574 bp, Glycine max
  Clone ID: PAT_MRT3847_92625C.1
ccttttgctattaccaaaactctggcatgatgggtggattcaagggtgtgcttaaaaaaacacacctttacttatgcaaatctgagctagctacatagcgccttacagcttcctaagttctttggcatatacatccgcttacagcaggtctactgaaccacttatcaaaaatctactgcacgtaaaagcatcgttcatgaccgacaagtggtttacagctccactacaaactagctacgtatcaaactgtattggggagacttaaaggatacctaaaccccagagtgggacattgactgacagctagtgtccaccatagtcgaattaaaacctgcagctcatcataagctgtattttatcatatacacccacccagatttcttcgtgccatctagacacacttaaataagccatgctaactcattacagctggaagagccaccgtaatccccaggctctttgaggaccttggttcacacaacttgctgcatcaaatgcaaccagcaaaagcctggtattgagaacttttctcctaaaccccatgtacctaattttacgcaattgaaaacctact

SEQ ID NO: 134681 - DNA, 788 bp, Glycine max
  unsure (1)..(788): unsure at all n locations
  Clone ID: PAT_MRT3847_92626C.1
ccacgcgttccagcaaaacctctcttcttcttctgattgattccacctcgcgatttttcgattttcgtttgttttcttctttttcggtttctgatctgaactcgattcgattcgctattgccggaaaatgagtcctccggcaagtgtccggtgatgatcgctccctcgagaggttgttgaggttatcgttgttgttcttcgaagtcatggtttcgatctgaggttttggcgctctcgagttcgttttggtgaggattctgattaaggaaatttttcttttattcattcggaggagaagcgtctcaaactctctctctttctccctcggttgtttatttttgaaattttattttcctttttcttctatgtagtactgttttacgtgtgacatgtgaattggaatgcttattccagcttatacaaaacagagacggatctcttcctattgttctcgctttgtttcttttgcagtagcatcatcatcatcaccataccttgttcagattctgctcactttcaccacaacggctttactatttaccgcgtttcgttttcgtgtcaccgcaaataatgaaaggaggtgttccctgtatccactcctcgtcagggaagatctgaagcagtgctagctgctcacgtcctgtaatggacgcatactcctccggcgaagaagtggttgttaagactagaaaaccatatacantcactaagcaaagggaacgatggacagaggaggagccatataggtttctagaagctttgaaactacacgggcgagcatggcagcg

SEQ ID NO: 134682 - DNA, 382 bp, Glycine max
  Clone ID: PAT_MRT3847_92627C.1
gttctaatggttacataatcaatttaagagggaaaaaaatattatagtgaagatgtgaagacaccgaatagcaaacccgcccaaaaggggagcagaaaaaatgcgggaaccagacgggagggggaagaaaaaaaaagggggaggaagcgggggcgggggaaaaaaaagggcgggaaatacataggctatgtgcataaccagaaagaccactgaccaacaggaaaaaaaaagaggaggaaacacaaaagggggggccacagaaagagaaccccggggaggcagcggggatgctaaaaaaaaaaacatgacaggagaaacctctccgggagaaaaaaaacacagggaaaaacagaaaaaaggacccctttccaaaagaaaggag

SEQ ID NO: 134683 - DNA, 552 bp, Glycine max
  unsure (1)..(552): unsure at all n locations
  Clone ID: PAT_MRT3847_92628C.1
ttctgaactcgattcgattcgctattgccggaaaatgagtcctccggcaagtgtccggtgatgatcgctccctcgagaggttgttgaggttatcgttgttgttcttcgaagtcatggtttcgatctgaggtgctgtcagtgctcacagcgcgacgctgttgagttgaaatttcgctggttttgagttgctttgtgactaattttttttctcggcaaccaaacaggaggattcaaaatttgcactgattaattagtaaagttttggcgctctcgagttcgttttgtagcatcatcatcatcaccataccttgttcagattctgctcactttcaccacaacggctttactatttaccgcgtttcgttttcgtgtcaccgcaaataatgaaaggaggtgttccctgtatccactcctcgtcagggaagatctgaagcagtgctagctgctcacgttctgtaatggacgcatactcctncggcgaagaagtggttgttagactagaaaaccatatacaatcactaagcaaagggaacgatggacagaggaggagca

SEQ ID NO: 134684 - DNA, 386 bp, Glycine max
  Clone ID: PAT_MRT3847_92629C.1
tttttgatgtcaaatcctttatcatatttaattccaggaatataatcaaatcacatagtctttacatactcatacaaaacaagttgctttcaaccacataattggttggttgctctcagaaactaagtaataccctaaaactgtaaccaacgaaaaccaaattaacctggggcaggcaaataaagggacatcacaacttccaacaaaatcccttaccttcattttttgttcttttttattaaaagaaatagacagaagaaaatactgtaaaatttaactaagctcaatataaaattttaccatgacggctaatcttttggcctcaccaacacgctcttccaaaagcagaacttcctcttcttgtgcaggatactctggtagcttct

SEQ ID NO: 134685 - DNA, 494 bp, Glycine max
  Clone ID: PAT_MRT3847_9262C.1
gcaacaacaacaaacaagcttaattttcttttttttttttcctttaaacgaaccaaaatataaaagaggggggttcacagaaaaaaagggctaaacccaacaaaaaaaaagtttcctagaacctagctataccccaaaaaaaaactactatctccttgcttccattaaaactctaaccattgttttggggttggaaaataaataacaagggcacactccccccctttaactaacttaatttaaaaattctaccattgttaaaaaagcccaaaaaaattaccctataaatataacaaaggggtagttggacccacactgcaataagccttttttttaaatcttaaagactggattcctttttcgcttcctaaacaggcttaaaagcccaagcaaaaggtagaaaactagcgtaataggaaaagcatttaccatcccaaatatacccccggggcttaatatgtcaggataaacgttgtattccttaccaaacacaa

SEQ ID NO: 134686 - DNA, 468 bp, Glycine max
  unsure (1)..(468): unsure at all n locations
  Clone ID: PAT_MRT3847_92630C.1
cnaatcaaacaaacatttttttttttttgnccaaacccaatatataattttgggggcggccacgcataatggggggcctaaaaacaaagcaagatacgacccacaggaaagaggcgcatcaaaaaacccgggtcccaataagcaaaacacaccgaagcaaaattcaatttaaaattaaacggcgacctcgatatggaactacagaaccaccacagataagggacttttccagacaattagactattcatccccctggctgagtaaacaggcagttttgttaggcacaacaacatcaagctgcgcgggtctctcaactataacttttgccttcctgggggacatatggggggcaatcccaagacaagaagtcctggtgtgcaacatgagcagttccaaatccttcacactgggaacaacaaagttctggaaaccattagggagataggggcgggtctccttggctgaac

SEQ ID NO: 134687 - DNA, 604 bp, Glycine max
  Clone ID: PAT_MRT3847_92631C.1
ggctcgagctcgagccggtttgttttcttctttttcggttcctgatctgaactcgattcgattcgctattgccggaaaatgagtcctccggcaagtgtccggtgatgatcgctccctcgagaggttgttgaggttatcgttgttgttcttcgaagtcatggtttcgatctgaggtgctgtcagtgctcacagcgcgacgctgttgagttgaaatttcgctggttttgagttgctttgtgactatttttttttctcggcaaccaaacaggaggattcaaaatttgcactgattaattagtaaagttttggcgctctcgagttcgttttggtgaggattctgattaaggaaatttttcttttattcattcggaggagaagcgtctcaaactctctctctttctccctcggttgtttatttttgaaattttattttcctttatcttctatgtagtactgctttacgtgtgacatgtgaattggaatgcttattccagcttatacaaaacagagacggatctctttctattgttctcgctttggttctttagcagtagcatcatcatcatcaccataccttgttcagattctgctacttttaccacaa

SEQ ID NO: 134688 - DNA, 615 bp, Glycine max
  Clone ID: PAT_MRT3847_92632C.1
aacactttcgggcgagtgtgtgtgtagcagtttctggttcggtttttggtttcgtttcagcaaaacctctcttcttcttctgattgattccacctcgcgatttttcgattttcgtttgttttcttctttttcggtttctgatctgaactcgattcgattcgctattgccggaaaatgagtcctccggcaagtgtccggtgatgatcgctccctcgagaggttgttgaggttatcgttgttgttcttcgaagtcatggtttcgatctgaggttttggcgctctcgagttcgttttgtagcatcatcatcatcaccataccttgttcagattctgctcactttcaccacaacggctttactatttaccgcgtttcgttttcgtgtcaccgcaaataatgaaaggaggtgttccctgtatccactcctcgtcagggaagatctgaagcagtgctagctgctcacgtcctgtaatggacgcatactcctccggcgaagaagtggttgttaagactagaaaaccatatacaatcactaagcaaagggaacgatggacagaggaggagcataataggtttctagaagctttgaaactacacgggcgagcatggcagcgcat

SEQ ID NO: 134689 - DNA, 597 bp, Glycine max
  unsure (1)..(597): unsure at all n locations
  Clone ID: PAT_MRT3847_92634C.1
aactaggctcgcgttctttttttttttttttgtatcgagaagatatcccttctttgcactacattttattcttatggtggctaatgattttacgatttgatatctggttgtgtcccagaccaaatttctatacactgaaacctatacagattgcagtcatcagatcaaaacttgtcatatttccacttacgtatgtcatctattctgagtgaaaaatcaataatagattcaggaatgacttccctattccaatatcattactttgaggaaaattcaattttatagctggcatcagtacagtgttgaaactgtcttggttcattcttctaatgcacataaacaaaccttctctaaatttagtggccaatcttcccctaatatagtaagattcaactctactgctgttctaaagtctgatatagatacagaagcagatctaatangctgttgcacacatcttctcagtggtanttcattcaaaccaagttgtatggaaccactgaacttatttacagactttgaagcaactaaatccaaacagggctctatcaatctttttaagtaaacatcaaagtcattatttaacaaacctgcagc

SEQ ID NO: 134690 - DNA, 504 bp, Glycine max
  Clone ID: PAT_MRT3847_92635C.1
cgacgaagctcggaattcggctcgaggttcagagttgcaagaacattggaacaaaacgcaacctttctcatgcataagtggcaactagtggcatgttttcttgatggggacatagccatcaatattttagtgcacagggtgaattcaagtagaaaaggggagttcacaatagaagctttatttcaaagcttgtatcttggaggtttggataagctaatgcacttgatgcaagagaattttccagaactagggttgaagagagaagactgtgctgagatgacatggattgactcagtcctttattttgtggggtatcaaagccgtgaagctttgttgaacagaagccaaactacaacggattcattcaaggcaaaatctgattttgtgaggaaccctattcctgaagctggcttagaagggttgtggcaaatgctttatgaagacggtgcacaaggtgcactgttggtgctctttccttttggggcaataatggatacgattcca

SEQ ID NO: 134691 - DNA, 426 bp, Glycine max
  Clone ID: PAT_MRT3847_92636C.1
gttggaaccaaaccgggaaggcctatctaagaaaaaaggggaccccaccaccatttatggctacccccgcccaaatccctcctaattttaaaacccggaaaaaaaaaaccccaagggggacccggcttcaagggaaccccccccctaaaaaaaacaccccaaattcccccttttagggcaaaaaataaaaggacccctctaacccaggaaacccaatccccaaagtcccttcccggctaaaggccaaaaaaaaaaccccaaaattgaaaaaaggccaaaaatttgccaaaagggtccggggaaggccccccttggcccccaaggggggaaaacccccgggaccttcaagggagggaccagggcccttggggggggcccttccagggaaaccccccccgccttgggaaccacggccacggccccaac

SEQ ID NO: 134692 - DNA, 183 bp, Glycine max
  Clone ID: PAT_MRT3847_92637C.1
agggaacaacgacgagcacaagattcagttacatattattccagtatacaacgcaggcacatagtatggcgggaccctttgagttggggtcatcaaagaagaaaccacaggatagagtgaatgagttacacacatttaaagcggaaaatatgcacagcaacatgtgaattatttattacagcc

SEQ ID NO: 134693 - DNA, 1513 bp, Glycine max
  Clone ID: PAT_MRT3847_92638C.1
atgaattcgtactttcacatcgtcggtgtgggactaacaggaaaaggttgatgttcaaacacgcttaaccaattcacacaatcctcgtaacctcttccatggctactgtttcttctccttgtactgttttccccatacttacatcaaccttgtcgaagccccacttggctcccctctcttgccgaacccaaaaacgaagtcgtatcagtatcatcacctctgtcgccgaggatcgagaaatagttccggtgtccgaagatagaggaattcgtttgaacgaagttgatggatttcaaccttcggagcctcacacagagtcagatgttgttgttccgcgcctcacaagcagtagtaccgtcaatgccatcatcgttttggggtttgggactttcgctgtcaccaagttgctcaccattgaccatgactactggcatggttggacactttttgagattgttaggcatatacctgaacacaattggattgcctatgagcaagctctgaaagcaaacccagttttggctaaaatggcaataagtgggattgtctactcaattggagactggattgctcagtgctatgaaggaaagcctctttttgagtttgatcggacacgggtactcagatcaggtcttgttgggtttactctccatggatcactttctcactattactaccaactttgtgaggctctttttcctttccaagaatggtgggttgtccctgctaaagttgctttcgaccaaactgtgtggtctgcaatttggaacagcatctactttgtggttttgggcttgttgcgttttgaatctttgactaacatatatggagaactgaagtcaacattcttgcccttgcttactgcagggtggaaactttggccttttgcgcatctgattacttatggtgtgattcctgtggaacaaaggcttctttgggtggactgtgtggagctcatctgggtcacaatactttcaacctattcaaatgagaaatcagaagctcgaatatctgaggcagcatcagaaacagggtcatccacttcaagcgaaaattccaaggaataaacaaattgagaataggagaaaaaatcaatctaggttcatggcagttgcaaaatcaacctcagcaatgaatcaaagaatctatcagttgaaggtccagttgagcgacctgagggacatgaggttttgatctgattcccatacaggatatatacattatacattacacaggtcgtgcatccttctggctaagatcaactattcaggttgcagtgatcacatacttagattattgtatatatgatatagatgcattcagaactcgagttaaattatgttccttttcttgtttgtatcggattacctcatatatccgtatgtctgttgtctgtataaaaaaaattattcatctcatatatataatgatggaaaatgtgaaaaaaactacttaacattgcatctggaattgctcaaaaaaaaaaaaagggcggccaccaactagtgagctc

SEQ ID NO: 134694 - DNA, 501 bp, Glycine max
  unsure (1)..(501): unsure at all n locations
  Clone ID: PAT_MRT3847_92639C.1
cgcacctgaatgctcgtgtttctcatagaagtatattttagatgcatatattgatacagatttaactgataaatgtgtatctgcacacaaatatatatgtatatttgtagaattgtgttgttaatcaacttgtgtgtgtacaatggtcgtgttgtccacatgtttttaaatcttgcctagtgatcaatttgaggtctttccagagccctaagtttgttctttctaatcaaagtgcagaattctttatttgtctttgtagtaattccattaccccagagtaagtcctgtttgattataactggtgattagtagtttaattattattttttcttccatgaacccaaacaaagtcaattatcaacggcagtgatgcaaaaccacttgtttagatgactgaataaagatctcttccctggtggggggtgnggntatatatatatatatatatatttataaatcctgtctatcccggatgaggtgtagagattacctgttcaattt

SEQ ID NO: 134695 - DNA, 439 bp, Glycine max
  Clone ID: PAT_MRT3847_9263C.1
cgacagggtcactgagagaacgatctttacttgcagagatgtagacatctaggttgtgtattatacaatggcaactcaatttagaaaatatctaccacattacattaggtggcatctgtgtaccttgttgatctacattctcccatcttttctcactgctgaaattaaatataagcggaatctgatcaacgtgcatatttccggcttattttacgacggcggatacaaattctggactaaacacgagaaaaatcttgctttgacagaagaggaaaagatggaagagattagaaatagaggcagtcctgctgatgttcttgcaaagcgagcttatgaatttggaaaacatgtggctgatgaaagcctcaaggatcaaattgctgctgatgacgaattgtattctactaaggtgagtaagtgtgcaagactgatgaactta

SEQ ID NO: 134696 - DNA, 208 bp, Glycine max
  Clone ID: PAT_MRT3847_92640C.1
gcacgagcaaaaggcattcttatcaactctagcatttgcagctgaacatgaatctgacattaagatgaaataccctattggtggtttgccgatatgatcagaggacaaagttttgtggaagtttcaaaaaaaggcacttcccaatttggtagatgataaccagacggttgtttagttatgtgttgtgctgaaatcttttagcaatttc

SEQ ID NO: 134697 - DNA, 558 bp, Glycine max
  Clone ID: PAT_MRT3847_92641C.1
ctcaaccctacaaaattgacttataaaaaaatcatcttgtaagttgaggactgttcaggctttgtaaggactacattgaccttatctccaatcgatgtgagatcttaactccttgcgcccatgatccaatgaccacaccccctcacccctgggaatgggaatagaaatctagagcatagacaaacaaaaatggcctaataacggatctaggacatgttttaataccatcttaaaatttagataaattattaacatcttagaataagaacactccctcacgactagggataacatctagagcagagaaatatgggtgacccaataacaaatctaggttagactttgatatctgattagaatttgggtctaattccaccccacaaaatcaccttgtaaggtgagtattgctcaaactttatatcctctatttagaagctatatttctaggtgatgtgggactaaacacacccatcacatctacaattaaggaaactccaaagaggctgcaattaaggcaagttaagggtaattgcaattaaggcggttttccaacaataa

SEQ ID NO: 134698 - DNA, 512 bp, Glycine max
  Clone ID: PAT_MRT3847_92642C.1
ttatttgttgttttgtttttttttttttgtttttttgttttttgtttggtccaacaaactccgtggctaagtggacaaaataaaactgcatttcagaatagctgctttttgctgaaaaaaaaaaatttttaacaggttgttttttgttttttttaaaaaattcctacccgaatcagggtgggccccaagaaaaaaatatttttccaatgacccttcattttgaaacgccccagcggaatttacccctgttttcccatgggggaaataaccttctgggccaatcccagggttaggaagccctttattacagggggggatgggttcaatttgattgggcctaacctacaaacccctacgttccgtgattttcctttgtaaaccgaatgggggcccctgggggcgggttcctttgcaatcaaaaccccccctcaaggttccttaaaaaaaaggggttcctaaggggccttcctttatttttgggggtgctttgaaacagcaggccctgaagcagg

SEQ ID NO: 134699 - DNA, 375 bp, Glycine max
  unsure (1)..(375): unsure at all n locations
  Clone ID: PAT_MRT3847_92643C.1
caggcacgcgggccggaaaacccgggacgacccacgcgcccggccccgcgttcggggacgcgngggaaaccgcaggagagcgggaaaagcaaaaaggcgacnngcaccggccaaaacaaaagcagagggggcaccgaaaaaaggacgagnccagcgacaaccacnncacagcacagaaggaaanaagggcagaaagcaagangccagcacggaacacgaagcacgngcaacaccaaangancgaggcncagaggaggnggccaacgcnggaaaacacaaacaaagagnnggngcccaaggagcaggaagcaaaggaagaccggaagacgccgcacagacaccagangaagagccagaagcgcaagcacaaagcgc

SEQ ID NO: 134700 - DNA, 225 bp, Glycine max
  Clone ID: PAT_MRT3847_92644C.1
tttttgggttcccttttttttcaaccgagttccccccatgaaaaaaggggtacttattgtgtacatgataatgatttcccaaaacaaaacctactctgggttggaagcaaactgagccaaaaaaaaaaaattggggggtaacatttagtccccccaatgacccgccaaaagccgatgggactcttatgacaccactctataagggcgctcgagagatatccaatg

SEQ ID NO: 134701 - DNA, 1135 bp, Glycine max
  Clone ID: PAT_MRT3847_92645C.1
gaaccagaggtcagagcagacccatttaatggccttgtacgcataggtggaagtgccttttttatctacctatacacttgctctagtctgtcctagagaccgtaagttttcactacttggcacgctgtgcagcattgcagctaattaagcaccaccatcactatcttataagggggggaaataacaacttgtgttgtgtctatataatagtggagacctcaaggttgttcatctctttttctcacttgtttgtttcctcatatttcttggtgttttttaggctttcttgttctgttttgtcctatctaagtgttgatcttaaagggggaaaatgagttacttgggtttgggtgttagtcctggtacagttccagtgtaccatggaacaaaactcaaagtgttggataggagggtgaggataacagagctggtgttaaggtgtgtgagccttggtctaggagctgttgcaattgttcttgtggtgactgattcccaagtcaaggaatttttctcctttcagaagaaagctaaatttacagacatgaaggctttagtgttcctggtagttgccaacggactaactgttgggtactccttaatccaaggattgcgctgtgttgtgagtatgattagaggaaatgtactcttcaacaagccctttgcttggctcattttctctggtgatcaggtgatggcatatgtgactgtggctgcagtggtggctgcattgcaatctggggtgcttggaaggacagggcaagcagaacttcagtggatgaaggtgtgcaacatgtatgggaaattctgcaaccaaatgggagaagggatagcaagtgcttttgtggttagccttagtatggtggtcctctcatgtatttctgcttttagtctcttccgtttgtatggccccaacaaaaacaaatatgcaggttggtaggtactattgggagctaccatccccatggttttttcaagttaacaaccaacctactccccttaccactcttttttgatcaacatagtagtagctttttaatttgtaaggctctttgttatagtgaattatgaattatgacgcattatggtgcatttcggccaaatgtgaatttcgcccgtccctgatttcccctttccc

SEQ ID NO: 134702 - DNA, 350 bp, Glycine max
  Clone ID: PAT_MRT3847_92646C.1
ttttgttttgtaattggcacaaacccacgagaaagcctcaacttgaattcaaactaactttataccaagggcaaggaagtaccctcgaagggtcatttcgtgaagtaatgggctaatggccccccacaaacaacaagtcaagttgacattaacaaaatcctaaacgacaaaaaataaagacgtgacatttcttctcacaccaattattgagactcacaaagggatgctttctcttaccatcttggatcccctatagaaacccacctcttttaattttcttaactttctttaattctttgatacatatatcttcatatttatatgcacctcactccccattttccactcaa

SEQ ID NO: 134703 - DNA, 242 bp, Glycine max
  Clone ID: PAT_MRT3847_92647C.1
gcaaaagacaaattaggttcagtagtcttaaaaactgataggtttcccccaaaaaaaacaataggtaggtttctcatcatgactaaaagcttaatgaatccaggtgatctcgcaagatcatatttttgggcatggttcattgcagggtgtgttaaaacttgttatcctacgaatataatcatgattgagtttatgactaacttgaaccaaactgcatgttcctgatataaaatgtataacat

SEQ ID NO: 134704 - DNA, 277 bp, Glycine max
  unsure (1)..(277): unsure at all n locations
  Clone ID: PAT_MRT3847_92648C.1
taacactttccttagttcaatatggggaagcccttcttcactctctctccncnnttccctttgcttgcnacnctngtcgagtgcatgctttgctantacctccagacaagtncaacgagaagccaactcaacaaccttcaacggcgtnggaacccgancancgcgtngagtcngaagnggtgctattgnnacatggaatctcancaccctgagctgcaatgcgcggtgacactgtttcnaaacgnaagctgaagacaaggcntcgactngccagcnc

SEQ ID NO: 134705 - DNA, 518 bp, Glycine max
  Clone ID: PAT_MRT3847_92649C.1
ggctcgaggaaggggagacctggaaatggaaaggaataacctcggaaaggactattcccatgctatgtttcattgagcaagtaagaatacttgagtaatgagaattgagaacctcctaccaactaggctaatcttttgggttaggctctttccatgcaatttttacttttctagtttctacatactatataatttcacttgcatatccatcaaacttgaatcttccttgtgcttttgctcaactaaatgtgcatttgtagagatattgtggctgaatattcaaaacaagtaaaagcgttaggtaccacgatctttgagctactgtcagaggctcttggccttgatccttcttaccttgaagaaatggactgcactaaagcactttatgttatgggtcagtactatccaaaatgccctgaaccagaattaactatgggaatttcaaagcacactgattgtgacttcataacaatacttttgcagatcagattggtggtcttcaagttcttcatgagaat

SEQ ID NO: 134706 - DNA, 402 bp, Glycine max
  Clone ID: PAT_MRT3847_9264C.1
tcgtgaacacccggccggccccatggccggacccgtgttctggggacaaagcgatgttgctcaccttaaacttcttactgacgggaagtctgtatgagggaaagcatattcctgtatctaatattagagcaggggagaatcatgtagtccaaatacccctaatggaacaggaggaaattctgaattctagtgcaagtgatctcagaactgcaatggtgagtaaaaatagcaagcctcaagctactgcaatgcatgtgggagctttagaaattatcattgatagattcgcaagacctgactgcaacaatactggtgcaatgcttttgggtgatacttatcataccaatccctgaaaatgcagactgtagtattcttgttgcgcctttcagcggcggaaggccc

SEQ ID NO: 134707 - DNA, 347 bp, Glycine max
  Clone ID: PAT_MRT3847_92650C.1
ctcgagccgggttaatacaactaacttttgtgtaagaagctgttgtaaattgtatacaactcctcccatttatagttctttttggtggtattgtaattactttttgttaatataggtaatcaatactcaatatcccaattttgtgtatttaatgatcattccatttcaatttcagctaaaatgggcaagattggtgaagtggagaatttattgattcactaagccgtttcacatgctgagcgagtaatctgctaagcgcgacgtccgctggctgagcgcatagaagactctagaaaaagatgagctatacaaaagcgttgagcgagtgtcaactcgctaagcgcact

SEQ ID NO: 134708 - DNA, 298 bp, Glycine max
  Clone ID: PAT_MRT3847_92651C.1
gagctctagcgtagttcatcaaagccggtgccgaggagagagagtccatggcgagtcaacggagagactcatcctgaatccaaagctgaccgctgcaatgaatgtgtctccaaacgactccgcgaatatgggctccgatacgcagatttgtacgatccttactacgatcaggatgtgtaggaggcgatgtgtccgataccggtgaggtagtagcagctccatatacgtatctggatttcgagactctaaagagagtgacggaacctgtgaaacctgagtagtgttgtcttacttacaa

SEQ ID NO: 134709 - DNA, 482 bp, Glycine max
  Clone ID: PAT_MRT3847_92652C.1
tacggctgcgagaagacgacagaagggggcgggtgccagctgttcaaccactttgctttcttcttccttagtttcgtttggttagttagggttttcctttccacaacttcactttcttcttcacttcttgcaatcacacaatacaacaacgcaattcctccacaaactgaaaaaaaaacacacaatttcgctcactacagaactcgcacgtgcccttactttcctgtcacgtgtgcggtggagtttagtctccattagagatgtgggttgaaggtggaaattattgaatgtcgaattattcagcttgaggagttggaacttatttttggaagtattcatcttgtgcgtgtcattactgagttgactagtgtccaaaataggttggattggaggcattcagaattaggtttattgtgtattctgagaaaatagctaaaacggagtcgctttcgtgtgtggctccacggccacatgaatcaaat

SEQ ID NO: 134710 - DNA, 105 bp, Glycine max
  Clone ID: PAT_MRT3847_92653C.1
tcggacatcggctcgagccgcaaggctttggaatcggaccagatggcaggtatagatgtgagcgtccagaattcactgaaggcacagctcatgtctaatctttca

SEQ ID NO: 134711 - DNA, 968 bp, Glycine max
  unsure (1)..(968): unsure at all n locations
  Clone ID: PAT_MRT3847_92654C.1
agtcgaagtttcataattgtcaatactgatttcttgtatgcaggtggcgtnccactgaggaccctgagaaaggtcagatggactgctaaggaaaatcncagtatcatctgaagcagaatagtgaagatcatacaggtggttgcctctgacgcagcctctactttctttatcaattgatgatgtagatgacccatagagttgaacaccatcattcacaccatatgacagaccttcagactgaaatctgaaatcccacctcgtcggaggaggcgaaaaacttgaatttgttcgccagtagggctcatttggacccatggaccagtccctactgccagcatttgattcatgtggccttgaagccacacaacaaagcgaccccgttttagctattttctcagaatacacaataaacctaattctgaatgcctccaatccaacctattttggacactagtcaactcagtaatgacacacacaagatgaatacttccaaaaataagttccaactcctcaagctgaataattcaacattcaataacttccaccttcaaccctcatctctaatggagtcttaatttcactagcaacaagagctccaccattaaaaccctacaattagaagaagcggacgcgtggcaggaaagtaagggcacgtgcgagttctgtagtgagcgaaattgtgtgtttttttttcagtttgtggaggaattgcgttgttgtattgtgtgattgcaagaagtgaagaagaaagtgaagttgtggaaaggaaaaccctaactaaccaaacgaaactaaggaagaagaaagcaaagtggttgaacagctggcacccccccttctgtcgtcttctcgcagccgtacccttctgtcgtcttctcgcagccggacccttctgtcgtcttctcgcagccgtacccttctgtggtcttctcgcggccgtgcccttctgtcgtgttctcgcagccgtg

SEQ ID NO: 134712 - DNA, 800 bp, Glycine max
  unsure (1)..(800): unsure at all n locations
  Clone ID: PAT_MRT3847_92655C.1
cgttcccttctccaaagagaaagaacagcaagcaatcgttacccattacctatttcactttccacaccactctcatcctatatctctttcttccttattcctctgtcaagccactcgataatatgcagagtctttcaccacctacttccaacgcgctcaatttgaagcatgtttttcgcccgcgacttggcgcgtcaagccgaatctctgtcaaatgcgcttttgggtttgagccggtgagctacggagtcggctccagccgagccgattggcagagctcctgcgccatcttagccagcaaggtcgtttctcaggaacaaccctccgctgaccagaacagcggcaccaccgaccacatcgccgccgtcaacggtcacaaagccgccgtcagcgacttccaactcgttccaattggaaacctagcagaggccaacaacaagccgctcccgccgaagccgctcacgatctccgacctctcgccggccccgatgcacggctccaagctccgcgtcgcgtaccaaggcgttcccggcgcgtactctgaagccgctgccggcaaggcctatccgaactgcgaggccattccgtgcgaccagttcgaggtggcgttccaggcggtggagctctggatcgccgatcgggcggttttaccggttgaaaactcactcggcggttcgatccaccggaactacgatctcctccttcgccaccgncttcacatagttggcgaggtccagctcccggtccatcactgcctnctcgctctccccggcgtccgaaaggagttcctcacgcgcgtg

SEQ ID NO: 134713 - DNA, 2036 bp, Glycine max
  Clone ID: PAT_MRT3847_92656C.1
cggctcgagcggcggaggctcgagcttctccaaagagaaagaacaccaagcaaagcatagtaacctaattcactttacacctaccaccctccttctaactcaattccatttttcttccttattcctctctcaaaccataatatgcagactctttcgccacctacttccaacgctctcaatttgaagcacgttcttcgcccgcgacgtgtcgcgcctagccgaatctttgtcaaatgcgccttcgcgtctgagcccgccagctacggggtcggctcgagccgagccgattggcagagctcctgcgccatcttagccagcaaggtcgtttctcaagaacaaacctcctcgctgaccagaacggcggcaccgccgaccatatcgccgccgtcaacggccacaaagccgccgtcagcgacctccaactcgttccaattggaaacctagcacaggccaacaacaagccgctcccgccgaagccgctcacgatctccgacctctcgccggcgccgatgcacggctccaagctccgcgtcgcgtaccaaggcgttcccggcgcgtactccgaggccgctgccggcaaggcctatccgaactgcgaggccattccctgcgaccagttcgaggttgcgttccaggcggtggagctctggatcgccgatcgagcggttttgccggtcgaaaactcactcggcggttcgatccaccggaactacgatctcctcctccgccaccgccttcacatagtcggcgaggtccagctcccggtccaccactgcctcctcgctctccccggcgtccgaaaggagttcctcacgcgcgtgatttcgcatccgcaggcactcgcgcagtgcgagcacactctcaccaaactcggcctgaacgtggcgcgcgaggccgtggacgacaccgccggcgctgccgagttcgtcgccagcaacaatctccgcgacaccgccgccatcgcgagcgcacgcgcggcggagctctacggcctgaacgtgatggcggacggaatccaagacgatccgagcaacgtcacgcggtttgtgatgctcgcgagagagcctatcatcccgcgcacggaccgtcctttcaagacgagcattgttttcgcacacgacaaaggaacttcggtgcttttcaaagtgctttccgcgttcgcgtttcgcaacatcagtttgacgaagatcgagtcctaacgaagatcgagtcacggccgcatcggaaccgtccgattaggctggtggatgacgcgaacgtgggaacagcgaagcacttcgagtacttgttctacgttgattttgaggcctccatggctgaggttagggcacagaacgcgttggcggaggtgcaggaattcacgtctttcttgcgagtgttggggagttaccctatggacatgacaccctggacaccttcctcccggggagattagcatccccttattttgtctttttcatctctccctcccaaaagagaggaaaacaaaaacatatattaaatgtctcatatggattctgaattttgtgaataaaagaaaacataaactcattattttaattatcttaatcttaccccatgtattttcattggtgttcttgtattatctctttctcgtttgtcatattttggggctttagggttatgcaatgaattagaattaagagacgaagagaatacgtacgttgatttttgtacgtagagggatggagaataattagatacgtggtagtgtgataagctagaaagggtagttggtttaatttaaatgcctttgtaataattgtgtgtacactgaattggccactttggttggtgaatacttgttgtgtttctgttaggaaaaaagtatacatgggagagattcatccaaccctaaaattttcttttcttttttggtcattgtcgtattcatattgttgctatggctctttcgtatattctggatttttcggaagtttttcgatacgaaatatgcttaaatggctcgcacatttaatgggaaatgcgagactgggagtagttacaacgttatt

SEQ ID NO: 134714 - DNA, 375 bp, Glycine max
  Clone ID: PAT_MRT3847_92657C.1
gaattgaatttcaattgagttcaacgcaatgcgatattaccctcctgaccattaaaggttcagataaccttttagggaacaagcctcttggagaaggttggttccggtatcaagcacttaaccaggtggaaaagtactgccaagctccagtatacggctcgtcttctcccagatcttcaacttcttcgcagtcatcgaaggcatcgccagggcagtcgtaacatctcagacgatggcatacactgcgattaaccaacacaggactacattattagccatcaatttatattagactctaaaacagttaaccatcaggctttcttttatgctagtgaacgctaggtcgatcacatcgacatatttatagtcggcata

SEQ ID NO: 134715 - DNA, 252 bp, Glycine max
  unsure (1)..(252): unsure at all n locations
  Clone ID: PAT_MRT3847_92658C.1
ttcctgattttcaaaataancaagcgaganacaagnncagtnanancacgagnaccactccaaataaaaagttatcccaggtatttataatgctcctaattgatttntccaatttttccgaagccttgacctctacatatttntantnttctctcttnaatccacttgactatancatattacataatcagctaaattannaanctattattantngttattcanctantangattgcactctaattttaat

SEQ ID NO: 134716 - DNA, 707 bp, Glycine max
  Clone ID: PAT_MRT3847_92659C.1
attatgaacatatctaatatatcaatacattatatctcaatatcaattcagatcttaacattaaccaatttatgaagacttctgacaatggacttaagaagttaagacacatgattgaagccaatgacaatcaatgaactgaaaagttgataaacaagcatttattgtttcttcaagaaggcccaatacgggtggaacatgatctcctcaacaaagctaaaagtgactgaacattttctggaagtttcgtatgctcaacctaccaatgcttaattgcttgaaggtattaattaagaagcctttgcttcttttcctgcttggaggctggccacagagctgctaacatattttacaaagataagcttctggctcatgaaggtttcagacttccctatttgatcaggaagtttcttcacaagtttgatatcaacccttagtggagtgacacctttcacttctcctggttgttgcttatatcatttatcttggccatctgcaaattaagcagttcatgcactctctgctttagctcatgtagccctccttgtgttttgacagatacgttaatagctccattgggacctgatttccggtacttttcaagctcgagttgggagggatgaggctcgtctgttgcatagactacaggagacgtcttcaacaaatcagattttgacacgacatcaagccataaatgtcctcgagcc

SEQ ID NO: 134717 - DNA, 449 bp, Glycine max
  Clone ID: PAT_MRT3847_9265C.1
tggtcgcttgggcggacgcgagggttctgagggggcgtgatcacaggttgccgcaccttaaaaccggaaacaaaagcaatcgttacttgatttcaagaatttctcaatttctgcctacttctttgtgtacgatttcttaagggaaagaaaatcactctctgtgctggtcacagacttcgagaatcatgttcttttccactcttagtgtatttgctgaacactctcctatttgatataggacttcgtgtcagatttaaacttcttctgtttctctctcagtcctctgttcaatttcaagttcaagctggggaaaatatggattagtgctcccactctcctatctgggataggacttcgagggtagacttttttatgtctgttcgttctttaactctcttcttctgactggaccgaattggccgttaaaagtggacttatttggaaaacac

SEQ ID NO: 134718 - DNA, 1232 bp, Glycine max
  Clone ID: PAT_MRT3847_92660C.1
acgagcaaaaaaccctcaccggctcaagcatcaaagaggcaccgtcgcgaacccctgactcccttagaatcaaagcacatgataatggctgtgttgggtaaggtaaaagaagctggacttccattgatgaagctggtgaagttgagagggatgcctattttgcagcaattgcatttagaggaacggctgcttcgaaccagttcagataattggtgccttattaacgagggaaccagttcccctgccattgtaatgggtttgtctgggaaactttcagaactcgttgaagccaagcctgtgttgcaagatcgtatatccatcatcagaaggtttactgggggaggaactgttgttgtagaccaaaacactatatttgttacgttgatatgcaataaagatgctgtttcaaatgtgctaccctttccccgcagtatcatgtcatggagtggtttattatacagtgaagtttttgaagggcttgctggttttcatctccgtgagaatgattatgtttttgatgatcgcaaatttggtggtaatgctcaatctataaccaagcaccggtggatacaccacacatcttttttatgggattatgaggtcaagaacatgtcttatctcaagttacctgcaaaggctcctgagtaccgattaacaagaagtcacatggattttgtttgtcgaatgaaggagtatgtgccgagatcagaatttatagagaaaactattaaggctattggaggccaattttctgtgaaatccattagcttggagtccatagacattccctctgtttctgaatatgttcataccactaggcttctcacagagcaggaaattcaagaggcttgcactattcaaacttgaaaaaatagttacaaaaggcttggcaataatttataagctatagtatgtgagagagaattcatcaatgggggaattgaggatgctgctgtggacataattttttcttttgaccataatttcttctgaccaaattgtctttatcttttggttagaatatttcagatgcttttagtgaaagatattttctttattttgttcttaagtttcaattaccatactactttttctgtataactttaaccctgggttatctttttgttatacaacttttagatttggcagtgttgatgtttgttcaaacgcaaatttctatcttggtggaatcatgccttggcctaataaattggcacttgtacttgagtaga

SEQ ID NO: 134719 - DNA, 345 bp, Glycine max
  Clone ID: PAT_MRT3847_92661C.1
cacttgcgctgttctaataggccatactctgtactgcaaatgaataccaagggggtgctggacctacttatgtccttggccactatacggctgatcttctctgaggcctgacccaagcatgcatacgacaatcttgactgcatatatggaaagactagtgcgaatagcatcaatgactacatgtatgaatctactagctattgcggctgatactagcatggtgcaatgaggaaccaagttactgtatgccataaacgccgatgcttcctcccatacacgataaccttaggcagcatatctaactatatctgtaacgacgcaaccgagagataatgactcacagat

SEQ ID NO: 134720 - DNA, 472 bp, Glycine max
  Clone ID: PAT_MRT3847_92662C.1
gaatgaacaaagctagtattatgcaacaaagaaaggcacagcaaagggaatatacaaaggggtaagactgcttccacctatgtatcactaactgacaagacatgaaaagaccaagtgcctataaaaaaaggacagcatgagcagcccaaaggctgatctataatgccgggataaaccagtcaagagacccaacatccctacatgccgtacctagaactttcttggggaagaggaccttgggctacattgatggcttgagatctgaactgagcttacctccatatacaaggtgctgacatggagaccatgccaagcatgcgacattatccctcgccaggagatccacatagagcccatcctgcagaactatcatgcgaggttaaacaactgttctgttgaacaaatcaaccctttgtggtgggagactcaccgctattggtggatctgggacattcactccacccacctcaat

SEQ ID NO: 134721 - DNA, 549 bp, Glycine max
  Clone ID: PAT_MRT3847_92663C.1
aggttactgtccatcaaatggaatctgctatttgcctacgccattgcccctttccctatggttccaaaggatttcaaggtgcaaggcctagcagatttcatcatcttaagattaaccatgccacccctctttctctccctcaaatttccaccaccagaagctcggttacacgttcatttgggcatgtaaattgcatgctcgaaagattcatctctatgccctccgagaatgagggaagtggcaacagaattttgagaggagtggcagcagcttctctggttctgacatgtgttcttggattatttagttttagtggcaagaatatgaatcctaaactcactacagcttatggtaatggattagaatttcctatttctaagcctcaaggaaggtttgctctcaagtcactgttggaaataccgaaagacgaagaactcgcagatactcagaataagatgcgttccaactttagtgtgcgtggacctagccagcaagaagttaaaaaccttaagtggctcgctattggtctaagcagccaatctccggata

SEQ ID NO: 134722 - DNA, 450 bp, Glycine max
  unsure (1)..(450): unsure at all n locations
  Clone ID: PAT_MRT3847_92664C.1
ccgtccgatcactttaccaattnggctaaagtatatttcacttttctgtttcantcactactaatacccagctttctggggagatgagcttcatactgtcgtctggacagtgcgnnntctatcttcccnncttctagnntgatgtgttgcnnctttgcnntggggaccttaatacacaagaccttttgaccatcatcatggtggaggatggcacgtctccaagtatacctactaaccatggagaagttacctcactcgtttcaattggacaaaagcatctgtgctcagtgttttcaatcaaaagaatgatgtattctcttttgggaagatttgacaatgcagcttcaagccttgtctcctggaaacttgtgctggcaccggcaactgnctattatttatcttcaaaaggatcaactttgggatgaaatagactttgaattttcttggaaa

SEQ ID NO: 134723 - DNA, 247 bp, Glycine max
  Clone ID: PAT_MRT3847_92665C.1
caacctcggtgctcccgagccgatgacgggagacctgagtagacgcgggctggggcggcgcggggcgggcgggggaggcaacaacctagtgcgggggataattccgaggaatgcgcggagtacgagaaggacatatagcgggaaggcacaccttgactggaaaggtttaaagaggcggaggagacgaaggactgtgtaatcggtaccacggaaggacgcgcgggttctgaatcgaaagaattcctct

SEQ ID NO: 134724 - DNA, 243 bp, Glycine max
  unsure (1)..(243): unsure at all n locations
  Clone ID: PAT_MRT3847_92666C.1
ttttacgcgttcgtggaaaanggacaaaacggaaagaactggtaccgtttacaacagagggcccaccttacgcgcttccacacaaaaaaggtgaaaaaggcaaatggtgattcgtttttggggatggagaagagatgacattgaaaccgggaaccaccgaagaagaggcttacaacatgctaattagctgaaccctgaaaaaatgtgcctctacatcggttggcatttgtatgtgccaaggat

SEQ ID NO: 134725 - DNA, 428 bp, Glycine max
  unsure (1)..(428): unsure at all n locations
  Clone ID: PAT_MRT3847_92667C.1
cccggaggaccggcccggaaaaattcccgggacgacgagcttattagtcggcggccagccctaanaanaaggggggggaaaatgaagancncgggggggacacaccccaaaaaggggacaggganaaagccaaagacaaagcacccacaanaaggnggcacaccagaacagagccaccaagggcgccccgcccaacaccnnnaaaaggggacanggacaaagccaaagacaangcacccacaacaaggcgcgacannagaaaacagccaccaagggcgccccacccaacacaaggcccncaagggaancgaccaacaaccnccccnncggcaaccgggaaccaagcnggagcacaccacccaaagcaaagagcccaaaccgaaccccgngaccaaggcggggcagcccgggcccagnccacccaggca

SEQ ID NO: 134726 - DNA, 1132 bp, Glycine max
  unsure (1)..(1132): unsure at all n locations
  Clone ID: PAT_MRT3847_92668C.1
cacgcgtccggagttctaatggtcattctttggagcctgcggccttgaaaacaaatgagaatagagaaaagttgtatcattgctgtgatggaaccctgttaagtagtaatttcaaaaatgaaaatatgccaaatcaaatgccatttcacagtctgggctcagctcagcaagtaggtcatcagtttgaaaatgaaaatgaaggtcatagtgaagttcaaggagttggcctaggcttttcaccagaaatagattcatcaacagtgcaggaaagctcatccatgggctctgctttggaccaagcctcacctgaagcaaatagcttttgccacctgcaacagatcatggatcagttggatattaaaaccaaaatgtgcattagggacagtctataccgcttggctaagagtgctgagcaaagacataataattcaaatgcaaatggttgcattggagatgatgaaacatgcaaagcaatgatggcgcaggatgcaaacaggtgtgccggattaatggatatggaaactgacacaaaccccattgatcggtctgtagcacacttactgtttcacaggccctcagatccatcggtgttgcttcctaacgaaactttacctttcanatccagtgccccgatgcataatggatcagtgatcaatccaccagtaaagactgagaaccaggtctgtcaggaagattctactggagtggaaaaaaaggttttacagggtaacacctcatgaaagtgaacccagcgttggcgcatttcgtcgcacaatttacattttccggtcatcgtcgtatatgatgatatataattatttcgggcttactcggacgcctttgttaatttgtgaatcatttttgcatcggatcccatgaaactaatgtaaatttgtcctaaccaaatcatcataaggtaatgatttagtgtaatgctcccacgctcgcacactattttcccaagaaagatcacaattatcccgcgcagcccatgactcactcatnaaattaatatttttttggccccacctcaccaagttatttgtttttttggcacacacttatcagattaatttaacactagcgtcacttgattgccccatttgttttttggaatgaaccctttctcatg

SEQ ID NO: 134727 - DNA, 249 bp, Glycine max
  unsure (1)..(249): unsure at all n locations
  Clone ID: PAT_MRT3847_92669C.1
tgacagttaaaaaaaattataatactacgcaatncccaatctttttgcattgattgtttaccaccccaatactaatttagtaattagaactttgatgtgcatcaggtgcatatcactttattccgttaactagttttatgattctggattatgtacgtactagtgtatgtgtaacctgttatttcactacatatgaaggttggtatgtcgtggggagatactaatatacgtaaatataaatatagtngg

SEQ ID NO: 134728 - DNA, 380 bp, Glycine max
  Clone ID: PAT_MRT3847_9266C.1
cttgaacgactctcttacattgatggtttgcttactggcatacccaactacaaagctggtgtacctactcgagaggggcttaacgcaaaagatgctcccgaattggctagcatcaactatgagtagtatgaattgcaacccaacgaaggtcttgcccttgttaatggcactgctcttggtactccattagctactctgggactcattgaagctaatatactatctgtgtatgactgaagttctatcagctaaatacgctgaagtgattcatgggaaacctgcatacactgaccatttgacacacaagctagagcaccatcctggccaaatcagaggtgctgatattatggaccatatctcggatggaagctactacatga

SEQ ID NO: 134729 - DNA, 301 bp, Glycine max
  Clone ID: PAT_MRT3847_92670C.1
gagaacgcttttcatcacacataagaagaaaaagaacaataactaaacaaaaaccataatttttttaaaacctctctcttcgttcttttcatccgccgccggagaatgaacattccggcgacccaaacttccccgtcaatgaacaatgctcgtctctccgacaaccgtcgcaacttgttcaacgaaaccactcacctcaaaaaaaccttcaagcggggaggctaaaagaaagaaaaaaaaaaacccgttaataactaaataaaaaccccctttacttaatttttcctttttcccctttttt

SEQ ID NO: 134730 - DNA, 398 bp, Glycine max
  Clone ID: PAT_MRT3847_92671C.1
acgagcttgctgtgctcagatccctatgcagctctcactctggccaaatctacatcgagttcctttccaatttccactttgaattccgcttaaccatctttcacttaaggcacccagtgtcaacaacccttggtcctaagaattttccaacactttaacttaattggggtggaccattacaagcaccaaagccgcttaaatgccggtcccgagaggcccccaaaaccccagtgcaataaggcctgcacctgaagttgcagcttctgcatctgatcgtccatcagctgaaagactcttagaatctgaagatgctttgtggagatctttaaggccacatactatacctggtacagcactaagttcattggtaaaccaaccttatttacctatagctgctg

SEQ ID NO: 134731 - DNA, 491 bp, Glycine max
  Clone ID: PAT_MRT3847_92672C.1
ccacgcgtccgctccttttcctccttgtttcttagtagccgctgaaaagaagtctgcaacaagtagatgaacatcaaaacaaaagcaaataaattatttgtaagcagaagttggggcaaaaacacttatttcttacatctataaaatgtcacattatttttagaaaaatcaatgactttttttatcgacaaatgttagcgggtaatattgttttgttagtggagggattcgaacctacgacctctcctcccttccctttacccttcaccactagaccttcttagtttttacttgaagtcaagaagcagatccaaatatttttattttgggagtcaaagatagaaatggtgccaccgaaagatagtagctagttcagaatcttactgagaatgtcttcgcaaagaatagtaggttttccaatgaaatgaaaccagctcctctgttcaaaaaaatttggtccagaagaaatgaaaaatgacatgtcaagaagg

SEQ ID NO: 134732 - DNA, 1273 bp, Glycine max
  Clone ID: PAT_MRT3847_92673C.1
tctcgccccccatttctctcttctcacttccttgtcttcctctctctcaccctttgaaattctctcacttctattttagattctcaattcgttattgtttttggttcacttggttcatattcaagcccaattttggtgtctcacttattggttttccaattggagtgattaaaaagttgattttgggaaatgggtatgtgaagtttggttttttgatttctgggtcttgaaattgaggtaaaaaagttgtcaaattggagagaaaattcggggtttttttttattgtggttggaattttgggtactgggtctaagcgataggcattgggggaagagagagtgagtttgtgtaagttgcgttgtgtgcgagaatgcctgcgacggactaccaaggttcgtcttctccttcatcgttaacccattttggccgttcaattctgagtcttcgtcaagaacaggttcactccatttccatggaagggtcaagcttggaggctgagttggaatcctttcagcaacacgtcactgaccggttccttgaactcacttcggttgttcatgatgatttgctttcgctctcgtgggttgggaagctccttcattgcttcctgtgttgccaagaggaattcaaggccattctccacagccacagggctcaggtgttgagacccccattggatcgcatggtgtctgaatactttgagcgcagtgtgaaggctttagatgtttgcaatgccattcgtgacggtattgagcagattcgccaatggcagaagctgttggagattgtgctctatgcattggggcatcagaggagcattggtgagggccaatttcgtagagccaagaaggccctcattgatttgcacatcgggatgcttgatgatcaggactccaacgcatcaattgcacatcgaaaccggtcctttggccgcagcactggtagcagagacagtcatagtcatggtaacaatcatagcaataataatacctatcaccatcggtcattggggcattttcgatcactttcgtggagtgtttctcggacttggtctgctgctaggcagctccaagcaattgggaacaacatttatccacctaaggcaaatgagcttatggcttctggtggccttgcaatgcctgtgttcatcatgaattctgatcctgttcgtgtgtgatgttggcacttgtggctgcaattccgtgccaggaccgtggattacatgttcattttaccattcccaggaattactcctgggctgctgcaatcctc

SEQ ID NO: 134733 - DNA, 157 bp, Glycine max
  unsure (1)..(157): unsure at all n locations
  Clone ID: PAT_MRT3847_92674C.1
attgcnactnttcttcctccgttgtcgacnaccaagactgcgtcntcacctctccttccggnaaccgnttcccttcgatctaaaactcccgcngcccgatgccgcctacgacnattngacgttagtccccgcnacgcgtgtgctctgatgaaaaaaa

SEQ ID NO: 134734 - DNA, 342 bp, Glycine max
  Clone ID: PAT_MRT3847_92675C.1
gtgcgttggggggggggggggggaagaggtgaaaggaaagaggagggggggggagggggaaccgggggggggggccggaatgcaaaaggtgggtagcgcggatgagggggttaagtttaaaatagcccgaaccattggaaggtggcaaagcaatggtagagggcccccgctaaataattccgggtaagctaaacggggaaatatgcgggccataagaattcagctagtatggcgctagggtaaaataccacccgaagtataaagcgggagcccgcggtgtaggttaaggggatgtggggacggccacagtatgcaaagtcccggggaaatggtgaaacaatg

SEQ ID NO: 134735 - DNA, 936 bp, Glycine max
  unsure (1)..(936): unsure at all n locations
  Clone ID: PAT_MRT3847_92676C.1
gattagtgcttaatttctactttctacttctagctaacaaagttaagtaaactttcgcttcagtactttatatatatataatggctgtggctttgacgattctggtgacccttctctcggttctctcttctgcatcgtgtgcacgaatggttggggggaagacggagatccctgaagtgagaaaaaacaggcaagtgcaagagcttggaagtttcgacttaatttccacttctaattaacaaagttaagcaagcattgacttggtacctataagtagtaatggctgtggctttgacgattgtgttgagcttgctctcggttctctcttctgcatcttgtgcacgaatggtgggggggaagacggaggtccccgacgtgagaacaaacagggaagtgcaagagcttggaaggttcgcggtggaggagtacaaccgcggtttgaaacagtggaagaacaatgggagtgaacagttgaacttttcggaggtggtggaggcgcagcaacaagtggtgtcaggaatgaagtactacttgaagatctcagctactcataaaggggttcacaaaatgttcacctctgttgtggtggtcaagccatggcttcattccaagcaactccttcattttgcgcctgcagcaccatccagtaaagatttttgagatgcatgcatgctagctatttggagctaattaattatataataattaataaccatggcggtatttgtaattgcaagtgagctttttgattttcttctactaaagttttcctctactttttgtaatgggtatatctgtgggcagaacaacaaaaatcaactacgagttgaaatcttacttaccagccatatgtaccaaagaaagtgaataataactatatatatgctatagttttgttctaaacttcttctgacttctgagtanngtttctgtggt

SEQ ID NO: 134736 - DNA, 461 bp, Glycine max
  unsure (1)..(461): unsure at all n locations
  Clone ID: PAT_MRT3847_92677C.1
ggctcgagctcagaccaatccccttttcaattctcatagcatagatctccattttccaattcaaaccttttcccctttcttccctttcttttcatcatcctaattgttgttggagttcacattcggtgttgctttagttattattgtggaatagttagcgttttagattttgaatgtttttttcttcttgtgattgattttcaggttggtacttatctacaatctgcatcatggaaggtgttattctgagaagggtcattccttcggataacagttgcctcttcaatgcagttgggtaagcaaagcaatggaatacaacccccttttagtttcatgttgtatcggtattactgctacttgtacanatgattccacttggtatgttctttcttctttttttgtgcttaatcatttcagatatgttatggatcatgacaaaaagaaagctgctgagttgagac

SEQ ID NO: 134737 - DNA, 613 bp, Glycine max
  unsure (1)..(613): unsure at all n locations
  Clone ID: PAT_MRT3847_92678C.1
cttaatttctactttctacttctagctaacaaagttaagtaaactttcgcttcagtactttatatatatataatggctgtggctttgacgattctggtgaccctgctctcggttctctcttctgcatcgtgtgcacgaatggttggggggaagacggagatccctgaagtgagaaaaaacaggcaagtgcaagagcttggaaggttcgcggtggaggagtataaccttggtttaaagctgttgaagaacaacaacgtcgacaatgggagagaacagttgaacttttcagaggtggtggaggcgcagcaacaagtggtgtcagggatgaagtactacttgaagatctctgctactcataatggtgttcacgaaatgttcacctctgtggtggtggtcaagccatggcttcattccaagcagctcctccattttgcgcctgcatcatcatncaccaccaccaccaccaccaccatgcatccagtagtacgtaaagataattgagttgcatgcgtacgtggcttgctttaatttggagctaattatatgataataataaccatattaagggtaatttcttgactggatacatgcatggcgggtattttgtatttgc

SEQ ID NO: 134738 - DNA, 316 bp, Glycine max
  Clone ID: PAT_MRT3847_92679C.1
caattgagcaatgatgactatgatattatgtgtcgaagcaaaacatgcttttggtgcgaagagtacaacttacttagaaatatgataaaaatggctgcacagaggagatagctcaaaaagttgtaccaaaattatagtccagcggggaacaagaatttgtagaggtgtaacttaaggtaagctttaatactttaacgtgaatgggatgtggataatgagactagcttgcctattacatagaacaaatcaaatgctaacggatttccgagacactgccactcagacctctataatcaatgtcgattgaagggaaaaa

SEQ ID NO: 134739 - DNA, 645 bp, Glycine max
  Clone ID: PAT_MRT3847_9267C.1
cgatgagtcaatcgcgcgtttgacttcatcaggctcgctcaaacacatcgatttgatgttcttggaccactacaagcccgcttacacaaccgacctcaagctttgcgaagagctagggctcatcaccaaaggctcagtattggccgccgacaatgtcatcaagccaggcaatccgccatacctggagtatgtgcggtccagtgtagatgagaaagtgaagaaggcaaagcagggcggagaaagccatgtggatggcattgcggagacgaatgtcaagatgtatgagaagcgctacggcaaggcaaatttcagccagagcaaaggcaatccaaatctggtctatgagagcaagttgatcaacagctacgagccgacaggagtaccagacggtattgaaatcactaggtgtgtcggttgagcacgatgagaagtcacagcgaattcgcgtgtatgagaccggatgcggttggaaaaggcctcaaggggaattgcgtaggagagtcgaagatggacgacttgtggttcaaacaactctttctatcagcttccttcctccacacaaattgagctacaccatctcgaaaccatactttaatcgacacattactattggtcataatacataagagactgctcgttgaaaaa

SEQ ID NO: 134740 - DNA, 482 bp, Glycine max
  Clone ID: PAT_MRT3847_92680C.1
tacggctgcgagaagacgacagaagggcattacatgcgccatttacaagtacaatactacactgtactccgaagtgggggtgtcctacaaattacgggcaacagcaggaagaaatatatgagtaattttttttataacttttttttttacttatttcttttatattttcaattatagtaaatatgatgtgttttatatttttaagctattgaatatattttttttgtctaatatgtttttataattagaagaatctctaaaatgataaaatattactcttactaaaaaaacagaaaaaataattttatatccttatatatattttttattaattaaatttcgtcattacctcaagagttgatttttaacaaatcacctattatttattttcaaatcttttaatcaatatcaaaatatccacccaaattgataacagcaaccttcctacattccaaaagcaacatatgtaaggcaaacacaat

SEQ ID NO: 134741 - DNA, 409 bp, Glycine max
  Clone ID: PAT_MRT3847_92681C.1
ggaattgtgagtttaaaattgttccattttaagttctaagggaaggggaaaaaaaaaagggggggggggaccggggaaaaaaaaccgtattaaaacaaaaaaaaattggggggaaggcacaatgaaaaaaaaaaaaaggggggggtttttcgaaaaaaaagccaaaaaatcctgatttttggtttatggaaaaaaccgggaagttttaggggacttcccaactcccggctaataagagggctataaacccctggagcagttaagaaaacccctgtggggttgaggccctgcaaaaagggaaggggtaaaaatgggggctggcccaaagggggtgtactgagggaccgggttccctgggtcgccggaacaaaaggaaagggcctcccccattccataccccggggggaat

SEQ ID NO: 134742 - DNA, 2774 bp, Glycine max
  Clone ID: PAT_MRT3847_92682C.1
ggagagtgagagagagaacccataacagctagttaatggccctcgctgagaatctactcacagaatctactctctttttttctaccttagattccttctccaacaatggctctcgccgtttccactacttcttcctcttcagcagctgctgcagcttctagctccttcttctctcgtctcggatcttcctccgacgcaaaagctcctcaaatcggttcgtttcggtttccggagaggtcgcttgtttcgtctgttgttgtcaatgtaactcaacgacgctccttggtgaggccactcaacgccgaaccgcaacggaacgattctattgttcctcttgcagcaactatcgttgctcctgaggttgagaaggaagaggaagattttgagcaaatagcgaaagaccttgaaaatgcatctcctcttgaaattatggatagggccctcgagaaatttgggaacgacatcgctattgcatttagtggtgctgaagatgttgctttgattgagtatgcacatttgacgggtcgaccctacagagtgtttagtcttgacactgggagactgaatccagaaacctacaaattttttgatgcggttgagaagcattatggaattcacattgagtacatgttccctgatgcggttgaggttcaggcattagtaagaactaaagggctcttctcattttacgaggatgggcatcaagagtgctgccgagtaaggaaggtgaggcccttgaggagagcccttaagggtctcaaagcatggatcactggacagagaaaagatcagtctcctggtactaggtctgaaatccctgttgtccaggttgatcctgtttttgagggactggatggtggaattggcagcctggtgaagtggaacccggttgcaaatgttaatggtctagacatatggagcttccttaggaccatggatgttcctgtaaattcattgcattcccaaggatatgtttcgattggctgtgagccgtgcacaaggccagttttaccgggtcaacatgaaagagaaggaaggtggtggtgggaggatgccaaagccaaggagtgtggtcttcacaaaggtaatataaaacatgaagatgctgcccagcttaatggaaatggggcctcccaagcaaatggatctgccactgtcgctgacattttcaactcccaggatgtggtcagcttgagcaggtctgggattgagaatttggcaaaattggagaaccgaaaagaaccctggcttgttgtgctctatgcaccatggtgccgcttctgtcaggctatggaggaatcatatgttgatttggcagaaaagttagctgggtcaggagtgaaggttgcaaaattcagagcggatggagaccagaaggaatatgcaaagactgaactgcagttgggaagcttccccacaatactactcttccccaaacactcttctcaaccaattaagtacccttcggaaaagagagatgttgattcattgacggcattcgtgaatgctttacggtgatggttaattgagtatcttgctcaatgttccgtcgtacaataccggcaataaatttcttcacagttttggcaattcactgaaaatgggaatggcagttttgacagcaaaacgaagattctcagctagcagtatccctgtataggtttagataatcttcctcacaaatataattgtagtagtcattctgagaatgtgatttcctgttttgttagatgagtagagttatggttgtattatgttgtttcttcactatcataatctacttttttagttttgccagatttccaagaacgaaggctaaatagttcagcttatgttccgtgtgaaataatagtgtccctgtctcgtatgttttcatggaatggttctgttaaaatgttctagccacaacggaacaaaaaccaatttggatttgatcattggtttcctatgtttctttcctgcaatgagtatgcaataacatgtatccgtgcaatattaaaaaataaaaaaaaaatatcaggaaattttcttggtttttgggttgcaattccactgtgactatacgtacagcgggttccttctttatgctattacgtgtatataccattcgtttacagattcttctgtgaactcgttgaaagtgggaatggaggtttatacaaataagatactcagttttgaatggttttatactaccatcttgcgtggttgtattgtagtagtcattctgtaggggagtaattgatattcttcttttctagatgagtgttttatttataattttcttcttttccttttatcgccgctgactgtcctattaaatttcatactaagtgaccaatcagttaattttgcatagcaaaacatttttaaattcaattaccacatctctactacctttcatttaaattcaaatgaagtcactcggttctcaatagttatgccgctgatacttaagtgagagttgagttagtcaagtaaaactattgtgtaatgtgggattagatacaggggcaacaaaataattcaaaatactaaaatgaccaagaataattttggcattttatgttaggtatgagtatgattgaacacgtggtaggaaattctaccttctcaaatattttagcagcgaattagcgatgatctgatggaaaagcaacagtgaatggaaagtgggaaaagtaaactcttacaattaccattttgcttcgtcgccagaacaacttattactgtttcaagttcaacagcaaggctgcaacaaaaaaaaaaaaaa

SEQ ID NO: 134743 - DNA, 349 bp, Glycine max
  unsure (1)..(349): unsure at all n locations
  Clone ID: PAT_MRT3847_92683C.1
ctcgagccttatcttttcgagctgattacaaggccagggtagggtcacaacttcaggagggggcgtgtaataatctggaaatgcaagaagcttatcttgtcaatctcgtaaatgtgttactagaattgtatttgcacagtccatttgtagctcgccaatttgtgaaggaaagctctctctctnnttcaactgcttctaaaagtttaatttcctaccatatctacatattgtagagttccatcctatgcataggatgattaaatgctccttcttcaaatgataatacttgatttactgttgaacattttatcttttttcgttttacaatcgagcatgataaaaccttttt

SEQ ID NO: 134744 - DNA, 693 bp, Glycine max
  Clone ID: PAT_MRT3847_92684C.1
aattcgacatccaattcactcaaactcagtaatggctctgcaggaagaagggtggcctttgggtttgagactattcaatgaaagaattgggttagcaagaaatggtgatttctctggatcagtctccttcagcactatgctcactgcttctcccacccgttcaactgattcttcctcagatcttgacacacagtccactggatcattcttccgcgataagagcatcactcttggcagccttattggtatttctagcttcctagaactatcaaggagatcaaccaggggaagaatattggtggaaccctcaaaggacaacaaaaagattaacaagctgaggccttggttgttctcactttgttcaatgctatctactgatgcagtgagtgtgaatgttgctccctctcttggtcactatcttgtggcagagagaagagctgcaagtactcacagaaggaataatcaatgttcaaccatttatggacctaatgatctctcccaagttcaggagtccaactcgctatttgttggtggccaaggtgctgctcatagttcatcaacttcactaggtgaagatcgtggacgagagtcaaatccagcattggagcaaagcaatgaatatgcagcaccaataatttgttgtttgtgcagataaatcaacaaatgatgatcgccctttgctactcatttcct

SEQ ID NO: 134745 - DNA, 611 bp, Glycine max
  unsure (1)..(611): unsure at all n locations
  Clone ID: PAT_MRT3847_92685C.1
tctcccacgcgtccgtacggctgcgagaagacgacagaagggggaagaaggcaaatcgcgaagactagatctgatctgagagaatggctcctcggtctagcagcaaggacgcccaagaccttttccgcgctctttgatcattgatctctatgtcatctatgccgtattcaccgctttcatccaggttgtttacatggctttggttggatcatttccatttaactccttcctatcaggagtactttcttgtgtaggaactgctgttcttgctgtttgtctcaggatccaagtgaataaagagaataaggaattcaaggatcttgcacctgagcgcgcttttgcggattttgttctctgtaatttggtgcttcatttggtgatcatgaacttccttggttaaattgggtttgtgtggcggttgttgtttctgattgaacccttggataataaaaattaaatagtagtatacctagacttttgtaatagtatttatagacagtagtcggcattctactaattgcttagcttaatgttgattacccccgcccccatttttggttccctgtttggaacgaaaagatttgccatcttntgaagtttaagtacctttg

SEQ ID NO: 134746 - DNA, 823 bp, Glycine max
  Clone ID: PAT_MRT3847_92686C.1
tttttcccacgcgtccgcccacgcgtccgcccacgcgtccgcccacgcgtccgtacggctgcgagaagacgacagaaggggagagtgaagaaggcaaatcgcgaagactagatctgatctgagagaatggctcctcggtctagcagcaaggacgcccaagaccttttccgcgctctttggtctgcttatgctgcaacccccactaatctcaagatcattgatctctatgtcatctatgccgtattcaccgctttcatccaggttgtttacatggctttggttggatcatttccatttaactccttcctatcaggagtactttcttgtgtaggaactgctgttcttgctgtttgtctcaagatccaagtgaataaagagaataaggaattcaaggatcttgcacctgagcgcgcttttgcggattttgttctctgtaatttggtgcttcatttggtgatcatgaacttccttggttaaattgggtttgtgtggcggttgttgtttctgattgaacccttggataataaaaattaaatagtagtatacctagacttttgtaatagtatttatagacagtagccggcattctactaattgctttagctttatgttgattacccccaccccccatttttggttccctgttttgaacgaagagattttgccatcttttgaagtttaaagtacttttgaatggcgaaataaagaaggtattgttattattcacatggaaataaagatataagcactagtccaaaacactcagaaattggcaaattgtagtcttctttgaaaataaaatgatgattaatggtcgcagaac

SEQ ID NO: 134747 - DNA, 469 bp, Glycine max
  Clone ID: PAT_MRT3847_92687C.1
acaagaacttgcattacttgccttggggctcctaaagtaggtcccatctaccatcaggttgttgaagctacctacgtgtccattattggactaggaatcttaggagttgaagctatgttggtcatgcaggtatctaggagcccggcataccgcgttttccctgagtgccatcccggtgggacctatctatctgcagcggtacactacgggtggctccctggcttaacgtcgccactgctttagcggcaaacactttcgttgcatgtgctgtccatgacccatgggcacctagccctagagactttggatgcttaacccgacctaccggagcggacctgcctcgtgattcatgacctagatcatgctgttcacaaagccccacggtgggatactctttgatgcacagcccatgataggatgttgaatgcacgaatctcggaagatcaggaacgagctggctgattcgggc

SEQ ID NO: 134748 - DNA, 157 bp, Glycine max
  Clone ID: PAT_MRT3847_92688C.1
tacggctgcgagaagacgacagaaggggcagacgtggcgggttcttcagttcgtcttcttgcagttcattctgagttctgggagttccgaggtcagccgcagttgagctgcggtgcgcgggtatcggggtgcgacgtcagttgcggttgtttgcatt

SEQ ID NO: 134749 - DNA, 328 bp, Glycine max
  Clone ID: PAT_MRT3847_92689C.1
attaaacttgggtttccgatggtggactaggagaatgtctcaaaacaatgataagggtggaaagaaccattttttctggagtgtgccaggcaggacgacgagaagcgggatcttgtgttcaaggaggacggacaggagtacgggcatgtgctctagttgctgctgaacggccgctgcgaggcgatgtgtatcgactgcaccaagtgtctctgacacatacggtgcaagatacacaagatggtgtgaaatcgcggcaagaacataattctcgtcagtctccgtgactaccaagacgacaaggtcgacgtcatgctcaagtacatgcccg

SEQ ID NO: 134750 - DNA, 522 bp, Glycine max
  Clone ID: PAT_MRT3847_9268C.1
cttctgtcgaaacttttaaaggtcccatgagggttcttaatatggggcaatttaaaattgcacttcccaagaacacagtcggaggaaccattccgcgtagggatctactggcaaattttttgacagagggcacttgtagagcaagtgttgatttgcagcgcactcatcgtatttaaggaatgattaacatggtggccacagttggtattcctgagaatacaggtatagcattggcctgtgctatgaatagtgcttttagggggcgcgccagttctgatattaacaccacctgctctcaagactgcgaattatggaatactgctagcacaaaagcaatgactatgtcatctaatccaaatgcgtgttctgttgcatgggagtcaggaatttctgaggcgtaccggagtataatcgagatatcattttgtgtcactggatggactgccaccccaatacatgatgttcaaggtaccattgattgggttatttccctctaggaatgcgttcccagtaccccaatgg

SEQ ID NO: 134751 - DNA, 613 bp, Glycine max
  unsure (1)..(613): unsure at all n locations
  Clone ID: PAT_MRT3847_92690C.1
tagttttccttcaaaaaaacgagaccacttcactatcgtaagtcgtaacgagcacagagacaggctaaacccacaacacacaaacaactgccactcaaacatttacctcacaactgtcgcctcagattatgccatagctttggatgctattgcaactggaaatacatactattgaactcattccggtttaatgtttaaacactgaccaagccgttaagtaaaacaattgcatcattgtctgatgtgggtgcttcagattccccaatttgtcagacatgttccatctcaaagtcacctctgctacacttcccatgtctcctcaagagtgccggtctcttttgtttcattgaacccttcagccaatctcatcaatgacataaacagcaacaacaaccagttgatacaatcattatgcaaaggagggaaccttaagcaggctcttcatctcctgtgttgcgagcccaatccaactcagcagacttttgagcatttaatttattcttgtgcacagaagaactcactttcctatggccttgacgttcatcgctgtcttgttgatagtgggtttgaccaagaccctttttagctnctaaactaatcaatatgtactatg

SEQ ID NO: 134752 - DNA, 492 bp, Glycine max
  Clone ID: PAT_MRT3847_92691C.1
agtcttatccaaatttttatagatttttgggggggtttgatggttttgaacaatgggggggggggggcactttaaacattgggaaaattaataataactcacaggaaaagggtacaaaatttaggggtcccgccagaagaaaagagccaggggaaacctggggttttaagcaagaacaaattaacaaaccctggtttagctcaggtttttttagcttacccgcttggtcaggttgaacaccagggttaaacaaaaaaagcccaaatttttgagtttatttaaaaatccctttaaaacttacctttgtaacacatggaacttttggagtggccggggtttaaaatttggtttttcaacatgaaaagggggggaaataaaaaagggggctttttattattttttaaattggaaacccttaaaggccttggcggggggttttttaagtttttgggatgggaaaagatttttttcaaaaagaaatttttggggggc

SEQ ID NO: 134753 - DNA, 539 bp, Glycine max
  Clone ID: PAT_MRT3847_92692C.1
tctttatattttgcacgtaaaaatgcaagctgttttctttgcagcccatgaagctaccgtaatatctcaagacgcattcccacactaaaacactgatatagaagccgttgttgaaaaacaactcaaagcaagttcttttgcatacacacaccaagctaatggctactaccacattctgtacatacctattccttcttctctgtgtgtacctctcaatcttcataaatcttagttcatcttcatcagagggtgatattcttctctccttcaaggcctccattgaagactccaagaatgccttgtcaagctggttcaacacttcctcaaaccaccactgtaactggactggaatcacttgctgcaccacaccttcactctcagtaacttctatcaaccttcaaagcctaaacctttgtggagatatctcatcttgaatatgtgaccttccaaatctggattatctcaaccttgctgacaacatcttcaaccaacccatccctctttatctatcttagtgtaggtctttggagactttgatc

SEQ ID NO: 134754 - DNA, 474 bp, Glycine max
  Clone ID: PAT_MRT3847_92693C.1
cccacgcgtccgctttgattgaaaggttgcgaggtccattgatcaataggagttctagctgttggacagtcacctcagttgttgagtacttacatgtgcttccttattctgaaatactctcagagtggatttctagagaaacattctcaaatagtttgcaaggttcaaggctgtcagagaaaaacacgatgatgggctgccctgaagtgaaaaaatcatatataagtagtgagggcatgtctattggcctcgatattaagccaagcattgatgctattgaagcacttaatcagaacgagaacaatggaagctgtgcagttacatgttctgcttctatcaaggattcccagaatgtgtatgtggacaacactttagcttgtccatctaaaaagtaagaagaatgccagcatattgccaatactttacaagttaatgaagatcaagaaatagaaaatccatttgtacaacattact

SEQ ID NO: 134755 - DNA, 655 bp, Glycine max
  Clone ID: PAT_MRT3847_92694C.1
gaagtgtactaacaaaagggatataaaatcaatacaatcattgaccagccaaaaatactttggattacataccatcactaaaaaccatcacttagaaaataatttgaatcattcacaaaatgggtataaataaaacaaatacatccatcccactggtcaacaattcttctaaattagtattatcactaaaaactatctcacaggaaaaagaaaagaaatgataaaaaaaaaacttgtatgactgacaaaagggatatagttataaaacaaatctactcatccactagccaaaaatacttctgaaagaatactaacattaaaaaaaatcaaaccaaaaataaattttattatgcatgaacaaagtataattcttactgcacgttttaagataaagctttatatctataatatctagttgctcttaacctagtaaaagttgcagagaatcaatagatgatattgatagatcacttgcttgatttggaagttaaatggcaggtggatggagaaaattcacttctgcactaacaattcctttcaaattttatgtgaaaatgcaaaaactgaaatttcacgaattcatgtgcagaagttactacttactacacacaaaaaaaatatgattccctgagcaaaataactcactttggacaca

SEQ ID NO: 134756 - DNA, 181 bp, Glycine max
  Clone ID: PAT_MRT3847_92695C.1
tgataatcatgtatggaggaagtatggacaaaagggagttctgaattctgaatttcctaggagttacttcaggtgtggtcataagtatgatcaaggttgccttgcaaaaaaacaggtgcagcgggatcaagagaattcaaatatgtaccgaactacctacattggaattcacacatgcaat

SEQ ID NO: 134757 - DNA, 459 bp, Glycine max
  Clone ID: PAT_MRT3847_92696C.1
ttactcagaatatttttaataattattgtttttgtccccataaaaaaataggtattgtttccataagataattttttaaataaaagaatgtaaaaaataaaagaaaaaataaattgatactaattttatcaactttatccttttaaacttgtagaaacttggatattttgattttttatcatgaatttgtgtattttgtaaaagcctataatattttgtcagaaaaatattatggactacctatttgcccccactttttttaatttttggatacgtcactgaatgtaggggtaaaacgtagtaaaatctcaagacctgactcaactaaagagacaagacattcattatattataggtaccagatacaaatcaaacgaaggtcaaagaaaatgacactatcctagctcctaccaaaatactaatgattatgaaaataaaaaataaaaatcttcttccttg

SEQ ID NO: 134758 - DNA, 146 bp, Glycine max
  unsure (1)..(146): unsure at all n locations
  Clone ID: PAT_MRT3847_92697C.1
cgcatgaggcaatcctganaacattanacctgcgaggcgttgntacagagcctaatgttaaggagtggattgcgacaacangnagtatatnacaaatttcatgaaatngtnagaattgcantggtgggaaaatatactaanctctt

SEQ ID NO: 134759 - DNA, 309 bp, Glycine max
  Clone ID: PAT_MRT3847_92698C.1
aatattttcagtaaaaaaagctatttataccataagatttataaaaaaatacctatatcaaattgatatgataaaagaaaatagtgtcaattaaaacatacgtgacaacacttttcattttgatccatgtctaaaaaattcttacaattttaatcttgttgacgagaaacacttacattttttgacgttataatgctattaaatttgattcacatacttaataacatttacttcattttggttcttgtacgaaaagttctgcattttgaacactattcttgacaaaaaaaatttgttcgtctttacatt

SEQ ID NO: 134760 - DNA, 299 bp, Glycine max
  Clone ID: PAT_MRT3847_92699C.1
gggttgaacagaacgccaaatattctggaaaaactcaaaccggaggaagcatcacccttgaagtggagtcttccgccaccatcgatgacgtgaaagctaagatataagaaaggaagggatccgaccttggccagtggagacttatctttgctgcgaaacagctagtggatggaagatccattgctgactactacatccaaatggatatcagctttaacctcgtgcttcgcgtaagggggggtatgcaaatcgtgtaaaacactttaactgttttgaccattaccctaaaggccgaatgc

SEQ ID NO: 134761 - DNA, 495 bp, Glycine max
  unsure (1)..(495): unsure at all n locations
  Clone ID: PAT_MRT3847_9269C.1
accggccggaatttcgtttacccaccgtcgccttcgtccgatntgtaaaccgcgatcacaggttgtcgaccttaaaaccgtaacaaaagcaatcgttacttgattcaagaatctctcaatttcttcctacttctttgtgtacgatttcttaagggaaagaaaatcactctctgtgctggtcacagacttcgtaatcattttcttttccactcttagttatttgctgaacactctcctatctgtataggatttcggtcagatttaaacttctttgtttctttttcagttctctgcttaatttcaagttcaagctggtgaaatcttggattagtgctcccactctcctatctggtataggacttcgtgggtagacttttctattacttttttttccttcactctctttttctcactgatccgcattgtccgctcaaagtggtcttattttgaaaaacacttgggctgttggtgcaaaatgtttgctttgtaaatttt

SEQ ID NO: 134762 - DNA, 488 bp, Glycine max
  Clone ID: PAT_MRT3847_926C.1
aaatatataaaaataaaaaaaaataaaaataaaaaaaatttttttaaaaaaaaaaaaaaaaaaaaaaaaaaaaaaaagggaggtgggggaaaataaaaaaaaaaaaaaaaaaaaaaaaaaaaaaaaggtaaaaaaaaaaaaaaaaaaaaaaaaaaaaaaaaaaaaaaaaaaaaaaaaaccaaaaaaaaaaaaaaaaaaaaaagaaaaaaaaaatacaaccaaaaaaataaaaaaaaaaaaaaaaaaataaaaaaaaaaaaaaaaaaccatttaaaaaaaaaaatattcctccgtctttcgatgctttaaagcttaaaatcccctaccttcaactaattttaatgctaaaaatatttccctcccgcaacaacaaacaaataaaaactcgtacccaaaccacggcaattaaaaaaaaaaaactggagccggacgagcttaacctataacgagagaaagtaaaattagacccaaccatttttatagaaaaa

SEQ ID NO: 134763 - DNA, 230 bp, Glycine max
  Clone ID: PAT_MRT3847_92700C.1
caaaaccagaaaccaacgtggcgtttggtcgggattaggacaaaggaaggtaaagtcgaaaactttccagtaaaaaaaccggtgcgattcgcccattccattcgtgttgcttatcagtattttactattgttttttcaactcacgattcttgagtgatgacaaattgaagaagcactaccattagtcttaaactcttaattaaagagacacaccattcattcatccattc

SEQ ID NO: 134764 - DNA, 562 bp, Glycine max
  unsure (1)..(562): unsure at all n locations
  Clone ID: PAT_MRT3847_92701C.1
cnnggttttttttttttttttttttttttnnnnnnnnnttnttntttttttttttttttnttttttttttttnntttttttttttttttttttgatgataattattacaactcacattggtaaccatagatacacagattatacgacataaaattaattatgagacgcgatctcatttgtccaagtaaaaatattagaaaaaatacataaaagtgttcacaattactatatactataactcaagttccaaagaaagtttgatttttctaatcaatagtggtacttagagcagcaccgaccagaactataattcaagttccaaaaaaaagtttgatttttctaaccaagagtggtgcttagagcagcaccgaccagaatggttagtgaatacactccaaaccgcgacggcgttatagacgacgcaccgtttagtctggctggcgtcgtttcgttcgacgacgacggcgtttgagatgatcccgacgacgacgacggcgagggggttgttgccgccgcagacggtcacgtcgcggatgctgccggggtgagggaggaaaagggt

SEQ ID NO: 134765 - DNA, 364 bp, Glycine max
  Clone ID: PAT_MRT3847_92702C.1
ggatggggaagataaattttattcattattcaaaaaattgtcaaaaataccatgaatttttctttttccgattaaaattccgtttggtttttgccttttattaattaaccacccaattaaattaattgctttgcttaattaaaagttcctacttcttaaattttttttttaaaaaaaaaacttggattagggcggggttgggccaaaaaaaaaaaaaaaaatttttgagcttacttttacaaaaacccttcatttttggaatggttttttttcttttcaaaccaaaattttttcaaattggaagggttttccctttgggtttccttagaattttttttagaaacccctccctttcctttttttt

SEQ ID NO: 134766 - DNA, 322 bp, Glycine max
  Clone ID: PAT_MRT3847_92703C.1
ataccaacgaatcatgggtgatctgttggttatttatgagtacggtccccgaaattgggtgatttacaaatcataccatggagcccatgcatggattatattgattgcaaatcctggcatacaaaacggatggacaaatttccaaactcagacatgcccatacctatgacaaatttaagggcactaaagtgacgagatcttcaggactgaatgggcacgtggaagaactgctctaatggacctgagggtacacactagggagagggccctgatcctcccatttttagacctagttgatgcgtcgactacatcatagggcgct

SEQ ID NO: 134767 - DNA, 315 bp, Glycine max
  unsure (1)..(315): unsure at all n locations
  Clone ID: PAT_MRT3847_92704C.1
tngcacgcacgcgtacgtnagctcgggaangtcgcggncgcgnggtntatcancatcatcnnaatntggtannaaaannncagnangacnacgaccagttgctcaganagcacgtgnggaanntcggttnccctccggcaacggaacantccantaaactncattnagtgatttngggtagcaantncaatnatttttcaactncngaaanngaaaatactcagactgcaactacgttcaaataaatggaagaacaaactcngtgattatacatatgacaataagtatanggnaaagtcgtgctttgaccacnta

SEQ ID NO: 134768 - DNA, 113 bp, Glycine max
  Clone ID: PAT_MRT3847_92705C.1
ttttggtatttttattctcactaagagcacacgggaagggcgctatatgggagtgaataaaaaattccataccacttcacccaggactattgccaaagggttacccaatattt

SEQ ID NO: 134769 - DNA, 327 bp, Glycine max
  unsure (1)..(327): unsure at all n locations
  Clone ID: PAT_MRT3847_92706C.1
agcttttccaatcattattgtttttgatgataaccttgtgttgccgtaacacacaaaaattctgcgatggaaattttccagtggattcttggttaccaattcttgtgaattggctttatcctgtaagtcaattaccttcagaagctgtcgttgtaaatgctacatgtggcagttgtcgtcgcttattgtttctctattttttaacaaataccttcaagacaaagcattttttgcatttagtggacaaaattagaaccccattccttggaattgatcttcccattagaggtattnntccttctcttagatttccaaacttttatgcct

SEQ ID NO: 134770 - DNA, 1001 bp, Glycine max
  Clone ID: PAT_MRT3847_92707C.1
gtcgtctcctccgcctcccgttttctgcagtggctcccctcatctgctattcctccacacttcttctgtgctcctccactccctcgggcgtcttcctgccccgcgcgccaatggctgctctggtcaacagcggccgccctagcgcccacccctcgcctccccccccacccctagataccctctcttccttccgccgtgatgctgagcatctcgcgtcctcgagcaggaccagtgccggcggggggctgcacatggcgggcgcttgacgaggggaattgtgggagggggtgctcccaaagagggctctccacgagggggtccatgggttcgggtcctcccaatcagctgactccaggtggaagcccgttgttgctggtcatcacaatcagcagaatcaaggtggaaacgagttgatgaatgtggtaaggaaacggacagagaagttgagcataaaagaaaacaaatgcaaatcaggtccacattcaaaggtgtgctactgtgcaccaaccactcatgaaggttcattcaggtgccggctccaccgcaagaagtcagccacagatgataataataagagcaatctgaggttgaattcccagtatgggatggtggagtttcagcctcagatgccaaggtatggtagggtttcctgtgatcaagttggaacacgtgatagcctaatcaaactctctaggatggattctgtttaaggactgatctacgtttcattttcagcttatagactaagactatgtatttgggtctatatgtgagatatgaaaaaaatgttaacagctttagtaggctttgcttatgatttttactttttaggtgttgcggtgtacatgtcacaaagctttccatgaaacccctgcaattttagaagggattaggaagaatttccatttccaattccactatcaaagatacattttcttcaccgtttatgttttagtacaatgttccagtacaattaagtaattactgtgaacttgctgcca

SEQ ID NO: 134771 - DNA, 448 bp, Glycine max
  Clone ID: PAT_MRT3847_92708C.1
tcaaggttccgctgggttggatcaagtaaatccccaatttgttggttgtatatctgtttcaaacaacaaatgaaaaagaaacaagatcattatcatacaaataaggaagccaaaatgggaagttttatgaagaattacctcaaggaaagaacatcgacattggtaattgaattgtttcccgtcagacacatgctgctcctaatatagtaattgaaaaataaataaataaatagtcaaaaacattatagaaaatagattcagtggttaaagcaggaagtaaaacgtactctctcaagctcagaaaacaacatttggaagatccgaggaacaattcccttgtgacttttgggcgagggctcctcaaacatggcacttgggggaccccacattgtataagtttttccacttccagactagcaaagaattaaaagaaaataaataaaaaatc

SEQ ID NO: 134772 - DNA, 701 bp, Glycine max
  unsure (1)..(701): unsure at all n locations
  Clone ID: PAT_MRT3847_92709C.1
atcagaatcttttatatattttttttatttgaaaaattgaactatcgaacaatgtcagaaccccccacccccgagttgggaagaaaatgcggcaagcacatatccaaatgatggaagagaaaacagaacacagataattggcagcgatgcaaaggacaatgaaaaaggaaggcatagtttgaaaatgtccctcagattccccgcgaacacaatccagaggctcgttgtcgttggattgttctcatgcctcatttagcagcactgccggctatactggatgcttcataactttccttttgccaacacataaaataaaaagactctatcgttagattcgcgaatgcagtaaatgtgattcagacccacaagttttttttcccagaatcaaaatcaactaactactcactcgaacatcagccagaacagtactaacaataacttttacaaactagacacctgaatctaattacgacggcttcaacatatataaccagctagtgttctttaaatatttattttttcttctaacaattagtatttattataataaacaaacttaacttaataaaattcaacaatttattttcanatcaggaatgactaatgaatgtatgtatgtagcatgcagcaagattagttaagacgatgggtgtgtatacaagtcanaaggagcccataaagaatccagagggcaagggccg

SEQ ID NO: 134773 - DNA, 616 bp, Glycine max
  Clone ID: PAT_MRT3847_9270C.1
ccttctctatcgcccacgcgtccggaaattatgataaaccgctatcacaggttgccgcaccttaaaaccggaaacaaaagcaatcgttacttgatttcaagaatcttccaattttttcctactttttggcgtacgatttcttaagggaaagaaaattactctctgtgctggccacagacttcgtgaatcattttcttttccactcttagtttatttgctgaacactctcctatttgatataggactttctgtcagatttaaacctttatctgtttctttctcagatctctgcttaatttcaagttcaagctggtgaaatcttggattaagtgctcccactcttctatctggtataggacttcgtgggtagacttttcttattctgacctttttttcactctttttttttactgatccggattgcccttcaaagcggtcttattgaaaacacttcggcgttggtcaaacgtttgattcttaattttctttgggacaacagcttactgtaaaacaatttttactgcgagattttgaccatctgtgtgtttttatacaaagcactcacttaaaaatttctactcatacatagggggcttggttccttgtgttacatttc

SEQ ID NO: 134774 - DNA, 1071 bp, Glycine max
  unsure (1)..(1071): unsure at all n locations
  Clone ID: PAT_MRT3847_92710C.1
agaggctcagatgcatgttgaaacaccccaacctttgaaaaggttgcgtttacaaggccaggagagtcagcctttgcatcctccccctaacggttcccccagcccttcatcaaaaaaacttaaattagatgataatgcatctgggaagaagcctcaaaacaaaccagtgtcttctgatgggaatccagggattgcaactcgtccacttccaccacgagatggcattgttgataaggggaaacaacctgcatcactccctcttaatcacagaggaagaagacttccatctgaaagagtgccccaatctataccgtctagagaaccaacagttgaacctgggaggtttctattgccaaacaaccaaatgccccgtactcagacactggtcatacccaaggatgagcctattgatgaattgactgattacgagatgcccattgcagtgattccccctgaatcaagtgtaaggaactcgtcaattaagaatggtgtagctggaaaacatagtggtcatgttactgtgacatcatcacaaaacagagatggagttggagatgaagatgttattcccacctcaaagaaagaagcgacttgtaatgtagagatagcctcatcaactcttggagaggtaaaactttctttgagctacggctcagctcttcagggatcagattttcatatacctagtcgagatcaacttataaaagtgatggaggataaatgtctgcgatcatataaaatcactgacccaaatttctctgtcaagaatctgttgagagatatatgtgattgcatgttggaattcagaaatgactcaaatgatgactcacaagaaggttctgtgataagttccagtgttgatgtgtcaaaggaaccacgggcacctggcacactgagtgtggtaggaaataaagatttggacacgtcttctcacttttcaaacggatccatcaatgttaagtcttctgatgacttggtttctccccgaagtatncttcctctagcccacccgaatggtctgagtgatgctgtaccgggtttncaagatggacagaacgaatgattttttgc

SEQ ID NO: 134775 - DNA, 263 bp, Glycine max
  Clone ID: PAT_MRT3847_92711C.1
acggctgcgagaagacgacagatgggacatggaagtctaagctcaaagctcagtttcctagtctcaatgagtactctccgattctgggtgacttctctactgcgactggaattgccacattcacaatgatccttgtcagccagtttatatgtgacaactattgataggcagttgttgccataatcacccctacggtcctgcttttgacacgagctgggttcttccctcttcatattgcatgggggtccgcttgcacctggtct

SEQ ID NO: 134776 - DNA, 302 bp, Glycine max
  Clone ID: PAT_MRT3847_92712C.1
aaaaaaaaaaaaaaaaaaaaaaaaaaaaaaaaaaaaaaaaaaaaaaaaaaaaaaaaaaaaaaagaaatggggtggccggtttcaaggatccaggctaacgtgcccgagcgtgcacccatatcattatttttatcggggcccctatctacttttcttgaacccaggtgctgcaacttctgttcggggaaccctcttgggtgacccaagttattcttcttgcgccccatcccctttttgcccgctgccgtaatagactggtggccctcaccgttcttcctttcaaacatattcccatcttaaat

SEQ ID NO: 134777 - DNA, 2171 bp, Glycine max
  Clone ID: PAT_MRT3847_92713C.1
ggtcagaaaagtagcaaacaatttacaaagatagttaaaaagagaggcaacttaaccacacctaaaagaaaagtttgcatacgttaaattccacaaatttacagccagtctataatttgtttcagctatcttacaatattaagagcgcggactcccgcgacggacgccgctgctcggacacacattccgcattccgtcatataccaacacaacttaaccgcatagtagatccgccgttcattttggaactccacgccagtaacccacatgcatctaccatcttttgtcatccttagtgggaacactctataagcaatattaactgcatgtccttatatatagttggatgttactttagctgttccacataggtagggacaaaataataagggggtcctgtctaccttttgcttcaaagaggtaaccgattgagagttactgcagttgcatgaacttaacctccacaagttttgccttgtcatcttcagttgggtaaggccactttgcatgttgctgccatccagttctttaacacagaagttgtgtcacctggtaatttcccagctctacgtttccttaatatttcttccctgacatcttcaattcttgacttgaaaccctgtctcagctcaatctttagttcctggcgaactctttccatcaatgacctttcagattctgtaggaagtaatggaccaaatcccatcatgtcatgcccttccgcgctagattgatctaaagaaatatccatttgtaaatcatcttcatcatctgacattgttgcaccagttccttctcccaaactcactccagttagagcttgtaaggcattttcgatatcacggcaggccatgacagcctcgacggcgtggactcttacatgttgctgaagctgttctttgaaagtacacagaactatcaaatattgtgccaggaagttgtcaagttcttggcggtgatgaggggagagagaatgagtgttgtgtgagacataagagcgtagaagatggtgagactgagataattgagcatcaatgagtggaagctgatcgatgggagtcgccacacggaggcatgccacgtgtgctgccagaagctgctcgtacagcggatgagtcgctatctccgccttcagcttccactcattgatgctcaattatctcagtctcaccatcttctacgctcttatgtctcacacaacactctttctctctcccctcatcaccgccaagaacttgacaacttcctggcacaatatttgatagttttgtgtacatttaaagaacagcttcagcaacatgtcagagtccacgccgtcgaggctgtcatggcctgccgtgatatcgaaaataccttacaagctctcactggagtgagtttgggagaaggaactggtgcaacaatgtcagatgacgaagatgatttacagatggatttttctttagatcaatctagcgctgaagggcatgacatgatgggatttggtcttcctacagaatctgaaaggtcattgatggaaagagttcgccaggaactaaagattgagctgaaacagggtttcaagtcaagaattgaagatgtcagggaagaaatattaaggaaacgtagagctgggaaattgccaggtgacacaacttctgtgttgaagaactggtggcagcaacatgcaaagtggccttacccaactgaagatgacaaggcaaaacttgtggaggagacagggttgcagctgaagcaaattaataattggttcatcaaccaaaggaaacgtaactggcacagcaactctcaatcggttacttctttaaagtccaaacgcaagaggtagacattatattattttgtccctaactatgtggaacagctagcaagcaacacaactatatataaggacatgcttattgctgataaagtgtagtcccactaaggattcagaagatagtagatgggttactgtaatattgtaagatagctgaaacaaattcgaggctggctgtaaatttgtggaacttaacgtatgcaaacttttcttttaggtgtggttaagttgcctctctttttaactgtctttgtaaattgttttgctacttttctgaccggcggaagaattattattactactacacagatgattgaaagattcgctgttctattaaatatgctctttggtc

SEQ ID NO: 134778 - DNA, 464 bp, Glycine max
  unsure (1)..(464): unsure at all n locations
  Clone ID: PAT_MRT3847_92714C.1
cagattcatctgcatattgccgagctcatttggtgtacgacaaacacgacctatagatgagaaactactagagagtgagttctttagagccctatgttgtgacccgtatcgagtacagaccgggattcgctctctacagaatgattcgagaacaccgagtacaatttgcaacacgcaccatagcaggggctgcgaagacaatccgcatagagacgaggtcagaagaggccttgaaggactacgatggcgatgaatccgcatcgctggcgctttaccgagcctcggcaccagctcgacgagttggaagcaggatgttnaggagtggcgctgtcgagatcggtcgcaggcgccgagtctatgactctgatccgtccgggacggagccgcggagaaggctgatcatagaagaaccacccacgggaagcaagaagtggagcgggagcttgaggtcgaggaccgggagg

SEQ ID NO: 134779 - DNA, 381 bp, Glycine max
  Clone ID: PAT_MRT3847_92715C.1
ggaacaagggcgcataatttattaaagccacgaaagagaaaacaacatagtgtagtctctaacatgacttgttgacactctgttgaaacaacttaaagtgtagtttgggcccttatttgaacgcttcttattacatttagattgattggtgcaagctatattgttgagaagtgtatgaactactgtatgttgaactggggatttggaagcttaaaggtcctgctttagtctatgtggcctccgagaagatctcttcatttgtctccaattatcccaacaatggtgttttcctgccttatcatttattctctagctgctgattcgtatgaatctgcttttttatttctaagaactcgattaatccttgattataaatttttt

SEQ ID NO: 134780 - DNA, 683 bp, Glycine max
  unsure (1)..(683): unsure at all n locations
  Clone ID: PAT_MRT3847_92716C.1
gcatgcctgcagcatcattgctgctagaaatgacctatgatcataaatattagggaatcaataatactcaactgggattatgatggacagcatccaactgttcacattgactattcaggacccaacccagaaatgtattagttttgaaattcttttatttcatcattgaatgcgtgtttggaaacacatttaaactttaaagaggataaacatagatcaattgagcctttgatgcaacttctactgtggagagtgttaacaaggatgtgtgaatctggagtaacggacatggttccaaactatctataagtaaacttttcattataatttaacgctaccaatttatttttaagataaaggttccatcttatagcatgtttggattcccctttttcaccgacgtgtgcatgtccattctgaagcattatagagttgtttctacttcatttgcataatatgacatgaaaacataaatacatgtgcattacagttgaatgttattccaaacgcacactgaatctatactatatgcccagggatggatctagaggggggcagtannnggggggttnngagccaccccacccccctccccttcttggatcttttcaagtntatacatatatatatatttttaaattaattantataaaattaattttgtatgtggttattataataat

SEQ ID NO: 134781 - DNA, 166 bp, Glycine max
  Clone ID: PAT_MRT3847_92717C.1
aagatacacaggaataaggatgaggtagtgtggcaagtggttcgatgagattagagcacgcaatatgcgttcaatgatttggctcgcttcctattctacccctgtcgcagccgtacgtgcctacgacaccgtcgtctgtgacgttctaggaccctgcgcgcgtcta

SEQ ID NO: 134782 - DNA, 556 bp, Glycine max
  Clone ID: PAT_MRT3847_92718C.1
gattcaaatgaccaacatgtgagaccatattcatttattaattagatgccaatggagagctggcataacaggctaccgaagctaaactaagaccctggagccatgacgataaatgacatgcaatatatacaatgatttcagcgaaaaatgaaactacataatgaaaacccttaaatttctgtgctgaggatagtgcacagattgcggcgacctttgaaaaaggtccataatgtaactttgaagatcatcgttagagtactggacatacttgtaagaaatgctagatgagtctctaccaatgtatgaaatgtgtgcaagatccagtttttgagacactgaagattgcagatcctcgcgaagtcgagggtctaggatgaaccaccctgtctggatcctgtaaacgttaccaaaggcagcgctgagctctgtgcatatttgctccaaagcatttgagagacacaatctgacacactaccctccgtgagcatggacagctcagagccccaagagatcctctcgtgacaccttgcggcgtgctgatgcatcggcatgtgct

SEQ ID NO: 134783 - DNA, 143 bp, Glycine max
  Clone ID: PAT_MRT3847_92719C.1
aaaaaatcgtatttgtaggcgccacactcaactctactccaatcaatcagatcctagcgatgggggggaagctaaaggtaccaccgaaatctcttgtatccgccaagcccacgtttaagcatcaccaactaaaaccttaaaat

SEQ ID NO: 134784 - DNA, 666 bp, Glycine max
  Clone ID: PAT_MRT3847_9271C.1
gcacgagaaaatttctcaatctaaaattgcacttcccaaaaacacagttggaggaaccattctgcgtagtgatctattggcaaattttttgacaaaaggcaattttaaagcaagtgttgatttgcagcacactcatcatattaaaggaatgattaaaatggtggccacagttggtattcctgagaatacaggtatatcattggcctgtgctatgaatagttcttttaaggggcgtgccagttctaatatttacaccatctgctctcaagattgtaaattgtaaaatcctacttacacaaaagcaataactatatcatttaatccaaacccatattctaatacataaagtttaaaatttttaaagcataccaaatttcattataatatcatttatatcactaaataaactaccaccccaattacagaatattcagattacaattaattaatttatttcctctcgagaatatattcccagaacctattatattgtaaatccacaaaatccttttgtattaaattgatagattaggaaaactaacttgtcccccaggacacttccgcgaagtatgaaaagaatacctctgtctataggaagaagacctgagtccaaaaaattctatgctcatcaatattccagatactagtctttcaatatagagatat

SEQ ID NO: 134785 - DNA, 574 bp, Glycine max
  Clone ID: PAT_MRT3847_92720C.1
tttttttttttttttttttttttttttttttttgttttttttttttttgggtttttttttttttggaaaaacccaaacttttcccatcaaaacaaaaaacaggcctcatcaaaaacaaaccgcaacgaaaatgttcccgccgatcaaaaacccagttttgaaggctacggctccatgaaatcgggggacccctcaaaatataacggggaaaacaaacccctaaaaccctgcaaagataaaccccgggaaaggaacaagtttttttgaaaccccgttgatgatcacatgggctagcaaaattgccaaaatgcaatcccttttttttgggggcagcctttgggaccctggccccgggggggtcttccttcccaaccctcttgatgaccccaacagctacgggctgacccatgtccctcacagcaaaacgaccaggggggggatccccagagaaagtttcaacccccatgggctgggtgggaaccattttaaccatcccagcctcaccattcttaaaaaattggggctccttctaaagccccttaccaaaacgcctggcaatcttggtcaagatttc

SEQ ID NO: 134786 - DNA, 343 bp, Glycine max
  Clone ID: PAT_MRT3847_92721C.1
gttggaggcaaggcatcttgtcgtaggaacttctctttggatggtgttctatccgatgcttttggacagcctgtagataaggagaatgaggtttttgcttcacttttgtatgccgacacgggggcaccagtggagaatacagccgatgatgaagcaccccttttagctagttatgatggaatagaattttcctcttgtgaaagaccaagtaagcttttgctgggacgtgcttcatttaagctcaaaatatctcagctttcatccaagtgtgacaacaggttgttactcatcagctcttgtgttccaaaactaggaaagtatgcttttcttgaggcatattccc

SEQ ID NO: 134787 - DNA, 524 bp, Glycine max
  Clone ID: PAT_MRT3847_92722C.1
actgaactgttaacagaaggcaaacttcaattggaaaagaacttgggcctaaaatcccgggaagtgttaattgcatcgttgagctgccaagaaatgagttggaagtgaaagcagaagacacagcacacacaccatgccttctgcttcttccaaactctacgcagatgacgtgagcctcctcgttgtaacgctagacaccaaccctttcttctggagcactttccccttccccttcgccgagttcctctcccaagtactcgcttttctcaactcgatcttgctccttggccagctcaaccaggtgatcgtcatcgccaccggatgcaactcttgcggctacatttacgattccacttccgataagaaccatggctccaccaccggtacaatgcccgcgctttattccaatttacttcacaatctcgatgagtttctcgctagggaccgccaattagatgccgacgcggctcacgcaccgggaaccgttccttcttcgctgttatcaggctccttgtccatggcgc

SEQ ID NO: 134788 - DNA, 491 bp, Glycine max
  Clone ID: PAT_MRT3847_92723C.1
ttgttcacgcgtccgcccacgcgtccgctacgagtgagtgcttctaaaaagcatttccatcttcaatttgggcactgaactgttaacaaaggcaaacttcaattggaaaataacttataacttgggcctcgaagcccgggaagtgttattgcatcgttgtgctgccacgaaatgagttggaagtgaaagcagaagacacaacccacactataccatgccttctgctccttccaaactctacgcagatgacgtgagcctcctcgttgtgacgctagacaccaaccctttcttctggagcacttttcccttccccttcgccgagttcctctctcaagtactcgcttttctcaacacgatcttgctcctaggccagctcaaccaggtcatcgtcatcgccaccggatgcaactcttgcggctacgtttacgattccacttccgacaagaaccatggctccaccactggtacaatgcccgcgctttattccaatt

SEQ ID NO: 134789 - DNA, 437 bp, Glycine max
  Clone ID: PAT_MRT3847_92724C.1
gggaaaaaaaaaagttctgttttatatacccccggacccccgcaaccccggagacgaaccccccattcggttttggttgggatttcaaaaccgcccgcccttccgttaaatttaaaataaagggtcctttgccttggacataacggaaagcctgttaggcctggggggaaagccccctcgccttttttggtggggcgaggaagggcaaataaacggggggagggctcgtttaaagagatttccctcgacgccgggaattttcacgagcgagttcgttatcggggttttgcccccgttgagggggggcggaaaatacgggcccggccccggcgcgtggttttttttggggaggctgcaccggaacgagccaggatgcgttttaggcaaacacatgcaggtccgtttttgttgggggggggggggaccaccgttttgcc

SEQ ID NO: 134790 - DNA, 950 bp, Glycine max
  Clone ID: PAT_MRT3847_92725C.1
caaaaacggaatttgaagcttcttccgatgctgctggtgccaagtacgtagaagaagaacccacgccatgtttctataagactgaaatgctgactgaaccacccaatcacacaaagcccaactcatggactctctcttctctctaacacccacactccgaccattcaataattgcatccccctctctctcacacacttcacacccccaacaagagtaaaggtgagtgctttgcagccccgtcgaaaccacggaggcttgggtgtggccctgctcagcgtgaccgcaaacgcgaagcttcggataagtcccttcgttgccacgctggcagccaaccccaccttcgtgtcggggctgctggcgtggctgatagcgcagtccatgaaggtctttctgaatttcttcatggagaggaaatgggatttgaggctcttgttcgcgtccgggggaatgccctcttcccactccgccctctgcaccgccctctccacctccgtcgccatctgccacggcgtcgccgattccctctttccggtctgcctcggcttcagcctcattgtcatgtatgatgctattggcgttagaagacacgctggcatgcaagctcaggtgcttaatttgattgtggctgacctgtttcaagggcatccaattagtgaaaggaagctgaaggaacttctaggtcacactccttctcaagtctttgctggtgctctgcttggctttttagtagcctgtttctgttgtcaagcttacatggtgggagcttaggtgattgattccaatgccagttttggtcaaactgtattgatatcattgtttgccctgatgttgccttatggtatatgacatggcctgcttaatcagtacactgtatctaaaggacaaataatcaaccgtagtagaatgtaaatgagatttttttttcttcttcaaaaaaaaaaaaactcga

SEQ ID NO: 134791 - DNA, 485 bp, Glycine max
  Clone ID: PAT_MRT3847_92726C.1
ccaatttgctttctttctttgactttgtgaatattgattcgatttgggggcgtggatttttcttctgatttcttcgccaagttcgggtttttgaccaattgggtcgctgattctcgcctcaccttgatctgggtcgttcccttttcttcaatttcagagttgtgttgtgttgttcccaattcttgagggacaataggctgaaactttgattcctatcttcttttctgggtttgatttttcatcttggagagtccttagaggcattggggtggggagagtagaagaagaagctattgttgtagtgtgctgttagttgtgacaagtggtggtggtggtgtcttttttttttccttctgatatattatttggaggagtttggttacacatgatgttccattctcagggtgtgtcaagacattgtagtctccttgctgtcctgagtggtaaatcacgtgacattaagcaaaagcagaagcagggtaatg

SEQ ID NO: 134792 - DNA, 717 bp, Glycine max
  unsure (1)..(717): unsure at all n locations
  Clone ID: PAT_MRT3847_92727C.1
tttgagttggttgaggaatttgagttgtgttgaacaatttgattagtagttttcaactttcagttgggccttactacatcctagtcataaacagcattacccttttggaagatctttctggggtgctctatacttttcagcgtggttaaaaaagtagacttttttttacctcaagattctggttctggttccatttgagtttgattacgtgataaggaagcttgtggttcttgtgattgaggcaaagaacttgccaccgacggatcctaatgggttgagtgatccgtacgtgaggctacaattggggaagcacaggttcaggaccaaagtgatcaagaagtgtttgaatccaaagtgggatgaggagtttagctttagggtggatgatcttaatgaagagttggttatatctgttatggatgaagataagttcttcaatgatgactttgtgggtcagcttaaagtgccaatttcaattgtttttgaggaggagatcaagtcccttggcactgcttggtattctttgcaacccaaaagcaagaagtccaagaacaaggaatctggtgtgttacgctgctgaactgtactttcctctaccttatccaatagtttgctgcttacctaacatttgagtggccatgtnntgtctctctctctctctctcaattagtagtttggttgttgggtatttatagtgcattaaatgttcctaatgat

SEQ ID NO: 134793 - DNA, 307 bp, Glycine max
  Clone ID: PAT_MRT3847_92728C.1
tttttatcaaatcaaacacacccttaaattacaataagcttataatatatcaaatgcgcagtgcaacaaaatgaaaaccacactcccaaacaaaccatcctaaatactcacttaaacaccatcatcactcaaccatttctaaacaacctcttttcataaccaacacttactactaaacaccctagtaccctcatgcaattctccccaaaaatccactaaaaacccttattctctttaatataacacactactgcatactacttaaactttttaactcaaactactcacactcctactattattacca

SEQ ID NO: 134794 - DNA, 234 bp, Glycine max
  Clone ID: PAT_MRT3847_92729C.1
ctagatcaatgcacaaattcttattgctctgaaacaacgtacgatgaaattgtttacctgtgcaccatacacgggattttacatgggccaccacttggaggggggggacaagagcttcaaaaacccaatgtccacagggaccgaattgggggcagcgattgataaaaaggtgtcggcctcattggactcgggggaacccgcccccgccgaggcggagagagccccaatagcaat

SEQ ID NO: 134795 - DNA, 571 bp, Glycine max
  Clone ID: PAT_MRT3847_9272C.1
gaagctttgttagtgtcccagaagagaaagagaaagagaaagcagagagtgatgataccagagagacaacaaggtggaggtgcgccacacgggatcctcctggctctggtggtggcaatcgtgctcatagtgcccttcttccttggggatcagggccaggccataacgcaggcattatcggacctgctaagcccattcggcctactccttctgcccatccttctccttctcaccattcagttcctctcctccgatcggggctccttcgtctccgccctcttctccaccggcgaacccgacaccatccaccgcctcagcggctcccccttcggcgtcgcactcttcctcatcctcattctcttcctcttgttcaaccgccgcctctccatcttcggcggcgacgattccgatgactgaaaccttctggatctgcctctcctttctcgttaccttttcttttcacacgttcgttgtacatctacctttttttttttttttaattgctttttttcttgctgttacatttgaatttctgttgagtaaataatagtattattattatatttgtggc

SEQ ID NO: 134796 - DNA, 146 bp, Glycine max
  unsure (1)..(146): unsure at all n locations
  Clone ID: PAT_MRT3847_92730C.1
aaaggcgtcttcataaacgcctttattctccgtttccgtntccttcccggaattcgattttncatctctgaaaatgagagagtgcatctcgatccacattggtcaaggcgggnatccaggtcggaaatgctgctgggagtctactg

SEQ ID NO: 134797 - DNA, 205 bp, Glycine max
  Clone ID: PAT_MRT3847_92731C.1
accagatggatgataattaccgtgcggatcaattgtatactatgaccgtggctcttgctgcaggtggctaatactcaaaggcataccttaatccctggatgatgggaatagagcagaacctcttgtgccacattaccacatatacatgacacagtaactaaattgctcattacttaatcattactgttcattcacgcaccctggc

SEQ ID NO: 134798 - DNA, 350 bp, Glycine max
  Clone ID: PAT_MRT3847_92732C.1
ctcgcccgataagaccacataagggatcaatcaactgtataactctgcattcatctatataatttccatgtgtggtgtaaccacaataagaatgaagctgataacaaatcattaattgaaagcatggcttttgtgtattaagggtatacctattactttacacatgggaactgctagcatacaaccatagacctgtcgaatctattgactcttaaacaaatacactgtttagcgaatcagttagctaagctaggttcaaagagctgcttgccacctacctaaaagcttataataacaagtggttgacatcatcctggatacactgaatgctcggatgattaatgagatac

SEQ ID NO: 134799 - DNA, 292 bp, Glycine max
  unsure (1)..(292): unsure at all n locations
  Clone ID: PAT_MRT3847_92733C.1
cnaatggcgcaccagctgccctgcngcaagctgcgagcctccttccgtacctatactgtcgcatacattnctanccgtncacagatgtactacgagattcaaggtaaactacgntgagatcactggtccattcctcacactacgagnanncggctncaattctccctcgatttccagcccgtccnctntgttgncgggcaagatttccgagtcaaagggaggcnaacgcgatgggctcacgtctttatatcnngatctcgtagtgcctgnagatcccanggggnatggntgt

SEQ ID NO: 134800 - DNA, 547 bp, Glycine max
  Clone ID: PAT_MRT3847_92734C.1
gggcaaaacttattacaaaaaaaaattaaaaaccaaaaccccacccccctaaaatgccttaacacatccaaaattaaaaggggggaaaatttcgggctttcctttaaaaaaaaacccaattccacaaacacaaaaacggccttaattccaacattcccaaaacaattcccgcaagcccaaacaaaaagccctgacattaaaaccaaaatttaaaaaaaagaaaaaaacctcaaacctttattggccccaaaaaaaaaaagttgaattaaaacaacctcaaatcccacaattttaaaaaagccccccaatttttaaaactcccaaaaaccccccgcaacaaaagttttttttttttccaccgcttaaaacatgaacccaaacccaaagcccaaaacacgaaaaccccccccccctttttttttaaagggaaaaattttggaaccttgcacgggccccacccccaccaaaatttttgggctcgcaaggcctgggatccgcaacaaacaaggggcgaacggacccaaaaaaaaaggccctgaaccccctt

SEQ ID NO: 134801 - DNA, 423 bp, Glycine max
  unsure (1)..(423): unsure at all n locations
  Clone ID: PAT_MRT3847_92735C.1
ngacagcaagaaacaattaataagagatgaagtttganagaacaacatnggtggtgctaacaggtgtgtttngttgcttctgtttccttcgtgggggttaccacgctgcacgcatgcgaaactgagcttcttcaaagagtgattcagtcgatcaagttatgactgatgaatgagtattcaaaaccactgctgttgattctctgcatgtgcacacgctcgaatgcctcctcacatgtacgctgtgcaagatatctacgctgagattcatgccactccagattgtaaggagctgttatgtgcacaccgctcacgagccagggacagtgtcgtttgtcttgacaccaacgggcttccgctacaaaccttgcaagtccagagatgactagaataactaatagctctcttaaatggacgacacccctt

SEQ ID NO: 134802 - DNA, 506 bp, Glycine max
  Clone ID: PAT_MRT3847_92736C.1
gagagagagagaagagggtgtgagatatgcaacgtttcagcaacacggtgataggattcttgaactttttcacgctcttggcatcaatacccatcataggtgcgggtctatggatggcaaggagcaccacaacatgtgaaaatttcttccaaaccccacttttggtgataggctttgttgtgcttgtgatttcgctagcgggtttcataggggcatgttttcatgtggcatgggcattgtgggtgtacttggtgatcatggtgttcattatagctgccctcttagggtttgccgtttttggctttgttgtgacggaacagggtgggggagtggaagtgcctggtaaggctttcaaagagtattgtctagaccgttattcgccatggctgaggaataggattaaggatcctcagtactggagctccattatgagctgcatatgggggtctaacacttgtgcaaagcttgccgtttggaccactcttgagtatgtgcagagggacatc

SEQ ID NO: 134803 - DNA, 349 bp, Glycine max
  Clone ID: PAT_MRT3847_92737C.1
gccagataaaacaatgtgatttgttcaaacactttcgggatattacgtgaaaacacaccaactaaaagtccttacagtattcaaattcccgaactaaaaattttgacatgagctataagcaggccttggccaaaattgcaaaaactaaagcttcaacaattccaagctaactgcccctatgggtgcaccttgtttaaatcggatgactggccttataagatatttgccccaggattgtctgatttgctcaaaggaaacttggggtttttatcctatttaaaaaccccgtgcttttgtgagtgcagactatattacaggccctgactctggacattgacaaaaaagggga

SEQ ID NO: 134804 - DNA, 266 bp, Glycine max
  Clone ID: PAT_MRT3847_92738C.1
acataatcaaacatttcttttatacaaaaaaccatttcttcactttcaactcttctactcactcttcgtaaataaccttttaaacctctcaaccactcacacttcaataccttgccctctcttctacacactttctctttttacaatcataacaacctcatctatcaattttcctaaaaccaactcctatttcaaagttataattataccccatttactctaaaatttttttaataccaaaataaccttctttttttttgaaattt

SEQ ID NO: 134805 - DNA, 520 bp, Glycine max
  Clone ID: PAT_MRT3847_92739C.1
cccgaacagagacatgatactgacgattagtactcaaaggatgcactccccactaaaggcgtgtgcctctgagagggaatgcttcaaccaaatatctctagcactcattcagtcatatgcatctttatgagtgccgagaatactagctgctaaggactgtcctgagattctcgagatcaaaggaaggggtcgactggacgcattggagaaatttctgccagaccttcgacagtccagaactcgtgcaatgatggctgagcatttcgtatacaacgagtcgaatgatcaatcaactgtacgtgacgaggctgactcgtacattttggacgatagagtttgatttgctgatcctgtccctggagctgaactttacttgagaccacctcataagacaacagctgaaatgctcagcaacatactctcaatagaacaaattgacccagtcaattctattgatattggcctaattggtatgattcgatggcaaaaaactagtttaacttcacctatatcacccacc

SEQ ID NO: 134806 - DNA, 149 bp, Glycine max
  Clone ID: PAT_MRT3847_9273C.1
tggctcgagatgcttggctaactgcaaacgatttgagccttagcactttagaaccgatactctagtagaccgctggttccctctggaactgcgcttcagaacaaccacactatctgtatatgctccgttgcacgctgctctattcacgc

SEQ ID NO: 134807 - DNA, 115 bp, Glycine max
  Clone ID: PAT_MRT3847_92740C.1
cgcatacgatcgtgctccacatacaccactttttcatgtatccttaattaattcgaatgagggaccctacttacggattcttcttgttattactacgcttctatcaaatatattg

SEQ ID NO: 134808 - DNA, 847 bp, Glycine max
  unsure (1)..(847): unsure at all n locations
  Clone ID: PAT_MRT3847_92741C.1
ccacgcgtccgcagaatcctcactcctagttaactagtacactataccactatacctatacaaggccacaccttctttttgcttattccaactcttcttctaagcttttccttccttcaaattcctcctgcgacctccacatttgcaacaatttcccaccctcttttctcttttttatttttgcaattccaattcatctctccaactcttcattttggcttttaaattttgcagattcttcgccggagatggaacccgacaacattgactgggacaacatcgattctacgttctctcaagatgacacctacgagaacttcggcgcgcctatgtgggttgatctctctgcttttgatgagtctcttgttgatgatgaagcctggttttgcactcacgattgcaagcatccaaaaactgctgaagattttcttaaacccaccaccactcgcaaatccaaggcgaagctgttaagatttgcaaccatttctgaaattctcccctttagggaccgagatctaagggaaaattcttcaattttggaaagttcttatgccaagtctagcgagagatccagaagacccagttgttcaggaagcttttatgaagatagtgagaatagaaatccgaacttttcagctccacttcccaatggtaggaccaacaagctgaagaagccactgataaagacaaacaaggccaattcaaaacagatgaataatggtccagtggagtgtcccgtgaaaagcagcnnataaaaacctcagctgaagagtactttctccgcacaaaatttgttgggtggcagagagattctgagtcagatcagcgggttctgctctgaattgaa

SEQ ID NO: 134809 - DNA, 382 bp, Glycine max
  unsure (1)..(382): unsure at all n locations
  Clone ID: PAT_MRT3847_92742C.1
gagcacactagtttgcggccgccccaccaacacccaccggaggggttcaaaaaaagcacacgaaacgacgccacangggcacananccaagggggnanaagaccccacaccaaccagnccggcgacaaangaaaggacacaagcaccacccnacgaggcanaaaggagncngcagcacaaccccnccacacaaaaaancaggaaaaaaanccagaggcagcccaccaggcgcacccgggggcgcaccccaaccaaaaccggacgcnaaaaaccacgccgaaaaaaggaacaaaacaaaacccnaccccgcaaaccacaaaggagaaacggcacaccaaaccagagcacagcaccaaaagcacccaagcaaccgcaccaaaac

SEQ ID NO: 134810 - DNA, 864 bp, Glycine max
  unsure (1)..(864): unsure at all n locations
  Clone ID: PAT_MRT3847_92743C.1
gagtccaaggnaaacatttctcactcgtcagtacaactgaccatacatgtggatgaaaggacatggctcagtaacacttgggtaggaagactgaagaaactggcgatgtttgatagagtggaaggcgaattcatgtggaacgggagagaagatatcacgccaaaatatctaggagatgatatggtactgctaatgggactcacggatgatagagttgaacaactggtcagggaagcaactgataagggttcatccttgttccatttgccggaaaagtggaactcgcagatgcgaacttgatatagacttgtttggatgttgtgctggggaatccctttacatgcatgggatttggaatacattaagcagatcacgtcggctgtaggagaagcggtggaggtggacaatgacgtggaagaactccagagactggatagggcgtgggtgctaattaagacagcacgactacccataatcctacatgttgtttcagtttattggggctggctgcatgggtctcacaacaccatttgacttggttagagaccgaagttttggagatattattttccataagatctttgttgaccaattcctccaatttccttcttggtctccctctcctcttccccatactaaaaatcatgcaatctactcttctcaatggtacctctaggggctttctttgtacatgtttgagccacctcaattagtgctacactaacctctcctcgtatacaatcattttgtatcctttcttttctcatattgtatggctacacatccatcttaacatcctcatttttgccacttggactttttctcttgctgtctctttaaagcccaacattcactactatagag

SEQ ID NO: 134811 - DNA, 408 bp, Glycine max
  Clone ID: PAT_MRT3847_92744C.1
ttttttttttttttttttttttttttttttttttttttttttttttttttttttttttttttttttttttttttttttttttttttggggcgtaaaaaaggggttcaccccccacattaaaaaataatgggggacctttttaaacccaaaggccccctttcccccccttattaaaaggggaaaaaaccaaggggttaaaaaccaaacggggggtttggtttgggggaaaaataaggggggccaaaacctaaccttggggtccttttgcaacccccggaaccccaaaaccttttttatatggcgaaaaccgaaatccccaaccccctggggcaattccccacagggaaaaatttccccaaaatatgggaaaaaaccaccttggcattgggttcttcccgctccccgggc

SEQ ID NO: 134812 - DNA, 1097 bp, Glycine max
  Clone ID: PAT_MRT3847_92745C.1
tttttttttttttttttttttttttttttttttttttttttttttttttttttttttttttttttttttttttttttttttttttttttttttttttttttttttttaacaactgaacgaaaaatatgataacaatgaatattgttgtatgcgtaaaacttgttacatcacttcgcatatgtaatgttctttagaggtttttgagttggggcggtttgccccttcctttcaccaaaagaaaattgttacaccacttagtaacttacaaacacaattgacaattgacaatattaatcacaaaccttcacctatggaaaaaaaatctttatatatattttaggtgcaagctgaacaaatcaatcgcccaatatacctgtaaagaatgaaatcccgctgcaaatcccttcaagtataacaacaaaaacaacaacaaaaatatatataaccaggcttcctagcctgaaacctcaactagcacaaaactggtatgagaaaaaataatccaatcatagcaccaaacaatgagctaaacaacatccctgtcttataatgggatgaaggcagctacaaaaatatgaagacaaaagaattccaaactcagggagttgacctaaaagtgcaaggaaaacacatgaaattgcagcaaatgctcacgaagcataaaaaaaagttcaagtcggaatgatgcatgaccaaacgatcgcccttgggaatcctacatctctgtccatgcctgtactatctcatcaattttgaatccttcaagtgctgtttcatttgagcagtgattctttacaatgaaagcaatatccgttgcagaagtcccagctagttcaaacttttcgactgcaacctccaaacattcctcccatgtgggaaggcccaggcttaattcccaaaccgaaacttccttaaaacaaggttccccaaaaaggttgatcccaaaacctctatttgatacctcatctttggcgccattatcagaaatatcttggagaagactatccaagcccattttctctaactgttctttatatttatctgatttggatattccattcaaacgctgctcccctcgtgccgaattcggcacgagg

SEQ ID NO: 134813 - DNA, 332 bp, Glycine max
  Clone ID: PAT_MRT3847_92746C.1
aaaaaaagaaagccctgcaaaagtaatacaaattttgggcttagttctccaacaaatctttttgtttaacaggggaaacttgggcctttttccaccaaacaaaatattcttgattaagggtccccaaaactgaaggcaacttttagattaactaaaaggtcccctttgaaaaaaaatagaaaacaaatttttaataatttttcaggggtttgcccaataggatcacaaggtacagccccgggcaatttttactcccccctgtccataaaatagcaatcccgggattcaaaaacatttggtttttaagaattttttacccaccttgggttttt

SEQ ID NO: 134814 - DNA, 612 bp, Glycine max
  unsure (1)..(612): unsure at all n locations
  Clone ID: PAT_MRT3847_92747C.1
ccacgcgtccgctaaaggtgtaactgtaaccagataacatattcttaaaaaaaagtgaatgtatattaaattacttctttagtccctctagtatgaaaattgtgcactttggtatctcaacttttatttttaagctaatgcatatcttatgatcattgaagatttcactatttaataacaaatttttcccaactctgataactggtggtcattgagtcatttaatttcgttaacttatattttgatgatcatcatgcttctcatacagtcaaggaaaatgcaagaaaatggatggcagcctaggtggttccacagagaaaatgaaaatggaacgttccgatatattggcgggtattgggaagccagagcccaaggaagatgganttggatgcccaaantatctttggtgaaattcatgaagngcaattttgatccttttaggtgcatcttgatttntagttcaggtaacgtttacatctattccaaagcatgtttgataccatcctgcatgcatgtgaggtacatgtatatctcagcctctcaggtcccccaaatgaagttcgtatagngatgatgacatgctaatactatagctgggntgcanaatatgat

SEQ ID NO: 134815 - DNA, 588 bp, Glycine max
  Clone ID: PAT_MRT3847_92748C.1
cccttttcttctctctctctcttctttcggctcgagccgccacttcctcctacccaattcctctgtccattcttcattttctcactaaaataaacgaaaaaaaaaacatttttttctgctttctctgataacccttttgtttctctccttgaattttgcatcaagaaactcagttctcacttctcagcatggtttcacttggagctatatatagtgtggcctatgtgttcatgcttgctgctactttggtcttgggtggggatatagttcaccatgatgatgttgcccccagaagacctggttgtgagaacaactttgttttggtaaaagtccccacttggattgatggtgtggaaaacagtgagtacgttggtgttggtgcaagatttggccctacattggaatcaaaagaaaaacgggccaatctttctagagttgtcatggctgatccgcctgattgctgtacaaagcctaagaataagctcaccaacgagatcattttggtgcaccgaggaaaatgtagtttcacaaccaaggcaaatatagctgatgaagctggggcttcagccatccttattataaactacc

SEQ ID NO: 134816 - DNA, 605 bp, Glycine max
  Clone ID: PAT_MRT3847_92749C.1
ctagcgactagtgttgatctgtgggtagcaactgtccaggtcctgtcacgacatatcaacaatgtataaacacccacaggcaaccacccagagtacagtttgagggcgagggccccggcgtgggtgcaataattttagtagagagtaggaacaccccgagtaacagtaagttggcaggactaacagtagaaaggggtaggtagagatataagggatagagtcgaataacagtatagggcggggcggggcacggcgggcgcggcggcggcgcggcggcagtgtagaagaataatagccacccgcacaataacaacgatagtatagtgcaccactgcaaccactataagaacttaccccagggcgccagggtaagttaacccaaccgggataagcgggtacaggccctaaaccattatttgccagcacaccggtttggcggcaattggctaccttaccagcgcatgcagctaggtcgactagattagttacctgtactagccaacgagtggcagtttggtggtatacccgattattgaacacagggtaaccgtgtacaccgcgtaaaacaggatacaaactggcccgtgcacgggcgtaaaagcccg

SEQ ID NO: 134817 - DNA, 432 bp, Glycine max
  Clone ID: PAT_MRT3847_9274C.1
tcaaacccgggcaacaatgcatatatggttgcatttgctgggcagaaatatgcagcaaggtcactacctattatgtttgctgacaacagtcacacaattactagtttcactttggttcttgaatttcaagagggaacccttcaaaacttgtattggaagagtttcggttgtgatggatgtcctagtggaagcatttgcctgaatcaacaagactgtgcagttccaaacaaagagtgtcaaaagaatggagggactgcctgcaacatgggaatacagttggcattttcaggcactgacaagaatctcgatgctcttaattcttggtacgaagtgcaaaatctacagcagtactccctctatggtctattctccaatcttcatgactccatcattgggccatatgaaaatctcttttaagtctacatatttcca

SEQ ID NO: 134818 - DNA, 566 bp, Glycine max
  Clone ID: PAT_MRT3847_92750C.1
ctcagttctaaacaaaatataatcaagcttaacattttctaattaaccataagcatagagatgcaaaatttgaatgggtaaccctgttatttttcacatataagtatcacacattaccatgcattgatttcaagatctatatatcaggaaatgaatgctgagactatatatattattattgcttcttggccttagtagcatttcttcttgggaccgaatcttgaaattctatcaagcattgaacattttttatataaaaccgacatctggattcaattatgctactcctagctttaatttttcctttttgaatgtgttttattttggatacccataaaacttgaaactatgataatgtgctctacaacctgtttcataatatatttccaaaccatctgcattttattagcaagaggcctgttttaatatttcttttttagtgtctttagcattgcttttacctcaaaagaaaaagcatcgaaaagaattttacctattttttatctcacgtaaaccttccttttgaatactgcaaagacatgatgcactgactatttgttgctctt

SEQ ID NO: 134819 - DNA, 144 bp, Glycine max
  Clone ID: PAT_MRT3847_92751C.1
actcttgatatatttttatctctacctcatataatccaaagaggggggaaactcttatcacaacggaggctttaattatctctaattcctgtcacttcttttatcacaaaacactaaccaatattttaattcacctaataacct

SEQ ID NO: 134820 - DNA, 281 bp, Glycine max
  unsure (1)..(281): unsure at all n locations
  Clone ID: PAT_MRT3847_92752C.1
angaaggannctgtagtcatagaagaccgagangnccactggaagngnccgctgatnagaanctcanagtgatgcnngagnaggaagcctcctacgatgnnattnaaaatgctatgcaaggaggaatcagagggcaagttgaagggatttcttggttacactgnagntgnngtggtctccaccgactttgtgggcgatagcagatcaagnatttttgatgcaaaggctggaattacattgaataagaactttgtgaagcttgtttcttngtacgacaacga

SEQ ID NO: 134821 - DNA, 336 bp, Glycine max
  Clone ID: PAT_MRT3847_92753C.1
gaaacgctcatgaaagataataaaatgttgttcattatttttatgataggaacatttacagtaggaatggctgaatatgtagtgacaggattacttacacaaatcgctgacgatatgaaggtttctatttcaagtgcaggtttattaattagtgtttatgctattagtgttgcattgatagggcctttaatgcgaatcataacattgaaagttcacgcccaccgtctgttaccgattttagttgcgatttttataataagtaatttagtgggaatgttagcaccgaattttaatgtattgttattatcaagactcatgtcttgcggcatgcatgcg

SEQ ID NO: 134822 - DNA, 182 bp, Glycine max
  Clone ID: PAT_MRT3847_92754C.1
aaaaggcggaaaatttcttatatatactagatggaattcattttttggtggggctacctaggactaactcatttattacaagaaaaaggggagttcttattaaagggggggttagccagaatcagcagcccaaaaaaagcctcgcctcccacccgggggaaacagggggcttacaagacttt

SEQ ID NO: 134823 - DNA, 116 bp, Glycine max
  unsure (1)..(116): unsure at all n locations
  Clone ID: PAT_MRT3847_92755C.1
ctnctnatcatgcacacaaattaggtgtcactaaagaacctttgtaaacgcacttgacaagaccctgatgacaggaagcataacgaagacaaggttactgaaaaccctgtaccacc

SEQ ID NO: 134824 - DNA, 689 bp, Glycine max
  unsure (1)..(689): unsure at all n locations
  Clone ID: PAT_MRT3847_92756C.1
cacttcttgaaccgtgccttaactaaactagagctagaattagagttagctaccttgcctaattcacaaacgcgtccctctacggctctacctattagctatcttttttgtgctgtgattgaaattaatttgtgatagctcaccatggccattgctacttgtgatcatgataagaacgcaaaggctttgcagttcattgaggatatgacccaaaacactgaaagtgtccaagagagggtccttgctgagattctcagccaaaactcccagaccgaatacctgaaacggtttgagctgaatggagccacagaccgcgacactttcaagtcaaaggttcctgtcgtttcctatgatgatttgaagcatgatatccatcgcattgctaatggtgaccgctctcctattttatgcgctcacccaatctccgagtttctcaccagttctggaacatctgctggggagagaaaattgatgccaaccattcgtcaagagatggaccgtcgtcaattaattttcagccttcccatgccagtgatgaatcaatacgtgactgatatggattaattcaaggctctcatcttcctngtcaccaaagccgagcagaanactccgagtggcttagtggcacgtccagtgtcngctagcatgtacaagagcgaccagttcaaaacagaccctacgacccatac

SEQ ID NO: 134825 - DNA, 236 bp, Glycine max
  Clone ID: PAT_MRT3847_92757C.1
aacatacattggggtttttttttgggtttgaaaaattttaaaacccaaaaatccgaaaacaaaatttcatttaaaccgtacataaaaaggcgcgctgagggttaaatcttggtcaaggggggatgcccatttattaaaatttaggtgtggaacaactcactgggggctagatagcctttattgggaacaaacagccttgccaacttaagtaataataaaccccgttgactgttgga

SEQ ID NO: 134826 - DNA, 552 bp, Glycine max
  Clone ID: PAT_MRT3847_92758C.1
gttgactagataagtgcccaagcatcagctgtgagagtggcagcatgtgaatggttttccagtgaccatcttccaccttatctacaatcaagccaccagatgcaatggaactttgaaatagtggcaaatttgggaaaagcagcaatggcaagtacaaacaagtgatcaggctatgtaattagcaaaatttcacaagaaaagtgacactaaaagccatggattgagcagaatgatttagcagacctttagcatgtaaggacattagtcatataatcaagggcaacctgagcgacattcattgtaattgtctatctgaaagggaacctgatttcgctccttaactggtaaacatggcttgtctcctcatgttacctaaaaggggtgcaggtgtggttctagccttagttctaaatttctaatctggacatacttatattataaataacactcatggaagggcctgtcaatgactaacatacatggagtatcccttgtgggaatacacgtgtgaaaaatgttggaatagacttggctgacctagcatctgtttct

SEQ ID NO: 134827 - DNA, 372 bp, Glycine max
  Clone ID: PAT_MRT3847_92759C.1
ggctcgagccgatctccggttatttttgagctgcgctttcagcagcagagtggcgaagtctcaaggtgtcaagctgcgttgcacggctctatgtctcacgccaaccgcgaataaccatggtcgtggatgatacatcacgacctattgcactgttaccacgacctctaggctagaatcgcactgtaaggctcgagaacagactatctcagctttcgctatgcaggcacacgcacaatgccgtcctactactatatgagactgacagacaaggattgtctacactacgatgagcatcactggctctctcgaaccagacagtgctgcttgatgcagatcgtactgtgacactgcatgcacagacccatgatccat

SEQ ID NO: 134828 - DNA, 581 bp, Glycine max
  Clone ID: PAT_MRT3847_9275C.1
accaaccggccggataactaaaatttaactgggcaacagtttaaaaaaggggggctttccccccgcatattacaaagggaaccaaaaaaaccctatttttatttaatgggatccttcaaacatccaaaaagtttgggccaaccaaagtcttgctgggccagaaagggaaaaccgggaatcttctttttggaacccaaaaaaaaaaaaacccatgtttcacttcaacagcagggccctgcttgggcccattatttttgagccccgggaaagggcatcagccatataaaaattctcacctccggccccaaaggggggggggcccaccttctcaaaaaaggtgggcctgagggaaaagggcaagggggccggttctctctcatccatgttaacaaggttgggggctccagtcctgattcggccccaaccggccccattggtttcatagggcaaaggccctcctgccacctaaaataaagctcgatttatctcccaatcttctcgggagcccccacctgtggaacctgcagccaaggttggtggcggccatccgccggtatttccaaaggtcccttccttcccct

SEQ ID NO: 134829 - DNA, 974 bp, Glycine max
  Clone ID: PAT_MRT3847_92760C.1
gcactcctcaacttcaaacatggcctcatagatgactctggcatgctgtctacatggagggacgatggcaataacagagactgttgcaaatggaaagacattcaatgcaacaatcaaactggtcatgttgagatgcttcatctccgtggtcatgatacacaatatttgataggtgcaatcaatatctcttcattgattgcccttgaaaatattgaacacttggatctcagctataatgattttgaagtgagtttgatttatgctattgaacacttgcaatcaatatctcttcattgattttgaacacttgaaaaattccgtcatttttactacaagcttctgggctgatgctctctgaaaataatttttcagatttgttttcattcttatgtgaccaaagcacagcttcaaatttggcaactttagatgtatcacgcaatcaaataaaggggcaactgccagattgttggaaatcagtaaagcaattactgttccttgatttaagcagcaataaattgtcagggaagattcctatgtccatgggcgcccttgttaatatggaagccttggttttacgaaacaatggtttaatgggtgagttgccttcttctttgaagaattgcagcagtttatttatgctggacctgagtgaaaatatgttgtcgggtccaataccatcatggattggagaaagtatgcatcaattgataatcttgaacatgcgaagaaatcacctctcaggaaatctacccattcctctctgttatttgaaccgtattcaattgttggatctttcaaggaataacttgtcaagtggaattccaacatgcttaaagaatttcactgcaatgtctgaacagagcatcgactcaagtgacactatatctaatatatattggaataatcagacttacttagaaatttatggtggttacagatatggaggttatacgcttgacataacatggatgtgg

SEQ ID NO: 134830 - DNA, 427 bp, Glycine max
  Clone ID: PAT_MRT3847_92761C.1
agtgtctgtgcgtgtgaggagtgcctgggcgctaatgactactctacatggcttggacaggagtgcagactgtatctggagctgtcggacctacccgactaggcgcttatgttccaagtttcgctagggcgcgtgagatattgggacggacatgaagggctcggagggtggactagtgtcacatccttgtggaataatcgataagaccactcgcggaccattatattctatagcaggggtaccatgaattccatagaatagacaagtgctgtgggggtggtgtgatgggaatacctctcctaaccgacgatctgccctgaaaacatcttttgtttcttaacaacttagaccactcttgaatctgtctcatgactgacagattatcgttaggcctgtttagtgatttgagtcgcgcatgggaccattg

SEQ ID NO: 134831 - DNA, 311 bp, Glycine max
  Clone ID: PAT_MRT3847_92762C.1
ggggcggtgggtatgacagccttgattcaaacgcttgcaaagacagaacagcttgttaagagtacgaattcatattagcagatcggcgtggaaaactacggcgcataaaccagcatttttttttttttggcatatctgtcaggaggggggctgcgacaattggcaccatacttgcaactgcaagttatgatgtataatgagcaatccagtcccacaagtctgactgtaagccctggtgctatttgccaacgatggcgatgtagcagattgaatagacgatgtatctgacgctgtcaaacccattatagaag

SEQ ID NO: 134832 - DNA, 266 bp, Glycine max
  Clone ID: PAT_MRT3847_92763C.1
cttcactattgccgtcattagtgttgcctgatatgtcatcaccatcgccgtcgttagtccaccgtagccctatccgtgatggcgattcattttgcagaggggacttcaggtagaagctgatgtcccagtagaaagttttgaattgtcacctgttgaccagatttttgttcgaataaggccaaagtacatttttaattaagctttcaaaaactgcatcaattctgtcatcagctactcataattcattggtggctctggatgagctt

SEQ ID NO: 134833 - DNA, 156 bp, Glycine max
  Clone ID: PAT_MRT3847_92764C.1
cacggctgcgagcgacgacatgagggtctcattgtccggctcaacggcatgagacagatgagcgactcggggtcctattgtcgaggccaaactccatcggggatcataactcacgcgcgctccattagtccggatgattggtctccctgatatctc

SEQ ID NO: 134834 - DNA, 265 bp, Glycine max
  Clone ID: PAT_MRT3847_92765C.1
ctgatccttatttttgttgtgtggggtggggttagtaaatggtgttattatatattttaaattgtgtaaggaaattaacagtttatttatcataataaggaataatgtaaattgttggtttcttaattttgaatttatgcatttttgcacaagttccctgctttatataacttggatgtatattttaaggtagttcaccattggtagaaatctgctcaattccaattgcaatgaacttcattcatgcttggaaaaaatgataaaa

SEQ ID NO: 134835 - DNA, 333 bp, Glycine max
  unsure (1)..(333): unsure at all n locations
  Clone ID: PAT_MRT3847_92766C.1
ttttntnctttttattattttcttttnnngcaaaaaacaaaacccgggtttttttaactaatttgggggtgggggtttggtagccacccggaaccaaagtcctaatggcttttacaaccgccaacatttggataaaccttaacctaaccctttttaacttcccttggcaatatttgaattggatcaaaccaccggcctgaaaaattcaataaacttaaaaacttttattaaaaccatggtcaaaggcctaatcttaaggagaattaaaccgttttcctccttaacaattttgggcttaaaactttccaaattttaaccaaggccctggcccag

SEQ ID NO: 134836 - DNA, 202 bp, Glycine max
  Clone ID: PAT_MRT3847_92767C.1
gggaaggatttacttgttagagttggacaacatacgaatgaggtacgattggtggtttcatgtacataaccgcaaatgcggggtgtgagaaagcataacatgaactgcgcttgcttcaaaacattattttcgtggttggcaaatacagggacctatgcatgctacgactaaacaaagctataggggaggctattcacccatg

SEQ ID NO: 134837 - DNA, 250 bp, Glycine max
  Clone ID: PAT_MRT3847_92768C.1
caaaaccttcggaactctcagcctcaccccaaatcaaaaatagggaaaaaaataattttatctatttcatcccattactgaaaaattttgtctacaatttagcacaattagagtacccttttggaaattggggtttgccaaagactgaattttgggcctaattggttgaggtttatagttttataggttttggcggctgaaaccctgttcgggatattcagttattcggcttactgtcagtggctatggc

SEQ ID NO: 134838 - DNA, 773 bp, Glycine max
  Clone ID: PAT_MRT3847_92769C.1
tcatcatggaacggtgtttattactacaaactttggcttttgcacttgttgctgttgtatgcatgttcaacttcttggttaatgccaccacagatcctaatgaagcgagagttttaaacgcaatctttgacaaatggagtataattgcgaatcatgaacactggaacataagtggtgacctatgcagtggaagggccatcgatgacacatctatcactgatcaaacttacaacccattcatcaaatgtgattgtttcaggaacaacaacaatacttgccacattactaaactgaaggtttatgcattgagtgtggtgggtgaaattccagatgagctatggactctaacttacctcacagaattggatcttcgccagaatcacttgactggttctatatcttcgattggaaatctaactcgtatggatttaacctttggcatcaatgctttgtcaggggagcttccgaaggagaaaaccttctagaattgaatactgagtttttcgtcaacaactcggttcttccatctggtctggtaaactagaacactatagtcttctctttccttttacgaaattttattagcgaaattagcaactgattttctttgttgaattttctcacaaatttaaatgaatttttttttcttagtaaagtaaagttccacacaaatttaattaaagtaccagtgttaagctttctacgatgggttgagccaatctgttagtttgattacacaaatttaatgagatatgagataggattatttacat

SEQ ID NO: 134839 - DNA, 296 bp, Glycine max
  unsure (1)..(296): unsure at all n locations
  Clone ID: PAT_MRT3847_9276C.1
ggcgtcttcataaacgcctttcttctccgtttccgtttcctcgttcaaattcgtacattgatctgcgcaaatgagagagtgcatctcgatccacattggtcaggaaccgataaangtcggcactgcttgctgggagctctactgcctcgagcacggcatcgggcccgatgggcaaatgccaagtgacaagacagttggcggtggtgatgatgctttcaatactctcttcagcgagactggtgctggaaagcacgtgccacgtgcagtgtttgtagatcttgagcccactgttattg

SEQ ID NO: 134840 - DNA, 511 bp, Glycine max
  Clone ID: PAT_MRT3847_92770C.1
aggaggacacccagaccccaagttgacatatggaaaagaggtgggtgctcgtatgggattgggcaaaaccgaacaccaagaagagccgacagagagaggggcagatacagatggagatgcagagagaaatatggttctgggaaaaagggatattgtgactcctacagattccgaggccatgatcgatgtaaatgctgatgaagctataacatacttgtaggctggaataaagggagtagccaggagcatgccaacgtctgctgccctggatgatgttagcaaacatctgaagttgaaattgtttgagggccccacgggaaggaagtgcattggcaatttaatggatgctggaatatggacagactggggtgaagaaaaggttgggactgggacagagcaaattagtgagaaagatggaatctgggcaatatatggctgggtatatataaatgcatataaaaatagagataagcttgaggacaagataggcactgttgaagacagaactcgc

SEQ ID NO: 134841 - DNA, 261 bp, Glycine max
  Clone ID: PAT_MRT3847_92771C.1
caagtccaattttccaaagaaccaaaaatgcacccatctcgtgccgaagcagcagcatcacaaccctgctttaatggctgtttcccatctccacttcttgcctctgagaagtcccatagaactacttcttccaagcccaaagtcgtcaataataataatgtaacttcatcacacgatgacttcgtcgcagccacatcttccacccttcacccacacccaaatttcaccaaccacgagtccctcccatctttgcaagactca

SEQ ID NO: 134842 - DNA, 169 bp, Glycine max
  Clone ID: PAT_MRT3847_92772C.1
gaatctagtggacgagtgaataagagatatcaatatattatgatactggagggatacaatacgacggttatgattgtggggatggtgttcggcatggccatgagtgggatggccagtgctcaatcctccttttgtcgcatgcccatcgatgggttggctgcctgtacgc

SEQ ID NO: 134843 - DNA, 1632 bp, Glycine max
  Clone ID: PAT_MRT3847_92773C.1
gctggtttcggcctgtggcgtttgctgtcttgcgcggccttgcacctgctcttgttgttgttcctgggtgggtcttgtgcattgtccctgctctcgctgaaatcaacacccttggtgttgtgtatgaacgtggattgattggaacctatcagaactggtgtgaagccatgtccacttacccgcgaacttatgacttcatacatggtgattcggtttttagcctctaccagaacagatgtgatatggtggacattcttctcgagatggaccggattttgcggccacaaggcagtgtcatgttgagagatgatgtggatgtgttgacgaaggtgaagatcattgcagatgaagtgcaatgggatgccagaattacagaccatgaactcgcgcctcctcattcactggggtctcaaggaggagaataatttgaatggagttcatcgcgatctgcgacaaagcaggtattcgagcacttaggggccactcctacacggggcggatcactggattggttggatgaggacacgtgtgaatcttaaagaggaatcggtcggaattgagatagaggcaaaaagtttattctggaaataggtggtgcaaaaggtttaccttgcaatatgaccagattcccaccaatcatattcactgcaaaatcacgcgaaaggtctacaagaatagacccttctgtgaggcaaaggatcccgacacagcatggtacactaaaatggatatctgcttgacaccactgccagaggtgaatgacatcagagaagttagtggcggcgaattgccaaagtggccccagagactaaaatcagttccaccaaggattagtagtggaagtttgaagggaattacaggtatacggctgcgagaagacgacagaagggggaagaagagagtagcatactacaagaccctggactatcagctagcagagcgtgggagataccgtaatttgcttgatatgaatgcttgcttgggaggctttgcagctgcactgattgatgatcctgtgtgggtgatgaacactgttcctgttgaggctgaggtcaacacacttggtgccatatatgaacgtggattgattggaacctatatgaattggtgtgaagccatgtccacttaccctcgaacttatgacttcatacatggtgactcagtttttagcctctaccagaacaggtgtaaagtggaggacattcttcttgagatggatcgaattttgaggccagaaggaagtgtaatcttgcgagatgatgtggatgtgttgttgaaggtgaagagtttcacagatgcaatgcaatgggaatctagaattgcagaccatgaaaaggggccccaccagagagaaaagattttgtttgcagtacaggatgaattcggttataagagtgttgtatttcaatggaagggtatatgaagataatgatggtgtaatatttgaaggaagtaaaaaagcgattcagattaaacgtagaattagtttcaatgctttgaagaaataaattggagataaggtaaagttacaaaataatgaaattatttctgctatcagctgtagatttttagtgtcagaaaaatatattgccttgcaaatttgtgatgacgaagacgttgaaacgatgttgg

SEQ ID NO: 134844 - DNA, 532 bp, Glycine max
  Clone ID: PAT_MRT3847_92774C.1
ggcttgcttaatgatctgttccctagctgttaccactgccaaccgtgccggtgccggcatggttgctccattcactggcctgaactccatggctggcttgcctaccacaaagaccaacactgacattaccttcattgcttgcatcggtggaatagagcaatgcatgcaggtgtggccaccacttggcaagaagaaattagagactctatcctacctgccataccttgatgatgcacaattggctaaggaagtgaaataccttcttaggaaaggatggattccttgcttggaattcaatttggatcacagctccgtgtaccgtgagcacaacacgtcaccacgatactacgatagacgctactgtaccatgtcgaatctgactatgttaggttgcactgatgcttctcatgtgttgaatgagctgcactaggctaagactgcataccctaacggctccgttcgtatcatctgattcgacaacgctacccaagtgcagtgcatcacattcattgtctacaatactcccgcctac

SEQ ID NO: 134845 - DNA, 333 bp, Glycine max
  Clone ID: PAT_MRT3847_92775C.1
tacccaataaactgtcaagaagtggaaaaccgaagagactgccaagaggttgatgactgaggggactgcctggaggaatattccaattcttaaaaaaaatgaaaaaaaacctggtgacaaaccagcattacttttcaggccagagaagaaaaggaccgcttctttaaaatggttgccacccaggacaagaagggggatgaaggggattcatacaacagggacacatctttgaatcccaaaataagaaatactcaaaccttgatagtctgtgaaaaaaataatgagttggggatgagcagactcctgggcgcgaaaaaacaccaacccaaataa

SEQ ID NO: 134846 - DNA, 151 bp, Glycine max
  Clone ID: PAT_MRT3847_92776C.1
gacacccaaagcggttttatttttttggagaatccgaaaacccggttaaaaaaggtccaattccccttcccgaaccaaattaaaaaaataaaccgccgaaagtggaggttattggccttggccttggccttggccttggccctggcccttt

SEQ ID NO: 134847 - DNA, 326 bp, Glycine max
  Clone ID: PAT_MRT3847_92777C.1
aatgaacacaatttaattttaacgcactgccgtaggccaatgatagggcttgccaatggaggatgaaaatgacttaccaatgaagggctaccaacaggaattgatccctggacctttgagtcaaggctgtttgatcctaccagtcgagccacattcattggcttctttaaaggactcattatttagatatttttcagatgctattctgcttagagtgccattttatagaaacttaattatggaatttgtacattatagattaaatttcctttggtttttgtttaaatgcaggtttgaaaaagcttgagtatcttaatattggatgc

SEQ ID NO: 134848 - DNA, 338 bp, Glycine max
  Clone ID: PAT_MRT3847_92778C.1
ctagctatctcgatcgaactgtccaaggtcctgtcactgtagtatggatgcccaacttggcggcgcacgaacacaaaacctggttgctattcactatattaatggcagattgtgcaggtgggtgggctggacaaggttatacaagagccaccatgcggtggggtaagtatgttttattgggcgcaaggtaacccgggcactaaccaacaacaacatgtaggctgaccctaacgccaaagagccaccgatagcatagctggtatccatgttcgccttggcaacgtgcgtagacacttggcgagagtccatagatgacattcggagccgaaattatgagt

SEQ ID NO: 134849 - DNA, 1005 bp, Glycine max
  unsure (1)..(1005): unsure at all n locations
  Clone ID: PAT_MRT3847_92779C.1
gtggctcgctctttttctctctctacactcaccaatggacgactctcacaacaggaagcgacttcgccaccactccccaaagcacccccgactttgttctaactcctccgacactcacccacttgactcgccccagtttcaactctcccgcgtcgacccggaccttctcaacatgctcaatgatgccgagaacgtcacggagcgtgaccctaccatgcagggtcttgactctgttattaagagtttcgaggaagaaatactttctccgcttccgaacccgaatctagcgtccgaagcagaggtgtttaatccgaacctagggtacttgttggaagcatccgacgacgagctagggttgccgccggcggtagcgcccggcgaggatgcgacaaatccccaaacacttgattcgggccgggttggatctgacggagtggatctgactgggttcctagggtttgaagatgatatcgtgaactgcggagggtttgggttaactggttacgatgatgtggaaggtgacggtggtggttatgtgacgatagatggattgtttgactatgcggaacccggtgccgatattctgtggcgatcggagtcgttgcaggcgatgtagttggttggaaagattaattaattaattaattaattaacatttggctaatgaaggtgtacaaagagatatctaggaattacgtcccacagataacataagtgggttaagattagatgtgaatttattttagttcttggctaaagacttgttctttaatattcttttagcaaaaatgttgtttaaatgggaatctagaaatggttaaaattaaaatccttgctgtccttagtgaaactggagaatgatctataatagaaccagattttcaatccttttatgtttttctttttgttttattttttgtaacgatccctgtgagtttctgtcataaatttgttgaaatatatgacaccatttgatgcatatgaaactcttaaattttactaanc

SEQ ID NO: 134850 - DNA, 402 bp, Glycine max
  Clone ID: PAT_MRT3847_9277C.1
aacccataacaaaaaacattttttaatttacaaactttttttacaaagggaaaccaaaaataccgcaggggaaaatttttttctttagaaacttctccaagaacaaacagataactggatttattatttttcagaggcaaggcaagctttttgatacattataccccaaaacaccaacaacagttcttaggggggcagtttttacattgtactttaacatgaacgcgttataagggcggataaaagcaaattccttcaaccccgggccttaggggttaagcccagcacaatactttttgacttaaacggggacacaattcaacaattttttttaaagccctacgggtttgctgaatttgttcataattttagagccttgttagggtaaaaacacacattttt

SEQ ID NO: 134851 - DNA, 313 bp, Glycine max
  Clone ID: PAT_MRT3847_92780C.1
ctcacgcgtccgtttaagacggggattcgtacaacgatacatgcaatgctaacagggcgggattatctgccacatatgatgctagaggtaagcccactgtcatgccatggccacaaatgaccttgactttgactgggaatgattacccatttgtcgacgataattatattcaacttgagtgctgagctgcttcaacactcccctgttcacaacaaggtttcatcgctatttcacaatgagcagaccatatcagagccttctgcgattgtttaatacttttattagacatggtagaacaaccagtcttattacc

SEQ ID NO: 134852 - DNA, 475 bp, Glycine max
  unsure (1)..(475): unsure at all n locations
  Clone ID: PAT_MRT3847_92781C.1
atttttaatcttctataatatatatatatatatatatatatatatatatatatatatatatatgagaatgaatcaaattatatcgctataattttgataactattacacaaatttataactttcaactgaataatgttttcttaaaatttaccattggattgaaagttcgtttcacataaatcacatatacaaaatttcatattaatttaaaatcatttgttactttgttcatatagattaaaatcgatgtaatataaacatttcaaattatactaaaaatatgaataaattgatgaccttcttgttgttgttcaatttaaaaaaaaattaatacaaacaatcttgataatatataaatataattcaacagttggatcaataaaaatcatattttgtgtcaagttataaaaataatataatagttgtcaaaagcnatatatatatatatatatatatatatatatatatatatat

SEQ ID NO: 134853 - DNA, 104 bp, Glycine max
  Clone ID: PAT_MRT3847_92782C.1
tccactcatgcggtaaaagatttgttgctgcaaaactaggcgagcctaagggagcaatggctgtaggttcaacgcaagctattaaagataccatggctgcactg

SEQ ID NO: 134854 - DNA, 267 bp, Glycine max
  unsure (1)..(267): unsure at all n locations
  Clone ID: PAT_MRT3847_92783C.1
cggaccggaccggaagggccgggccgacccacccgggtgagatgccggaacaggaacgggaagccggagggagcatgggcggaccngaacccgaaccaccacaggacgnggnggcaganagaaaccccccacgacacgccccaagcgcacagaagaaccncaggcagaaacaggcgacaccaagggaaagcccgaacacggaaccaagagcaaaaagaaaccgcggagagaccagagcaccacgccccggaaacgaacgcaagcagg

SEQ ID NO: 134855 - DNA, 250 bp, Glycine max
  Clone ID: PAT_MRT3847_92784C.1
ttggaatttcgggggcgacgccactctttcgtacttcttcttaaaaaaccacagtattgttcctcttctctcactagtctttttatgggtgggttttttttactactagaagggtctcttctcttcttatatttattttatcccacaccctttattgtatcctatagagaatctaaatattaccaccttttttactttcaatctctacttttaatgttcttttcattattaaaaacacacatcgaatttt

SEQ ID NO: 134856 - DNA, 719 bp, Glycine max
  Clone ID: PAT_MRT3847_92785C.1
ggctcgaggagcattcaacacctgtgaccctttctttattcttcgtgattctcacctttgttaacgtaaaaatcctaactttgtttcctttatcaattggggtccccttgaaaaagacgccatccctcatcattattcaattcggtgaaccaggccaggtgtccatgtgaactcctttactctctctctctctctaatgcccttcaagcccagacacatatctgcacttcacaaccctccaaacaacatttaactatatataaaaccatcattctgaacaccatgtttactctcttcttctctcttcttctacattagttcttgttattcattattcattctcagcttcttttcttctggggggcaaaaggggtcacttttcagatccgagattgagctcctttacccatcatcatcatggagctcctcgggtacctgaatcagggtcacccttctagaggaacaacacttgttattactctttcattggtgctttcgacacttgtgtccttctccactttcacacatgccttctcttcttctgcgtttccggaactgaatcctataaaacctaggcactcacgtcttctcaggagtgccgtgcaacatgaaactcctacatcacagctttctgaaatatggtcacctctggaaagccaaggatggaaaccttatgttgaatcaaataagccaacattaccagagaagtccgagggata

SEQ ID NO: 134857 - DNA, 749 bp, Glycine max
  unsure (1)..(749): unsure at all n locations
  Clone ID: PAT_MRT3847_92786C.1
ccacgccgtccgaaaaccatcattctgaacaccatgtttactctcttcttctctcttcttctacattagttcttgttattcattattcattctcagcttcttttcttctggggggcaaaaggggtcacttttcagatccgagattgagctcctttacccatcatcatcatggagctcctcgggtacctgaatcagggtcacccttctagaggaacaacacttgttattactctttcattggtgctttcgacacttgtgtccttctccactttcacacatgccttctcttcttctgcgtttccgtcttgtaacttgtcagagtcccttaattcctatgagctatggtgtgccactagaatggtcatcgaattagagatgaaccggactccggaacatgcttatgttgatgccacctagtacctaggaactgaatcctataaaacctaggcactcacgtcttctcaggagtgccgtgcaacatgaaactcctacatcacagctttctgaaatatggtcacctctggaaagccaaggatggaaaccttatgttgaatcaaataagccaacagcattaccagagaagtccgagggatatatccaggtctttcttgatggaggtttgaaccaacaaaggatggggatatgtgatgcagttgctgtggcanagatactgaatgctactctggtgattccatacctttgatnanatcctgtatggcgagattcaagcttcttcatggatatatttg

SEQ ID NO: 134858 - DNA, 348 bp, Glycine max
  Clone ID: PAT_MRT3847_92787C.1
ggctcgagcttaggcagaaaccctaagatgcttatatcttgagggttatgatcagatttatccttctctatgactcattgcttgttactatctattattatactatgtaggtcgtttactgacttgtaaatagagatctactatgctgcatagcagcattgctaagttactacaaacaagagtagaagcaaggcgggaaatactgataaatatagatgtggatctaagatatgagtatttgcaacttagttgatccttgtgcatatatgctatctgttgattgacttggacatagtggcaaaagaattatatgggtggacatttaatgaataacacatcctctataag

SEQ ID NO: 134859 - DNA, 503 bp, Glycine max
  Clone ID: PAT_MRT3847_92788C.1
aaaatattaaacaattatattatattttcgtcttgggtccataaaaagtcgagatccaatctgggtgtacatatcaaatttttatgacaactactaaaatctacgttttccatcctaaatattttcatgtaatgatgcaatacttctcaacaaacattaattcatggaaagaggggattaaaaagaatctcaaactaatacaaaataacacggggaagatacttagttatggattatgatcattgatcagacttcaatttgggaggtgtaggcattttaaatactgagtaaagtgatgcttgggactgagaaatcagtttctctcccatgtcttgaagaatctctccgtaatgtaacaacatggctccgttttgagccatatgcttagccctttctacttcatcatgattggttaaacttggatttaccctcttgatcttaagaacatactctccatcgcccacaatctcaaggtcaacgttgactgcaagcggacgcgtggg

SEQ ID NO: 134860 - DNA, 312 bp, Glycine max
  Clone ID: PAT_MRT3847_92789C.1
ggaaaccttcagcttgcatatgatgcactgcaacgatcatttgctacagaccaaaatgcgagtcttactaatggtgacattacgttatggtacagaccacctgagtggctgctaggaacaacaaagtgtgggccagctgccgatcttaggcctgtggagggcatttctgctgaacttctacaagggaagcctatatttgctgtagatgatgagccacatcaatatgcttacctatctcagcctgggtggagcacctgaagaagctcctaggactgaggctaccagaactccttattataatatatgtatgcc

SEQ ID NO: 134861 - DNA, 493 bp, Glycine max
  unsure (1)..(493): unsure at all n locations
  Clone ID: PAT_MRT3847_9278C.1
cggacatttgngtagctagccgatcctaaaccctcttacttgatgggaatgttgtttagagggtcaagcatacttcctgtttctaatactcagcgcaggggacgaatcactgtatttcaaataccccctaaatggcacagtgaggaaaattctcgtcttctagtgcacagtgatattcagaacctgcactggtgagtaaaattagtacagcctcaagctactgcaatgcatgtgggagctatagaaatcatcattgatagtttcgcaagtcctgactgcaacatagttggtgcaatgcttttggttgatacttatcataccaatcctgaaaatgcagttcgtagtatttttgttgcgcctttcacaggcggaaggcccattccggtggttacattcccgaataccattgagcatattgaaccagacatgaattcaaggttccagcctttgagcaccacttccaatggtgattttgttcaaggaaaagatcttc

SEQ ID NO: 134862 - DNA, 313 bp, Glycine max
  unsure (1)..(313): unsure at all n locations
  Clone ID: PAT_MRT3847_92790C.1
aacggaaaaaaacttatttttcattaattattttaggaaaaantaaacttttacatagaccttttttttggataaaaaaaataaaaaagaactggaactttttaggaacacgacgtaagtgggggctttttcttgctagaaaagggaatgatgataaagattccacgtgctttttctaaatcaaacttttaagggttatttttagattcatagcagcccttaagccgttggataaaaagcattttttggaattccacataaacctttcttgggacgtatttttttttttattcttatttacccttttttaccc

SEQ ID NO: 134863 - DNA, 311 bp, Glycine max
  Clone ID: PAT_MRT3847_92791C.1
cctctcctttatctctattttttttctttttttcaaacacagcttcttcaagccacggacaacgggtttttagcctggcgtcgcatatcaaaactccggccccatataacggcaaagctaaaccttaaaaaaaaactaccactgccttttatcggtgcccctctttttcatgtatcaccgacaattattcttatgttggggtaaaacttcccccatgtctccttttctccgcacaactcatgggggagagaaccctcctatacatcacacttccctggctggttcatacgacttttccaactataactcct

SEQ ID NO: 134864 - DNA, 151 bp, Glycine max
  Clone ID: PAT_MRT3847_92792C.1
ggggtggaaccggcgaagggtgataataataatattacttgaggagcagattaatgattatttgtatgtaactagtaacttggcgaggcagaaaattctctctatatattagggatcatgaggggcttatgagaatgtggaaaccattttt

SEQ ID NO: 134865 - DNA, 847 bp, Glycine max
  Clone ID: PAT_MRT3847_92793C.1
ggaactttaagatcatttaccgccgctatgctggcctctacttctgcatctctgtggatgtcaatgacaacaacctggcttacctggaggccattcacaacttcgtggacgagatgttcctggctggcgaaatccgagagaccagccagacgaaggtgctgaaacagctgctgatgctacagtccctggagtgagggcaggcgagccccaccccggccccggcccctcctggactcgcctgctcgcttccccttcccaggcccgtggccaacccagcagtccttccctcagctgcctaggaggaagggacccagctgggtctgggccacaagggaggagactgcaccccactgcctctgggccctggctgtgggcagaggccaccgtgtgtgtcccgagtaactgtgccgttgtcgtgtgatgccataagcgtctgtgcgtggagtccccaataaacctgtggtcctgcctgaaaaaaaaagaagctatagatgaagaagataacacaaagtaatgtccaagagtacaaaacgacctcgtgcgttgaagaggctctgagaatacaatggggtgctccggattagtgctcctcctatcgcggacatcgattccgtgccgggcattgaagggtgagaatttttactttatcaagactttgactataggttttgcaacattcagagcatgacaacgtcaaggtaaaaattgtatactgccaatatttgcaaaggcatttgctcccaaagattcaggctcaaaacggacgttgcaaattagatgcttaaaaccgttaattgcctgatgaaaaatagcggattttcacagtcaggaactcattcgtgcaaga

SEQ ID NO: 134866 - DNA, 682 bp, Glycine max
  unsure (1)..(682): unsure at all n locations
  Clone ID: PAT_MRT3847_92794C.1
ccgaattcccggtcgaccacctccgtttttttaccacttttacggggggggggggtgtcaaaaacataatctctgaggggcgggcctcttactacccacaaccaagaaccaatgttattattactactattgctgattcactcattgttgatcactcaatccacgccatgcagaacttcttgtggggacattcccatggggggcgggggnnctngacctttaatttnnaanccatactaacaaaaataacaannnnnnccnantnnnnaccccccccgggagaaccnntnnnnngaaaaacaangggcacaanggnagctangctgatccaaacattctaatcactgatccattcatgtggaactgggacgatggtgagaattaccgtcccacaaggccattcagtttggacaccagcacacgcttcaagctttcccctcataatgagtatctattcttcaattgcagtgaggatcatgtgatcgttaagccaaagccaattttctgtgagcgcttccctgagcgttgtgactcttcgtgtgacagtggtagttatctctgcaggcacatgccagggtgctcctttgctatgagtggtagctcttgctgctcttactctccgagagccactgaatcgttgaggttgatgctcaagtattgtactagttatactagtgtttat

SEQ ID NO: 134867 - DNA, 483 bp, Glycine max
  Clone ID: PAT_MRT3847_92795C.1
acgctgggctacgaccggcacccggccgtgcaccatctcaacggcgaggttgcgccgggtgcgctggtcgccgtgatcggcccgaacggcgccggcaagtcgaccctgctgcgcggcatcgtcggcatcctcaggccgctcgacggcagcatccatctcggcgggctcgactcccgcgatatcgcctatctgccgcagagcgcggagatcgaccgcagcttccccatttcggtgttcgacttcgtcggcaccggcctgtggcgcggcaccggcctgttcggcggaatcggcaaagccgcgcgcgaaaaaatcctccgcgcgatcggcgccgttgggctgaatggcttcgagaaccgcccgatcggcacgctctccggcggtcagatgcagcgcgtgctgttcgcgcgcgtgttgctccaggacgcgcggttgatcgcgctcgacgagcccttcaacgccatcgacagccagaccacaaccgac

SEQ ID NO: 134868 - DNA, 344 bp, Glycine max
  Clone ID: PAT_MRT3847_92796C.1
tgttaatattttgaatgtagcttttatgtacaaagtttgggggaaaaatcaaagtgcgggtgggtgaatgatatattataatatatacattatgacattccaaggatttctcaatcaatcctataaaattcctcaccttaaaacatttacgattatatttattatcctgagaaacacattgttaatgtagaactgcatacatttaatgatatagtcaattattacaatgccttgcctagtgatcctgaaactgatataaaaactgtctaataatcttttactactaaatctctatatatttatttttatctttatccttatttaatcaaacaaacttttttaat

SEQ ID NO: 134869 - DNA, 519 bp, Glycine max
  Clone ID: PAT_MRT3847_92797C.1
ccacgccgtccgcagaatatattatatatatataataccaaaatatatatgtaaaataaatatatcatacacctctataatggaccttgtattttggttagtttaggaaaaagaataaaattgtctcctatttcgattgactacaaaaatatatttttgtttatttatttgggttataggaatttgaatttttacctttcattttcttacaacatttaaaatgagggattgagggattttgagtgactagtttgtggtaggactaaaaatcggtgtgtgaaaaacttgtgactgtattttattgtttccgtgaccaatcaacacggtagagacattaggaagataatgataaaaataaattatatacagatttctcacattttacatatgaaaaattataaatattattttcttactatgttttaagtaaaaaatacatcgatgactaatttctaatacgagagactatttttaagatattcatattcaattatatttaaataaacattatattaatac

SEQ ID NO: 134870 - DNA, 144 bp, Glycine max
  Clone ID: PAT_MRT3847_92798C.1
aactttagaccgcgggcgcgcctttcctgaggcattctactgaactaaaccatggattgtggtctgttcttcatcttcagggttctgaaacctgtaaagatccttggattgcgaggcgtagtttcacctgacgcttatatcatc

SEQ ID NO: 134871 - DNA, 643 bp, Glycine max
  Clone ID: PAT_MRT3847_92799C.1
gtctctgtctgactgagaaacacaaagccgaggagacgaagagaaagaaaaggcacacacacaacggtggaaatgaatgaatgattgacggaccaaatcaaaccaggccagcttcaaaacgctgcgtttcactcccccgtcctcgcgttgcttcgaaaccctaaccctatccacggcattcctccgctcgccgtcgacgccgtcaccgtcgcgccaactgccgcaaaccgaataaaccgaatcgatctgagagaagaagaagaagaagacgcgatctcggaggtgggagcgaaacgaaacgatgccgtctcacgcggatctggaacgacagatcgagcagctgatggagtgcaagcctctgtcggagtcggaggtgaaggcgctgtgtgatcaagcgagggcgattctcgtggaggaatggaacgtgcaaccggtgaagtgccccgtcaccgtctgcggcgatattcacggccagttttacgatctcatcgagctgtttcggattggagggaacgcacccgataccaattatctcttcatgggtgattatgtagatcgtggatactattcagtggagactgttacacttttggtggctttgaaagtccgttacagagatagaatcacaattctcaggggaaat

SEQ ID NO: 134872 - DNA, 252 bp, Glycine max
  Clone ID: PAT_MRT3847_9279C.1
gaaaaaagtagggtagaatcgccgagtcgtctagcctagtaaaaagcaatagcccctgcctcaactccacaatcacaatcatttgtaaagtaaaaaagggtggtttgctggcttgctcgtgcaatctacgataaattcgttcattcacatgttttattttatctgtttgactcagaaggaggagaagacgaagccgaagatacagaaagaatcgtctccagcgcaccgatgggagacggggcccccgcaaga

SEQ ID NO: 134873 - DNA, 463 bp, Glycine max
  Clone ID: PAT_MRT3847_927C.1
gtatgtgttcaacaattgtttcaatcaatgttgccttatgcctgtatagagagaaggataaaaagaataattgattttagtccaacaagaaccataaacaaatacagtaatagatagataaaacaagttatcatgtgatattttgcaaatccaaggtaaaacgataaatctttccacaaacaaaaaaatggctaatataaaatttcgattcctcatcttattttattgattttaatttgatatactaaattttaaaagttttactttgttactaatagtgtttcaagttgaacaaattggtcctttccttgcattagttttatgcactaacaatgctaatattgattgacgttacatacgttcatcttatgtaacatcttatgtcaccaagttgaccaagttagtgtggtaatggacccacgtgaacggtatttgtgccaccacacacagtaatgttgggaga

SEQ ID NO: 134874 - DNA, 760 bp, Glycine max
  Clone ID: PAT_MRT3847_92800C.1
caatgaaggattcccttagctgaatgttctagagttctagttgcaaatttcaaattctctttgtgatatcgaagtcattagcctttaggttagtgtttacctactaaactttgattcccttaacctttgactgaacagctttatgtttgattgttctggaagtctaaatctttgactggctaggtaatatgacttcgtggttttttctttcctttttcctctgttgtttttggcggtattcactttttccccttatgtagattgcttgtctatgcttggtagttgggtcatttatcatctatattttagtggaaagatatgacagagtattttgaattccatagtgaatccatgcattgtcaatcttggaagagcaaatctgccattgtgaatccatacattgtccattttggaagagcaaattttcctagagtagaaatttttcttaggccacttttttaacaacggaaatttctgactgcctcttaactttttgctagtctatggatattcttcaggtgctagtggaaagtggaacaagtgagactctgctcatatcttatgcttatttcatatttctgtacagagctatctatgtaaagtctattctgcgtgtgttttttcctctaattttgttggtttggcacatcaagaaagacacacgaggagctatgagctgtctccattgcctatggacatgtgcttctaaggtctataaactaccattcccatgaagaacatttcaattctgatcagtagt

SEQ ID NO: 134875 - DNA, 1301 bp, Glycine max
  Clone ID: PAT_MRT3847_92801C.1
gtaagctcggaattcggctcgagggaagaggtggatgcacttccggctatatatgctactgaaagtattagattcaaatatcatgttgtttgagatttgaatctaatactttcaatcgcatgttgggaaaagataaaactgccacgtccttggaagaggtggatgcacttccggctatatatgctactgtgttaaaattctcgtcatctgcgccatatgggtcaattccatcctatcgtataccttttcttcttggtgaaccttacaataaagattctgcatctcaagatgcctccctaagtattgttcctgttgatgttggaaatgattcccaggaagaggaaaaatatagagctattgttgagattgatttggagcccagggaacccacaccaggtatagttgatgttcacattgaaacaaatgcagaaaatagtcaaatcatccaaggtcaacttcaaggaatcacagtaggcatagaagacatgtttctcaaggctattgtcccaacagacatcccagaagatgaaatacctcgatacaactttgacttgttcaatactttatgggaggcatgtggctcatcctccagcactggccgggagacatttcagttgaaaggaggcaaagggattgctgccatcagtggaactcaatcagtcaagcttcttgatgtccctgcaacctctttaatccaggcaactgagcgccatttggcacattttgtcgtaggtgtgagtggggagccacttattgatgccatatgggaagggggaatcattcaaaatgtcatttgggaagatgcttctcctgatgctacttctgttactaatcatgatacaggtccactccgtcttacttacaatgatgaagagtatgagaagggggctattagcaatagtagaaaaagaaacctgggttgttttcttgttctaatatttcttccaccgcggttccatctccttttccaaatggaagttggtgatgtttcaactttagttcgtattcgtacagatcattggccgagcttggcctacattgatgattatttagaagctttgtatctgtcataagagctttcgtttcacctacattgatgactgtagaaagatgaataatcctcaatcagtttatcgaaacatatgtccttttttttagagaaaaaaaataatgtagaatccttagctgtacgtgtacatgatcctgttgaggctaccagtatttggggaatgcagaggattgtcccttgtagatgtttagataatacacaagtattactttgaaaacataaaaaaaaaaaa

SEQ ID NO: 134876 - DNA, 232 bp, Glycine max
  unsure (1)..(232): unsure at all n locations
  Clone ID: PAT_MRT3847_92802C.1
gtttcatttacacccttctttcgttgaaattgaaagtcatcagaaccttgcctgtaaacaaattattatttatcattttttctctatgaacttcagattcaataattttccagacacaaaactgttgctctcttcacattccctccctgtcaatttttccctgtctttctttgttcgtgcgaaacttagtgaanttgcctcggggtcgnngntccncnnngttccctttngg

SEQ ID NO: 134877 - DNA, 410 bp, Glycine max
  Clone ID: PAT_MRT3847_92803C.1
gagaaacatctaagactatctacgatcaaatggccatcgatatctgccgttaattcagtgcacagaccatacgggctgaaatcaacaagaaggtgcgccaggtttatgagatgtacagcaaggctgcgggattagcggcggagatagagcggaacagaaaagattcacagagctatgccggaatgaagagaaaggcatgcggctgcattgggaatgagatgctatgatgtggaccttgcataacaagactgaccagctgaactaatcaaacaagttcaccacgtgaatgctcaccctgacgatcatgggatatcggttcaggttgcggtggctaagcacataaatgaagaggaagttctgactgatatcagccttgacaaagatgttgatggttgtcatcctttgaacat

SEQ ID NO: 134878 - DNA, 269 bp, Glycine max
  Clone ID: PAT_MRT3847_92804C.1
acccacgcgtgcacccctcctcccactcctccgagcctaaatttatatgaacttttgcactgaaaatctcactgccaccggtcttagaccatatgggccaaggctcaatactatcaacattagctcagtaaagcattcgcctgttacagactccgatatgtcttgcatatcttgctagccatgacccaactgtgatccatatagatcttaaatgtgactataatcatattaacggaaaccaatgggaacatgaaattggagatcttggg

SEQ ID NO: 134879 - DNA, 190 bp, Glycine max
  Clone ID: PAT_MRT3847_92805C.1
gcctggtagatttgagagtttcttccaatctagcatggaagttcaacaatcctacttgcaaggattcagcaggaacatttaaaaggcttctaacattacaaaatccaagagattaaccaaggtcctgttaattaaagaggaagggcaccaccaagggaaccgaagctgccagagaacgtgattgtggaaa

SEQ ID NO: 134880 - DNA, 173 bp, Glycine max
  Clone ID: PAT_MRT3847_92806C.1
agccgaaagcccagtaaatatttggggtactaattacaataagttacctttttgagggaaagggctagaattataaatgatgccccacttacttactggggtgcaaattaaaagacatttaaacttaaccttgtaatttaggggaatgaaacattagcggataccggcaaagg

SEQ ID NO: 134881 - DNA, 393 bp, Glycine max
  Clone ID: PAT_MRT3847_92807C.1
cccacgcgttcgcatgcatagacatggccaccgctacttatgcaccactgtctatatccttactcactggcctcaacgcaagcagcaggccaagagagtgccgccgtagttaaaaggctcagcgtccccaagccacagggatctgcggcatcaaagctctactcaaagacgctggagtctgtgctgtggccactgctgacagcgcagtactagctagcaacgccatggccattgaagtgttactgggcactgatgacggatatctgggcttctctcccaactctctctccgcggaccctgaggaaaagatcgtgttcaagaacaacgcacgattgcaccacaacattgcgttcgacgaggacgatattcctagcggcgtggatgcacggaaaa

SEQ ID NO: 134882 - DNA, 171 bp, Glycine max
  Clone ID: PAT_MRT3847_92808C.1
acccaactcttcagtttcgcgaccaggattcgcgtcagatccgcactccgttcagaaaacggtcttgatgtcgatgtcgatttgcggaatgtcactgcacgagcgctgcgacgaaaagcaagacggtaaggggagggggtgccgccggaacgtcgtgcaaggaggcggcgc

SEQ ID NO: 134883 - DNA, 484 bp, Glycine max
  Clone ID: PAT_MRT3847_92809C.1
gtggcatattgccttggagaaaaggacaaaaacaaaaaaggaatcagcttcctaacggaatggtgccacctcagccaacaaaggagaattgctacgttgctgctacgatgctgattaccactcctgcctgctatttttccacaaaatccttgaggtgccttggacaaatctggaacttcttcaaactgtttgcattcaccaagctcaatttcctgtaaatagtcaagttcctgtaaaaaattcaaaaggagagagacatcacaacggaaaatcctcaaaaaaggaagaaaaaaaatgtaaacatgtgcacatacctatctttctttacctggatcccctgccaaagttgtttaagtttgctgtgtggcattggaatctcaacaagaaacttagcaaagaaaggtgatggagactgaaaagggtatccaatccactcaatgtacctcagttgatcagaaaatggctcaagagtagcaggaaggtc

SEQ ID NO: 134884 - DNA, 251 bp, Glycine max
  Clone ID: PAT_MRT3847_9280C.1
attcaaataaatttattactgagattcggggaagtaccttttagagaaaaataaaacaaaaatatatgataataagaaaataagaaatatgaagctaacatgtggtccacctaaataaaatatctttacatgatatttagataccgataaaataatatattaacaagtgtgtattacatatataaggatgacccttatcaagtcattaaaaacaacagcttacatattatgaacataatcagagatcgcta

SEQ ID NO: 134885 - DNA, 310 bp, Glycine max
  unsure (1)..(310): unsure at all n locations
  Clone ID: PAT_MRT3847_92810C.1
ccccctttnnaaagagggaacgggccttttcccccaaatttgggggggaggaggggggaagccaaagtccttttggggccacccctaaaatttcaaaaaggatgtgggggcccaaccccatggaaggccttgctccctccgcttccaagtgaaggactttaaaaacgcctttgtgtaaaaccgggggaaacccttttggcccccctttcccaaagaagaaccccgaaaacatcttttggggaaaagtgtctttttttccaaaaaattccggggggttaatgaagaaactaaacttttttttttggggggg

SEQ ID NO: 134886 - DNA, 444 bp, Glycine max
  Clone ID: PAT_MRT3847_92811C.1
ctttttttttttttttttttttttttttttttttttttttttttttttttttttttttttttttttttttttttttttttttttttttaaaaaaaaaatttccccaaaaaaaaaggggggcccccccaaattggaaaaacccattcggacggggtaaaaaaaaggggcccccaaacaaacccatagggggcctgggggtttaaaaaatcaactttcccaggtggggcccttttcaacaaacaaaaaccccccccaaaatttcccggaaaccctggttttaaacagggcttttggggttagggggggcccgggccctaaaaccaggttaaggggggttcccacccaaaaaaaacttttttttaattttttaaaagggaaaaagggcccccccataaggcggggggattttcctaacctttttttggcaagggaaattcgggatct

SEQ ID NO: 134887 - DNA, 588 bp, Glycine max
  Clone ID: PAT_MRT3847_92812C.1
ttgccgctctacatgtgtagcagtaccgcctgcttgggggggggggggggcgcggtttatgagaggggtggggtgggaggaacgaaacagagaaataggagagcggagggatagactggagtcaaaaaaaaaagaccggtgggatagaaaaataaccggagcgtgacgaatgcatggaacggctaaataatacataacggtaaaagggcagatgtgacggatggggagccaaataagactaatgggtgaggggttaggctgcaaaataactgcaagcaagaggtagtggggcaagttacacactaaaaagaaggaagtccgaggaacaccaacaggcaggcgcgcgtaactgcgctgtagtgacttaacagagcagcgtattaaaaatggcacggaggagggtagtacctgtatttgtaacaacgctagcagacctagttggcgaaactgcaactggtggcgtgcaatactggctaggtgtagataacctagggctgtatgcagccagtacgtatacgcgtactggttttcgcaaccagcaagaggccgacacaaatggtgggtaagtctgccgtgagggtggtcgac

SEQ ID NO: 134888 - DNA, 1030 bp, Glycine max
  Clone ID: PAT_MRT3847_92813C.1
taggggcgaattcggctcgagttttcattgtagacaatgatgaaagatcaatttgcgaattatgtggtccagaaggtcattgatatctgttctgaaaatcagcgagcaatgttgctttctcacgtaagaatccatgctcatgctttgaagaaatacacttatggaaaacacattgtggctcggttggaacatcaatttggagagaatcaaacacccagctcatgatagaataaagagacaaagccatgggtctccagcaatgctgccgtgtcatgcaaaccctgcagcatcaacatatgttctgttgatcacaggaaatagctgagacattgatagcttccagttgtttttactcctgacttcgttcctgcgccttgatagcttctacattgatggcttcaggagacattagtatatacgactatactttgaaactcaatgtaattatgtcatttaaataattggttccgaatgttatttgaataattatttggaaggaaacccttcccttcctgatgtataatttactgggtcttccgtgcttgaggttcttccacatacttcaaaattacggtgcgagaaatcgacagacgaggtaatccaaaagttttttgagtatggaagccctgagcagagaaaggaacttgcaaatcgacttcttggccagatactgcctttaagtctgcagatgtatggctgttgtgtaatccaaaaggcacttgaggctatcgatcttgaacagaaagctcaacttgttcatgagctagatggaaatgttatgagatgtgtacgtgaccaaaatgggaatcatgtaatacagaagtgcattgaatcaattccaactaaaaacattgactttataatatttgcatttcgtggtcaaattgctcttctatctatgcatccatatggttgccgagtcatacagagagttctagagcattgttcaaatgagggtcaatgtcagtttattggtgatgaaatcttggaatcaatttttactcttgctcaggaccagtatgggaattat

SEQ ID NO: 134889 - DNA, 2132 bp, Glycine max
  Clone ID: PAT_MRT3847_92814C.1
caacgtcctgaaattctccacaagcgctcttggtcagattttccaaacacaccacgataagaacgcatatggtgtaggcgaaaaaggtcaggggacaatttggatttcctctgcagccttcttttagtgatcctatttacatgcaatatcatcaacaaccttttgtggagggattatggtgtatctgctcaatctgctaatccggcacctagagcctgttggcgtagccaaattggtccctttgattcccaaaaaaggcccaatagtggtgcttacttggatgacaaaaaattacataatcagaaaactggtgctaatttgaattctaatagagatgggctaatacaccctggttattttggacacccttcaaatttgggttttgtaccccagtatccaagttccccactttgtagaccagttttatcaggatacccagaaagtagtcctggccttctaggtggaaggaatgaaatgaaacgttctccagcttctggtagaaatggaggtttattatctggatggcaagttcaaagatcttttgacagtgctcatgaccccaaaattgctaattttcttgaagacttaaaatctggcaaaagtcgaagatttgaactatctgatattattggacatattgttgaatttagctctgatcagcatggaagtcgatttatacagcagaagttggaaagttgtagtgtcgaagagaaggcattggtgtttaaagaggttcttccacatgcttctaaattaatgactgatgtatttggtaactacgtaatacagaagttttttgagtatggaagctcggagcagaggagagaacttgcagatcgacttgttggccagatactgcctttgagtttgcagatgtatggctgtcgtgtaatccaaaaggcacttgaggttattgagcttgaacagaaagctcagcttgttcatgagctagatggaaatgtaatgagatgtgttcgtgatcaaaatggtaaccatgttattcaaaagtgcattgaatctattccaaccaaaaagattagctttatactatctgcatttcgtggtcaagttgctactctatcgatgcatccttatggatgccgagtcatgcagagagttctagaacattgcacagacgagagtcaatgccagtttattgtagatgaaatcttggagtcagtctgtgctcttgctcaggatcagtatggtaattatgttacgcagcatgtcttggagagaggaaagcctcaagaaaggagtcaaattatcaacaagttgtcaggacatattgttcaattaagccagcataagtttgcttcaaatgttgtagaaaaatgtttggagtatggtgataccaccgaacgggagttgctagttgcagagatatttgggcatgatgaaaaatgtgataatttattgacaatgatgaaagatcaatttgcgaattatgtggtccagaaggtcattgatatctgttctgaaaatcaacgagcaatgttgctttctcacgtaagaattcatgctcatgctttgaagaaatacacttatggaaaacacattgtggctcggttggaacatcaatttggagagaatcaaacacccagctcatgatgaaaataaagagacgaagccatgggtctccagcaatgctgctgtgacgtgcaaaccccgcagcatcaacatatgttctgttgatcacagaaaatagctgagacatcgatagcttccagttgtttttactcctgacttcatacctgcaccgtgatagtttccacattgatggcttcaggggttatactttgaaactcaatgtaattatgtcattcaaataattgtttgaaaaagttatttgaataattatttggaaggaaacccttcccttcctgatgtataatttactgggtcttccgtgcttagtgtgtggttttcttggagatacaagtattcaagaattcttaaactcaactagtccttggcaacttagaacctggtccttgtcatgcatgttttaattgggaatgattacattgaatgttggttataggcttacggtttttaggttggagcgtgtagaaaaatccttcagctaccgcctcacgctgcaatataggggtgggcggccccttaaaaga

SEQ ID NO: 134890 - DNA, 968 bp, Glycine max
  unsure (1)..(968): unsure at all n locations
  Clone ID: PAT_MRT3847_92815C.1
ccacgcgtccgcaatagtggtgcttacttggatgacaaaaaattacataatcagaaaactggtgctaatttgaattctaatagagatgggctaatacaccctggttattttggacacccttcaaatttgggttttgtaccccagtatccaagttccccactttgtagaccagttttatcaggatacccagaaagtagtcctggccttctaggtggaaggaatgaaatgaaacgctctccagcttctggtagaaatggaggtttattatctggatggcaaggtcaaagagcctttgacagtgctcatgaccccaaaattgctatttttcttgaagagttaaaatctggcaaaggtcgcagatttgagctatccgatattattggacatatagttgaatttagcactgatcagcatgggagccgttttatacagcagaagttggaaagctgtggcgttgaagagaaggaattagtattcaaagaggttcttccacatacttcaaaattaatgactgatgtatttggcaactatgtaatccaaaagttttttgagtatggaagccctgagcagagaaaggaacttgcaaatcgacttcttggccagatactgcctttaagtctgcagatgtatggctgtcgtgtaatccaaaaggcacttgaggttatcgatcttgaacagaaagctcaacttgttcatgagctagatggaaatgttatgagatgtgtccgtgaccaaaatgggaatcatgtaatacagaagtgcattgaatctattccaactaaaaacattgactttataatatctgcatttcgtggtcaaattgctcttctatctatgcatccatatggttgccgagtcatacagagagttctagagcattgttcaaatgaggctcaatgtcaagttattgctgatgaaatcttggagtcagtttttactcttgctcangaccagtatgggaattatgt

SEQ ID NO: 134891 - DNA, 375 bp, Glycine max
  Clone ID: PAT_MRT3847_92816C.1
aaaaagcggaaaaaaccccggaaattttggccccacccatagaaggaatggccccacttataaaattttatttaggaggggggaactttatcagcccatttaccccctcacccctttggtcccgggccttcccaggaaccctttttaaacctcatttaaaaaaaaccccctttgggggaaaaaacccccttccaaagggggttaaacttaaaacccctggggttcaaaaaaccctttattccccaagggaggaaccccttggcccgccctaaaaggggggggtggacaaaccccattttccgggtttatttaaacccccccgtttaggggggggccaaaagggtccacaatggcggaaaaacccttggttttccc

SEQ ID NO: 134892 - DNA, 362 bp, Glycine max
  Clone ID: PAT_MRT3847_92817C.1
aaagccaaaccattttaaattttattacggacttgtgttttgttttttcattggtcttcccccccggaagacattttggttgggttccaggggccaatttttggggaaacccagaaatttttttgggggttctttttttttacgaaatttttttgttaaaaaaaatctcttcggggaaaatttttttcactttaaaaccccccccccccccaagggggggacggttccggggtctttttgtacaacaaaactaaaaaattttttgcgcggaaatgggtcccaacccggggggccttttctgaaaaaccctctgaattttttccctcacaccctgggggacatggcgaaattttccccctttc

SEQ ID NO: 134893 - DNA, 1378 bp, Glycine max
  Clone ID: PAT_MRT3847_92818C.1
gaagatgaaaaaaaactcaattaaacaaagaaatactcctacactcaattaaatactccaagtgtgtgtttggatggagcaattaaagtaagtaaagtattttaattgagatattaaaatgcttccttgtaaaatgatctgtttggatagggtattttagaagtaattaaaatgtcatcattttattgaagcattttaataaagtaaattggcagaatttcaaattctcacaaaaaatagaggaattaaaattcccagccactcttaggctctctctccctctcagccacatgctctctctccatctcagccactctcacgatgatagttctctctcagctgcacgctctctctcacgatgctagcgcgctctctctctctcagcacactagctctgtccgtacctctctctccctctcagccaccctcatgcaccacacctagctctctctcaagtaagtttcccttgcgatttcgacccactctcgctgtgccatggtgtgttcattttttttcgttaatttgtgatttattttttatttagttgtttgatttcattgattttgtactgtgggtactcattgtttgatttcgttaatttgtactgtgggcatttttacaaatttgttaggaactctaggtgcttgtgtttattcttctaaaagaactctggtttataaatctagctttgtaacccatccatgcctccgatttgagtggtagttgggctggttgttatgactggttgttatggtcaagtctccctacaatacatcatgttgaatggtagttgatgccttgtgttgggctggttgttaggaatttggggattttagtatttaaccaacttgcctacttgcctacttgcctacttgcctacttgcctacttgatgaaatgcctaagctaattaatgtgaagtataaatcgttgtttatcatcttcttctttttttatctgttctggtttctatggcaagtaggttcttgattggctgttaatttttccttcagtatttttttttcatatgtttttgtaactatttaactggtctctccaatgtgatttatagaaggtgatatcttacccaattgtgtttctaaaatttttggcatcaagtaatttcaaacgtgcaaccatcaatgcagttgtcccactgatgtaattttgtatcccccagatccttctttacctcccacaaacagctgtttcatttaaagccagcaccaaagcttatcatctgtactttactactttgtcacccttcttgagcctttcttggtctccatgtatcctagcacataccacaggctactagctgatgtgttttatccaaaaaaaaaaaaaaaaaaaaaacaaaaagcggccgctctagagga

SEQ ID NO: 134894 - DNA, 347 bp, Glycine max
  Clone ID: PAT_MRT3847_92819C.1
gggaaagggtataaaatctgaaaaattcggctctttgtcaaattcccaatgtcaatataaatctgggtgaaaaatccaagagctccttcctttattgccaacttcgcaggcctggtatttagaaaagcaggtccttataatcaaaaaaactccccctaaagggggaaagggtttatatggacaaaaaaaaatgcccggtggcggctccgagaaaaattggataattggtaaaaaaactcttccctctaatcaaaaaatctttaaaacccgccccccttggggggcgaaaaaagggggaaaaaccaccctcccaacggccctaaccttggttaggatttttaaagaaa

SEQ ID NO: 134895 - DNA, 488 bp, Glycine max
  Clone ID: PAT_MRT3847_9281C.1
tattcttgttcaaccgcgatcacaggttgccgcaccttaaatccggaaacaaaagccatcgctacttgatttcaagagtcttccaatgtcttgctacttattggtgtacgatgtctaaagggaatgaaaatcactctttgtgctggccacagactacgggaatcattttcttttccactcttagtttatttgctgaacactctcctatttgatataggactacgcgtcagatttaaactttctctgcttgtttctcagttctgtgcttaattacaagttcaagctggtgaaatcttggattagtgctcccactctgctatctggtataggacttcgagggtagacttttctatttctagcctttcttacactctctccttttcactgatccgcattgccgttcaaagtggtcttatttgaaaaacacttgggacgtggtgcaaatgtttgctttcataattttctgtggagacatcaggctcattgtg

SEQ ID NO: 134896 - DNA, 198 bp, Glycine max
  Clone ID: PAT_MRT3847_92820C.1
cttccttcttcaccctttgcacaccgtgtagtaactactttcatcttcattgatagcgaaactccgaatcttgctacacatatcacaccgctaacatggatgcagttgtggatgtgagcctagaagatgtaactgataacaacaagacatcctacacagccaacaccaggggccgtggacgagattcgggacctggac

SEQ ID NO: 134897 - DNA, 228 bp, Glycine max
  Clone ID: PAT_MRT3847_92821C.1
aaaaaagaaaaatcacttttaggggtggacgcgggccaaagttataaaacaggccaaaaaccgttttagtcattaattgattacatattacaaaatacatccatgttggctaagaataggacaactcctggatacgttggccactaggtgcagcacaattgcaataccctaatgtgttagaactaaaacgtgggctagtctacaaaataaacatgtggacttggaaaa

SEQ ID NO: 134898 - DNA, 282 bp, Glycine max
  unsure (1)..(282): unsure at all n locations
  Clone ID: PAT_MRT3847_92822C.1
ccagaaggaagaagcaacaagacaagggcaaaagcgagcnagtgtcgctntcccttcctcccctccccctctncccccttccagccgacagcgggttacgcttgagctccgctcgcgttcctagcttcgtgcacacacaaaacagcgacactttcaagcgaccaaaatcctcacgccctcgtctttttgcgacctccttatcctnccctggttcaagtctggcgagcgagcgagctggcgtgatcgagaaactcttgcnaccagggggngaagcaagggaga

SEQ ID NO: 134899 - DNA, 408 bp, Glycine max
  Clone ID: PAT_MRT3847_92823C.1
cccagacgtcctaacatgtacagcatcggactctacaagttcaactgggggggtaagtgatggtttttatggcacacactcattggcaactctggattgcggggttggaatagaacaagaaactgctggttccataaccgtacatatatgttagtctggaaaaagagatggcttgcaagttactgaagtaatggggccttatgtaggcggtgcatactttcttcattcaggtgctcatacgccaaagagggacttccaccatgggagggacacaagaatgcttgcgcgccattactctgatagactattgtgcactgagaccaggagagaccttgcctatagatatatcttttgaccttccataaggtggcactcctccaggtaatcagcgtggctggaattgttaag

SEQ ID NO: 134900 - DNA, 381 bp, Glycine max
  Clone ID: PAT_MRT3847_92824C.1
caaaaatgtggaaaagaacgggtttggaagaaaaagcagttaaatggatcaactaaaattgaggggccctaagtttagctgttaataaactcgcccataatgccataaaactggggggcatgggtttgggagccttttttttcggatggttggttgccatggctgttattaatctgtggatttgggatcgtccaaacgggaaaacaaattttttaacagcactactaattccatacatttttttaagctggccttaattaattttggacgttttcaggggagagctgggaaaatggatggctgcagttgctgttgaattacgccttttctttccaagacacttccttgatgggttggaatggcctggggctctgattcttt

SEQ ID NO: 134901 - DNA, 746 bp, Glycine max
  Clone ID: PAT_MRT3847_92825C.1
ccacgcgtccggttgttgaggggaaggactaaaagattattagatggtcatgttagggttttttttttttttggattcataggaatcgaagaagacaggtatgagggggtttagaacaactcacaggatttgtttttttattttattttttattctggttgagaatatacagtatggcaataattaataagttgctctgtgattaacttttttctgcatttgatttggtattcaacagtattgcctagtgcttttttattcaatacaatccaaaaggggttacccattgccatgtattgtttgaacctattcattgtcctgcttagtaacggtcaaaccgtcctttctctcattaactattgtgcaatgggacaaaattagatgcaataggtgcttttggtgatgtttttgttttctaattgaagttttaccttggtaatatgggtaataaaggtttgcattaaagatcaatgtaggttaaagagatgaaactctaattttgatcggagaattggagaacaatactcaaaatatccaagagtttgcgtctaagttttgtccaactaaagaaaccatatcaggttggtgtatgctgtctcagttcactctgtgttctctcagttccctttgtttttgagtacattggttttttccttttaattagttcacaaggcactcccactatatcatctgttgcaagtttatggtttagcctctggttctggtttggcttcctactattattt

SEQ ID NO: 134902 - DNA, 521 bp, Glycine max
  unsure (1)..(521): unsure at all n locations
  Clone ID: PAT_MRT3847_92826C.1
cggaanncgccgggncggacccacgcccgtccggttccatcnnccaaatatttatggcgtgtatggtatgcatcgtggtttaggaccacnntctacaaagagtcagtgggggagtccagaatttatagagtagtatgcttgcaataccttgacatcntnnattcaagtcattgggctttgtgatcnnncaaatcactaattcnnccctgcaaattctagaagtctgtctcggatagtttagtggagaaccaagcgccgaataccaataggagagtaccgtgagatatgtcgagcagagtntggacgctgctgattgatctctcatgttnggatttccatagtcagaacaaagcgtggatacattaggagagcatgtgagactgtcaagcatagttggactgctgattgatagctcaacgtttggtttggtttctatggaacgtcaaaaatagtccaatgtcgtgtctaaataacattgaacaccgcaaatgtgttgcaaactactttgtctntattatgtt

SEQ ID NO: 134903 - DNA, 441 bp, Glycine max
  Clone ID: PAT_MRT3847_92827C.1
tatccggggggacccacacgcgcgcgtgtgtgtgcgaagacaccacagaggggcacagcgagcgagccacaaaaatattcattacacaagcttttgggttatcattccaaccattggccttccatgttggagcatattagaatgagctagaacgagattagagaaaactgcaaccgggatgagtgcaaaaacagctaatgtgttaacaccatcaccaatgctgtgacctttgtctagatacccaccaatgcattgaagaaggatatccaactttcacctttatctggagcctgggatgctaatcaaactcgaggccattctagctaaactgttcgagttgtgcatcctttcatgcatgcctaaaacgctaagatgcgcacctgatacatcacccataagatgcacttgaatacagggcttcaagctaagaacctgctacta

SEQ ID NO: 134904 - DNA, 203 bp, Glycine max
  unsure (1)..(203): unsure at all n locations
  Clone ID: PAT_MRT3847_92828C.1
cttccattccatcgcattgtatggtccccttttcatacacaacacaacacattccctccacacaacatatgatatacncncacncncancaccancaccaacaccaaccgcttcccctctcccgggttcggatctacgaccaccgccgcacgcggcccgagcttccacactcagaatccagatccctacttccacacaacata

SEQ ID NO: 134905 - DNA, 3230 bp, Glycine max
  Clone ID: PAT_MRT3847_92829C.1
tgtccaaaacgccgagcagttcgggtttttggagaagtttcatggactctgattgaagcttagtttaatatgcaaaaaccacttcaggaactgtgttgtatttcccagtgttgactccaaggattgcatctttcattccttgtgtgtggtcttttgtacttaatttatattatctagcatttcattgatttttcggtacactgagattattgggtactatactgtgggcaaggttgcttgtagaagagagagtatttgtacttctttaaaattgtaccaatggaacaccattttggtcaaggcactacacctgcatctgaatcctttgataaggctagggttttaaatgtgaagccattaagaactcttgttcctgtgttcccttcaccatctaatcctgcttcatcttcaactccacaaggtggtgccccttttgtgtgtgtttctccttctggccctttcccttcaggtgttgcacccttctatcctttctttatctcctcggaatcccagaggctctctgaacagaatgcgcaaaccccatctggtcaacgcgttcctgcagctccggtatctactgcagttccaattaattcatttaggacacccactggtgctgcaaatggagacgtgggctcatcgcaaaagaatacccgaagtcgtggatgggtcacagaggaagatggctatagtaatgttgagatagaggaaattgatgcagatgaaggaactgggactgggaggtcaaagcgcaagtcaaataagaagactaaggcaagacagagtggtggttctgtttctgttgatgttgatccggatgcagtcgctgctgatattctcaaatcactcaatgcactggttttcgatgtacttagtcaaccagaaggtagcagggattcagttgcatatacactcatgatatatgaagtgatgcgaagaaagcttggacaaattgaagattcaaatagggcagctaactctggagcaaaacggcctgatttgaaggcaggtgcaattatgatgaataaagggattcggaccaacagcaagaaacgtattggagttgtgcctggtgttgagattggggatattttctttttcagatttgaattgtgcttagtgggcttacatgctccttctatggctggaattgattacattggcaaaaccagtcaagaagaagagcctttagctgtaagtatcgtctcatctggagggtatgaagataatgtggaggatggggatgtgttgatttacagtggccaaggtggggtgaaccgtgacaagggagcaagtgatcaaaagcttgaaaggggtaatcttgcattggagaagagtgcgcatagaggtaatgaagtaagagtaattaggggtttgagggatccacaacatccaactgggaagatttacgtctatgatggcctttacaagattcaaaattcctgggtggagaaagcaaaatctggtttcaatgtattcaagtataacttagtcaggttgcctgaacagcctcaagcatatatgatttggaaatccattcaacaatggactgagaaatctgcttcaagagctggggttatattgcctgatcttacttctggggctgaaaatgtacctgtttgtcttgtgaatgatgttgataacgagaagggccctgcatatttcacttacatcccaactctcaagaatttgaggccaactgctcctgtggaatcttctactggatgcccttgtgttggtggatgtcaatctaaaaattttaactgcccttgcattcaaaagaatggaggctatcttccatattcttcagctttgctacttgcggacctaaaatctgtgatatatgagtgtggcccttcttgtcaatgtccttctaattgtcgaaatcgagtttctcaaagtagcttgaaatttcgtttggagcctttcagatccacgaataaaggttggggtcttagatcatgggattctattcgtgcaggaactttcatatgtgagtatgcaggggaagtcatatatattgctaaaccgaagaagcttggaggtgacaatgcaaattatttaatttttgattctactcacatttatctgcaactggaagtttttcctgatgatactgatagctcctaaaattcccatcccccctttatatatcagcaaaaaatgaaggaaatgtttctcggtttaggaaccacagctgctctccaaatgtattatggcgtccagtcatacgtgaaaataagaacgagtcagatctccacattgctttctatgcaattagacatatccctcctatgatggagttgacttatgattatgggactgttcttcctctcaaagtaggtcagaggaaaaagaaatgcttatgtggatctgtaaaatgcaagggttacttttgttaattaattgtctatgatgaattttggaggaggaggcctccgaatgaatatacttaaggataagctttagctatgtaagtcagacagcaggatggaactgtgtagaaagatgatagcagaccaacttttcttttttggcaaacctagtaaattggcacatgaaagagcaagttgtctattttgctaatgagggtaagttaaggtgtaaaagttaactgtaagacacattttgtgtagattgtttctttttctgctgttagaagtacccttttattttttttgggatggattttgagtagtagggcttttttagtagtccacatggtaaaattaaatttgacctgtagaattgaatattttgtttgttgcccatcatttccaaaaaccatcctgatattctattcttttgcatgatggagttgccttatgattatggggctgtttttcctctcaaagtaggtcagaggaaaaaaaaatgcttttgtgggtttgttaaaagcaaagggtacttttgttaattaattgtctgtgatgaattttggaaaaggaggcctctgaatgaatatacttaaggataagctctacctttgtaagtcccccggcaggatggacccctgtagaaaaattatagccgcccccctttttttttttggccaacctagttaattggcccatgaaaaagcaagttgttttttttgctaatgtgggtaatttaaggggtaaaagtttactgttagaccccttttgtgtagattgtttttttttttcccgtttaaaaaaaaaaaaaaaaaaaaaaaaaaaaaaaaaaaaaaaaaaaaaaaaaaaaaaaag

SEQ ID NO: 134906 - DNA, 479 bp, Glycine max
  Clone ID: PAT_MRT3847_9282C.1
tttttcagttggtatccctgggaatacaggtctatcattggcctgtgctatgaatagttctctcagggggcgagccagatctgatatttacaccatctgctctcaagactgtgaattatggaattctgcttgcacaaaagcaatgactatgtcatttaatccaaatacgtgttccgatgcatggagtttggaatgtttgaagcgtacctgatttcattgtgatatcatctgtgtcactggatggactgccacccacaatgcaagatgttcaggatacaattgattggtttatttcactctcatgaatgtggatccaggacctattgtgttttaaattcacaaaatactaatgtgtgaaataggtggatggggaaactgactttgccccaaggcacttccctaaatgttaaaagaatgcctatatttattatggcgaggagctggtgcaaaaatgctattctcatgaatatgccaaatgc

SEQ ID NO: 134907 - DNA, 450 bp, Glycine max
  Clone ID: PAT_MRT3847_92830C.1
gattttctccccgtcaacgtcgagaaatacacgggggagggcattttcggataaggaggcctctgaatgaatatacttaaggataagctctagctatgtaagtcagacggcaggatggaaccatgtagaaagatgatagcagaccaactttttttttttggcaaacctagtaaattggcacatgaaagagcaagttgtctattttgctaatgtgggtaatttaaggtgtaaaagttaactgtaagacacattttgtgtagattgtttctttttctgccgttagaagatacccttttattttttgggtatggattttgagtagggatttttgaagtccacatgataaaattaaacttgacctgtagaattgtctattttgtttgtcatcctgatattctattcttttgcaaaaaaaaaaaaaaagagggcggctgctcgcgattctagaac

SEQ ID NO: 134908 - DNA, 531 bp, Glycine max
  Clone ID: PAT_MRT3847_92831C.1
ccccacgcgtccggttgaagggtggagttgtcaaggtttgaagtcatatgttgagtctactctccagtccatggccaagaagattgagtttgcgtatagcacacattagttaaagtgaaaactagggtttgggatctggcctgagaataaatctggtggtgctaaggttgtttacaactaattaaacataataagagggtgtgtcacgtgtgttgtttccaactcctattatcacttttggtatttgtttgcccaattcattcgaaacaaatacttgccatttaatgtgtgtcctaaaaaaaacttatgcactagacctataatttatgctatttataaatgagaatattctcaaaaaaaaaaattttaagtatcaatcggggggggagtttcacacatacgtttattgtacttgcaaattgcaattggcaacgctaggatgtttcctttttttggttgtgtcagtctgatccgtttgcatcagagttttaaaactctcgacttggtaattgatctggccagtggtcaggg

SEQ ID NO: 134909 - DNA, 257 bp, Glycine max
  unsure (1)..(257): unsure at all n locations
  Clone ID: PAT_MRT3847_92832C.1
aatagaacttgttcaaataaataataaaatcatctcgatcatanncngtnngncctngtccgatcggccaggccgaacggaccagtncaaccgggactagtttcactattggatcgctcatgcatgtgacccgggatggcccggccaagcccggccaattttgngaaaacccggtgacccggctggtttagnaacccagactgggttgtgcacattaaaaaaataatgggagtgcaganaacaataattggggtgct

SEQ ID NO: 134910 - DNA, 307 bp, Glycine max
  Clone ID: PAT_MRT3847_92833C.1
gttcttcaccgtggttatctccacatatgtgccatgcaacccaccccccaaaactgcgtaacatctacctgtaccagatccacctttcccaaaacatgcgagttgtcccaaatacactattaagcttggtgcgtgagcttgagtattaggtatggatcaactttcgaacttgggaagaaccgcaaataacccggtgttgcaacctcagttgagggtctcgctattctttaaacctgcagtgggcctatgcactggtattcgaagactaatgtgttgtgctgaaaccttaaatgttccagatgaactt

SEQ ID NO: 134911 - DNA, 330 bp, Glycine max
  Clone ID: PAT_MRT3847_92834C.1
aaccccttaaacaaaaaggttggtaaactggtaattaagttccctaatgggcataaaggaaattactagcaactggatcccgcctttttaactttttttatgaaaaaaaaaaaaaggggctcttcaatggcctcttgaaaaaattaacttattcccaggggttttggggggggggccccccccggggaaggaggaatggctccccccaccttttgtccttttatcccaagaaaaatatttttaatttgttttaaaaccaacctttcttttaacaaaaaaggggaaaaaaaaaaccgctgggtggatctcaaaaatgggaaatttcaaggg

SEQ ID NO: 134912 - DNA, 211 bp, Glycine max
  Clone ID: PAT_MRT3847_92835C.1
tcttctcattttaaatttatagcttatattcccaatctataccgaagaaacccgggaagtttcaaaactcacacgacccatccactcacaagccattttaacaatattctggacacacatactcaactattgagcaactaaattttatgcaataacatgataatcatttagagattacccaaactaaattctgaaattaacataaaataca

SEQ ID NO: 134913 - DNA, 881 bp, Glycine max
  Clone ID: PAT_MRT3847_92836C.1
cccacgcgtccgccttaatatcctaaaattccttcatagaaaagtactcaccctaaacccaaaaggtcaatttaccaatttattttttttatagttcccatgcacttaacgtaagaaatccttcaccttcacttctaaaatctctcttttcccaaatccaccaatctcactcacacacaaatcagaattcacacccacataccaacacaatctctctgaattgaaacccaccatgttgattaaagggcatcaaattaaggcaccaattttggtcctcaatttgttccttgtcctaatttgttccacagcttcttccgtcaacgttgttgaatcaaggaaacttgatgagaccactccagtgcctgccacaaacggtactgaagaaaagtgtggatcatgtggtggtaccacttatccgtcgccaccgccaccgttactaccaccaccgtcgccaccaccgccttcaccaaagaaaacaccaccctctcagtattgtccgccaccaccaccgtcatcgttcatatacatcacggggccgccggggaacttgtatccggtcgacgagaatttcagcggagccaccagccatcaccggagcttcgccgccgtgttgatgccacttttggttggcttgtttagcacgctagcgtttttgtgatttgcttgtgatgaagaaggtaattaattaataatcaccatgtatcattcagatcattctaaattcagtgaaagaattttatggtttatgatgttattgttatatttatgaataccaagaatttacataaggtacggcatggagaattttgtaatcggtaattagtgtttgacactatgctctcttcttctttttattatgtgatcacagcctgttcaatgat

SEQ ID NO: 134914 - DNA, 286 bp, Glycine max
  unsure (1)..(286): unsure at all n locations
  Clone ID: PAT_MRT3847_92837C.1
ngcggcacgagagaggaacactttttttgggnncggggtctggccgggaggcgaggagacaaggggagcttggggacgaggcagagctccggggcgagcggaatcatcgggagcctctgcaccagaattcagctgataagnnnatcgactgccaatcaactaacaacgaactgggggaatcactggaacaaaatgatggaggaggaggcgggcgagcgcaaaactggcacagatgaaaccactcagcgagcacagacggagcgggggaggaaaagtataggaacag

SEQ ID NO: 134915 - DNA, 258 bp, Glycine max
  Clone ID: PAT_MRT3847_92838C.1
gcaccaagtgaaccaatagagtcgaagccctattcgacccaaccctaacacacacccatttgattcagtgtgcatggcttgcctgaacgatgcattcttggctgcacatctctccatggatgtcgtgagtgcacccatggcacatgcagctatgacctgcgggcaagagacgagtaacctggacaattgcatcggttacctacagaatggacgaacgccatcttcggcatgctgcaactgagtgaatagcctcaatgc

SEQ ID NO: 134916 - DNA, 387 bp, Glycine max
  Clone ID: PAT_MRT3847_92839C.1
aaaaaccccctcgaaccctacaacatgggggggctttaaccacccttcctccaaaaattccttaaattgggggggattgacccccttggcccatattttttaaaggaaattttcttggcccagggaacccttttcctttaaacaaataaaattcttccttaccaggtcggttcccctccaaacattggattaataaagcccctccttaaatttttttttccctttttaaagtctttaaaaacctttttaaaaggtttttccttttaacccccttaaaagttttaaattccttaactgggcaggattggcacccttggcacataacttttaagggatttttttttgacccagaaaagcccttttctttaggcatataaattttttttt

SEQ ID NO: 134917 - DNA, 544 bp, Glycine max
  Clone ID: PAT_MRT3847_9283C.1
aaactttttactgtttggaagttgtatgagggtaagcacattcctgtatctaatatatagtgcaaggggaataatctatgtcagtctcaatataccctcttatatggctacaaggacggaacatttctcgtcttttctatgtgccatagtcgaatctccaagtaacctgccaattgtgtgaagtaaaaaattagcatagcctcaagcttactgcaatgcatgtgggagctatagaaattatcattgatagtttcgcaagtcctgactgcaacatagttggagcaatgcttctggttgatacttatcataccaatcctgaaaatgcagttcgtagtattcttgttgcgcctttcaaggcggaaggcccattcgggtggttacattttccgaataccattgtgcatattgaaccaaacatgaattcaaggtttcagcttttgagtcccactaccaatggtgattatgtttaagggaaagaatctccaaaggttaaagttaatgtaacatgtgctgtctgtggtttgacatcagttacactcccact

SEQ ID NO: 134918 - DNA, 512 bp, Glycine max
  Clone ID: PAT_MRT3847_92840C.1
ataaaacctttttaaaagggggtcttttctaaaaaaactaaacaattatataaggggttttttttttgggagtgcttaaccggggattcccacaaacataacagggggggactaaccctcaaattaaaacaatgagtaagtgaaaggggaaaatcatctacaaatacttgcgcagtggggggactagaaacattaacaatttaacatatttgcgttttaaaaaaaaaacaatttaacaggatacttgataaaggcgggggaatataaagcaactaaaggtcaaaattttaaacttaccatcaataaaaaatatttattattaatttttttaaaataaaaaaaatgtgatatacgtaagcaaaaagattcgacatatcattttttatttaaggggaaacaaaaatttctttcgggttttacttatagcctcatttactggggtgagccgggataaacggggaagttgaaattagagggggttccattttttttaaagctggaaaatcatcttt

SEQ ID NO: 134919 - DNA, 406 bp, Glycine max
  Clone ID: PAT_MRT3847_92841C.1
aactctcatggcttcttccttgtgtttttcccggtaccatagctgcttctctaagataaagaacagggtaatgactttgcaattacagtgaaccagattgatcaagaggatagcctgaattgatatcttaaatcctaatttgcaggttgcaaaaatacagaaaaatagttcacaagatgaacatcctccgctctttttggaacagtcccactggtctaaaaacaactcatttttggggtcctgccttcaattggagccttccttttgcggcagcaatggacacaaagaaaccaccggaaacaatatctgtcaatatgaccggaggttaattaattaattcctatttagtgttaacttttgtttgagaagaattaattcgtaattgaatccattgtttttatttccg

SEQ ID NO: 134920 - DNA, 431 bp, Glycine max
  Clone ID: PAT_MRT3847_92842C.1
ctgcttcggctatgtttgactgctaaaatcgacaggaagaaaaactatgattgtcaccggctatttctgaaaatttggctttgaagtttaggattaggaagtgctatcataaacattctgattcaacagaaacacaggcttttctctgggacctaattgttattatatcgggcctcaacacagataccattttatttatctacaacttccattttcctcttcattccatagggctattacaatttttcccccttttggttgcatgggctttgcgtcaaataacatctgtgtgggactctcacataaggcttatgtagccccaccttgctttggacaggactggatcccgctaaccatatttgctgggacaggtatgacaatcattttaggatacgacaggtttagatttcccatgaggttcttggaagttt

SEQ ID NO: 134921 - DNA, 1036 bp, Glycine max
  Clone ID: PAT_MRT3847_92843C.1
atgttcctcaacaacggatatctcggctcttgcttccatgaagaacgtagcgaaatgcgatacttggtgtgaattgcagaatcccgtgaaccatcgagtctttgaacgcaagttgcgcccgaagccattaggccgagggcacgcctgcctgggtgtcacacatccagtcgtcggaggcgcagagtagagcagcagagaagagagaaaacggcactgcagccgtagaaggaaaaccgaccatggtgcacgtctccttttacaggaactatggtaagacgtttaagaagccccgccgtccgtacgagaaggagcgtctagacgcggagctgaagctggtgggggagtacgggctgcggtgcaagagggagctgtggagggtgcagtacgcgctcagccgcatccgcaacaacgcgcggaatctccttaccctcgacgagaagaacccgcgccggatcttcgagggcgaggctcttctccgcagaatgttccgctacggactcctcgacgagactcagaacaagctcgattacgtcctcgccctcaccgtcgagaatttcctcgagcgccgccttcagacgctcgtcttcaaatccgggatggccaagtccattcaccacgccagggttctcatcaagcagagacatatcagggttgggaggcaagtggtgaacatcccatctttcttggtgagggttgactcacagaagcacattgacttctcacttacaagtccccttggtggcggacgccctggaagagtgaagagaagaaaccaaagggctgctgctaagaaggccgcaggtggagatggagacgaggaagacgaggattagactgttcattatgtctttctctagtgctattagatcttatgccaccttttactttgcctacctaatcgattttggttgttatacattttcatcctttggttcccttgtttgagaaaatattaagtggtgacatattatgtttttgtgaatttggatattttaaagtatcaagattttccattaaataatttttgatgatcatt

SEQ ID NO: 134922 - DNA, 757 bp, Glycine max
  unsure (1)..(757): unsure at all n locations
  Clone ID: PAT_MRT3847_92844C.1
agcacggaancggctcgagcatttctcattttcctcgagccgatcaaacatggaaagcaaagccatctgtttctgcatcagagtgcgcaaaagcaagagcaaggaaagcaaagtgaaagatttagagaaactctcccatgtcaagcctaatcacaagggaaaaaccaaagggtgtacttcaacaactcctgttggtgatggtggtggcatcaatgttcatggagccaacacagttgctaacaatgatgtaggagtagctgctgctgagatgactgcagctcatacctctttgatgagtgccaatggagttcaagatggaagtggtcatggtcatgggggtgaatctggggcagatggtgatgttggctgaaatttcatactaaaatatttttgtgaagcagaaaacttagatgcagttctttaaatgtttttggatgtttttggtattgttattgaattataattgttgatctttaatgcaaacatttgtcgggcatattattgaagtgaaactcccattctgatcagaaagtaagacaaaaatgccttgggaactaccagtaagctatatcattcttttaatgcttgtctcccctaccttgctttgcaaggttaattgtaatgcttgatagcttcctgtggatttcttggttctgcattgcaattgcttgtctattgttccttttttgttagttttctacagttgtatgagatctcaattaagtggagacataaattccttccttatctataaaaa

SEQ ID NO: 134923 - DNA, 451 bp, Glycine max
  Clone ID: PAT_MRT3847_92845C.1
gccgtccttttttttttttttttcttttttttgaatattttttttttttttattttttgttaatttttttttgttcaataacgcaacatagggaaattaaaaaaacctaaaaaaaatccaaccccagggcggaccacagggcacacccgggggacaacccagaaaatccggaccgggacctggcgacgctaccgcttctcctaatgaggactgcttaacaccctggactatctaagcaccaacatgccgcacgcgtgaaaaaacccggcaattccaaacccgcaccagcaagcagcccaactcttaatatggaaagcccggggagcccaaggggggagcatacccacatttgttgcctgggggacactgcccgctcgccaaaagggaaacccgcatacccccccgaaaaaaaaaaagcaccaacccgcggggaaaaggggttagctaactc

SEQ ID NO: 134924 - DNA, 567 bp, Glycine max
  Clone ID: PAT_MRT3847_92846C.1
aaaccccaaaaaattgggcaatcatattaaacaaaaaaaacctttaaaagattataggggcccatttgttctcaggaacggggcggggatcactacccgcaaagaaaaactaaacccatttcaaaacagacatcaagattatcccccattttaaaatttccaaagaaccctataccaattttaggggaaacaaacaaaaaccccggggcgggtagtcaagaacaagggaattttcaaggatctaaaaccccccttccccgctaaaaaatttttccgctaacgaaaaaaaaccccagggaacaaaaaacgggcggcaggaattggcacttaaaaacctctctccgaaacggaaaaacaaggccccagttccgggggggggaacaacagaatatttgggtttaactaaaccaaggtggacaccaagaccggggggggaaccaggacccattcggggggaaacttcggggggaataccttggacacccttggaaccccctaaaaatggccagggtcagaaaaggcaaacacaggcgcacctttaacaggtatccttaactcagctgcaag

SEQ ID NO: 134925 - DNA, 136 bp, Glycine max
  Clone ID: PAT_MRT3847_92847C.1
gtaacttaacacatcataaaactcaaggatcttgcgtggtccaccccaaggaaaacggccaagcattcaacatggaaagaagaactcgacggaaggatatctatacacacaagaagattcagatcaactccaacac

SEQ ID NO: 134926 - DNA, 150 bp, Glycine max
  Clone ID: PAT_MRT3847_92848C.1
acggctgcggaagacgacagaagggggtgatgttccactactaatactggtactagtatatgaaaccgtgttggggttcggcttcttcgatctactcttgacataacatcactctcaacgtttcaatactgacctcatcatcttcacatt

SEQ ID NO: 134927 - DNA, 311 bp, Glycine max
  Clone ID: PAT_MRT3847_92849C.1
gcccagagccggggccacgcgcttcgcaaggctctactctactgcttcaccttctgttgggggaaaatgtaaaggtgatacatggcttcggctgctctctctgtggccaaaccaggccttcaggcaaatgggaaaggcttctctgaattctctggcctccgcagctcatcaggcttccttcccttttctagccactcttcacaggatttccattctggggggggcttccacacctatgcggctggaagctgtggaggattcaagatgggtgtgactgatgcaaatctgaaggttgccttattacggctttt

SEQ ID NO: 134928 - DNA, 314 bp, Glycine max
  Clone ID: PAT_MRT3847_9284C.1
actcacgcttttttattttttttttgggagagaaaaccgcgggacattttattaaacaatttattttaaattactatttactagggggctttccgttttgtgcaaagccatgcactatttgatcctgactcaagggcccccttgaatgaatacaatttttacttaggagctaccgttcacaaaggttacccctcattttttctaaaccttttatccatggaatccaactagaaactatttgaaccgcacatctattccgctctatagggcggattcaactcttaagaagaaatttcagacaatgtttggagcaa

SEQ ID NO: 134929 - DNA, 446 bp, Glycine max
  Clone ID: PAT_MRT3847_92850C.1
ggctcgagctcgagccgaatcggctcgagcgcactcgttctcgtcgtggaataacgacatgaagtcaagcaatgtggtgatgtcgccgacaagtaaggtgaagcaggctctagggctgaagatgttgaagaggtcaccatcaaggagaatggtgtcgggtggcagcggtggaccgtcgtcgccggtcggcggaagtagtccttttcatcagtccgggtcaccgttgaggccacgacggccgatgacttctgcagagatcatgagacagcagatgagagtgactgagcacagcgataaccttctgaggaaaaccatcatgaggaccctcgttggccaagcaggaagaagagcagaaactatcattctccccttagaacttctaaggcatgtaaaaccttcagaattcagcgattccaatgagtaccacatgtggcaaaagaggcagc

SEQ ID NO: 134930 - DNA, 425 bp, Glycine max
  Clone ID: PAT_MRT3847_92851C.1
aaaaaaaacccccggaaaatctttggggggggcccttttaaaaaaccaaggggaccgggaaaaaaagggtggtggttttaaaggggttaaaaaaaaattgggggggatcccccttaaaaaagggccccccccccccggaaaaaaaatcgggccaggggggtaaaaacccggggggggggaaaggaaaacacccgggggggaatggccccggggatcccaaaggcaaccaaggggggggggaaaaactttatccccagggggtttaaaagtttaagaaggagttttaaggaaaaaacccaaaaggccgggttaaaaggccccgggggccaaaaattgggggaaaattttatccttggcccatccaaagggttgggtttaagggaaaggatacaaagccccttgggggggggcccccccagaagggg

SEQ ID NO: 134931 - DNA, 458 bp, Glycine max
  Clone ID: PAT_MRT3847_92852C.1
gtttaggcttccaagatgggttctacctacaaaagatgtacagccggttactttatagccattgctgatggggctgatgacaccagcaaaactgaggcttttccccagaaggtggagcgtgttggtgtgatgaaagaaaaagaggcgatgaattatgcacaggaggaggctcctgcagcctgggcaagtcaagggcgacctgcaacaactgtgttgggtgatgggcgggcatatctggatgctaaggtggatgatagctcaaaggctacactagcaggggattttgacattgcagatgaggtgacaaccatgaacaagaagggtgcatatgggctcgaacgtggtgttcaggtgctgggctttcgagcgcccatactgaagagatttcacagcatgcatgggtggatgcaaagggcagcagcgagaacaccattggatctacagtctagcaaggagag

SEQ ID NO: 134932 - DNA, 277 bp, Glycine max
  Clone ID: PAT_MRT3847_92853C.1
acggctgcgagaagacgacagaaggggtatatctaagaccaactcaactaaattcaaaagtttcaatgcttacataaagaattgagctaataagataattgattatgtataaaaaaacacaagggtgctcttagggtcaattttagcaactcattatttgttgcattgtatactcgtgggcagctacaactttcacttccttttatcttattttggagtggaagttggaaggcatgagacctacacttttttcaaaactttcatctatctttgactt

SEQ ID NO: 134933 - DNA, 276 bp, Glycine max
  Clone ID: PAT_MRT3847_92854C.1
tcgaccgaatcggctcgagcctatctaactaccagaccaacacagccaagcatgatgaactgacctatttctgatcctcactttggacaaggcccttcagccagaagactgacaaagtcatcctccgtctaccagagcgtgcacttgtgatcctaaaataagcttcatctccgggctgtgccccttggggtggaaggggcaggattctgcagctgcttttgcatttctcttcctaaatctcattgtgttgatctctttccttcccaataggtgatc

SEQ ID NO: 134934 - DNA, 124 bp, Glycine max
  Clone ID: PAT_MRT3847_92855C.1
ctaggcagcagtgctgctggaactggaagtgcagtttcctttagtgatgatcagtatgccatgcgactatgtagttcacagccacttcgtagatgtcgcaaacgcgtctctagagcgtctcaaa

SEQ ID NO: 134935 - DNA, 126 bp, Glycine max
  unsure (1)..(126): unsure at all n locations
  Clone ID: PAT_MRT3847_92856C.1
tggatctcttctatgcattgtatgcagttnggaaattttaacatctttccgggggtcacaaccaaacacaagacagtatgcaagcaggatcaacccaccaactacatagggtctacaacacgaaca

SEQ ID NO: 134936 - DNA, 417 bp, Glycine max
  Clone ID: PAT_MRT3847_92857C.1
ttttttttttttttttttttttttttttttttttttttttttttttttttttttttttttttttttttttttttttttggggaaaaaaaaagaaggggggcccctgaaaggttttaaaatggacatggcccttttaacggttttttttttttaagagggggcccttaacaccggggggttttaaattttaaggttggaacttccttttggaacaaaccccttggggggcccctggaggatttgcttcccctttttttttttaggaaaaattttttttgggggaacaccccttttggccttggggggggtttaagtttccccctgggaggcaaaaaattttggtgaagttccttgccccccttttaaaaagtttacggggggtttgggcccccctcccccctttttttttaccattat

SEQ ID NO: 134937 - DNA, 277 bp, Glycine max
  unsure (1)..(277): unsure at all n locations
  Clone ID: PAT_MRT3847_92858C.1
ggaggtttctcccagaatttggtaaaggtaagaaaatggtttttttaacgggggttaacccttttccggaggtttaactgcttgttttttttgccgttaaaaatgaaattttgggttctacccccactaatcctatgctgccgcaactcttggggaactgtagaagtctcaaatatctggttgataagtgtccttttgcaattgggacctagaatgtagtattttattcactttaaaaaaaaccgcattactatgtgcaatgagtgtgtttaatntt

SEQ ID NO: 134938 - DNA, 184 bp, Glycine max
  unsure (1)..(184): unsure at all n locations
  Clone ID: PAT_MRT3847_92859C.1
ggaaaagccgggccgaccgcacgcgtccgnacaccccaacccttattcaaataatcccttacacacaccctaaaacatacactgggccattcgctaatccttaaagagcgcatttaggcaactacaaatactctaacattttatgactatgacctgcacaccatggacacatcacacactatac

SEQ ID NO: 134939 - DNA, 550 bp, Glycine max
  Clone ID: PAT_MRT3847_9285C.1
aaaataacacacacttcacacattattacgacaattaaaagagggggggaaattttcagataggcagagcatactcaacaagaggggcatgcctaatttccttttttgaattaaacaaacgaacaagcgaaagaaaacacgaattccagatcatgcagaggattccgcattttcagaagatctggcagtagcctggggaacagaaaaagctggcataagagtattaccagcaatttcaaaatcttgagagattcccaagagaatatcaaaaactggagactgtttgggattgtcaataaggaaactcaaatgccatgaagtttgatttgcccactcagaactccacttttcaaaaccattattaggaccacatacctcttttgggaagattaattcccaggaatggggttctggttttggccacttacctgcctcaaaatgctctggactggggctggttggtaaaaacacttggtcccttggggcccattcactccttttggctgctgcgttcccggacttcccattcttggccttttaacaacctttt

SEQ ID NO: 134940 - DNA, 868 bp, Glycine max
  Clone ID: PAT_MRT3847_92860C.1
ggcatagctaatgacatcttcttattgccagccccccaaagtgctacaataactgatattataaagaaatcaattgtcacccccacaaccgaaaatgacgctgattttggatttcttgcccctagttcattgctcactctccacacttgcagctgcgttaaatccaaactgagatcataaaaaacccaatccagacactgtggtacaaatagatagagaatccagagccaactcagggtgaggaagcaaccctgcaagcagaaccaaaatttggaagtaccaggtctctaggcagagcatcaccgccgaagcagcagacagcttaaaaaactctggcaagcccgaaaacgcttgaaaactgaaccctctccaagtgtgcttacacttttcactcttgacaatgtacacaaactgtgcaatcacaatgatccaccacgaaacactcaacaccagcgacgcacccaacagaccaagccccacctcgtacacaacaaaataactcaacacaagatggaccaacaacgttgctgttgaaatgtatgcgcttggagccactatgctctgggcttggaggaatttttgaatggggaagtttacagcgtaagcgaagatttgagggattaggccgtagacgaaaagtgctgctgcggatgcgattcttggggattctcctaggaagattagaatgggttcggagaagatgtatatgatggttagaataatgcctgctagcgtcagaagcaccgttgatctttgcagcaatgagatggagagaaacagggtgagtagtactgtaccatgaggccataagcgaagacttggatgccggtgtttccaagagaagcagcagcaagttcaaggttaccga

SEQ ID NO: 134941 - DNA, 283 bp, Glycine max
  unsure (1)..(283): unsure at all n locations
  Clone ID: PAT_MRT3847_92861C.1
atgtacgagtangtagagatggngnattcggaatngnnngnttntgatnggtttttgctgnaatatcnatananaatgcgtntnctnatncntgnntgcatnnagttgatcgnntngancanntnnttgntgagtnngaataatnctatnnaggggagaaagganntttatcaaanntngnngcatggagtanntnaaggtntnnnnggntagtctanaggggnataagcntgcacntntggngnataaatcnttnataagggtagtcanctgntacatggct

SEQ ID NO: 134942 - DNA, 386 bp, Glycine max
  Clone ID: PAT_MRT3847_92862C.1
ggctcgagctcattaattgcaagaatggctctccggggcttggagatgtccctttctgttctctgcactcttggtcgcgctagagaaagccatgccatggacgaaaattgtcgggtgctgttggggcatgcgctcccattcgaagttcattgcgagatcttctaaagacctggccctgcgagggtggaaatatgtgaccaccctatgcacatagaagaaacacagtacccgacaacgttcttttataaagaagaccttcatccaggcttaacaatgaaagtacaattgaggaagccttcctttcaaccaccatggggtgctggtccatggttcacggaaatgaaagacactactaaagaaggatgtcgttccggagagctatgcat

SEQ ID NO: 134943 - DNA, 894 bp, Glycine max
  Clone ID: PAT_MRT3847_92863C.1
tccctgaaaaaaaaattgaggaaggagagtgttagaaggagagataagaagaagaggagaattatacctacccagcaagcaggattagagaaaaaaaaaaaaagattaacaaactgttgatttgatttattttgatctgcttctgctgggtggttggcaatgtctgcacctatgatcattgaccctatggtgatatcggcaccagaaactcaatcagcagcagcagcagctagcatactagttgcacaaagtgaagttgaatttgctgtgtgtgactgttgtggactaacagaagagtgcaccccagcgtatatagaaagaatcagagagtggtatttcggaaaatgggtttgtgggttgtgtgctgaggctgttaaggatgaaattgtaaggtctgagaggcttgttagcacagaagaagcaatggctaagcatatgaacttctgcaaaaagttcaaggcatcatcagggcctcctccaaatccaacagtgcacttgatatcagctatgagacagattcttagaaggactttggattctcctagagtaaggtccacaccaaatagtccaaccaagactatcacaaaaattcatgtttctgtgcttacaagatctgagagctgcttccctactctctctgaagggttgtgatgaagggaatacttgtgtatttagttggataaaaatggaagcaggaagcataaataaggacagaaaaatatgagctgcaaaagtttagatgttcaaaagtagttttgtccagtacagaactttcaatctgtttgttagaaaatttgaacataatttggtcaagaattttgcttcactcagaccagttaccttgttttctattccatttatttgtttgaaataagaaaaatatgttcataactg

SEQ ID NO: 134944 - DNA, 299 bp, Glycine max
  unsure (1)..(299): unsure at all n locations
  Clone ID: PAT_MRT3847_92864C.1
cncacncacncnnacnnaancncnnaanncancacnanccncncanaaaaaccannnacannnanncacnanccaancnccaacanaanaccaaacnacnacnnncacancncccacanacnanccacccncacaaccacaccaccacacancacanccaccccaacanacaancccacacnnaaccncanacccancaanccaacaccacaacacnnnnccnaacanaaccnaaacnnncnccccacaccncnncnnnacancaaannnncancnaacccannacnnanaccnaaaan

SEQ ID NO: 134945 - DNA, 1915 bp, Glycine max
  Clone ID: PAT_MRT3847_92865C.1
ccctttcgttccgctagctagagaccggagagaatccaaattgcatttcatcaggcgccatccttttcctgctgagagtgagaggcgttaatctgaatgggttacatccaccatggaagaaccggtctcaggcacttattcagattcagaaccgccaccggcgtggtaaaaaactccgcgagatcgcaattacgcactgcatttctctcccattcttcccctatcctcggcaacaacgtggtttttttctccacaggcgacaaattcctgcacgaaattaccgcggaggtggagaaagacaggcgcagggagcgaaacgagcgtttgcgcctcggcctcgacaccgccgacatcgacgccgagtcggagcaggactacatgggcgtggggcccctcatcgcgaagctcgagaaggaaatgctcaaggaatctcctgagctgaaccgctacgaggagcccaccgactccgacgacgactccgacgaggaaaccatggacgacaccctgacaagaagttgagtgatttcgagaagaaaaagaccaacaaacgggacccattgtattcaccaaaacaaaaaaacacaacaatctttgaattgaagagaaagacagacagagtagttgaacgaaatgcggcgcttccctaacaacgtcagttttccctctctagaaagtgcctttctctttccctctctcaacttccctacaattcatatatagccaagtagtgcagatcccgtgcagaagccaaataaaatccctttgtttgctcacataagatttgggtttcttcaaaattatctttttttttctctcctaaaaaaaaaagagaaaactttgtttgattctttgaaggaggtttgaagaaagcaaaaggtgtagttttgttttaagtttctttgaaatggttttcatgtctgagatattgttccccgaagaaaaaattgaggaaggagagtgggagaaggagagataagaagaagagaagaatacctacccagcaagcagaattagagaattttttttcacaaactgttgatttgattcattttcatctgcttctgctgggtggttggcaatgtctgctcctatgatcattgaccctatgatgatatcggcaccagaaactcaatcagcagcagctagcatactagttgcacaaagtgaagttgaatttgctgtatgtgactgttgtggactaacagaagagtgcaccccagcctatatagaaagaatcagagagaggtactttggaaaatgggtttgtgggttgtgtgctgaggctgttaaggatgaaattgtgaggtctgagagacttgtttgcacagaagaagcaatggctaagcacatgaacttctgcaaaaagttcaaggcatcagggcctcctccaaatccgacagtgcacttgatatcagccatgagacagattcttagaaggactttggattctcctagagtaaggtccacaccaaatagtccaaccaagactctcacaaaaattcatggttctgtgcttacaagatctgagagctgcttccctactctctctgaagggttgtgatgaagggaatacttgtgtatttagttggataaaaatggaagcaggaagcataaataaggacagaaaaatataagctgcaaaagtttagatgttcaattgtagttttgtccagtacagaactttcaatctgtttgttagaaaatttgaacataatttggtcaagaattttgcttcactcataccagttatgtaccttgttttgtatggcattctctggggggcccgatcccaatccccttcggagtcgattaccgcctaacggcgtggttacacgcgtgacggtaatcctgcttacccactaatgattcaaacatctcttgtcactacgtataacaaaagccgaccaagacttcc

SEQ ID NO: 134946 - DNA, 684 bp, Glycine max
  Clone ID: PAT_MRT3847_92866C.1
ggctcgagctttgtttgctcacataagatttgggtttcttcaaaattatctttttttttctctcctaaaaaaaaaaagagaaaactttgtttgattctttgaaggaggtttgaagaaagcaaaaggtgtagttttgttttaagtttctttgaaatggttttcatgtctgagatattgttccccgaagaaaaaattgaggaaggagagtgggagaaggagagataagaagaagagaagaatacctacccagcaagcagaattagagaattttttttcacaaactgttgatttgattcattttcatctgcttctgctgggtgttgatggtttcatgacagggtggttggcaatgtctgctcctatgatcattgaccctatgatgatatcggcaccagaaactcaatcagcagcagctagcatactagttgcacaaagtgaagttgaatttgctgtatgtgactgttgtggactaacagaagagtgcaccccagcctatatagaaagaatcagagagaggtactttggaaaatgggtttgtgggttgtgtgctgaggctgttaaggatgaaattgtgaggtctgagagacttgtttgcacagaacaagcaatggcttatcacatgaacttctgcaaaaagttcaaggcattagggcctcctccaaatccaacagggcacttgatatc

SEQ ID NO: 134947 - DNA, 219 bp, Glycine max
  Clone ID: PAT_MRT3847_92867C.1
gccacgcttaagatcactcatgagagaacgcaagacacacgaaacaacacacagagagagattgaggaagggctcatcaaggctgcagactcgtactgggccagtgatagctcttaacgtagcagcttcgactataaacttaaaggtagtcatgatcatcacaacgaagcacacttttaaggttcatgagagggcttcagaacagcctgcaatggttca

SEQ ID NO: 134948 - DNA, 399 bp, Glycine max
  Clone ID: PAT_MRT3847_92868C.1
ctccaaatgtagcacaaatatgaaataagagaaagaacatctgcctttactggcatttgggtcacatcaaagagctgacatgtcaacttgctaacattgaggcatcactgatcaaaatctggtcaagcaatattagacagggttttgtttatgtaatgggtgatacaaatagaacaaactagatgttctcctaatatctagaataccattcatctctggtgtctagatataaggactgtatatcccttttgtattggtacctctggtactgtttcaattttatatatatatatatataatacatttattttgctgatcaaaaaaaaaaaaaactgatcaaaatctggtcccattggatcaagtaggaataatatttgctttggtaggatgtattgttgg

SEQ ID NO: 134949 - DNA, 190 bp, Glycine max
  Clone ID: PAT_MRT3847_92869C.1
ctttagccgaggtcaggaggagcactagctaagttcacaatttcataatggctatgggactacaggagcatttgaaaaggctcaatgctcctaagcataggatgcttgtcctactgggtggtgcattcgcgcttaaaccctcatctggaccacactaatcgatggagcgcctcctgctcatacctatgct

SEQ ID NO: 134950 - DNA, 560 bp, Glycine max
  Clone ID: PAT_MRT3847_9286C.1
ggaggggtcggtttcccagcccaagtttaaaaaaaaaaggaaccaccaagggggggagggggaggaggaggagaaagcaaccaaaattccaagggggggggccaaccaaaaaaattaaatccccaaggaaaattgggggggcccccactcccattggggggcaacaagggcagccaaacccacaccccttggggaggacccccattcattggcaaaccaagcaaggaccttccccatggcatcccccatgaccaggggcaacggggagccaacggggggggacccatcagggccccggaaggcaacggacccaaggggctcatcacacccaaaaaggatcccctggagcccatgggcggccccctctctgaaggcggaattcactttttcggaaaagggcttttttgaaacccgaacgacgaggcccaccactgaaacgttcggggggggcccccggggggcaaggccattgagtttgcctttgaggggggggaggacaagggccacggcctttgctgccccgggggaaggggggacaatgttgagggctggtgcccttg

SEQ ID NO: 134951 - DNA, 154 bp, Glycine max
  Clone ID: PAT_MRT3847_92870C.1
cttggggggggggggggggatggcaaaatgtaagaaaagggcaggtagggagtagattagtggcaacagagggaacttgaaaagggcaggatgtggaataaaacatagagaacagtgaaccagcacaaatacgcatagcagatgttattttaaa

SEQ ID NO: 134952 - DNA, 331 bp, Glycine max
  Clone ID: PAT_MRT3847_92871C.1
gggaaccccccaaatagaagggtggcgtttaataaaccaaagcaccccacgccagcaaaggcctgaaactcggtgggcttaaaaaaaatgtgatcgggggttccgcccaaccccccccttttaaaccccgattattaaaagctattttgcccccggggataaaaaacccagtgtggggaacaacattggcgagatgatggggggaactttaaactttggccgaaaaacaagctccctttaaaagaaaaccccggggccccgaaaagaaaccccctttttttgtgcccaacatcccctgttgaaccaccccgcaagatttactttttttttt

SEQ ID NO: 134953 - DNA, 893 bp, Glycine max
  Clone ID: PAT_MRT3847_92872C.1
gcagcagctccttaaagtgaaaccctcttcccaaatcaaaaaaatccgcgccgaagccgagcttgaccccaagctcaccgcgctccgaaacctcttctccaaacccggagtaaacattgacgcttacgtcatcccttcccaagacgctcaccagagcgagttcattgccgagtgttactctaggagagcctacatatctttctttctggcagtgctggaactgctgtggttactaaggacaaagctgctctctggacggatggcagatattttctccaggcggagaagcagctgagctctaattggattctgatgcgggcgggaaatccaggagtccctaccgctagcgaatggctcaacgatgttttggctccaggtggcagagttggtattgatccctttctttttacttcggatgctgcagaggaacttaagggggttatctctaagaacaaccatgagctcgtatatttgtacaattcaaatcttgtggatgaaatatggaaagaatctaggccaaaacctccaaataatccagtaagagtgcacaacttaaagtacgctggtttggacgtggcatcaaaattatcatctttgaggtcagaacttgtcaatgctggctcatctgcaattgtcatctccatgcttgatgaaattgcatggttgttgaacttgagaggcagtgatattccacattcaccggttgtgtatgcatacttgattgtggaggttagtggagcaaaattatttatagatgattccaaagttaccgaagaggtgagtgatcacttgaagaaagcagatacagagatcaggccgtacaattcagttatatctgaaatcgaaaggttggcagcacgaggtgcttccctttggttggatacttcatcagt

SEQ ID NO: 134954 - DNA, 381 bp, Glycine max
  Clone ID: PAT_MRT3847_92873C.1
ctcatatggagccaaagctgcctacaccgactcttgaggatgtggaaactactatgggtactatgttgcatctgaccatttctactgctagacttgcacttgccgctatcacagttagacgaaccattctgcgtaatcgacctacttgaagattctctgacgcacggcaactatctagcaggagagacatctgacaatcactcatggtatgaaaagactgatccacaagcatggcacaattgggattcctgagaatacatgcatagcattggcctaggctatgaataactgtttgatggagcgctccagctctgatctgacaccatctgctctcaagactgtgaattatcgactcctgcttgcacacaagcacatgactat

SEQ ID NO: 134955 - DNA, 429 bp, Glycine max
  Clone ID: PAT_MRT3847_92874C.1
gccaaaggccatatcatcttttattattcgaaataatgtgcgggatcatacacaagattggggggaccctgcattttggaagggccaagaaataggaactctaaagggaacaccatggtgagcacaaaggtttactccaaggaaaacaccatggagagtacaaaggtggacacttaggagaacaacgacattgggagcacaaagagggacttgtggataagatcaaggacaagatccatggcgatggccatgacaagggtgagaaaaagatgaagaatgacaataagaaaaacgatcatggacatgaccattatggtcatagcatcagccgtgacagtgattagatcttataagttaagcaagagtacaggacgatattagtgacagagtcaggattcctatttctgccttatgagataattcagataa

SEQ ID NO: 134956 - DNA, 247 bp, Glycine max
  Clone ID: PAT_MRT3847_92875C.1
ataggaaagaaattgaagatacaatggagattgttcgtgaagtgagttattacatgttcttctataggttacatataacatgtgaaattcaatttctaatttctagtgccttgacatgaactactatgctttatatttttgtgttcaatttttaaaatttatttataaaatagtaaaaggggaaattaataaaaaaattgaatttcagataacttggacaatttattattttgtgttcaccctttgg

SEQ ID NO: 134957 - DNA, 363 bp, Glycine max
  Clone ID: PAT_MRT3847_92876C.1
tttttttttttttttttttccttttttttttttttttttttttttttttttttttttttttcttttttttttaaaagaacccaaatttatcaaaattggaaaaggaaacgagaaattatcaatccaaaaaaaaaaccacgggcccaatttctaaggttcgggcttggccaacaaccaaacacaacccaaccaaagggcaacaacaaaaccaaaattcaagggaaacaaacgaacccccgcccccaaaagacaatttacagaatccccacgccccggcgcaacaaaggcacccccacaaaattaccagcacccgggggggtaggcctccccccaaaagaacacccccaggacccctgttcccct

SEQ ID NO: 134958 - DNA, 168 bp, Glycine max
  unsure (1)..(168): unsure at all n locations
  Clone ID: PAT_MRT3847_92877C.1
gcatcctgattgtgtgatgctagtttatccaaatgattttgttttgtttgatgtgaattccaaggtgtgaagggaaactatattggggggtgggtgcgttaacacaaaagggaancctaattcccttaacaaataacatctcttttgggaatttatttatattactcc

SEQ ID NO: 134959 - DNA, 250 bp, Glycine max
  unsure (1)..(250): unsure at all n locations
  Clone ID: PAT_MRT3847_92878C.1
tggncttcatnggcatncgccttgnacancaattcggatttncnaagattggcatcanatactnngtgtccgggnntggtggnagtgnacngtcgtcncnatttatcagagaccacatctctgttngngcttctggtgcccttnttggacttcttggcgcaatgctgtctgaacttatcacaaactggactatatattccaanaaagcnatggctttaatancccttctagngatcatngngatcancct

SEQ ID NO: 134960 - DNA, 402 bp, Glycine max
  Clone ID: PAT_MRT3847_92879C.1
atggcgttattgtaaagaggaaaggccaaaaggaaaggaaaaaagacgaaagaaaaaaaaaaaaaaaaagacgatccccccaaccaaaaggccgggccccaggaagaaaaaaccgaccataaaaaaggcacacaaaacggcaacaagccacggggtaaggccaaccaaaggaggggaagtggcgagagcaaaagcggacgccggggggcaaaaccggaaccgggagggccacccggggacccccaaccggtccctataaggggacggggtatcccaggggggagtcgcggaaaaaggggctgcctgcggggaaaaaatattctcctgccagaacacccaacaccctaacaggcaaacccaaaaggaaaaccggaagggccgaatgaaaaagcgaggggccca

SEQ ID NO: 134961 - DNA, 457 bp, Glycine max
  unsure (1)..(457): unsure at all n locations
  Clone ID: PAT_MRT3847_9287C.1
catttgngtcactggatggactgccaccccaatgcaggatgctcaggctacaattgattggtttatttcctctcaggaatgtgttcccaggacctattgtggtttaaatccacaaaatccctttgtgctaaataggtggatgggaaaactgactttcccccagggtacttcccgaagtgttaagagaatgcctctttctatagggggaggagctggtgcaaaaaatgctattctcatgaatatgccaaaagctgttctttcaatgtggagatattttgttggagatctcgcctttgaagcttctaagaagactactccccacattaaatggacaggccctttcttcatagcacttggaaatttggctgaggacaccaccaatgttgaagatttcccccacaagctggtcgagattggagagataccgggaaaaggtggattgaaaatttcggaagaa

SEQ ID NO: 134962 - DNA, 537 bp, Glycine max
  Clone ID: PAT_MRT3847_92880C.1
ctcaacgaactctattttcacaagaatttgagctcctccgtttaacaacaatatgttgggagagcaaaagataaaaagaaaaaagtccgcttggggggctccgaaccaccccactgactgccaacttgggcaccggggtgcccgggtctttaaacccccgcctttccccttaggggggtgcttggaaaaaaaaatgaacaactatccctcttgcccttcgggatccccccttgtcaggtaaggggaaaaaaagtcattcaggggcttcccgaaccttttctttatttgggtgggaaaaaccataggggggccctctttttgtgggcccccaaggtgcccggaccccttccccccagcctccaaatgctgcccccctgggtgggggctttgaaaagcctagtcccccagaaccccttccttgggctaagggggcacccccaccgagagaaaatatctcttaattcaaacggacgccaaaaggggggggtcattccataccagtccttctctttactttttaacccctccccccaaaaa

SEQ ID NO: 134963 - DNA, 1380 bp, Glycine max
  unsure (1)..(1380): unsure at all n locations
  Clone ID: PAT_MRT3847_92881C.1
ctggcaggtacccggtctananttgttangcacctcgctttttgccgggaattcccggggtcgacccacgcgtccgggtcaagtggcgcagaatatcatatttcatctcgtctcgggaaagactgaagaacaacaagaatggaattaccgtccgcttccggcttctgcacctccgatctcgaagaaacaaggattccgatccctcaagctcgtcaacgccgacatggaccaactcctctccgaccaacccgtcggcgtcgactacggtacactcgacaatggccttcgctactacgttcgctgcaattccaaacctcgcatgcgagccgctctcgctcttgccgtttgggccggatcagttctcgaagaagaggatgaacgcggagttgctcacattgttgagcacctcgctttcagtgccaccaagaaatacaccaatcacgacatcatcaagttcctcgagagtatcggagccgaattcggcgcttgtcagaacgccgtcacctccgccgacgacaccgtttacgagctcctcgttccagtcgacaagccggagctgttgtctcaggccatttcggttttagccgagttcagttcagaaattcgagtctcgaaggatgacttggagaaggaaagaggagctgtcatggaagagtacagaggaagcagaaatgccacggggaggctgcaggatgctcattggatgttgatgatggaaggttcaaagtatgctgaaaggttgccaattggactagagagagtgattcggacagtttcgtccgagactgtgaagcatttttacaagaagtggtaccatttatgcaatatggcggttatagcagttggagatttttctgatgcacaggatgtagttgagttgataaagactcattttggccagaaaattcccgatcctgatcctccacttataccaacaatccaggttccatcacatgatgagccacgtttttcatgttttgttgaatccgaagctgctggtctgcagtgatgattagttataagatgccagcagatgagcttaaaacagtaaaagactaccgtaatttaacttgcagaatccaatgttcctctatgccttaaaaccagaggttctttaaaatagcacgtagaaatgatccaccctatttctactgttctacagctgctgatgttctagtccgtccattaaaggccaatataatgacttcatcttgtaaaagaaaaggaactatagaagcattggaatcaatgttaatagaggttgcaagggcaagacttcatggcttttcagagcgtgaaatatctgtagttcgtgcgctattaatgacagagattgaatctgcttatttggagcgtgatcaaattcaatctaccagcttg

SEQ ID NO: 134964 - DNA, 527 bp, Glycine max
  Clone ID: PAT_MRT3847_92882C.1
cgggacccgggggccaacccggaaatcccggaccggacccgggaggggaaccatttttcccaaaaggggggggaaaaaaagcggggggaaaaaagggaaaaaggggttcccgggggaaaatgggaacccgctaaaaatcccaaaaaaaaaaaaacccgaaaaaaaaaagggaaaagccgggggggccaaaggagggaccaaaccaaaataaatgggggggggccaacggccccttttcaaaggggaaaaccgggggggccaggtgaaaaaaaaaaacgcccaacccccggggaaagggggtttgggaatgggcccccaggggggttttttttttaaccagggaaaggggaaaaaggggagggcccttaaccgccgggccctaaaaaaggggaaaaaaggggcccacccgggtttcccccaaaagggaaaaaaccgggtggggggggggaaacgggggaaaaaaaaaggagcgggtttgggtttcgccgtaccccacacaccgaaaaacccccaccaacccccaaccg

SEQ ID NO: 134965 - DNA, 256 bp, Glycine max
  Clone ID: PAT_MRT3847_92883C.1
ctgatgccttttcgggaacccagatttccaccattctgagtaacttcacacaccatataacatcaaatgatgtggggcttgtggaaacttgggcaatcaatccctcgccgtcttgctcacggtaataataaagctgttgcttgtcgatattttgcctcagatgctgagctgaaaaagacagtcctccatgacttccatgttgctaatggagggaagatggtgccatttgctggatggagcatgccaatccaataca

SEQ ID NO: 134966 - DNA, 233 bp, Glycine max
  Clone ID: PAT_MRT3847_92884C.1
ggcgagtacggctgcgagaagacgacagaaggggtcactgatggcaccatacttacctcaaggtgggactggagcttgtggtagggcatactgcaaaaagtggtgctctctatgcccttgggcttattcatgcgtaaccatggggagggcatcaaacaatttctttctgatagcccgggcagtaccactggtgggggtaattaacaatggtggatgtttaaggctttggtttg

SEQ ID NO: 134967 - DNA, 305 bp, Glycine max
  unsure (1)..(305): unsure at all n locations
  Clone ID: PAT_MRT3847_92885C.1
ggacgctgtgggaagacgcgtgtaaaaannttttctttgacaggggaacgggtttctataaaccggggaggccttcaaaatatgaatcaattctgggtgaaagatttacaagggatctgaacaatcatttttaagaacaaaaaggttcattactttacccccaacttttttttgtgtcctttttctcaggaaggggcggggaacaaattacaatctttacaaattttcaaccacatgaattcaggagtttaagctgttaggatatttggaattggcggggagagagcccccatattcttaccccc

SEQ ID NO: 134968 - DNA, 451 bp, Glycine max
  Clone ID: PAT_MRT3847_92886C.1
cccaccccacccgttccgttttttggagattggagcgactgaactaaccattaatttgcactcgctgagacagattcataacccttattttgcatcattcataacgcttgagaaacggcacaggaaacctttgtattcacatctgaatctgtaaacgagggtcaccccgactagctgtgcgatcagatctatgatgcatcacttgatgcgtgccttgaacatgaccctaacagcaaggttgcctgtgcgacatgcaccatgaccaacttgggcatggactttggagagaccacaaccaaggccaccgtcgactatgataagattgtccgcaacacatgccgcgagattggattcatatctgatgatgctggtctggatgctgacaaatgcaaggagagggtcaacattgagcaacagagcccgtatatcgcccatagtgtgcacggccact

SEQ ID NO: 134969 - DNA, 1773 bp, Glycine max
  unsure (1)..(1773): unsure at all n locations
  Clone ID: PAT_MRT3847_92887C.1
tctcccacgcgtgcgcccacgcgtccgtagcgggtgctataagacgacagaaggggacggctgcgagaagaccacagaagggtacggctgcgagaagactacagaagggcttgtatatatctcattttgaggcagtggaaaatgttgtacgcttgcataaggcgggctctgatgctaacttggaggatctatcatcagttatatcctctaatggtcattctattgaagaatttcttgcatctgaggccactgaagctggttcaatatttgacgatcttcagagaaccctttcaactcagcaggatgaattggaactatttgcaaggaaactacgcaatagattcaatctcagccttgaacaaataaaagatatctctgatcgctctcaagaatttgtggataagctatttgaagaatcaaaaaagcttgaagactatgcatcacaggctgaccaaatgcaaatgaagagcattgatgagtttaagaaagcatatgaggaacaatcaaaatctgatacagagaaacttattgccaatatgactagtttagtttctgatcacattcggcgacaaatggatctttgcagtatgggtcttcttttttatagtcgattcttttttgggcccttgatgggtgaagataggtgaagatgggcgtgggaataagtttatggtactgtatccttaatttgagtcaagtacggctgcgagaagacgacagaagggggtagactcaaagcttgttgatcttagagaaagtggcatcaagaacaagtccttcttagatggacatgtgtcatcaatggaagatattgtgaccaatgcaaaaaggaaatggcaggccttttgcgtgcaagcagaaaaggatgcaaaagacactgctgatgattctgccgcaaagcattgtcgtatggagaaactcatacagcggggtgttcatactgctcaatcggctttcgaacatacaaagaagacacatgaggctgtaaatgagatggggaccaaacatatttcagcaacagagtcaattgtcaggaatgctactgataacaatgtgcaacatgtcgttgaggtccattctgcacgagttacagcagaggaagatgtggcaaagaacagtgaggatcttctggagcagttagatgtcacgtctgcacaggagagggaatccatatctggcgtattaaatgtggtgagaactcatgcaaatacacttgagacgctacgagaggatcacaatggccaagctacttcaattgaacacaacaagcaaaactttccaacagcagtacagggactatgaggctagcggcacaacacctataagatgtgagcctgatgttccgacaaaggggacaatagagtctcttcggtcgttgccaatggaagcccctcttgaggaattccgggaaaataatccatatgaatctaatgatgtaaaggagttgaaaccatcgcttattccacgatcgcctcttactcagctgaactaatggcggtggttgggtcctctgttcttgagtcaaatttgtatttctattgtaacatcacattgcctttgttacccattaaattgttggaagaatgcatcatcatccgcagatagattattgtatttgatatttagagcaaagtactcatgtaaatccccccttgggatgaagtataggataaataatgtttaattttaagtaaggctcgcgtggttattcttgtcnnnnnnnnaanannnnaaanaaaaaaaaaaaaaaaaaaaaaaaaaaaaaaaaaaaaa

SEQ ID NO: 134970 - DNA, 248 bp, Glycine max
  Clone ID: PAT_MRT3847_92888C.1
tcgtgagaagatgatagacgggcatcgccgtcagaagatgatagaagggcatggtccgcagaacctcatagaagggcatggtcgtcagaagatgatagaagggtatggtcgtcagaagatcatagaagggcatggtcgtgacaagatgatagaagggcatcgtcgtaagaagatgctagaacggcatagtcgtgagaagatcatagaagggcatactcgtcagacgatcatagatacgcatggacgtc

SEQ ID NO: 134971 - DNA, 796 bp, Glycine max
  unsure (1)..(796): unsure at all n locations
  Clone ID: PAT_MRT3847_92889C.1
gggtaccgcctgcaggtacctcggtccggaaattcccggnngtcgacccacgcgtccgaaccaattaatgattttttatatttacatgtcagaaattaaatccataatcacatatttaataaataaaattatctattaattactatcatatcttatcattctttcaactatatgttgcatgtattagatcaataattagtttgagggattacccttccaaacactttattattaacaatattttaaaacaagcaataccaatttgcaaaggcaaagcaatattaatagattatagacactgctttggcgtgttaaggcagttaattagtattgcttttggtagtctttaataaagacaattaatatacataaatattatgtactattatacagtagatataatggaatatcatctcataattgaatttctttcccatgggaaacatcgcatgaaaatctactntcgtggttctttaatttttttttctatttaggtttcaaagaaggtcaaaagaattggtgtctagaagcttaggctaaagtgcagatctcagtaattaaatgaatatgatttggaaatcatttaatttttgaaacgatttagtaacacntaattgtgatggagctgagagaaaaactgagaaaagtgaaagtttaaaattgattaaaggagtaaagggtgtngttactgtttacaaattgttacaaagagtttctattagaagtgatatgacntcatataaccaatttntgtatnccaagtagaaacccatatattaaacaatatccactgatc

SEQ ID NO: 134972 - DNA, 469 bp, Glycine max
  Clone ID: PAT_MRT3847_9288C.1
gtttgccgcactttaaaaccggaaacaaaagccatcgcaacttgattccaagagtctctgaatttctgcctacttttttgtgtacgatttcttaagggaaagaaaatcactctctgtggtggccacagactgcgtgaatcattgttttttccattcttagtttatttgctgaacactctcctatttgatataggacttcccgtcagatttaaacttattctgtttctttttcagttctgtgtttaatttcaagttcaagctggtgaaatcttggattagtgctcccactctcctatctggtataggacttcgtgggtggactttggtattactctccttaatgtcactctcttgttctcactgatccgcattgccgctcaaaggggtcttatctgaaacacacttgggcgttggagcaaatgtttgcttcgttattatcattggagacacaggttcactgagacaacac

SEQ ID NO: 134973 - DNA, 317 bp, Glycine max
  unsure (1)..(317): unsure at all n locations
  Clone ID: PAT_MRT3847_92890C.1
gnattngtagttagctcggaattcggntngagttaanatnantttctcctttatnttnnnctntnntttntntctcttaaagantaatatnatnanantatannattttttttnattatctntntnttttattttnatgnntattntnaaatnnatantgtnncnantaggttnaaantnaaanaanggaaanncanaaattnannnangntanagntangnnnnnattttannntnttnantttnnannnnnnatannanggctnnatannnnntnnnangnnnnttcnnnnnttannnnnntcnnttnnnnnnnc

SEQ ID NO: 134974 - DNA, 299 bp, Glycine max
  Clone ID: PAT_MRT3847_92891C.1
ctgggtgatgcaccaataccatctggggcatgacgaggaatatagaaaattaaaacttgatgagttaaaaatgggctaacaaaaacaaacgaaggggggcggattggttaaaaaagaactccacaacccgggaatgattccgagaacaaccctgtaacgccaccaacttcccttatggtagaaaaaactaaagctgggggacttgatggtcatatactgaaatctatgtgaaatagatatacgatctcaatgcctcacatcatacgagtcccatacctaaattgtacactctcgggggt

SEQ ID NO: 134975 - DNA, 186 bp, Glycine max
  unsure (1)..(186): unsure at all n locations
  Clone ID: PAT_MRT3847_92892C.1
anacaacacaaaatanaatcaccttaacganatcagaggacctangttaaggttgcgtgcttgtggtcgngttcanaggaagaggaagagattaatttgacagacnaagttgaattgaaggtataatggcgnggcgagagtttgcaagcacnttgaagnacntgaagttcatgcaaagggcggccc

SEQ ID NO: 134976 - DNA, 667 bp, Glycine max
  unsure (1)..(667): unsure at all n locations
  Clone ID: PAT_MRT3847_92893C.1
ccacgcgtccggtcggatcgaaaaccctaaattgaattcgaatacacaacatgcagcaggggggaggatctgagacggaagtaacatgggaagaccagcagaacatcaacaaattcggaaggttgaataatcgctttcacgagcttgaggatgagatcaaaatcgcaaaggtattctattcaaccctttcattccactcgtgtttagtgtattatgcacacagaacattagggcatgcacaaattatatttacttcttgtttagttatatattactcctaagtcactgtatgcttaagattaagaacttaggacaagctccaagacttaaacttctctgtgtcctgattttatttattttgctgcttttcattggtcaaacataatatacatggctacgtgccttttgtagagactggaacatttggtgtgagttgtatctggaattaatcatatcattcgccaaaaaagaaaaaaaatcatcttgcctacactcttttagcagtggactaaaaagaacttttatgcaatgtgtgaagttaagaaaaagattgagtcccaattcatcactaaattacagggaaaagggaggagaggaaaaatagaagacgattacatcattatattctnccaaaaataattctaagtttgcttgagtaagctactca

SEQ ID NO: 134977 - DNA, 4017 bp, Glycine max
  unsure (1)..(4017): unsure at all n locations
  Clone ID: PAT_MRT3847_92894C.1
tgacgagacgcgtccggttttggggcatcactcgttgtttctctcttccatgcccaaaatgcgtgtcctctttgtttttctgtttttccattttcatttccctgaaaccctttctgccccaatctcagagtaccgcgcccttctctctctccgttcagtcattaccgacgccacaccacccgttctctcttcttggaacgcctccatcccttactgttcctggctcggcgtcacctgcgacaaccgccgccacgtcaccgccctcaacctcaccggcctcgacctctccggcacgctctctgccgacgtcgcccacctccctttcctctccaacctctccctcgccgcaaacaaattctccggccccattcctccctctctctccgccctctccggcctccgcttcctcaacctctccaacaatgtcttcaacgaaaccttcccctcggagctttggcgcctccagagcctcgaggtcctcgacctctacaacaacaacatgaccggcgtgctcccccttgccgtcgcgcagatgcagaatcttcgtcatttgcatctcggcggcaacttcttctccggccagatcccgccggagtacggacgctggcagcgcctccagtacctcgccgtctccggcaacgagctcgacggcactatcccgccggagctcggaaacctctccgccctccgcgagctctacatcggctactacaacacctactccggcggcatcccgcccgagattggaaacctgtccaacctcgtgcggctcgacgccgcctactgtggcctctccggcgagattccggcggagctaggaaagcttcagaatctggacacgctgtttcttcaggtgaatgcgctctccggttctctcactcccgagctggggagcctgaagagcctcaagtccatggacctctccaacaacatgctctccggcgaggttccggcgagttttgcggagctgaagaatcttactctgttgaacctgttccggaacaagctccacggcgcgattcctgagtttgttggagagttaccggccttggaggtgttgcagctttgggagaacaacttcacagggagcattcctcagagtttggggaaaaatggaagactcactctcgttgatctttcttcgaacaagataacagggacgctgcctccttatatgtgttatgggaatcgtcttcagactctgataactctcgggaactatctgttcggtccaattcctgagtcgcttgggagttgtgaatcccttacacggattagaatgggagagaactttttgaatggttccattccgagagggctttttggacttcccaaactaacacaggttgagcttcaggataattatctctctggagagtttcctgaggttggttctgttgcggttaatcttggtcagattactctctctaacaaccagctttctggggctctgcctccctccattggtaacttctccagcgtgcagaagctccttcttgatggcaacatgttcaccggtcggatacctacacagattgggaggttgcaacagctttctaagattgattttagtggcaacaagttctcgggtcctattgcgcctgagatcagtcagtgtaagctgttaactttcctggaccttagccgcaatgagctatctggagacatccctaatgagataactggcatgaggatattgaattacttgaatctttctaagaatcatttagtgggtagcattccctcttcgatatcatctatgcaaagcttgacttctgttgatttttcatacaacaacctgtctggtttggtgcctggtaccggtcaattcagctacttcaactacacgtctttcttgggaaaccctgacctgtgtggcccctatttgggtgcttgcaagggtggggttgccaatggtgcacaccaacctcatgttaaaggactctcctcttctttgaagctgctacttgttgttgggttgctattatgttccattgcttttgctgtggctgcaatattcaaggcccggtcattaaagaaggccagtgaggctcgtgcatggaagttgactgcgttccaacgtttggacttcactgttgatgatgttttgcattgcttgaaggaggataatattattgggaaaggaggtgctggcattgtctacaaaggggctatgcctaatggggatcatgttgctgtgaaaaggcttccggctatgagtagaggctcttcacatgatcatggcttcaatgctgagattcagacattggggcgaatccgacacagggcacattgttaggttgttgggtttctgttcaaatcatgagacaaaccttttggtctatgagtacatgcccaatggaagtttaggtgaggttcttcatggaaagaaagggggtcatttgcattgggacaccaggtataaaattgcggtggaggctgccaaggggctttgctatctgcaccatgattgttcgccactcattgtccatcgtgatgtgaagtcaaacaacatccttcttgattcaaatcatgaagcccatgttgctgattttgggcttgctaagttcctgcaagattctgggacatctgaatgcatgtctgctattgctggttcatatggatacatagctccagagtatgcctacacattgaaagttgatgagaaaagcgatgtgtacagttttggtgtggttcttttagaacttataacaggcaggaaaccagttggtgaatttggtgatggcgtggacatcgtgcaatgggtgaggaaaatgacggactctaacaaggaaggagttcttaaagttcttgatcctaggcttccctcagttccccttcacgaagtgatgcatgttttctatgtggccatgctgtgtgttgaagaacaggctgtagagagaccaacaatgcgtgaagttgttcaaatactgaccgagcttccaaagccacctggctctaaagagggagacttaacaataacagaatcctctttgtcatcatcaaacgctttagaatctccatcctcagcctccaaggaagatcaaaatcctcctcaatccccaccacccgaccttcttagtatttaaagtgctctgttgggtgtttcatcttattagttcccttggttgtgatagcttatccatttactttctttttctgtctctcttctggggttggggcttttcttcttcttctaactgaaggtattaatgctctgattttttaatggttttgtacagtaggattggtggggggggttattttcttatgaagtcactttcttcatcatgtagtactgctttttaatttttatgttacggccgttgttgtgcttcgcctattcttgggagtggggaggattcaagggaattactctttttttatgcgatcactgacaggtagacacaaaatgacgcaaacgggttgggtattaaacagtgggtatattgtatggtttagaatattattgatgaatcctgagtggattggcacagtgtgaactgtgagcctgagctgtgactgagtctatgagtcaggtttggataaaagcttatttgaagaagttaacctgtttcgagaaaatcagagtgaatcaggattcaggcgtgttttagctttagttcgttgttcatgccgtgacgcttttacagaagttaattcttttgctttagctttttcatttacgagactttgtagcgctaaaaaggatataatttttttcccttgttaaataacaaaagagaggcattggggatgacatttactttctttttctgtctctcttctgggattggttttttttttttccctaactgaaggtgttaatgtttggattttttaatggttttgtacagtaggattgatgggggtattttcttataaagtcactgtcttcatcatgtagtactgctttttaatttttatttgcgaccgttgttggggaggattcaagggatacaattaaattactcgtttgtttcctgcaaaaaaaaaaaaaaaaaaaaaaaaacnaaa

SEQ ID NO: 134978 - DNA, 350 bp, Glycine max
  Clone ID: PAT_MRT3847_92895C.1
aagggcgctggtgctggaaggaagcaatcgaagaaagctgcttaggatcctaacaagccctagagacctcctagcgctttcttcgctttcatgtgcggattttcgtttgcttttgataccgaatctgttttcgtttcgtttcggtgtgattttttttttgtgtgctggcgattgaagtttttgtgatttgttttttaagtccgagttcacagagcagtttaagaatgagcatcctaactacatatccgtcgctgttgtgagcgatttcaccttactttcactggtcgactgaaaatttgacgctatgtttttgggcttatagaatttgactgagaacatattttagggcg

SEQ ID NO: 134979 - DNA, 505 bp, Glycine max
  Clone ID: PAT_MRT3847_92896C.1
tgattgaagagcatgtatttgctttggttggccagaatgttgaatactccttcttaccgaccattgaccctggattgctaccctatgtcacactacgctacagcacctcacactccttagcgcgctctattatctttaacatcgcactattagatgattgatccatactggggtggcagaaccttactgtgtaggcggaacctgatcatgatttcggatgatgagcaacatctccaccttctgtcaaccctaatcaccctcttccaacccttatatattttcctactttatgagaatgtgcatacaaagcgagatagtgcggtcgatgcgccatagagaaatagactggataggaactctactacgcacttgctgctcgactgacaaatatcctacacgatgataaatatatgccacgtagatcttttgtttttatgcagatcttttctttttaaaggcggccgcccactaatggggccgccgaccactaaagaacttgcggacc

SEQ ID NO: 134980 - DNA, 356 bp, Glycine max
  Clone ID: PAT_MRT3847_92897C.1
tgtatatgagactacactgagcatcgtctagctatctcgatcgaactgtccaaggtcctgtcactcctgtcactgtcacttcggtaaaatagaaaagcattacgtaggggcagcctggtgcgtacgaagtgaccgtcggtgtgtttgcgatagggggtggttaacgtatttgaaagcccctgcactagcataaatgtaagctttattaataagggcggcttgcgatgcccatgggacgtgttgaacgtgaattaaagacaagtagtccaaacgaagagggtcaacggaaaggccacatagacatagccagttacataacacgggttaggtacgtgcgttttgcatgtgcccatagt

SEQ ID NO: 134981 - DNA, 405 bp, Glycine max
  unsure (1)..(405): unsure at all n locations
  Clone ID: PAT_MRT3847_92898C.1
aaaaanaggggcggcccacgcgtccgcccacccacccnccacncctnccncccatatatatcatatatcctatcatccttaatctcgcctttattttacaccaactttccactcattaatctctacaaatatcaaaaatcccccttcctcttttaatcaaaccatatttcatatttacaccaaattttttttaccaaaatttataagatcacaattcacaatccccatacaataaaatgtaaaataaatccttaaaaatttcatttttcacaaatacactttaaacaaaattgaattacataaaaattatccttcaaacacataaccaacgctatataaacctttcttcttatcttttctaaaaacctctttttcaaaaaaaacaaaccctttttcacctatcat

SEQ ID NO: 134982 - DNA, 301 bp, Glycine max
  unsure (1)..(301): unsure at all n locations
  Clone ID: PAT_MRT3847_92899C.1
gcaccaccactgtcaccctacagtgatccataagaatattaaatcttctaatattctcttagatacaaacttcaatgccaanctagctaattttaatcttaccttaactagataatcccaaagcaagaacaacatgaaactatcgagtaccttaaaatacatagcaccagagtatcttctagataataaatgaagttataaaagtgatatctatacttttaaaattatactattaaagctcctactagaaaagaagccagtggaaaaactaataccagctcaataccaatctattatcaca

SEQ ID NO: 134983 - DNA, 1960 bp, Glycine max
  Clone ID: PAT_MRT3847_9289C.1
atgaaatgcagagtaagcaaaaggatttagagttggaggacaatgcattaatttttgtgggaggaaaagtttccgttgatatattactattgatgaagctgctaagctttgcggtgggtgttcttcctgatcatgttcccaaggtggagcccagatgcaattgtttttaattccaatcaggtttatgaaactcccagctatagggtgcagtttatgtttagagagtcaaatggagcaacatttttaaaatcacaacttcaaacgcctgaccctgattcagttgatgcatcagcaattctttggaaaaatctccaagataaaaaaacttacttaaaaataaattttgctggtgatgtcttgtcagtttgctactgtaatctgacaatatgcctttcaatcatagctacatccttcggccaatctcagttgcaacctttgtttcctttcatggaggctttgcctgatgaaatgcatgttgctgttccctttcttcttagttttatcatgggtgatccagtgaagatggcatcagtcagtattgaaaataagcttcctcctgccaaaaaaattgaacaattgtcatacaaccttactgcattgctgccgtgtcttcctgagctggctgatattataccaagggatactcttctttggaagctgaaacttctcaaatcagctgctgcatatgctaattcgcgtattcatgctgttgaagctgaagttcttgtgcttgctagtggcaaggataacatgcttcccagcacaaacgaagctcaaagactcgtgggattattgcaaaactgcaaagttcgtgtctttaaggacagtggacacacacttctcctggaagatggcattggtctgctgacaatcatcaagggaacttgcatgtaccgtcgttcaaggaggcatgatttggtcagggatttcatacctcccagtatgacagaattcagatatgcaatggatcaagtagttggatcatttcgttctgctactggatctgtatttttctcaaccttggaggatggaaagattgtaaaaggtctctctggtgttccagatgaaggtcctgtcttatatgttgggtatcacatgttgttggggttagagcttatctcacttacagatggatttttaagtgagaagggtattgcacttcgtggaatagcccatcccgatctgtttaggcctgaagtggagtcttggtcttctgagttttctatgtttgattgggtgaagatatttggtggggtgcctgtttcagcaagcaatattttcaaattactttcaacaaaatcacatgttctcctatatcctggtggtgcgcgtgaggctctccattataagggggaagaatacaagttgatttggcctgatcatccagaatttgtgagaatggcagcacgatttggtgccacaattgtgccatttggagctgtaggtgaagatgatatagctgaattagttcttgactacaatgacttaatgaagatccccatagtcaacgatcatataagaaatatgaatcgtgactcagttaagtttagagatgaaacaagtggcgaggtggcaaaccaaaatctctcttttccagtgcttctaccaaagataccaggtcgcttttactttctatttgggaagcccataagaacaaaaggcatggataagatgctaaaagacagagaaagtgccaaccaaatgtaccttgagattaagtcagaagttgaacacaatttaaattacttgatcaagaagagggaggaggatccatacaggaacttcgtcgataggaaaatgtatcagatattttatcctcccgaaactgattcaaccccatcatttaagccctgaaaaatgtttttgtatatataatactctttttatgtaatcataattatttttaaacaggtacatgtacatgtgccattattctaataaaatatcactttattttaaa

SEQ ID NO: 134984 - DNA, 353 bp, Glycine max
  Clone ID: PAT_MRT3847_928C.1
gtgctcaagaataacattcctggttatagtattcctagcaatacaatgttataccttgaaacaaatgcccacaaagtaattataggaatatttaagagcagttagttgatggtgaactgtatcatttaggattgtgaagcagttgaaatactcacatgtctgactgtcaaataaaaataacttatatacaacttttggttgtcttcttgaatagttgttttctgtgtgcagttttgggaagatggttgcctgctttcgttatgcttcaattcaccttcattctgtttatcttcccccacccaaactggaattcaactatgatagtcaggactggctacaaaaagatgcaaatg

SEQ ID NO: 134985 - DNA, 343 bp, Glycine max
  Clone ID: PAT_MRT3847_92900C.1
catagtctcgcaggcagaaagatgtctcacaagtgctttatccttcattaactttttcatcgcaaaagcaagactaagtgtcacagctgatggcaatccttcaggaattgcaacaactattatggttaccgcaatagcaaagtagtccagcagcttcaatgcatcatttgaagaccaactagcaaactccccacgaactgctttttcaacaacaaaccttattgtcaacaccacaaatgtcagcacagaaaaagtcaaaccaattttaccaataactgtagcaactccattcaatttcacctgcagtggagtctcatcctctcctccctcacttagagtttcc

SEQ ID NO: 134986 - DNA, 271 bp, Glycine max
  Clone ID: PAT_MRT3847_92901C.1
tggctgcgagaaacgacagaaggggggcttcaatggcttgtaagaacccaggctaggtggtgagttgatgatttcgcatcatccaccgaaaccatgccaagggcggcccctccatatagaaataagcaattgtaagcctgtcggactcaagtgttgcgtggtactcaaaaaattgtgtgattttgaacatccatcctgaggggtctgatccatcaaatcttggaacatcaagtttcattcgggaaagattaattgtttgtgggtttggtgt

SEQ ID NO: 134987 - DNA, 440 bp, Glycine max
  unsure (1)..(440): unsure at all n locations
  Clone ID: PAT_MRT3847_92902C.1
agctnggatcctctagagcggccgctttgttttttttttttgtttttttttttttggaaagaaacaaatagttgatactaaaactagcttcaaggtatcgaccaggtcatgttattccccaaacgtgattccaaaaaacatcctcattaatgatccctagacagagacactaggcgacagatgtgaattatcatttcattgtcttataacacgatatatgtgctacactaaactcaaaatggattgatgaagacaaatgacacgtacgtactgacaacatgtcgagttaaaacgttgattacccaacagtagaaattactttccttacaagctgacattcaccattcattcatacattaattttatttaacacccacctgatgggaacaaaaaggaaaaaactttgttttggtccttcgatgatacaaaatactgttcat

SEQ ID NO: 134988 - DNA, 184 bp, Glycine max
  Clone ID: PAT_MRT3847_92903C.1
ttggggggttctaattccacctcacatagaggatgcctacagtcctttgcccagatggatgggtgaatctctcaagggtgggaaatattttgaatcttatcacttttcttgggctgaaggaaaaagaactattgagcttgtagcaaggaaagagaatgcaattgcacaagtggtcattcacatt

SEQ ID NO: 134989 - DNA, 254 bp, Glycine max
  unsure (1)..(254): unsure at all n locations
  Clone ID: PAT_MRT3847_92904C.1
gcaattgaagttaaaagccttagccttccatacaacnnnagacnnnaagacatnaanatccatggctgnctccgtctccactgtcggagnngtcaanagagntcttttgaanctgaatggttctggagtggagnttcagntcccagttcagcttctttgggancangttgaagaaggnnaatggctnaaggggccccaaaaggaaggttccggngggaaactttcaaaattggtggtgtanaagagaagaaaga

SEQ ID NO: 134990 - DNA, 424 bp, Glycine max
  Clone ID: PAT_MRT3847_92905C.1
cccccccattaaatggttgtatttaagcaaaggaaaagtccctctttccccctcattttaccttttaaaaaaaaaattggtccgggaaaaaaaatgggattcatgggtttcctgaaccaaaaattttttttcttgccaaatttttaatttttatagcctgggaaggttttttaaaaatccttttgggaaatgggcttcaaactaatttttttaaaatcaaaaaatttcttaaaataaaaaaccgggggagtggaaaaagggttttttcccgaaacccaaaaatttgaatttttccccccttttgttctgggccaaaaaaaatttgcccaaaccatgcggaaatcgatttttttcctttggggaattgaaaaatttttccttttttttccaaattgttttaacaaaattcaccggtttcgggggg

SEQ ID NO: 134991 - DNA, 175 bp, Glycine max
  Clone ID: PAT_MRT3847_92906C.1
acgtaagtctcaggaattcaggcttcctgtgacaaaccaaagctcctcgctcagctatctgctttgttgtctgaagttggactgaacatccgtgaagctcatgtcttctcaacgactgatggcttttgtttggatgtatttgttgtcgctggatgggcatccaacgcgaacttcg

SEQ ID NO: 134992 - DNA, 1583 bp, Glycine max
  Clone ID: PAT_MRT3847_92907C.1
cccacgcgtccgatgacttgcacccatgcagctctaaagaggaaagatttcctccagttaggtttcaagtatgacaacttgctaatggaagaaagtgcccaaattttagaaattgagactttcattccaatgttactccagcggcaggaggatggtcatgcacggcttaaacgctgcattctgattggtgaccatcaccagttgcctcctgttgtgaagaatatggcttttcagaagtacagccacatggatcagagtctatttaccaggtttgtccgattgggcattccttacattgagctaaatgctcagggaagagccaggccaagtatagctaaactttacaattggagatacagagatttgggagaccttccttctgtaaaggaggaagtcgtattcaatagggcaaatgctggatttgcttatgattatcagttagtggatgttccagattaccttggtaagggggagacaactccatctccttggttttaccaaaatgagggagaagccgaatatgttgtcagtgtctatatatacatgcgtcttttagggtatcctgcaaataagatatcaattttgactacatacaatggtcagaaacttctcatccgtgatgttgtaaataggagatgcgttccatacgatttcattggtcctccaagcaaggttactacagtggataagtttcaaggtcagcaaaatgattttatattgctatctcttgtgcgtactcgatttgttggtcacctacgtgatgtaagaagattggttgttgcaatgtcacgtgctcggcttggtttatatgtcttttgccgtcgttccctttttgaacaatgctatgagctgcaacctacatttcagctgcttcttaaaagacctgaccaccttgcccttaatgtgaatgagattacatcatatactgaacgaaatgttgaagatcctggaccggggcatcatttacatcttgtcagtggcattgaggagatgggtagtatcatagacagactgtatcaggaaaagttgagacatcagtttgatcaaaatggggcttattttagtcatttagaaccatcagcaaatacagattgggtgcaaagtgggcagcagactatggacactgatatgcctgaacaaacagaggaagctacaactgttgataaccatgtcgctgtagatatgccacctgaaaacagcatggaagatgttaccatggttgataatggtgatggtgttgcaaatgggaacccatcgccatagaagcccttcaaatgaggagactggtgtaggtgctgctaagcattccttgcacatttgttttttttttttttgttttccagttacatatccgtaggtcatggcatttctatgactagataaatcaatgccaaattgacaagatgtagctatatagcaattagcaaattagatttttcatgtggaaggccaggtggaggaattcatgttttgtatgtaacaattgtagtcggtatatgggatggcttattgatgtagctatagcaattgtagtcagtatattttttcgaatcaattaatcactagtccacttttactcgctt

SEQ ID NO: 134993 - DNA, 2547 bp, Glycine max
  unsure (1)..(2547): unsure at all n locations
  Clone ID: PAT_MRT3847_92908C.1
ccacgcgtccgctgcaacctgcaggaacgacacagagtcctctctctctcataagctattttctcgcgttttctggacgattttccttccatccaaacactcccaatcccttcgcagccgcttgcggtttatcttcggatcctcacaagagaatcccttgagcttccaagcgatctctccctcgtccttcctccctgttgaatcttgcaaagtttcttgtaagtttttgtctggatagatgccagttgcaaaactcccagcctctggcactatcgatttcaggaaaacagacgatggaagtgattctttagacacaataatcagacaagcaattggaaaagaacctttgctttcctttcctagggccggtgtcagcccagtacagtggattcaattacttaatgctttagatcagcaagggttgcctttgctctctcctgtgaaggttcatttacagaagtgcaacaagtgttctcgagaattttgctctcccattaactatagaagacatatacgcatacagcatcgattgaaaaagcttgataaggattctgataaaaatagggatcttttaggggcatattgggataagctctccgtagaagaggcaaaggaagttgtgtcattcaagaatgtgatgctggaggaagttccagggtcttcaattttagaagctttgacaactcttagaaaacaaggattttcttctcttccacaatattatctgagggctggtactgcccttttgaatattgttcaatccaggccttctagttttcctatatcttcccaagagttgttcagtatcctagatgattctagtgaaaaaacatttttggttggatcagcagtatcaatgcaaagatatgtttttgatggagaggctggaaagattggtcttgaaccaaaaaacctagttgcttgcacaagtttcttgctagagcagaaactggtgaaggcctggcttgctgacaaggatgctgaagcattgagatgccagaagctgctggtggaggaggaggaagctgctcagaaaagaaaagctgagattttagagaggaaacgccaaaaaaagcttagacagaaagaacacaaggccagggaacgactcgaagatgacacagaaattaaagagaacataagcagcacaggagaggatgttttaccagctgaagcttcttctggtacatgtgactttgaagcacagaatccagatatatttgcggatcattctactcctccacatgtaacttctcgctgcctagacaatgatgaagttgtagaaggggttacactgtcagggtatgattttgacactgatcagtatatagaacgacagacatcacgaggacataatcaccggcgcataatggctaccagatggcaagggctgccaaaatctcaatgggccatagccaatggttcgcatccaggccataattctcaaatgtcaaagcttggagtcattcaaaaacatggaaccaactgtgatcaaagggtagctcctatagttaatggtagtaagttttggagccgaaaacctaaaccagaaactaatggggtggttttaacggccattcacaagggaatttggtagcagcccagcgggactgcgtggtagagaatctagccaagcagaatactgggcaggaaaagccagtcaaacatgaatttggtggcacccctacgggacagcttggtagataatcttggaggccggtatactgctttggaacagccagtgcaacatgatttcaaaatggtgagacagaagctgatgtaattaatggaaaatatgaccaaaatttggcatggaaatgaagtttacggttgtgtagtatagatggtagtgaaatattggtttagtggtggaaaatatgacctaaatttgtcaggtcaatgtagtttgaggttgtgtagtatagatggtagtgatattggttttggggacaatttttcccacactgtagattcagaaagcttacgtctatccatccatgctgcaaaagcctttcttgtacaaagatggaaagaagctatctcatcaaaccatgtgaagttgtttgttacacctgattgtcaatcttctaatgcggacagatgtagcattattgcaaattcagagaaccgattgcctgcaacctctggagttgccaaatccaaacccaaaacaaagcttgagaagggaatgaagataaagtacattcccaaacaaaaagaagcaacctagtaagaagaatcaaagaagaaatcgggttatttaattatgacagatatgcataatttgagttctcgcctattaattttattagcagaggttccagttttatcgatggtctttctgtcagaaaattggaggtagggttatgccggaaagtctttttatattccgtccttttccttcaaatgatggcataggggattgtgcattaagtttatttttttcttgtggcatttttaccaaaatttttgtgtaataaatttgtctagttattataaaatggcatttaatagtatcataaatgtgtttaggagtttcnnctgaat

SEQ ID NO: 134994 - DNA, 361 bp, Glycine max
  unsure (1)..(361): unsure at all n locations
  Clone ID: PAT_MRT3847_92909C.1
gaatcttttgcctttttcctttggtcgattatcctaattgaatgctctctcccgttaatcaccatcaattctgcgttatcatcatcaattctgctttattagctctatttttatctctctctttttcaatttctttttaaaaattctctctcttcctgtgaactttatgtggggtgggacatttatgacttattatgagggaagaaagacatcgtcaactgagcaaaaaaagtggggatttggagataattagaaaagataacaataatgaactcggacacgtgctgctatactttacttttgataaagtttcttggtaggaaccgtggggtnttgtttttgttcatcgtgcttcttaatg

SEQ ID NO: 134995 - DNA, 462 bp, Glycine max
  Clone ID: PAT_MRT3847_9290C.1
agaggcaaacccgcagacggacgggcaaagttagcacaagaatacgaaaaacatgccgcccatgaaagcctcaaggatcaaattcctgctgtagacaagtatgaatactactaaggttaataatgtagcaaaaattatgaaccttacacaaagtgttgatggtgatcttaaacttcttactgatgggaagttgtacgagggtaagcatattcctgtatctaatattagtgcaggggaaaatcatgtagttcaaatacccctaatggcacaggaggaaatactgtcttctagtgcaagtgatatcagaactgcacaggtgagtaaaaatagcaagccttaagctactgcaaagcatgagggagctatagaaattatcattgaaagtttcccaagtcctgactgcaacatagagtgagcaatgctcttggtgatactataataccaacctgaaaagcagtccga

SEQ ID NO: 134996 - DNA, 223 bp, Glycine max
  Clone ID: PAT_MRT3847_92910C.1
tcctctagagcggccgcccttggggttttttttttttttctttaatacctttattctcgtttccacactccgtgttgtagaagttagaagtattcttctgttatgggagtgaagggcgaccctaatccggattccgattcccttttttgccgcattaatgcattcaacactttggaactgtgggaagaagatgtatttttataaccagtccaattcagaaaaa

SEQ ID NO: 134997 - DNA, 315 bp, Glycine max
  Clone ID: PAT_MRT3847_92911C.1
ggatgaaaaaaatggggggccctgccaatgtatacgaaatttttgtttcaaaattacaaaagtttgggaatacgaaaaaccccattaaacttaatgcccaaattttttttttcaaaacttttatgggggggacattatatttttgggcccacaatttttcaacttaaatggcaaaggaagggactaaaacatttgggggggattcacccaacccccccattggaaaaaatttttttttgaaggagtaatgaaccaagccttttttcaagtatactccaaaaagattttgttggggcccatacccttttttaaact

SEQ ID NO: 134998 - DNA, 1337 bp, Glycine max
  Clone ID: PAT_MRT3847_92912C.1
gatgaaacaagctgcagcacttggaggagtgcaaagagccaggaagaggtttgttggtgtaaggcaaaggccatcaggtagatgggtggctgagatcaaagacaccattcagaagataagagtgtggctgggaacttttgacactgctgaggaagctgcaagagcctatgatgaggctgcttgcttgcttcgtggcaccaacacaaggactaacttctggccttgttctcaatcctccacaagtccagctctttcctcaaagatcaccaatctcctccttcaaaggcttaaagaaaggaacaacaacaacacttgttcctcgtcctcgtcctcctccacttcacttctcatcaaccaccaacaaatgcatcagcaagttggtgcatatggagaaggttcaacacaattctcaattgaccaattcactgatttcctcaatgaccctgaagattatagcacaagcaacaatgacttcatcaacaacagtgcacaaattgactacattactagtagctttgaatcatgcttaactgaaaaagatggtgggactaaaattgatatgcaatacaaatccaggaatgtgacaccacagacttcaagcaatgacagcaattcaggagtggaggatagtgaagaagaaggctctgatttgggtgtgcaaagcacaaatttggatgtccatgattttaagtttttggacaacattgctccacctagttactactctccctttgagatggctgaagagatggaggaggagcctgtggagcctgagaatgagaactatggcgatgagccttcaatgcttagagctgtgatgaagagaatgacttatgagaggaagttctcagcttctctctatgccttcaatggaatacctgaatgcttgaagttgaaacttgaatcagggaacatgaagggaagaggactagctgatcaattaacaagccttcaaatggcttgtagcaaaaacatactcgagaagaacaaggaggagaaagaatacattggaacaatggataggagacaggaagaagaacaccaacaaacatcacctgacatggattcttcaagtgttgatggggaactgttgctttggaattcacttgatcttcctcctatttgctttgttaacttgctagaaaacggttcattcaattagcaatatccattcattttctgtaacattatttatgctgagcacaactatattgtaacattagactttgtagtaagcatgaagtaatatcttctgctaattgaaattatttaaattcttatttcattcataattcctagtatcaatgagtaacattgaatttaaagtttttcttaaa

SEQ ID NO: 134999 - DNA, 730 bp, Glycine max
  Clone ID: PAT_MRT3847_92913C.1
gcaggtctggaagggccaaggatcaagaaagtggaaacatgcccagagtgatggtttctttgttcaatttgagtcaccttccctgcgaaagttgtggtttatacccagttcgaatgaaaagggacagacctggtgcaggtttctctcccacttttactcgcaacacttatttactgaatataagttttgtagtttatggagggtgatattgcgaggattgattgttcttttatcaaaatgaaaaacaaggagaaatgcttatatttatggtttctattaacagttttattcccttttcttattatttactactttctatccagtatccactagggtgataggttggttttgttaatccaatttctctgcagaattattggtatgaaaaaacttagctgttatatacgttaatcttgtgacatcaggcactccttatgctcaaagtttggttttgtagagcttcttttcctagtttggttagagcttcagacatcttaggcttcctttctccttaaaagaagtcgacccaaacaaaattataagaaatagagcttttaaaaatgtatctttttttaaatgaaggaaactttgaaaaacggagctttatcttgagagcttttgatatctacttctccatttccttctttacttcaaaaccctagatctaaaaacccataatctcagaaattattccaagagattttaactctaaagtaacttttaagtttaa

SEQ ID NO: 135000 - DNA, 1863 bp, Glycine max
  Clone ID: PAT_MRT3847_92914C.1
cacgcctccgagtggtaagccctacagagtacagacatcatttaggaagcagaatcagatatttgaaggttagaacgaaaaagaatcatcgatggcagagacgaaagaaggttcaggttcggagatgtctctgaaggatcagggcaacgagtttttcaagtcaggaaagtatctcaaagctgctgcactctacactcaagccatcaagctagacccttctaaccctaccctctatagtaatcgtgctgcagcactactgcaattggataagcttaataaagctctagatgatgcagagatgacaatcaaattaaaaccccaatgggaaaagggatatttcaggaagggaagcatattggaggctatgaaacgatatgatgatgctttagcttcctttcagatagcattgcagtataacccacaaagtcaagaagtatcaaaaaagataaagaagataaaccaactggtgaaagatagcaagcgagctcaagaagtggagaatatgagatccaatgttgacatggccaaacatttagatacattcaaaactgaaatgtctgggaagtatgggtctgaggaatgcttgaaagatttgttctcattccttgttgagactatggagactgctgtaaaatcatggcatgaaactttttcagtggatgctaaagtttactttcttcttgataaggaaaagacagacaccgataagtatgccccagttgtgaatattgataaggcctttgaatcaccacatacacatggcaactgctttgcatttcttaggcagtatgctgaggagtctttctccaaagcagcctgcttggtgactcccaaaaacatcattgcttatccgcaggtctggaagggccaaggatcaagaaagtggaaacatgcccagagtgatggtttctttgttcaatttgagtcaccttccctgcgaaagttgtggtttatacccagttcgaatgaaaagggacagacctggtgcagggatccagaggttttggacattggtgctcatgaagttcttccccggttattcaaagaaaagcagccccgttcttagtgtactttactagtacctggtgtatatttatttcatgaggtaaaaatgacaggctcacacaaagatttgcatgatcaacaaatattggtgcaatttgtttccaatcttatgatgtgttctatgattgcaaaaaatgctggcagaaaagatgtgtgcttcataattttgttagatccgtatatttttatttaattattttaaattatccaagccatcaaggagttacatttttgcctttggtgattttcattattgcgagtttgctattctgttcttgtggtttagatactttggcctttagtttgtttattctatgcaagtattctggacttctagtagttaccatagatattttatctgtattttttgtgattcagatatgaatgttgaatttggtggttaatgttcattttatgtcaacactttatttttgtatcctctagtgtttgcagaatagataacgtatgcactgataaatgtaaaatttgttttcacggcaattaattacaaattattatgtttggtaaatttattgatttttacaataattactttaataatatcagtttttttattggttaaaatctcccacttttactcgcaacacttatttactgaatataagttttgtagtttatggagggtgatattgcgaggattgattgttcttttatcaaaatgaaaaacaaggagaaatgcttatatttatggtttctattaacagttttattcccttttcttattatttactactttctatccagtatccatagggtgataggttggttttgttaatc

SEQ ID NO: 135001 - DNA, 250 bp, Glycine max
  Clone ID: PAT_MRT3847_92915C.1
gaccgggctgaagtttacttccatctttcaggaagaaacttatattatcgggcctcaatcagctaacgaaattgctttttctatacatatccactgcccataatgaatatgaatactctaaaaaaagaaaataggggggcgagagtggcataactaaaacagaaggtaaaacaggccccacagaggattccttgcctctacagttagcagaatgttaacacaaagttatgcttgctttaaccaaaaaaga

SEQ ID NO: 135002 - DNA, 695 bp, Glycine max
  Clone ID: PAT_MRT3847_92916C.1
cctcacgcgtccgagttcttgaggctgttccttctagatctacatgcattgccaatatcaaattgtctaacatcacacacaaaaaaagaggatagtaagagtatgaatattgaataataccaaactagcgttgttcattttataattcatacacttaatcacttactattccaacgcttgtgctgggcgcgcaacatgtttctctcaaacaagcatgttgatgttacctttcttctgttcctatttatgtttgaaattggatcatcttcagcagcacccgtttacaacgctaattactgcccaaacaacacatcgtacaattccaacgtaacattccaaaccaatctcagagtcctcctcgcatctctcgtctccaacgtgtcccaatctgacggttcctataactccgccatgggaatggggaccacaagcgtcgccagcggccaattcctctgccgcggcgacgtctcccccgccacgtgtcaagattgcatcgccagcgccgccacggaaataacgcgactctgccccaacaaaacagagtccataatatggtacgatgagtgcacgctccgtttcaccaaccgctacttcgcccccaccagcatcgacccgggagcgaggttgtcggacgacaacaacatctctgcctccgacttggacagtttcaaccagacattgttcggtttgttgaa

SEQ ID NO: 135003 - DNA, 422 bp, Glycine max
  Clone ID: PAT_MRT3847_92917C.1
tttctcctcaaggaaccacgaaactaattcacttttcctattttcgattggcttaatggaattcccttgtttaggatgctattcaaatgttccgttatccctttctctgcttgtattgaaattgggtttaactatgccctcatttttcttaatcagattgaaacttattgtgaagaatgaacgtggattttggttttgtgcttgtgatgtgaatcattttccttcaccctcgagtcacttgtacttggatatgtgcttttacctctctatattctggctttgtcgatatatgttaacatatggtttggacagtgttacgtgctttaccaaacatgacctctgttcacgaccttactgataatgaagatgatggacagcagtattcagaatcaccaatgcagccgccatctggaaatggaata

SEQ ID NO: 135004 - DNA, 157 bp, Glycine max
  Clone ID: PAT_MRT3847_92918C.1
cttcaacatgtaccttggttgaagatgatagcgggacgaatactacgagcagggttgataccagtgccggtgatagggatggtgctgttatcatctttaacaaggaccttggttgggatgatcactggatcttatgggtgggaccttttattggtgc

SEQ ID NO: 135005 - DNA, 260 bp, Glycine max
  Clone ID: PAT_MRT3847_92919C.1
caaataaaatgtggacatataattaaccggagcagcgcatcgcatcacagtcctgaaactagctgtgctaaacaataaagtagatcaagggtgccgacaaactctacacgttaaaacacagctaaatttaagcaattctgccaccgactattaagaacccagtactgggaacatcaggcgcgagatgacggcgaagacttcaaactcttgtcgaaagacatgctacctatgagcgaagacactagagtacagaaatgaaa

SEQ ID NO: 135006 - DNA, 286 bp, Glycine max
  Clone ID: PAT_MRT3847_9291C.1
cccacgcgtccgaccacgcgtccgaaatataaaaaaaagagacaaagaccgtcgggagggaatttgattcagcgtagcagggcaacaaccataagcaacacaacaatatccatttaacagattctgattcgacaacgtcagacaaaggaaggggttaaggtgtgacggggggtcctttttaaagagaaaaattttcttttctcaccttagaaccctaatatcttttttttgggggcgccaaaatcaacactccgggcgctgctttcaaatccgccagatgggaaaa

SEQ ID NO: 135007 - DNA, 245 bp, Glycine max
  Clone ID: PAT_MRT3847_92920C.1
aaacactgccatcacggctattgcgaccatctaaacattcttcctttcaccttcgacacttgccaacagatctttagtttttaacacagatcctacaagttccacacatccttgatatccgaccacaccactacaaaacttttcacactcaaagcatgtttaatatacatctacactaccgtccatgttttactaaactaaaagtcaatcttgcataatcacctcatgtcttcattatataaccc

SEQ ID NO: 135008 - DNA, 441 bp, Glycine max
  Clone ID: PAT_MRT3847_92921C.1
gttgtaaaagctcttgcaaatgatcttgatatacgcttgaacccaggtttgcctgtataatttattgcacgacttagctacatgatttgatgcataatcatttttcataatttattgtggaattaattattatcatttttcgtcacttttatcaacaagaacgcataccaattttttctgttacctcctcctctcataggggtagttaggcagtcaggttttgatccttttatgaaaccttaccatgtagggtgaccaaaatatccgatggttacaacatggtaatggtcacagttgaggatggcagaaactttgttgctgatgctgttattgtaactgtccctattggaatccttaaggccaatttaattgaattttcaccaaaactgcctcattggaaggctgaagcaattaaagatattggtatgggaaatgaaaata

SEQ ID NO: 135009 - DNA, 654 bp, Glycine max
  unsure (1)..(654): unsure at all n locations
  Clone ID: PAT_MRT3847_92922C.1
caaaacgcacagttttagtcttcaccatttttcgctgggctaaaatcctaaaaccctaaacccatatatcgccgaaagaacagagtagcactatcagagcaccctgccatggagaacactagcaacgacgctggcgtcgaagccctacggctgctgaaagcgacggaaccgccttcatttctcactccgaacccagcgctgtcggaagctgctcgtaccgcatcgcaatacttgttctcttccctaaaaccgttttccccaaaatcgccactggaccaactccttgtggacggtttcgacgcagaacagatatggcagcaaatagacctccaaacgcagcctctgttatccaccattcgccgccgcgtgaaacagctggtcgaaaatcccgaagagatttcccagctgaaggttccttcggagggtgggaacaagaaggaggagaagagtcaagacgagtgggaagaagagagtgacggttttgacgaggaattggatgaggaagaggaagaagatgaggatgatgaagtaaaggagggagaaggagaagaagaagaagaagagacggaggatgaagaggaagagggggaggataatgaagaaggtggtgtcattgangataaatgctttaaatagatgaattgacaaagtgct

SEQ ID NO: 135010 - DNA, 275 bp, Glycine max
  Clone ID: PAT_MRT3847_92923C.1
gaacggcttgggggaagtgctgccatctattctggatatgatgagtgtctgctatgcaacacgaccattggatgtggctagctgactagcattttgacggctgtacaattgtggccagaacaaggcactccgcaggacctatcgccttctgggaacatacgcttgctgggtagactcactcaaacaaacctcactgtatgatctctagctccatcacaggagcgctgtctctatatctgccattgctcttgacaggtcacggcgctagatgcctg

SEQ ID NO: 135011 - DNA, 271 bp, Glycine max
  Clone ID: PAT_MRT3847_92924C.1
ccctatcggtctctcccccgtttttagccttggaccgaatttacccccccattggggctgcttttccaaacaacccgacttgccgacagctccttttggtgcgaccgggtccgggcaccacggggctcttacccttttttgcccccccttccaggggactttggcccggtcccccacttaggacccttttccagacttcaattcggaccccctgggccaccgattttcatggtgggcttttcccggttcgctcgccggtacttagggaatc

SEQ ID NO: 135012 - DNA, 1401 bp, Glycine max
  Clone ID: PAT_MRT3847_92925C.1
cccgcggtcgacccacgcgtccgagtgattggggcatggaaatgatggttgcaaagtgggcctctctctctccaccttctttccctgcaccgataatctcggctctttcatttctctctctacactttctttcgctatctgactcactcactcctttggctttcactcccacatgccacaacctcctgattcctcttaattccagaggggagagttaatgtgccccagattcttttggtggacaatggcttcttgattttcattgctggagaaatgagattcttggtggagaaaacttatctttagtgattggtgaaatagagtgcataacacagcaggcttaagagctttccaaaatggataggtgctggtttaataagttcaagccaaaggataaaacacagtcttcaaaaaacaaggaaactaaaggcattgcaaaagaagggtcaaagcccctaacaaatgaagaagcaccttccaatgtgaccaaacagaaggttgcagctgcaaagcagtacatagaaaaccactataagaaacagatgaaggacttggaggagagacaggaacgggaaaacaaaaatctcactggaactgctcggtatgcaagtgttaatactcatctgggagttgaacaaagcagaagagatgatctagaatctctcggatatgtgctcatgtattttttgagaggaagtctcccatggcaaggcttgagagctggcaccaaaaagcaaaaatatgacaagataagtgagaagaagatgcttactccaatagaggtcttatgcaagtcatatccattggaattcacatcatacttccactactgccgatcattgcggtttgaagataagcctgattattcttatcttaagagactctttcgggacctatttatccgagaaggttagcttcatatatatatatatatatatatgtttcttaatgagtaatgaaattctattaggctttgaaaatcttgcttttacaggttatcagtttgattatgtatttgattggactatgctgaagtatcctcaaattggatccagttctagagcccgaccaagtgggaaaccagtcataaacccaggacaatcaggggagagaatagaacggccttcaggtgcagttgaggcatttgcaaggaggaatggctctggactgttctacatagtgagctttctacataagtcttcagatgtgccatcttgcaagctaattctgtctatggaaaggagaatcatctgcaaaaatgcttttggatgttttgcacccttctatgcgtattttatacccgtctattttgttccaatgtacatttcaagtaatggaaatgtcaatcgttggctccgattatggataaaaaaaaaataatagggcgaacttcttctaaat

SEQ ID NO: 135013 - DNA, 153 bp, Glycine max
  unsure (1)..(153): unsure at all n locations
  Clone ID: PAT_MRT3847_92926C.1
tatatatttgaatgtctagtacaagcttaagaaatctcccaagagaggtatataagttgaaatctgtgaaaattctgatcctatctggttgttcaaaaattgatctgttggaagaagatatagtgcagatggaatccttgacaacnctaattg

SEQ ID NO: 135014 - DNA, 345 bp, Glycine max
  Clone ID: PAT_MRT3847_92927C.1
ggaggcaaaaaagttaaattcttttttaaaatatccatcggggatcccaaaatcccctacacaattggtcaaaacgggggcccaataatttattttgaaaaaatgtgacaagaaaaaacaaaaacctttatgggtccttgggattatttaaggggacaaatttttttcccacgagggttttttcaaagttcaaaaaaaaaaaatcaatggggggttttttgagcttcctttcaaagcccaaggagaaaagaacctctattttgctttttaatcgcacaggagaatatttttccatagctaacccggaaaaaattaaaaaaaccgtattttttttttgaacgcttt

SEQ ID NO: 135015 - DNA, 208 bp, Glycine max
  Clone ID: PAT_MRT3847_92928C.1
tgtgcggcgctcgaggcggccgggttcgaagttatgacttcatgaacaattttgtttagcctttttcttgtatttaacattttatttattggtgaggatgaggtacagggaagaaactgatatgtagcagctgcaaattaatgcagaagaacaatgaagagagatagagaggaagaagggggaagaaaatataaaacttattttgatt

SEQ ID NO: 135016 - DNA, 437 bp, Glycine max
  unsure (1)..(437): unsure at all n locations
  Clone ID: PAT_MRT3847_92929C.1
cacacatacacccacacttccgcctatacttatacccatacctaaaaaacctaaagctaaggttaattcatcatgcccacattcctctcttcttactccttaaccttctaaactaaccttatatcctttaccaacaaatatctttcaaatcatctttcacaatcaatatctttcaaccttnacacctaattttcctcaaatcaaccaatcttatactacatataactcttctatattaccaccttccacttattatcaaaacattcatctttctacctcaataacctatatttcaaacatcataatctcaattnaaacacattaaccaacatatccatatctactttcantctttcaaccccactcacatcattcattccatccatcatttcttaatcaaaatnctcctntanctaacctcantataaaacattttc

SEQ ID NO: 135017 - DNA, 363 bp, Glycine max
  Clone ID: PAT_MRT3847_9292C.1
gggaaaaaaagatggggattttaaaaaccatttggaacaacctttttcaaaataagggcgggaacaaaactcctttgactttaaaggtcatttcatttaaattcaagacataatagggaaaagcaaactagttttcccaatggggaaggggggcactttattttccattggggtaagggggccttgatctgccccctacctgttttaaaaacttaaaaggggccaggggttttgcaccccattgttaaaccaactttgggtccttggttttgggattttttttaaaccctgccaactgttccttattggacccgggggcggacccgggggcggacccctgggcggacccctgggcggaccccg

SEQ ID NO: 135018 - DNA, 1090 bp, Glycine max
  Clone ID: PAT_MRT3847_92930C.1
cggccgctcgagccggccgggcgggaatatacaccaaaaaccccctccaactcctctcattctttttttctttctcttaaattaactacaaaaccaacaaccctcctccaacttcactcatattttttctttctcttaaacttttttaaggaaaaaaaaaatctaaatccttttaaaaccctattaatactaaacatcatataacattcattgttcatcaagaactatctttgtggtcgtgtttgttcaataatgctacaaaattcctccatgtcttccctcctcctccaccggatcaacggtggcggtggtgcaaccacggccaccaactgtcacgacaccgtctttatgacggtgccggatggcgtagcgcgctaccacacccacgcggtagcgccgaaccagtgctgctcctcggtagcgcaggagatcggggcctcggtcgccaccgtgtggtcagtgttgcgccgcttcgacaacccgcaggcctacaagcacttcgtgaagagctgccatgtcatcggcggggacggcgacgtcggcacgctccgggaggttcacgtcatctccggcctgcccgctgccaggagcaccgagcgcctcgagatcctcgacgacgagcgccacgtcatcagcttcagcgtcgtgggcggggaccaccgcctcgccaactaccgctccgtcaccaccctccaccccaccgcttcctccgcctccggaggatgctccggcacggtggtcgtggagtcctacgtggtggacgtgcctcccgggaacacgcgcgaagacacgcgcgtgttcgtcgacactatcgtgaagtgcaaccttcagtcgctcgcgcaaaccgcagagaacttaacgctgcgaaagaacaacaacaacgattacaagtgctgttcttaattttcctcttctttttactattttttgatttacagtgttattatatcgatatatatatatgtgtgtggggggggaggggggtgattgttataattaagtgttgtagatatcgatataatacaatcttaattttacagtgtctattatggataattactggattgttgattgtattagttggttttgt

SEQ ID NO: 135019 - DNA, 178 bp, Glycine max
  Clone ID: PAT_MRT3847_92931C.1
agattatctgcaaaacgaactacaagatgtcggatggccacaaacgacgaccttgatagcagagcctttatctaatttatataatagccttgtcctgaatacaactacactagcaggcacaaatttttatttatgatgattaatgcgcgattgatgactagtctaataatatattctg

SEQ ID NO: 135020 - DNA, 175 bp, Glycine max
  Clone ID: PAT_MRT3847_92932C.1
gcggagtcgaggatattctagtatttgatgtttagtggttactaactacatggatgagcgtagactgttcataaggggggtgcaaaaggagcacagtcttaacgcctaccatgcccaccacgttatctttagttcttgtttaagagtctatggttgctatgtgcacttgaaagga

SEQ ID NO: 135021 - DNA, 147 bp, Glycine max
  Clone ID: PAT_MRT3847_92933C.1
gaagaaccggcgtatcacatctgagaagaagcgtcgcctccgcgcgtatcaagtgaaggctcgggagaacaactttgaggttgaaaacaagcttgcacctgagaggaaggtgaaccttgcccaacaacttgggttgcaacctaccac

SEQ ID NO: 135022 - DNA, 404 bp, Glycine max
  Clone ID: PAT_MRT3847_92934C.1
cagtttcatttccaaatagcattccttcagcaggagagagaatctataagctttttgctcatagcctcacaagcacattgcttcatctttttcccactgttagttggtttgtattgatttctgggtcagtgtagctttttttttttttttccttttagcacgagtttggtcaagtttccagtgaatttgttaggtgtgtggggggtatagagattatcgagctgccatggatctggacagtgctgctgcttttgagggctacttggtcctcgtgaagatcaaagctgctgaagatatggagtgcgtgaaccatcactctgacagaatgccatacatgacactcccattgtctgattcacacacacgcaagcagctggttgaatctttgcatgtgagggggattc

SEQ ID NO: 135023 - DNA, 269 bp, Glycine max
  unsure (1)..(269): unsure at all n locations
  Clone ID: PAT_MRT3847_92935C.1
tttnannnttttcgttttccatgaataaggngtcaaaaacggttcagggctcggttgtaattttatggnctgacttttaaatcccactggctgaacattatctagctaaatgcagcaagtaatcttcttttttttcttccatgaatggtatacttgtacattatttggtatccggtatggnctgatttttnatttatttttnacatttcccacttatttgattttaaaaaccagaccataatagctggttcccgtgaatctgatatgtc

SEQ ID NO: 135024 - DNA, 905 bp, Glycine max
  unsure (1)..(905): unsure at all n locations
  Clone ID: PAT_MRT3847_92936C.1
agaaatcatagatagacgaaaagaatggttatttagcggtctgagcgtactgggatcagtgagtataagagcgagtgattgtacacatgcctctagtggtgctagagctgcaggacctgttacacaagtgccacgcgtccggaacaatcataagattgctgagctagatgaattgtcacaccaggataaacccttacagccaaatattttggaaatgggtggtaaaacagaaaatttgtctcttcaaggaagtaaacaaagtgttagtgatggtggaacagaattaaaacaacctaagaaaggtactgtgaagttaagcactgagtttgtaaccttgaaaaccaaagaatctaccagttgtagtgcagaatgtgacacaacggctgataataacggcatgtctgtctctaccaaattggattccaaagatgtttgtttaaatagaaatgatagtgtagttagtaatgaagcggtttcttcaaattctggcacatcagatcagcagtctgctgatctcctagaagcaacttcaaaacagtgcaaggatgatagtgcagagaatgctggcagtgtttcagtgtctcttccagcatcaggtaccaaggacagaccaatttcagagtctagtaaggtgaaacctacatcaaaggggaaaaagaaacgaaaagagattcttcagaaggccgatgctgctgggtcaacatctgatctttataatgcatataagggacctgaggaaaagaaagaaactattataagttcagagaaacaganagtggttctacttctggaaataannagcggntgccaactgatactgctcagccagatgctgtagcanatgagcaatctaagcagagtanagctgaacttngatgattggggnagatgctgctgacatgtct

SEQ ID NO: 135025 - DNA, 188 bp, Glycine max
  Clone ID: PAT_MRT3847_92937C.1
gagatcgagaaagagggtgtttagagacgaacatatgaattacgtaaagaagcagctgcagcaacttttcttgtgcaatacccgtcagatgcaaatgcaaagacactcagcattataattactactgagtatatgttcctttcatccttctgtgtcctgaccatgccagtcggactccttcaaaggga

SEQ ID NO: 135026 - DNA, 686 bp, Glycine max
  Clone ID: PAT_MRT3847_92938C.1
gctgtagttaccagtgaagatctctccgctgcagcttcagacatgttatcagctaccagtgagagcataacttctgctgttgaaacaaaaactaatgattctacacaagtttctgcatgtgcttcagctgaaggacccgttacacaagtggcggataatttgaacaatcataagaatgctgagatagatgaattgttacaacaggataaaccgttacagccagatattttggaaatggttcgtaaaacagaaaatttgtctcttcaaggaagtaaacaaagtgttagtgatggtggaacagaattaaaacaacccaagcaaggtgctgcaaagttaagcactgaggttgtaaccttgaggaccgtgcagcaagggcaagggcaggacgagtctaccagttgtagtgcataatgtgacaggacggctgatgataagggcatatctatctctaccactttggattccaaagatgtttgtttgaatagaaatgatagtgtagttagtaatgaagctgtttcttcaaattctggcacatcatatcagcaatctgctgatctcctagaaacaacttcaaaacagtgcaaggatgatagtgcacagaatgctggcagtggttcagtgtctctttcagcatcaagtaccaaggacaaaccaattttagagtctaataaggtgaaacctacatc

SEQ ID NO: 135027 - DNA, 357 bp, Glycine max
  Clone ID: PAT_MRT3847_92939C.1
tgacttttcatgcactgcttcctgagctcggaattcgagtcgaggtaaacatcacctacaatctctattttacttcatcggttgaagcaacctccaaagggggactcatagagataggagagaaaccccaacgtgcactgcccatatctgcaatgaaacttctctaaagccaatatggttaccggcattaaaatctccaattctggtaggttaatttttttctttcttctttaatatgtggaggacatcatcttcaatgaattgaagggatcttaggaatgtatataaaaatcatatgaggttaagtggtataacttgagggttttaaaagaaattcttctttcttggacgattttg

SEQ ID NO: 135028 - DNA, 659 bp, Glycine max
  Clone ID: PAT_MRT3847_9293C.1
cccacgcgtccttttcggtcaatctcagttgcaacctttgtttcctttcatggaggctttgcctgatgaaatgcatgttgctgttccctttcttcttagttttatcatgggtgatccagtgaagatggcatcagtcagtattgaaaataagcttcctcctgccaaaaaaattgaacaattgtcatacaaccttactgcattgctgccgtgtcttcctgagctggctgatattataccaagggatactcttctttggaagctgaaacttctcaaatcagctgctgcatatgctaattcgcgtattcatgctgttgaagctgaagttcttgtgcttgctaggttttactctctcgagacttgacgcctctcatgataatatttggcaaggataacatgcttcccagcacaaacgaagctcaaagactcgtgggattattgcaaaactgcaaagttcgtgtctttaaggacagtggacacacacttctcctggaagatggcattggtctgctgacaatcatcaagggaacttgcatgtaccgtcgttcaaggaggcatgatttggtcagggatttcatacctcccagtatgacagaattcagatatgcaatggatcaagtagttggatcatttcgttctgctactggatctgtatttttctc

SEQ ID NO: 135029 - DNA, 454 bp, Glycine max
  Clone ID: PAT_MRT3847_92940C.1
tctctccgctgctgcttcagacacgttatcagctaccattgagagcctaacttgtgctgttgaaatgaaaactaatgattctacacaagtttctgcttgtgcttcagctgaaggacctgttacacaagtgatggataatttgaacaatcataagattgctgagctagatgaattgtcacaccaggataaacccttacagccaaatattttggaaatgggtggtaaaacagaaaatttgtctcttcaaggaagtaaacaaagtgttagtgatggtggaacagaattaaaacaacctaagaaaggtactgtgaagttaagcactgagtttgtaaccttgaaaaccaaagaatctaccagttgtagtgcagaatgtgacacaacggctgataataacggcatgtctgtctctaccaaattggattccaaagatgtttgtttaaatagaaatgatagt

SEQ ID NO: 135030 - DNA, 379 bp, Glycine max
  unsure (1)..(379): unsure at all n locations
  Clone ID: PAT_MRT3847_92941C.1
ccatcacgcaaaaactttcagttgcatgagtgaacatttctcgacagtcaaattaagcatccatcagggccagattcaatgcgtaaggtgaacatctatttaatgtgtgacnncaccaccggggggggcatgtacaccnnnnnggattgtgcgaaccccaacacnnnaccacaacggacaactgtttgcaggaatgaacattaaccttaattcgttccttggagccggctggaacatgctgcttggctaaagacaccagctgttgaatttgctaccatgctccctgggggggcttacagaatattagaagggagtgcgtaccatccattgaaccttganntactaagtccatgtgcaattgcgaacaccnnggntcctt

SEQ ID NO: 135031 - DNA, 454 bp, Glycine max
  Clone ID: PAT_MRT3847_92942C.1
gtgaagagccgtatagagatgtgaagtgaaagaagcacacgtgtcttcccctctgaaactcaaaaacacatcatagtttatgttgtcctccttgtaccgatcacgcagaaagtccatctcgtcatcatcatggagatcgtagtcataactagaggaagaagacatggaagagatgaaaggatattattgtctaagaagaatggagcttcagacaaatgttatgcggcataaataaccattcttttcttttcggattcccatggagatcccctggatggaaattcagtcaagaaaccatggagattgttgttccaagatatgtcaataaccgacaatgttccaatgttgaagatcttatgtggaaatgttccagtcaacccgcaattattaagactaaggatggtgagatttttgtaatgggaaaatgtttcgggcactgggatgataatttgtt

SEQ ID NO: 135032 - DNA, 223 bp, Glycine max
  Clone ID: PAT_MRT3847_92943C.1
caatttaatagccataggggtgctaggaattaaagaaagagaagcaaacattgaacttgggggctttaaagaacaacgaataggcagcaactagaaggagcaacctttggaaatgccgaaatatagatctgaattgtctgaacaagatatatttggaatcccaacagggtatccagttgggggaaactactaccctcaaagctggaatttctttagagtttct

SEQ ID NO: 135033 - DNA, 340 bp, Glycine max
  Clone ID: PAT_MRT3847_92944C.1
acctccccaaaagggctattttattttgttatgacattctgtaatttcccccaaaaattgattttttagatcgattcgttgatgggtcatgctggggtgttgtcaatcgttgtaatggctaattgaagttctgtgggtgttttgttgggaaaatgcgggatcaaggtgttaatgttgggagagagaagaggaagatgagttttgcagttgttgtggagatgaagatgaggaagtgtggaaagagactgaggaacctgttgtggaaaaaggttgaaggatgagcttgatgaatttcagtgaaaatgtctttaagggttgtcaatggcagggtcgaaaattt

SEQ ID NO: 135034 - DNA, 1165 bp, Glycine max
  Clone ID: PAT_MRT3847_92945C.1
cctcactagctcaattcctcgccaagtttttattgttccgacgtggcaatcggactgctgccgcctccgattcaacgcgcagtcgccggtgatttccgtcgctgattctccgacaccgttttggccatatattgaaatagttttctggtgcgccgatgaaccgacctgatgttattgacagtagaagggggaggattcttctcttcttcagcatcagggtatactaagggtctggcccttctcctcttgggtcagatctgtgacgataaatccatgagagttttgccgtggaaccagttccatttgggccaagaatctgaccacgagctccagctggcttccagaaagaaccgtgtctccagcgggtgtgcttactttgtatgctttggtcgtgtctctgcagggtttgacactacatctcatcttaaagtgggccctgccaaacatcatgatgtctcttcagggacactggtttccaacaagggcaagtacccttctgctaatgtaaatgatgatagtagaaaggttgcacttaaaagttgcttaaaaaggaaacaaaacaaaaaaccagctcctgttgaggctgctactgaacatgaggcatcatccggtggaaagaggaaagtgcagtggacagatacttgtggtagtgagcttgttgaaatacgggaatttgagcccagcgacgcggatgggtcagttgatgaattcgaccatgggaatcacaaaacttgttcctgtgctattatgtaaattggcattccaaaagatgacagagtcacagacccatttatgaggtatcaagtcgttgattgctaacatattccaccactcagcttgaggaaaaggagcagatatttttcagtctagtggagatttatacacctcttttgcctgagcaatcatttgtgtctataaatgcttgctgtggccttcaattttgttcctctgctttcatcaatttttgtataatctttgtcgtgtgaattctttggcttttaattcaagattttctaggttcttatatatatatatatatatatatagtttaaacgtagttctagttttatgctctcgcgttatctagaagaaagaaatacagatgtaatattttgtaaagaatcagtgctgtctttggcggggaatgaacttatgcttttatttt

SEQ ID NO: 135035 - DNA, 428 bp, Glycine max
  Clone ID: PAT_MRT3847_92946C.1
ctagccctggtgcgagctgctctctagcatttacttgggacaggcccggaaccatttgtagctgctttggctctcgtgccgattgtccaccctattcccttgccccgatcacactttccgggtgttgttgctgttagtgtagctgatgagtccgctggatgccggggggctgaacttggtcttgttgttctatgtttgggcctggctgttgcgcggggcattttttgcagggcggtgctttttggtgcctggtttttgggtgttggggaacctggtgctgctcagtatgtttactgggctgcgggcttggctcggcttgtcttccggctgtttctgtctgtcgttgtccttcgtgcttggggtcgtcgctctccgcaggggacacccctgcccctgggtgtgttggggtcggcctggttgctgtgctc

SEQ ID NO: 135036 - DNA, 313 bp, Glycine max
  Clone ID: PAT_MRT3847_92947C.1
ttttcattaaggttccgacttcatttcatagtaaataaaaagaggatgacgggggatttccctgggggcggatctattggaggatcgttacctttttcaaagtttttccatcccaaaaaacggcccttgtttcttaaattttttggaaccaattgtcaccaaatcccaaatggggattgcctcaaatcaagaaaattcaaattggacccttgggggatggaaacaaccttttgccagcccagggtttgggaccccaagttcttctaagaagggttggttcaaaggatttaacccattgcccccccggtttggg

SEQ ID NO: 135037 - DNA, 355 bp, Glycine max
  Clone ID: PAT_MRT3847_92948C.1
cttgagcatttcctactctctaacctttttgctgattcgacgacaacaccaacagcggacctattgacggctgctgctacaccactgaaacctgctgtcattcacaccaaaagataggaaaatgtagttcgagatgattgcagctactggagcgcatcaatgcaaaacattaatcctaatcgacattccactcttattgaaccacccaacataatcacaacctcgaaaccattctacattgcaatacctgatcgagccattgctgatactcgaggccaggaccttaatttcatttgcgtcaaacaccagcacgacatcgactatgactggaacatgcttctcccttgatccacct

SEQ ID NO: 135038 - DNA, 280 bp, Glycine max
  unsure (1)..(280): unsure at all n locations
  Clone ID: PAT_MRT3847_92949C.1
ggttttgnttctcgttaagccatcntagggnnggaggggctntccgggtcaaacaagtgnaacanagcgagatctgagtcgtaattcggagtccttttgaaaaaagaggcttttttgctgaattcacttggttcccatttggnttacttgattttntgaggttgcttggagttggagtcatggcagtgaggtgtgggattgagatggttcaaggaccatggagatggtatggaggaaaacccgttttaaatgagaagganatggcagctggaananngtt

SEQ ID NO: 135039 - DNA, 479 bp, Glycine max
  Clone ID: PAT_MRT3847_9294C.1
gtactctgccgaaccgtgatcacaggttgccgcaccggaaattccggaaacaaaagcggtcgttacttgatttcaagaatctttcaatgacttcctacttcttggtgtacgatttcttaagggaaagaaaatcactctctgtgctggccacagacttcgtgaatcattttctgtaccactcttagttcatttgctgaacactctcctatttgatataggacttcgtgtacagatttaaactttttctgtatctttctcagttttctgcttaatttcaagttcaagctggtgaaaacttggattagtgctcccactctcctatctggtataggatttggtggggagacttttcgatagaagtccttaatttcactctttttttctaactgatccgcattgccgtccaaagtggtcgttattgaaaaacacttgggcgttggtgcaaatgtttgcttaattaatttactcttgggacaaca

SEQ ID NO: 135040 - DNA, 160 bp, Glycine max
  Clone ID: PAT_MRT3847_92950C.1
ggaggggaaaattaatgcatatatgaccattagaagaaaaaaatcctaatgaatatggtcggtgtcggagagccagtgttattttcaggtcaaaaagcatactaagagagccggtagattttttactatacttagtgcgttgccctcctccaaagtgaag

SEQ ID NO: 135041 - DNA, 1300 bp, Glycine max
  Clone ID: PAT_MRT3847_92951C.1
ggatgaaagaaatataaatagaagcagcagcgggatttggtaaagctagaaattgcaatgaagaagaggagcagcagcagcagcagcagttcagtttttgaggcgaatggagtggaggaacctcaacaaccttcatcctgtgcagcagcagcacttgatgagttgcataaagagaaaaatgagaatggagaagaaaccctcgtgccttccaatccctatcccaatcttgacgatggcttctatgaaatcgaaaccatacgccgtaagaggctacgcaagggtcagctccagtacctaatcaaatggcgtggatggcctgagactgccaacacttgggaacctcttgaaaatctacagtccgttcctgatctcgttgatgcttttgaggacagcctcaagtctggaaaacatcagaagcgcaagcgcaagcatgtggatgtgcttcaactcaccctactcaagaagcgctccgaacgttctaccacttcttacagccttagacatttcccacctctaactcccactaatgcaaatgattatgatccaaagctcagtgaacttaaggcaccaacacacactggggttcagctagataaccttgcaatacatttccaacaaccaattccaagcagaggagcaaaaaggagaaaatctgcttcttctgtcaagaggttcaagagagacaccgatgcagctgcacttcaaccaatttctgctcctatcaacatgcctgatgctaatactgcctgcaatattgtcaagattatcaagccaataggctattcagcttctttatctgacaacatgcacgatgttttagtcacctttatggctatgaggtctgatggaacagaagtgatggtggacaacagatatctcaaggcatacaatcctcttctgctgatcaatttctatgagatgcatctccggtatactcctacaccgtgactgaacagggtaatgaaggggcttcctgtgtttgctgttggtgataacaatgtagttttgtagacgcagcggatcgtgaagggtaatacttttttggttagtgtatgacgatataaccattagaccaattgtttcaaatgcctgcctgcatgacttcatactaagacaaccaagaattagagccatgaacatgactaggaaattgtatttcaaatctttgcaaacctctttaatctaattattctacatcccgttctatcctctcattattatcgactaacatgtacaagagagagacacaaatattattatggcgagatttttcattatttgtgttggatttaccgtgtat

SEQ ID NO: 135042 - DNA, 520 bp, Glycine max
  Clone ID: PAT_MRT3847_92952C.1
attctcattgacatgcccttcttcgacccctctatctctaccaatcgccgggactgagaatggatcacaaggccgaaaaaaacgacaccgactttaaggacccacgagaccgtcgtcaccccctgcaccaccgccacggacgactcgagtaccgaaccttctagattcttctgacgcaaccacccgcgccacaggatcgggaggagcgcagctgtccctccccctcgaccacgaatctcaggcggtgcagaaggcgcgcgaggaacaccaacggatccgtgcagtctgctcctgctgttgtcgagcgcgctctcttctctgcaacacccgcgctgctgtgcattctcgcttttaaatcgagcttctttacttttcttctctcgtgtggttgtagctatacgagtacgacgggacgagagtgcgtagaatttgataatgcatcgggtgaatgtcgtgtatatcttcaagggcgtgaattcgccagaatatgattgcttggaggtaccatgagaactaacta

SEQ ID NO: 135043 - DNA, 353 bp, Glycine max
  Clone ID: PAT_MRT3847_92953C.1
gggttatgtatatattttaaattcccagaacctttaatttccaagaatttttttaaaaactaccaatttcttagggaatagccctagaatttaataaaccctgccaccttttttttatttatatatatatttatttttttttatatatttaccaattaagggaactccaaatgggacctggttttttgggtgggaacttcatgaaggttggtttcaattttgagaaaaaccttggacccctatggtgaaaggtttgggggttttttccagccacttttgggatttacaaaaatcatttcaaatggggctcttgggacactgtgcgaatcaacatcgagccgaataggctcgag

SEQ ID NO: 135044 - DNA, 1288 bp, Glycine max
  Clone ID: PAT_MRT3847_92954C.1
ggccctcgaggccaagaattcaagcgttccgcggcgggctgcggtcttccatccgcgtggcgcgtgccgtgaaggaggccgtggatcgcaacgagacggacgtgcggtggttcgtgttcggcgacgacgacactgtgttcttcgtcgacaacgtggtgagggcgctcgcgaggtacgatcatagcaagtggttctacgtcgggagcaactccgagagctacgagcagaacgtgaagtactcgttcgagatggcgtttggaggtggtggcttcgcgatcagctactcgcttgctagggttttggcgagggttttggactcgtgtttgaggaggtatggccatttgtatggaagcgattcgaggatttattcttgcattgctgagcttggtgttgcgttaactcacgaacctggatttcatcagttagatatgcgggggaacttgttcgggatgctggctgctcatccattatctccgttattgtcacttcatcacttggaatcagtggagccccttttcccggacatgaacagagtacaagctttggaacatcttattgcagctgcatatgtagatcctgccaggatcctgcagcaaactgtctgctatgatcgatcaaattctttgaccttctcggtttcttggggttttgctatccaggtttatcaaggaaatgaacttctacctgacctcctttcactgcagagaacttttgtgccatggaagaggggtagtaaagttaatgccaattttatgtttaacaccagagactatcctagagatccttgtaaaaggccttctatatttttctttaaaagtgttgcatctgataaaaggggcatttggagcaattacagtggacatgttgttgggaactgctttgaatctacactgctcaagcagatcatagttttttcaaagaagctggagcttaataatgaacagatgattgctccccgccgtcagtgctgcaatgtattgctgacctctaatgatacagtcagtcttcatattagacagtgtgaacttgatgaactgatctccatgcaaccctagcattcatttagggagtggcctcctttaaaagcttcttcgaaattttcaagagcatgaatgtccgtgtggtagctgatgtgaggtggatgcttcttctttaagtagagaaagatccttgtcctttttgttgaagaaaaataatcagaagataactcttaagatcttgctggtaatcaaacccctctcaggtaggtttttcgtttgctggaaaagtgctccacccctcacaatct

SEQ ID NO: 135045 - DNA, 349 bp, Glycine max
  Clone ID: PAT_MRT3847_92955C.1
cttccatctccaattccaattctcgtgaactccattcattcattttcttttcttttgtcttctgcacatccatcatcttcacaaattccattcaaacaacataggaattaattgatttgggtgatgagcgcgcgaaaaagaagaagaagatgatggcagggaagaataaaggggtggcgccggaagacgccataagggccattggcttgggttacgatctcaccaacgatctgaagctcaaatcctgcaagaaccactccagattgatcgctattgacgatgacaaccttcgaactgtcgaactccctgctcggatttccatccctaatgtccccaaatgcatcaagtg

SEQ ID NO: 135046 - DNA, 2308 bp, Glycine max
  Clone ID: PAT_MRT3847_92956C.1
cccacgcgtccgcccacgcgtccgcccacgcgtccgcccacgcgtccggtagatgtgtgcggaaaatcgaggaatcaaaattagggttcgaaatagcattgaggagaaagaagaagaaggatgtggcacgaggcgaggaggtcggagaagaaggtccacgacatgatggacgcggctcggaagagagcgcaacgacgcgccgtttacctagccaagaggcgcggcgatcctcagcaatctattcagctcgtcggctttcgaagccgaacctatcgcgacgacgctctctaccaagccacgcaggatcagcagggcctgataccttggaatgggaaacaagatgtattgattgacagatttgatgggcgtgctctccttgatttcattcgcgattctagccacaggcgcgtcccggaaaagtctgaagaagaagaagagttagaagagtttgttaattttgagcgttatcgggatttaataaagcatcgccgtagaggatgtcgtttctgatgaggaggctttgcaacatgtaaatcaagagatggaggccaaggctgctgctccatttacatcagacagatctaatttgtcgcagcctgctgcaagcaaaggatcttactcgcaggttgggttttcttatgatgggaatggaaaagaagaaacccatatttcagatgatgacgataatgataacgaggaagaagaagatgatgaggatgatgaggattttaacagtgatgatagcaatgatgaaggaatggaaataattgcaaaagaatatggagttaaaaggtatggttggcttgtttacatggataagaaggctaaggaggaagaaaaaaggcaaaaagagttgatcaaaggtgatcctgcaattaggaagctgagtcgtaaggaaagaaggaaggcttctcagattgaaagggagagagagagagaagccacacggatatctggaactcgtgtgctgcatcatgatccctaccgggaaacaaggcaaagtcctacatatgaagcctattctcgatctagaaggtcaaggtctccgttgcggtcatactctccgtcgcattcaaggcgttattcgcgtagtggtcattctgatgatattcaccgaagcaaaccaaggactcctaaaatagaatacattactgaatttgggggctctggagcagcagatgaacgcaggcctgaaggattttctccaccacgatctcctacatctcaagttgatttgttaaaccggtcggagcactggacctttaattcttgccaagatagattggactgtcttttctctgggcaacatatctcccattttgttgcctgaggcaattttttgtggtttagaatagatcaggactaggtttgtcggggtaactgccaagaggaggagggagaagggagaaggcttcctatttgaagctcattgttccctgaaatgaattttgcataactaactacctacctgcgagttgcatagaaatttcacaattattttttctgatacctctactgttttgcaggccaacatctggttgcatacttgaggcgttgcatgttgatcctgcttctggtgtatcaattgataaggataagggcactaaagtcttgaaaccgtcagtaagtggttcttcttcagcattagcaaaattaaaggctggtggttctggagggcccttaaaacaaggggagaagaaagaaactcctcaagaaagacttaaaagaatcatgaacaagcaactaaacaaacaaattaagaaagatactgctgcagaacttgccaagaaaagggaacaggagcggcagaggcaggaaaagcttgcagaaactagtagattgagtcggtatagatgccgcagccgcagccgcagcaggagtttcagcggttcccctccaagaagataccggcgcagtagaagtccaagtagaagcagaagttccagaagatattattctagttctcattcacggtccccttctcgcacacgttctccgtctccttattctcgatctcccaggataagaaatcgatcaaagcactgatggaatgctatatacgagtagaaggctgacgaagtttgtgtggcatttatttataatatgaaatggatattaatatatggctttcatttctgccaaatagttcgagggaaatcggtcttggttgagttgtgttgaagttgcgatatgcaatctacctgaacatgtcattttagtatttgccaacgtatatttaacattaattaatgaattatgagtaatttgatgtcaaacaaaaaaaaaaaaaaaaaaaaaaaaaaaaaaa

SEQ ID NO: 135047 - DNA, 444 bp, Glycine max
  Clone ID: PAT_MRT3847_92957C.1
aaaaaacattcctaacacagaaaaactaattacatattactcgttccagcacacatagtctccgggaggggacgaatagaattgataatgataatttgcataacttcaaataatataactagtctgcatacaaacactcgattctataatccaaatccattccataacggtcaattactatctactaacaatatataatacttatagaatgattttatgtcactaacgacatcttaaaattttttaattcaaatatatctactataatatttagcttatataaatcgcaattggtacaatacccataacgtaagccgaaacattatattaaggatacatatgtattcgccactaaaagtatatttatccaaataattaacttaatttccatatatatctcttgcatctaatatctaataatatatatttcgacctatatagata

SEQ ID NO: 135048 - DNA, 358 bp, Glycine max
  Clone ID: PAT_MRT3847_92958C.1
ctcgagccgaatcggctcgaggggaaacaaggcaaagtcctacatatgaagcctattctcgatctagaaggaaaatttattatgtgtttttgtcattttctttatccaggtcaaggtctccgttgcggtcatactctccgtcgcattcaaggcgttattcgcgtagtggtcattctgatgatattcaccgaagcaaaccaaggactcctaaaatagaatacattactgaatttgggggctctggagcagcagatgaacgcaagcctgaaggattttcttcaccacgatctcctacatctcaagttgatttggtaaaccgggtcgagcactggaccctttaaattttgccaagatagat

SEQ ID NO: 135049 - DNA, 1362 bp, Glycine max
  Clone ID: PAT_MRT3847_92959C.1
gcacgaggttggcttgtttacatggataagaaggctaaggaggaagaaaaaaggcaaaaagagttgatcaaaggtgatcctgcaattgaagctgagtcgtaaggaaagaaggaaggcttctcagattgaaagggagagagagagagaagccacacggatatctggaactcgtgtgctgcatcatgacccctaccgggaaacaaggcaaagtcctacatatgaagcctattctcgatctagaaggtcaaggtctagatcgcggtcatactctccgtcgcactcaaggcgttattcatgcagtggtcattctgatgatattcaccgaagcaaaccaagggctcctaaaatagagtacattactgaatttgggggctctggagcagcagcagatgaacccaggcctgaaggattttctccaccacgatctcctacatctcaagttgatttgttaaaccggtcggagcactggacctttaattcttgccaagatagattggacagtcatttctctgggcagcatatctcccatattgttgcctgaggcaattttttgtgctttagaatagatcaggactaggtttgtcggggtaactgccaagaaaggagggagaaggcttcctatttgaagctcattgttccctgaaaagaattttgcatgactaactaactacctgcgagttgcatggaaattttacaattattttatctgatgcctctactgttttgcaggccaacatctagttgcatacttgaggcattgcatgttgatcctgcttctggtgtgtcaattgataaggataagggcactaaagtcttgaaaccatcagtaaggtatgacatcatccaacagtgtatatgtgaatggacatttttgtaattatatgtggtttttgtagtaccatctgctttattaagcatcaaatttgtatcaaggtttgtttcatctttgtctaacagttagaaatactgtcagctggtcatggacaccataaaaacattcctttatattcttaatttcattcagcttttttttttttgttttttagaatatttcacttttttttaaaaaaaataatctgaattatctaatatttatttgttttttaatctttgttgctcttttttccagtggttcttcagcattagcaaaattaaagactggtggttctggagggcccttaaaacaacaaggggagaagaaagaaactcctcaagaaagacttaaaagaatcatgaacaagcaactaaacaaacaaagtatggctgtttgagtaatttattttaataacagatcaacgaaatcttctatctgcattctactaattcttttcaggagtgagtctagcagtacttctgaatttt

SEQ ID NO: 135050 - DNA, 443 bp, Glycine max
  Clone ID: PAT_MRT3847_9295C.1
cccactcgtccgtgataaaccgcgatcataggttgccgcaccttaaaaccggaaacaaaagctatcgttacttgattccaagaatctctcaatttctttctactttttttgtgtacgatttcttatgggaaagaaattcactctctgtgctggccacagactgcgtgaatcattttcttttccattcttagtttattcgctgaacactctcctatttgatattaggacttcgtgtcagatctaaacttcttctgtttctttttcagatctctgcttaattacacgttcaagctggtgaaatcttggattagtgctcccactctcctatctgggataggactttgagggtagactttgctatatctctcctttctttcactctcttcttatcactgatccgatttgccgtcaaagtgggcttattggaaaacacttgggcgttt

SEQ ID NO: 135051 - DNA, 575 bp, Glycine max
  Clone ID: PAT_MRT3847_92960C.1
ggagaaagaagaagaaggatgtggcacgaggcgaggaggtcggagaagaaggtccacgacatgatggacgcggctcggaagagagcgcaacgacgcgccgtttacctagccaagaggcgcggcgatcctcagcaatctattcagctcgtcggctttcgaagccgaacctatcgcgacgacgctctctaccaagccacgcaggatcagcagggcctgataccttggaatgggaaacaagatgtattgattgacagatttgatgggcgtgctctccttgatttcattcgcgattctagccacaggcgcgtcccggaaaagtctgaagaagaagaagagttagaagagtttgttaattttgagcgttatcgggatttaataaagcatcgccgtagaggatgtcggtacttttttatttctcgacaatgtgtttaataaccattatgtttttgtcattggtggtttttttgtatcttttcgttggtggtcattcatgataaaaggataagatacagaagggtctatggttccgcggccactgatttctttgttttacttttgagttgaatttacaaact

SEQ ID NO: 135052 - DNA, 823 bp, Glycine max
  Clone ID: PAT_MRT3847_92961C.1
aggttgataaggataagggcactaaagtcttgaaaccgtcagtaagtggttcttcttcagcattagcaaaattaaaggctggtggttctggagggcccttaaaacaaggggagaagaaagaaactcctcaagaaagacttaaaagaatcatgaacaagcaactaaacaaacaaagtatggctgtttgaataatttattttaataacagatcaaagaaatcttctatctgcattctactaattattttcaggagtgattctagcagtatttgtgaattttgtatttctgtgtgtaactgtttgcctgtgcagttaagaaagatactgctgcagaacttgccaagaaaagggaacaggagcggcagaggcaggaaaagcttgcagaaactagtagattgagtcggtatagatgccgcagccgcagcaggagtttcagcggttcccctccaagaagataccggcgcagtagaagtccaagtagaagcagaagttccagaagatattattctagttctcattcacggtccccttctcgcacacgttctccgtctccttattctcgatctcccaggataagaaatcgatcaaagcactgatggaatgctatatacgagtagaaggctgacgaagtttgtgtggcatttatttataatatgaaatggatattaatatatggctttcatttctgccaaatagttcgagggaaatcggtcttggttgagttgtgttgaagttgcgatatgcaatctacctgaacatgtcattttagtatttgccaacgtatatttaacattaattaatgaattatgagtaatttgatgtcc

SEQ ID NO: 135053 - DNA, 934 bp, Glycine max
  Clone ID: PAT_MRT3847_92962C.1
tcagccactgaggttggagggaacagtaacaaggacacaactgacaacaaaaaagaagtcgagcatgagtaggataatgtaaattattgtgtactggcttgggtggctaatcatgcaacattaatcaggtgggaagatacatcctggaatttggcagggcaagagcatttaggacctctctgcccactgtatgtttttttaataggggtattgaatttttattcccaccaacttctgaagctagaaattcaatgtttgatgaggctttagctcatgcattaggtgctactgaattcttcacctgttcatatcaattgtttagcttttgcccatttaggtgctactaaattttcaccctcttcaactttaactgttcgtataaaaatacgtctccccgttccgagtgtgttggtatgtgaagatgagttccttgattgacttgttcaattgctcaaaagtaaccttgtatgatgatttttataggaagtggttgaactcaggttcaggtcacgtgggtctttagcattgcaaagctccatggttgcttataaggacttgcatttcataaagcatactgaaaagtgagaaaaggccaaaaattggtgggaaggggagggacgtttctgtaattacgagttttcggatgaacaatattcgttacattgttacatactttgaacctttgggttctgaaacttgtattgacttgttccagtatattgtacaagttcccttccaaatcaccctagttggttttagacttacattggattgctatgcattgtcattttgtgggtttacaagaggggattaatgtgctggtaagtatttctcgattttgtttatattcaattattgatacccatttggtgacttttgactgtaagaatgaataataaattcgaaagaaataaattatatattgagagccccc

SEQ ID NO: 135054 - DNA, 403 bp, Glycine max
  Clone ID: PAT_MRT3847_92963C.1
ctccgacgcaacggtgagcttagttagtgtgaagaggtccggcggtgggcatggcccccagaatccggctgtgcggcgacgttttaggccgcctgaatcagcttttcaagcgcgtctcatcggtcctctctttccctagggtttttttttccatcattactcactcggaggcgtgacatggcaccgaatccatttcatttcatttgacgtggttgttgtattgtaggtgaacaaatctgcaggtccattcgacgccctcttgtgcgtgggtcagttcttcccggactcaccggagcagctcgaggacttcacgaaatacatcgaaggtgggtcccactttcctctcccgacgtacttcgtcggcgactacggcgtcgccgcccccaaacttctcctgcaagct

SEQ ID NO: 135055 - DNA, 385 bp, Glycine max
  Clone ID: PAT_MRT3847_92964C.1
caaaattatgacagttctttcactctttttccatttcacgccttccatttccattatcgattctgtgtcaatccgcggtagacatctcttctttccaaatgtctactttaaagttcaacaacagctcatgtacctccacccccaactgataatattcatctatctctattctatcaacttgttctatcacactcttttatacaagccctacatcttatcatctctacttctattcctaacattcctcttatgtcatccctacatcattccttagctagtaatttttcttcatatcaacgcaatctcttttcaacttcttcactgaaaaaacatcttaatctttccactgcttatatctcatttatatcttactttatctccaaca

SEQ ID NO: 135056 - DNA, 300 bp, Glycine max
  unsure (1)..(300): unsure at all n locations
  Clone ID: PAT_MRT3847_92965C.1
tcgcangcacgcgtacgtaagctcggaattcggctcgagnaagagagagagagagagagagagagagagagagcgagcttcaaacagcctantgncagctctgntattgggcagaggtctntacatttgcagctcatggntatgctacctgacgagacttatgcagatctctgggctaaggtttaggtacnactcagatctctggggctaaggtntaggtacaactcaactttgcattattantttgtggctccctcctccacccangtagcatagctataattangtctaagctcataa

SEQ ID NO: 135057 - DNA, 605 bp, Glycine max
  unsure (1)..(605): unsure at all n locations
  Clone ID: PAT_MRT3847_92966C.1
cttgtttgtggtcttttacagacagctagctagctagctctcaagaataaaatcgtttttttgcaaaagactaaacaagggagaactagtctcgagttttttttttttttttttcaaggtaaaaattttattgcacaatgagaaggcananaaaattgatggttctgtttctcantacaagttttaaaatgaaaaatgaaccaacaagtgtttgtantggtagtantantantantaaccatacaaaactacaatggcatggtacatacatataataattaaattaccaattcagaatttaatggctctcacttccacttattaacaacaatatcaaccaaatccacaaccctttagaagtagccccactcattatcataccaagcaatcaccttaaccatatcatctcccataaccatagtcaacaattagtcaaacattaaagacacatcagttcacctaaaatcaacagacacaagtagctcatcacacacaaaaaaaattccctagacctcattatctacactctctctaaattctacattcacttcttctacaaaatcttcttttaaacctaaacaacaaaatccacccactgaaacgtt

SEQ ID NO: 135058 - DNA, 1773 bp, Glycine max
  Clone ID: PAT_MRT3847_92967C.1
ccacgcgtccggttcccattccctgtggtgaaaaaggctaaggaggaagatggtgctttcggaggaggaaatgggtcgtctgtaccgaataaggaagacggtgatgcaaatgcttcgggacaggggttttctggtgggtgaattcgacgtgcgtgctcatccctttagggtgaaagaagaatggtgctttcggaggaggaaatcggtcgtctataccgaataaggaagacggtgatgcagatgctgagggacagaaattttctggttggtgacttcgagatcaacatgtccaagcacgagttcaagtccaagtacggcgaacacatgaagcgcgaggacctcgtcatcaacaaatccaagaaggacaactccggcgaccagatctacgttttcttccccgacgaacccaaggtcggcgtcaagaccatgaagacctacaccaaccgcatgaactccgaaaacgtctacagagccatcctcgtcacccagaccaacctcacccccttcgccagaacctgcatcagcgaaatctcctccaaattccacttagaagtcttccaggaggcggagctgctggttaacattaaagagcacgagcttgttcccgaacatcaggttctcactgacgccgagaagaaaaccttgcttgagagatacaccgtcaaggaaactcagttacctaggattcaggtcacagatcctgttgcgagatattatggattgaagcgtggacaagttgtcaagattatccggccaagtgaaactgctggcagatatgttacataccgatttgttgtataagaatttgctttaacatatttggttatactgtcatagtgatggatagggatataaagccttctttttgcaaggggggaactcttgatttacaaggaaatgaaatgtgtgtttgtttctgtttattatagactattaagttcttttggtaatttagtgacaaggagagcagagggaggttcatttcttttgtcatttctgtgcatgatgttgtcccgagtcttttataagttggtggcttcttcctgctccataattatctatttaaatttaggtgcaaaccttaccggaattatgataaagtcattctcatgtcaattgagatgaaattccttcatgaacgatctcgaattcgtttagttatacacacataggagcatattaaaagtgagagtaaaaggaattgattttgaccatgttgtcatacatggatagtgaagattggttttattcaaatctaattttgatcatatatatctgtatgtccatttgtaaagaaccctcttccaactttttgttgtttagggattaaaataaccgtgagagttgtgtttagggttttatggattaataatgcactttccgaaactaaactggctgtttacttgattatttaattggtgttagggccttggttttctgcagtcatgaaaataaggattaaaatgatggaactgaaatgatattctttgtttcgggaaactctattgactgacacggttctaactagaatgaaactttagtgcatcactcaaattgttgagtgggggaatcaatttagtgtattactcatatttttactttattttaactagaatgcattgataatgtaatatctctacactgatatctaaacattgaccatggtgtatgaaagaaaactattctaatcgggtgggcagtgtgaaaaattctgagagtgctattaacaatatggaagccaattttcgtttttctggatggggcttgaactta

SEQ ID NO: 135059 - DNA, 428 bp, Glycine max
  Clone ID: PAT_MRT3847_92968C.1
aactagttacgatgcatgctttactcacgttcattcaaacaattaaacaaagcaagcaacatatgatgttgttcatactaagcataatttacaatcttgtcaatatatcatcatcaaaaccaactgaaacaaagtggacttcttcaaacttcaatatggtcatcatccagcacctctgttctaactttaaggtcaaatttctccttttgaaacacacaaattggtgaaagttgtctcccacaaagagataaatttctttcccacctttcctagcatatataattataaagtacataaaaatcaaaagatatgtaagttatggccaaaatacacgagcaatgtgtccattctgcagttcaagtgaggagagcgctgtccacctattttttcattgtagaaggatatccaatgtgtccattcttcaattc

SEQ ID NO: 135060 - DNA, 448 bp, Glycine max
  Clone ID: PAT_MRT3847_92969C.1
aaagaaaaggattagcagttatgtttggttaaaatttcaatatctttcaactgattttacaaaaaaaatatacatcaaagtacaaatctttgcaacacatgtttggttctcattggggcataagttgcccttgggggctctcttgttcatcttctaacatccgattatgagaaccatagggaagattcaccacattgtcaccactaacataaactactcgaaaaatatcatacttcatctcaggggagaatcgttcaagatatggcatcatccactttctatggtctgagttgagaatccatgagtaacaaaattgtagggactgccacacatgaatgcataccactcttggtaagcattggcctttcatgcaaaggcccgcagttatgccttctgttttgggaaaacgagacctaaatattgctaggactgcatagcacaggtcatt

SEQ ID NO: 135061 - DNA, 310 bp, Glycine max
  Clone ID: PAT_MRT3847_9296C.1
tttgatatttttttttttgatgatttattatatatagaaaggtgttaaccctgtttttcatcaaaaatgacctcatcaactgttgtttattatgcctaagaatgaataaagacttctaaatgaatttgcgatggtcatttattctaccgctttaataggggcagccatccttaacttggcttactgaattctgcaccctagttcctcctgaaggagaaatatcaggccccttctaatcctctcagtaaggtttcttattcgtaggtgattacaatttttcctgaggttatcagaaagaaaagagtaccgc

SEQ ID NO: 135062 - DNA, 1090 bp, Glycine max
  unsure (1)..(1090): unsure at all n locations
  Clone ID: PAT_MRT3847_92970C.1
gcgtccgcccacgcgtccgggaagatggtgctttcggaggaggaaatgggtcgtctgtaccgaataaggaagacggtgatgcaaatgcttcgggacaggggttttctggtgggtgacttcgagatcaacatgtcgaagcatgagttcaagtccaagtacggcgagcacatgaagcgcgaggacctggtcatcaacaagtccaagaaggacaactccggcgaccagatctacgtcttcttccccgacgagcccaaggtcggcgtcaagaccatgaagacctacaccaaccgcatgaactccgaaaacgtctatagagccatcctcgtcacccagaccaacctcacccccttcgcccgcacctgcatcagcgaaatctccttcaaattccaccaagaagtctttctggaggccgaactgctggttaacattaaagagcatgagcttgttcccgaacatcaggttctcactgacgccgagaagaaaaccttgcttgagagatacaccgtcaaggaaactcaggtcgttcattttcttcatgtttagggattaaaataaccgtgagagttgtgtttagggttttatggattaataatgcactttccgaaactaaactggctgtttacttgattatttaattggtttagtcccttggttttctgcaatcatgaaaataaggattaaaatgatggaactgaaatgatattttttgttttgggaaactctattgaatgaaacggttctaactagaatgaaactttagtgcatcactcaaattatttagtttgggaatcaatttagtgtattactcatatttttactttattttaactagaatgcattgataatgtaatttttttacactgttatctaatcattagaccatggtgtatgagagaaaactattctaattggttggcagtgtgaaagattttagagtgctattaaaaatatttgaagtcatttttcgttttctgtatagggtttgaacttagattgccattctaggtattgtgccctacaactttctgctgatactgacatggtagctttattcctaattnttgtggggcggttnctcagttacctagga

SEQ ID NO: 135063 - DNA, 833 bp, Glycine max
  Clone ID: PAT_MRT3847_92971C.1
gaccagatttacgttttcttccccgacgaacccaaaggtcggcgtcaagaccatgaagacctacaccaaccgcatgaactccgaaaacgtctacagagccatcctcgtcacccagaccaacctcacccccttcgccagaacctgcatcagcgaaatctcctccaaattccacttagaagttttccaggaggcggagctgctggttaacattaaagagcacgagcttgttcccgaacatcaggttctcactgacgccgagaagaaaaccttgcttgagagatacaccgtcaaggaaactcagttacctaggattcaggtcacagatcctgttgcgagatattatggattgaagcgtggacaagttgtcaagattatccggccaagtgaaactgctggcagatatgttacgtaccgatttgttgtataggaatttgctttaacatattggcaatattgccagagtgatggatagggatataaagccttctttttttgcatgggggaactcttgatttacaagaagtgaaatgtctgattgttgaaacttttggaatcaaaactatatatttagatgattatatcataaattggttgacatatgttgttatgattagtgtcaatctgttatatggaactttgtttctgtttattaatagctattaagttcttttggtaatttagtgacaaggagagcataggagggaggcttcatttcttttgtcatttttctgtgcatgatgctggtccgagtcttgtataaattggtggcttgttcctgcttcataattgtctatttaaccatacgatttaggtgcaaataccagaattatgat

SEQ ID NO: 135064 - DNA, 406 bp, Glycine max
  Clone ID: PAT_MRT3847_92972C.1
cattagataacttgtaattaatctttaatttggatccacttgttgtacttagtttctctgaagttttttcaaagaattttgtgggaattaatccttctaaaatatagtttgaatcagcccctgtgtcaaatagggccgttgtatctaaaacaaaatcattaatattaattttaatgtttatgtaaaaattttggattttaatcttgttgattaatcccataaatatatcattttccaaatttttagtttggttttctttactgtttttgacactttcagaatcactatcttcctcaagttgagaaaggatgatttggtgaatttcttgttgttgacgaagttctttaacttctctttctagattattaatttctgtttggagatcttggattgttgttggttttgc

SEQ ID NO: 135065 - DNA, 1037 bp, Glycine max
  Clone ID: PAT_MRT3847_92973C.1
gattctcttacaatgatagatgtctccaaaggcagcctcttcaaattggagcatatgaatatgatgacaaagttgaggccctttgtccgcccatttctaaaagaagcaagtgaaatgtttgagatgtacatatatactatgggtgatcggccttatgcattagagatggctaagctacttgatcctcagggagaatacttcaatgctaaggtcatttctcgagatgatgggactcaaaagcatcaaaagggtcttgatgttgtcttaggacaagaaagtgcagtcataattcttgacgatacagaacacgcatagatgaagaataaagataagatgacaataatggaaagataccatttttttggttcgagttgtcggcagtttggtttcaattgcaaatccctagccgaacttaagagtgatgaagatgaaactgatggagcactcggacgcgtgggcggacgcgtggggcaagtccattgcatgttctttgataaacaagaagattttgatgatcgagatgtgaggcagatgttgtcattggttcgaagggaagtcttaagcggatgtgtgatcattttcagccgtattgttcatggtgcaataccatctctgaggaagatggcagaacagatgggagctacttgtttgactgaaattgacccgtctgttacacacgtagttgctactgatgctggaaccgagaagtgccggtgggcagtgaaagaaaagaagttcgtggttcatcccctatggatagaggctgcaaattatttttggcaaaagcagcctgaggagaacttcattctcaaaaaaaagcaatagtcacttttcttatggtatcaaacagtgctgtgttcataatagcttgcttacttagtggcccaagtatatgaaaggatatctaatacctaaccaacaaccttctgattgtgaaacgtgaacagtcaacttaccatttgagtagaaaacaataccatttttatgtctagtttaactctgtttgcttttggactatttcttttgtttcattcttt

SEQ ID NO: 135066 - DNA, 316 bp, Glycine max
  Clone ID: PAT_MRT3847_92974C.1
cgaccccaaagatcactatatactggttacaatgtgaagcattgaacagactgtcattgcaaagagggaagtctattaaattcttcagccacacaagctgaacaaaattcattcaaatattaacttatggtgggaatatttccatgaatgagaacaggttgtccaacatgactctttgcatgaccaagtctatcatgcccaatactattacacctattacatgtatttacatgatcatctctaactaaatttatcgtcattaataatcatcaactatcatacatgttgacgcacacacttatctgtatcttgaatc

SEQ ID NO: 135067 - DNA, 748 bp, Glycine max
  Clone ID: PAT_MRT3847_92975C.1
gaggaattcctcccttctggagaagggaggcatgtatttatatataaatattgtttcattcaagagctaagcaaaaatggagacaaagacaaaagaaactgccatactaatgtttactccctcaatgttaacctataatacagcccctagagtttgaaggggaaagaaggaaactccatcactaaaagggagcagcagaagggttcacaacaatgtgcctaagggggtgtgcaacatcgccgccaccagcatgcttaacaaactccgccggagagaggaagtttccatggcacacacacatgatcctcacttcctcccccttaccatatttgtacaaaataccctcaattcttcttccattaggaccatccccttttgtaaatacacaaggcatgtcttccattgagtttgtcccaatgtgtcttcccattgttttctgggaaggatggtgtttcctagatggattctccccctgatcagctttggaagttcttgtcacattctcattcgtctttccccctgaacccgcaggatcctggctgctttgttcttgcgctgatatattactaatagggctttttgcttcaccacagctacttgatccaagaaaagccttgctatccatttcagaaagtgatgaagagcttcctccttgagaatcagctgagccgtgagaagatggttgcccaaacaatccttgaaacccctttccctttcccatcacatcaccaagaacaacttgcttttc

SEQ ID NO: 135068 - DNA, 322 bp, Glycine max
  Clone ID: PAT_MRT3847_92976C.1
gtgctattgggacttaacatattgaatattcactactttccaatactaaaaccactgcttctggctttggacgtgaaaaacaacagagctttttttctgaaaaaagttccccagccgctcaatttttgtttaaaaaaaagaaaatatttattatataacggaaataacattctttgttaaatccataaaaacggaacccaacagcaacagggcatcaccgagttttttttactcttatgcagcactcgcaccactaagatacacactggggggaaaaaccctttcagttatcaatgtgtacaggtggagaacatcatccaca

SEQ ID NO: 135069 - DNA, 768 bp, Glycine max
  Clone ID: PAT_MRT3847_92977C.1
cttggtcacagtgtgaatcctagaaattatcatgcgcctcctgcaagttacattggcccttatcctgctgtgccaggtgtacagcatccaatggtatatcccagaagaattgtaagtccgaggccgatcccacgcgtccgctcttaccctgctgttccaggtgggaatagcaactcttcatcttcaggtgccagtaaaagttccagtggtcagattgaaggaccacctggtgccaatctatttatttatcacatacctcaagaatatggagacgaagagctcacaactgcatttcaaccgtttggtagagttttgagtgctaaaatttttgtagataaagtaacaggagtaagcaaatgttttgggtttgttagttatgatactccagaagctgctcaatctgccattagtacgatgaatggttgtcaattaggtggtaagaaattaaaggttcagcttaagagggataacaaacagagtaagatttactgatgaaggtggataatagaaagttgtataattctcaattctcctgacccatatcagatgtcaatacaatttgtaattttctgtaacatgaaaattcatttagacattgattattaatttattgatttttccctcagaaagcatattgattatattataacttcataacttcattggttttatcatccgggagggatgatatgatcgttattttggccctcgtagataccaatcaatagtacgtttgtgttaaaaaaaaaagaacgaaggccgactact

SEQ ID NO: 135070 - DNA, 188 bp, Glycine max
  Clone ID: PAT_MRT3847_92978C.1
cagacgcgttccatcgcttgctttcacatttttgctccaagagctgcctcttggctgattgtctctgtgttacagacaggcttttctaatgttattaaagatttcaagtatgttcattctcatgagtgggtgaaagtcgattgaaattactcaaccatcttcataactgatcatgcacacgatcattt

SEQ ID NO: 135071 - DNA, 362 bp, Glycine max
  Clone ID: PAT_MRT3847_92979C.1
ggttcgtcaacaacacattataacatgttctgtgtacaaacaaaccattacttaggggtgatttccattgaaggtgacaatccatatccacaattttatgaattcgatagctggataagaaacggcctcttcatcagaccataatgccaacaaacttctttcatatacactttcccatatttgtgtaattgaccaaaatcgtacatatagattcacaaaactcctgtgaccataatagaaacataagcctttatagaaggattctgggcatagaacaattgcttggctcgacaaattgaaaaatacatacaggtcattgtcaactctacaaatataattgaatattcaacgagtaatgcaaa

SEQ ID NO: 135072 - DNA, 2747 bp, Glycine max
  Clone ID: PAT_MRT3847_9297C.1
cggctgcgagaagacgacagaaggggacgcacactcactcacaaacactcttccggctcgcaaaaccctaaaccctcactttttttttttttccgacgagaatggccggcggcatcgacatgtccctcgacgacattaagaagcgttcagccgccgccgtggcttctcgccgccgattcacggttgttcacaacccggccagaacgacgccgtacccgattccgcaggtaaggcaacagagcatggttgcattatttccagaaatggttttggaggagtcaggcgcggctaagattgaaagtggcaccaagctctatttatctaacttggatcatggagttaccaacgatgatatcaagctgctgttctcggaagagggtgaattgaaaagctacactattcattatgatcagagtggaagatcaaagggaactgcagaagttgtgttcgtgaggcattctgatgctttattagccatcaagaaatacaacaatatgaggcttgatggaaagccattgcaaattgagcttgttggaacaagtttggctactcctgctgtcgctcctctttgtcaaaataacttgatgggaagaccaaatgatgtccattttagcacacgaggaagggttggcgatagtgggtttcacaatgactttgcacagggctaccttccaaggggccgtggagaagagaaggaccatattcgaaaggtgtcttttagagatcttgatcatagctttgagaggtttcaccgcactcagagtcagagaagctacgcaaaagtaaatggcaattttggaaaggtgactgctaaagatcttgatgatgacttggagaggtatcacttagaggctaagcggattaaaaagcaaaatggaaagccgtctacaccatcgtcgtggtatttcgttgtcaagattatggttagaactagaggtttatgtcgtgctttaggcaaagttgtaggaagagccctagggagagaagataatcgtgattcagatgaatctctccaacagcgaaggccaacaacatctgcacgtaggcatcgagaaattgccgctgttgctgaggagagtcctcacctggatgacgcagctgaagaagtcttccaacaacctgaaggagtagttgttgatgatcagggttttccaggcgggccgcgcgacacatcagttctgactgcctatgctgatcatgttgtagtcattgtttgtaatggagagttatcctcctatggaagacaagttcataaattcgggaggcctgctactgagattgaagggttagtcgttgccacaagattaagtcctttgatcgcatgttcattggacattgtcgatcaaaaacttatatatgtttttacggagaggtggcataaggtcttcttggttgcaaacactgaacacaagggaccaacgttccttgagttcattgcaagaagcaggatttgcttcttgattgatcactggacacaaaagaccaacgtcttttgggttcattgcaagaagtgggatggaagttctttggggtttattgcttgtaaaggattttacaaggatagtgaaaatctcaagcgggttgcttggggactggacgaaactagcagtttccatcttccagtaggagaggtcgtcatcaccctcaatgatgtggcctctttgcttcatctgcccatcataggcgcattccacagcttcgagactcttcatgtcgacgaagcagtgttgatgttagtggagttacgtgaagtcagtgaagatgaagtcaaagctcagacagtacagtgtcatggggcatatgccgaacactggactataacagctcgagcttatcagttgcattttctaggttgcactttttttgctaacaagagtgcaacacacgtgcatgtggtgttcttggacacctttcgagacctctatcagagtgaaagcaacgcatggggagctgcctccctagtgcatatgtacaatgatttgaataatgcttgtaagagtgacaacatacaacttgttgtatatatcacactattacagcattttccatctgttgctgagggttttacggatgaagactatgatgaaaggtcaccatgtgcctaccactggacctatacgaaggcattaccagcgtcaacgtatcgaaagcgtctagatcgactgacgactgctaatgtttgttggatgccttatggtgccatcatgcagttagagactttgacccgatttcatacgattcctccatactttccgggttcaagattatgcgtggaagatattgacgatagatggatgcatttctctgactaccttgcaccgcttggggatccacccaaacatccacctatcgtgcaagatgagacatatgtcgaaccagatatgcctcagtacttggtggtggcagcagctatggaggaagcatttgcgcatgcaccttctgatttggagcagcctagacatgcaatggaggcttgtcaagcaatagctgaaaggttggagaggttgttcaacctaaggatagtgactgaaggcacaaaaacatatgttgtcatgcaagattgcctaaggatcgctagaggtgtcactgtggatcacaatgtatatgtgatgtcgcgacgaagaggtgtacagatcacgcatgtagacatttagattcttgatcgtttgtgcttctcagctttatatatttcttcatctagtctgaattgggaacctatcatatcatttatcctttgaaaactcgat

SEQ ID NO: 135073 - DNA, 202 bp, Glycine max
  Clone ID: PAT_MRT3847_92980C.1
attttattactcttaaacttactctgcccattacagacacactccgtaccgcacacctgcggggcatattctaccctacgtgactacgaaacgctagagggctcactatgcctacacaggatgcccaaatgcagtgagcgccgttcatgacaaaaaacttacaatgagagggtaatcttggacatcaccaaatggtctgacc

SEQ ID NO: 135074 - DNA, 1279 bp, Glycine max
  Clone ID: PAT_MRT3847_92981C.1
gtgtggatggctgccgtgctttgcagggcccgtgattttcgtaggcagcgtcctgcgctgacgggggtggggtacctcctcctgctggtccgggcctcggttgggttcgcgcttcatgtggttggtgtctactggtggtatcagaatgatgatctaatgtatccattgatcatgcttcctcccaaggatataccgcctttctggcacgcgattttcatcatcatggtcaatgatactttggttcgccaggctgcaatggtattcaagtgtatattgttgatgtattacaagaatagcagaggccgaaattatcgtaagcagggtcaaatgctgactttagttgaatacctcctcctgctttaccgtgccttgttgccaacaccagtttggtatcgtttcttcctgaacaaagaatatggaagcctcttttcatcactgatgacaggattgtatctaacatttaaactcacgtctgttgttgaaaaggtgcaatccttctttgctgcagtgaaagcattgtcgcgtaaagaaatgcactatggggcttatgcaacatcagagcaggtcaatgcagctggtgatctttgtgctatttgccaggagaagatgcatgctcccatcttactacgttgtaaacatattttctgtgaagattgcgtatcagagtggtttgagagagaaaggacctgcccattgtgcagggctttggtaaaacccgcagaccttaggtcatttggggatggctctactagcttgtttttccagttattctgaaatcatatataaataccaaccaggaagtttttttctgctttgaagctttactttttcaaagcagcagtcacgatctatatacatcaacacatgtaaaatgctctggaggcaattgtggggatactctttgaagatgaatgcagctgtatactggtcatgcgttcatataatgtactagcaaaaaaggttgagtgtatctaaatgaccctgtaaactaggaagtcgattgaaaatataatattaaacatgactcttcatttgcaaggaatgaaggtctttctccgaattgcatcacgattctgtcatatagtgccaaatcaaactgttaattttaaatatattttttatttttgaatctctctttatgtgggctttgatgcacacctcaaggagtgttgcccacgggcagattatggttaaagatctcgcacttcatgtattaaatctgtggatactagtttatttttgtagcagttaatagttaatttccccatgattatgtgct

SEQ ID NO: 135075 - DNA, 543 bp, Glycine max
  Clone ID: PAT_MRT3847_92982C.1
ggctcgagctttttcttctctcgtttgtttcctcatcctccagtagtgtgcaagaatttttatccaaattaagatttattatctctttctcaagccaaaaatgataatacaaatgaaagttaattggattaaaaattaacttctcacatttccattaaaatataagattttcatcctttattgtggaaataaaaacaaatcgaaacacgacaatattacatttctcgaaatatttttaatagcttataacaaataaacacagatatagaggatcaaatatgtcgtcatgagttttgccaaatatagagttttgcctaattgaacagtttttaagagacaaataagaacaaattaaaaaaaccttaaaaataaaaatattcttagtcaataatagttgcaaaatagatcaaatactacttaatttgccaattttcatgacatttgatcaacttgtaattttgattttcacaatcaagtcattaattaaatgcatattgatttgacctctaagcaagagaaagaacgaaatgattttttttgcat

SEQ ID NO: 135076 - DNA, 242 bp, Glycine max
  Clone ID: PAT_MRT3847_92983C.1
cactttttgagagtggacgaggtgttccacaaactatagctcgtgtcgacgagcatggcagactgttttaattatcgcttgcataggacgactcttccttacactattgctgagacgaagagagagcccaaacagtggttggtggattgtgacaacctcatctcgtaatcattgttgataccgttacaacagagtaatatgtggaagctgctgatgcagccccacgggttaactacatggtt

SEQ ID NO: 135077 - DNA, 231 bp, Glycine max
  Clone ID: PAT_MRT3847_92984C.1
ttacattcataatatttacttgtcagcgcatgattaaatcaaagagttacatgccttcctttgaagggatggcctctatcatctgtaatttgatcaactaaaacctaatttatttgggcagatttatttacccaacttgacagcccacaatcaatatttttttttattcacaacaacaacatatcttttctcatgctcattctctaaataaccttaccaattttaattatt

SEQ ID NO: 135078 - DNA, 523 bp, Glycine max
  Clone ID: PAT_MRT3847_92985C.1
ctactgttaatgcggacaaagttactgtactttgagtctaactccccattaaatacatctgcaatgtcaacaataaaaagcaaatcttgtttagttgcaaggattagatgtgtgatcacttggtcagccaaatttgagtaaaatgagaagctgctgcagttgttgcaaagtatccccgcattagcatgcagtctgccaatctcatccagtccaaaaagcactgattttgataggccagcactgccaactaacgctacactcatccaagggcaagctgcagaaaaaccttgatgttcttgttctagagatcctctactaatcccaatttttgatacatactcttggatttcccccctagaaaactgaatatatgcagagtgtttactagcaggattggaagcgatgccaataaccagctctttaagggtatttcgatttgaaactgctgcatgccagcctgagcatgtcagcaatcctggaacaagatcctcagaacattcaagttccacttcctgcaaataga

SEQ ID NO: 135079 - DNA, 214 bp, Glycine max
  Clone ID: PAT_MRT3847_92986C.1
cacccgcctcattaagtccgaggagatcagagaggtcctcaggcccgcccagaagaaggttgtgcgccgcgtgcgtcgtctcaatcctctgcgcaaccagcaggccatgctcaggctgaacccttatgccgctgtcctcacgacgaatgctattcttaccatccagaagcgcatgaagccacgtgctgagctgctcgccaagaagcgaggggtc

SEQ ID NO: 135080 - DNA, 336 bp, Glycine max
  Clone ID: PAT_MRT3847_92987C.1
ttaattccgcgctcgaccatctcctagtcttcggccggcctattatttttttttttttatgggtaggagtactggcgagctttaacatagcctgctagttgtctcatccgcgcatatgggctctatttgagctatgcaaactcatactactagggcattgtggcgggcaccaattataaaacaaactctatgttaaaaacctatggtatttgagatgattcactgggtttactgccggcccccgcctcggactgagaacttaacgaatttccggcctacatattgcacagttccatgcaccgttgctgagatactgtgcctggcttttgcagctga

SEQ ID NO: 135081 - DNA, 412 bp, Glycine max
  Clone ID: PAT_MRT3847_92988C.1
aaaaaacaacccccccccccaaggggagacatttttgggtccaattccaaattaacaggggggggattcccccccaaaaaaacccaaacttttttttcccccatcacggaagcgggaggccttaaacaggggggtaacccaacccccaaccgggttttccctttttgggaaaaaaaaaaaaaccctaaccccaaaagggggggtccgggtaaccccccccctttaattaaaggcccttgggacaatccccaaaaaaaaaaaggccccaggcgaagccaatattcaaggaaggccaaccaaccaaccacatgctttgggggagcgggatttgctcatggaaaaagccaatcatcacttttttttacccccccccaccataaaaaccaattttttaagttatttttggcggtat

SEQ ID NO: 135082 - DNA, 221 bp, Glycine max
  Clone ID: PAT_MRT3847_92989C.1
aaaagatggcggtgtttctcctattttttttttgtccatgtgccaattcattcgggatgataataattgggcgcacaaatgggtaaattaagagcccatcgaccacgggacataaggaacgggggtcctagcgaacgatggtgcccaaaagaccgaggtactccaaacagccaactacttgggcaaacaagcctagcgtgtgataaggcagacactacaga

SEQ ID NO: 135083 - DNA, 735 bp, Glycine max
  Clone ID: PAT_MRT3847_9298C.1
ccacgcgtccgcacaacataacataaaacccataacaaaagcaaggtctgccgttgaaccagtgataacagcagaccagggttttgagcttctctcatttttttctccacattgtctctcagttcttataaatataaatatatatatagagatatcccttttgttttttctgcatttggagttgtaaagcgcgtattttaatggaagttgtggtggagggggagtggcaagatctttcattttgattggtggagtagccgttggaagtcgatccggttgcaagctgagtttttgatccgatctctctcagaaatggctgcggctgccaatcctgtagttgggtcccatatttgggtggaggatcctgatgtggcttggatagatggtgaggtcttggaggttaaaggagaagaaattaaagtcctttgcacttcagggaagacggttgttgttaaagcttccagtatttatcataaagatacagaagtcccaccaagtggagtggatgatatgagaaagcttgcatacctgcatgaacctggagtcctagataatctgagatcaagatatgatataaacgaaatttatacttacaccgggaatatattgattgctgtgaaccctttcataaagcttcctcatttatatgatagccatatgatggcccaatataaaggagcagcttttggtgagctaagtccacatacctttgctgttgcagatgcagcatatggg

SEQ ID NO: 135084 - DNA, 296 bp, Glycine max
  unsure (1)..(296): unsure at all n locations
  Clone ID: PAT_MRT3847_92990C.1
cangnactcgtacgtnagctcggtccgtgcgctgagctgggtggctcggctgccgctaagatgtcagtgctgaggccgatggacaagctgcccgacctaaacagggctaccatcttgctggtgagcacggaggatgcgcttctgcngcagctggcggagtcggtgctcaaaatcgactgtgcgaccgagctgagtgtccacttggccaactccctgcctttgccctccaatgcgaatcggccccgaattgacctgattgtgtttgtgattaaccttcacagcaaatacagcctcca

SEQ ID NO: 135085 - DNA, 509 bp, Glycine max
  Clone ID: PAT_MRT3847_92991C.1
gggcgacagaagggcactcctacctatcctatgaggatgtagttttaaattaaatttcattaccaaataccaatatgagaattttataggaagtaatctataaacatatttatatatgtaattattatttgaggtgtgtaacttatcctaactttaagaaacctccaaaaatttaactcacctttactttcacatacgaaaaataataattggttgaaaatagcatgttaaacatttcacataatgatatatagctttggggtggaaattaagctacattttctagagtattttaacaaaatttatcttacgatacaaaacagagtgttatacattttggaaagacaacttttcctcttcattagtgaatgattatttgtgctaagtttgattaattcgatatacacttcgatcggctaaaaaatgttaaattaaagcgttgtgaagctaaagatatggtagggtgtctatgtacttgcaagtagtactgtcacatttgaaaagaagaa

SEQ ID NO: 135086 - DNA, 389 bp, Glycine max
  Clone ID: PAT_MRT3847_92992C.1
tttttttttttttttttttttttttttttttttttttttttttttttttttttttggggaccatcaaccttccaacgttttaagacgaagggaacaggtccacccttggaaggggatttgggaaaaaaacccagggagggaaacctcctcccagaagaagtttccagaaaatttcattattccacaatttttttttttattttaatttccccccttttattaatcagggggggaaagttgttcgggggtggggttgataaaaacaactttttaaacagggccagggtttccaccaccgttgagaggcccggcccaaaaaatccaggggttggtccagttccagttaacgaaagagggccaaaatgtaaaagggggtttaatggccgttc

SEQ ID NO: 135087 - DNA, 625 bp, Glycine max
  Clone ID: PAT_MRT3847_92993C.1
tcgacccagcgtccggaaaaaaaaacttgtatgactttggcatactatactagtctcatttgccattcacattcagtggaacatagcagaagcatagagatataccataccatattatatataacaccgaattgaattcttgctttgtttctctacctttgatcatgatcatggattctcttctctccatcctcttctttcttctcactctatcttctctcaacccttcctttgcttcacaaccctcttaccaagaccactgtggctccatagttccagagtcaactcccaatgaaaacactcacaattcttccccttttgatgatcatcaaagaggttacttcacaggtggtgatagcatcatcgatggtggaacttccttaaaccaatactttgacctccaaccaatgtacatacgtgcaaccaagttctctgacttgttcaatgttgaagccactgtttcactcacatccagcatatcttactactggaactcaagccatggtgacagcttaagatatgaacggaaacgccgctaccgtagaaaccatgtgtacttcaagcttgaagggttctggtctgagtcttcagggaaagcttgcatggtagggaaaggaaaaggtta

SEQ ID NO: 135088 - DNA, 346 bp, Glycine max
  Clone ID: PAT_MRT3847_92994C.1
ctgcaaatactttgagatttctcagagagcagacctcttccggagatgatagatataactaccaaaaaaatccagagaggacagagagacattccagacattcctcagagacataaacctctaaatcctaattctcaaactacaacgactgatgttcccttgcccttcttgtcaccaccaatctcaaagtgcttggacctcttaatagccttttcccacacatgcttgcagaccctggcattgcaacctcacgacaatcttcttggtggttttacccttcttctccaacacccccttagtttttccaccataaccccattgtttgccatcataacggccttttcct

SEQ ID NO: 135089 - DNA, 282 bp, Glycine max
  Clone ID: PAT_MRT3847_92995C.1
caaagacactcatggttaatactcaagggtagataaggggaaactcggggcttactcatcattaatgccttatatgacacaactactttcataaggcttaacatttgcttactatagtctcacttagaataaatttactcgattatcaacatgagcaatacctagaacacatgactaccataatcataactcttaaaaccttcatcatttacctccacaggtatataatcctatctatcgcttcagaatggattgactagcatgaatgcttgaactaaaact

SEQ ID NO: 135090 - DNA, 510 bp, Glycine max
  Clone ID: PAT_MRT3847_92996C.1
tttacttatcagagttgtttccaggagaaatagtagttacgtgtccctttaagcgaaaaaaaatccaaatctgttttgacccaattgatgttcatgtcggctgtgtcctttaacttcgtggaataacaaaaattcggttgcaacaattcatgaattcattaccccaatttgctttctcgcaaaaggaagcgaccctgattggttttgttgcatgtaatggagattttggattatgggcaccccgcataaaccaaaaaggtcttacttttcttttgagagaattgtcagagaaggtctcttgtgctaatagagcattaaaatcatttccaggaagtgctgaagcataagaagctctagattcctcagcccctatcttgttattccttttggcaacagatgagatgtaatatatgagtcattgcgatttattgcagacagcttcattgatttttagggagtgcttgagttccagtgtatcagcttgatcttgtagagtaatcattggccatg

SEQ ID NO: 135091 - DNA, 1647 bp, Glycine max
  Clone ID: PAT_MRT3847_92997C.1
gaaaacaaaaaccaatattttacttatcagagttgtttccaggagaaatagtagttacgtgtccctttaagcgaaaaaaaatccaaatctgttttgacccaattgatgttcatgtcggctgtgtcctttaacttcgtggaataacaaaaattcggttgcaacaattcatgaattcattaccccaatttgctttctcgcaaaaggaagcgaccctgattggttttgttgcatgtaatggagattttggattatgggcaccccgcataatccaaaaaggtcttacttttcttttggctaaattggaagagttaactacaaggtttcaactcaatggatgattcaaatttagacgaatctatccatttgctgctggttgtttaatttttcttctgttttgctatattcatttcgttgaacaattttataatgatgaatatggtttagggtctcttgtgctaatggagcattaaaatcatttccaggaagtgttgaagcataggaagctctagattcctcaaccctatcttattttttcttttggcaacagatgagatgtaatatataagacagtttcattgatttttagggagtgcttgagttccagtgtatcagcttgatcttgtagagtaattattgcacaatggaatccaaacaagaagcaccaagtgttattttaaacttgatgggtcttgatcaagtgcctacccaacatcccattagagataagcagaaagtgctctctgagaattacctgcagaaagttgcctctattggtgtcagaaagaagcgttcatctcatcagcatcattcctctggaatgaatactagtgaaaaggaagaatttgaggatgttttaaaagtggtcaaagcactaaggcgaggtaagcaccataacccatcaaagggaaatggtaaagagaatcctatttcttgcaaaaattctaatttggatgatgggctgctccaagagatattttatcctaaaagcatgagactgtatcctgaaatgagggagagaaagaaaatatcctatcacatgaattctggtaagcagagttcaaggcctttgagtaaaatttcagaggagatttctatgccatcgggaaatgttgcaaatggagttttaggtactgcttcaagttcttttttcagagggaatgaagcattttccaatgataatatgctgaagcctgcttcaaatatttcagttaatgagatccaatgcaattcccctttcctctgttctgataccaggaccaacactttggcacagggggatgcgactgaaaaattgcaagaacttggacggtgtggtcaagactgtatacataaccagttgcctatgatttctgaacatggaaatggaacaagaaatttgactcgtcaaagtggttatagctatgacaaaattataaagaacattagatgtaaggctggtgttaattacagctttgctagaagagtgtcaatacctctttgtgcagcttcagttattgctgataacggtagaactatgaatcaggatatcttgtttcagagatattggggtttgagaaagaatgcatctgcaaattggttatcatgggaagtcgaagaatgaaaatgttaaccagaaaagatgtatgggaagatgtgaacctcagtcct

SEQ ID NO: 135092 - DNA, 424 bp, Glycine max
  unsure (1)..(424): unsure at all n locations
  Clone ID: PAT_MRT3847_92998C.1
tctagctatctcgatcgaactgtccaaggtcctgtcacgcacaatcttcggggcgtgcacgggtgtgcttattaaatattgttcgtaaagatacctcgtccttcgttacagtggctagtaacagccgtcgtaatgaaaatccggccactataggcggttgcggtaaccagcaaccaccgaaatccacgttcgtaaaccgcacgcgataccggcaaatcgatgtcctagtgtgccgcggtctgccgatgttctggtgttattgtagtcgcccgtttatgttgttcgaattgagttgttctttgaattggtatgtatagcgtgttatacttgtgatacngttaacgaccagtgtcaagtcgatgtactatatttgacttatcgtcgtcgtcgtaacccagatacgtgttttagtagtcatcatagt

SEQ ID NO: 135093 - DNA, 285 bp, Glycine max
  Clone ID: PAT_MRT3847_92999C.1
ggggtcctgtccgtggcttagagagaaagacgtgcagagtgtgaatgaagctatctgtcctgttctaatgatcttctcttgaaacctacgactcttgacgctggagttgtgcaattgaacagactgtgcctaataaataaaggctcagtataatgactggaaattgtatctgtatgggtggaggagaaccagctacatgatgttataagaacggctcacatcatcttagatcgcaatataaatctctggatgaaactactgtgaaagactactcttaaactgatg

SEQ ID NO: 135094 - DNA, 484 bp, Glycine max
  Clone ID: PAT_MRT3847_9299C.1
tcccacgcggccggaaagaatagctggaggggaattcttcctttgatattaaatctcgctctagaatggaaaaagttctctctactgaagcacaatttgagggagggaaaaccttccaatgtgatgtaattggagctggtgcacattcttcagaagattttcctgaaaaagaggatcacgataaacccaaaaagattgatgccagagtgagacaaagactagatcctcaatacaatgaggttcaggctcaaatggaaacaaattcggttgaattgtctcttgatgatgttgaaactcctaaagggtccatgacggatcttaaaaactctcaatactaaaattgcactttccaaaaacacagttggaggaaccactctgcgccgtgaactattggcaaatttttagaccgatggcaattttagagcaagggttgatttgcagagcactcatcgaattaaaggaatgattaaaatggcggccacag

SEQ ID NO: 135095 - DNA, 395 bp, Glycine max
  Clone ID: PAT_MRT3847_929C.1
taaaaaaaaaataagtctaagttgttcagtcgaaaaaatctcaaaactcgtggcaaaaaaaaaaaacttcaacaggatgatggggaggtttggaaaggccccaatcttctctcttatactgcgacgcctcgaaccaaatcgaacaagactctaacgggggcctactgcagttcctctacgaggagaagcacagcgacctccttaatggtgaggctactctgacgatcagggcggccacaagccaacccaagcttgaacaccatgtacacattcttcctcatcgaactcccctgtaagccaggcattcgcagtctcacgcgcgcaacccttggcgtacaggtccctcacccaataaatgagcaccacgtcctactccaggaccgacgactaaatgg

SEQ ID NO: 135096 - DNA, 255 bp, Glycine max
  Clone ID: PAT_MRT3847_92C.1
atcatacagcacttgaaagccatgctgcaagaataaaatcacataaacacctactactatcatctatttaacacacaaacttacaacaaccccttcttttgctgactaattatcttaacaacgatgaatcattatgtgcggtggcggcaccatcactgactacatactacgccgtggaggaggccgccttaatgctttttttgttcactcttaaaccatctacaaaaaagacgactatgagttctaggacttctt

SEQ ID NO: 135097 - DNA, 437 bp, Glycine max
  unsure (1)..(437): unsure at all n locations
  Clone ID: PAT_MRT3847_93000C.1
caaaaaacccaaggacaaaaaaaaaaaaaagggggaaaggggggaaaaaaacaggaaaaaggggaaaaaaaggaaaaaaaaaaaaaaaaaaaaggggggggggggggcccgagacccaatttctttgggcaataagggggcaaggggggttaaagggggcggaagggaggccatggaggggcctttctgccctcccaggggttcccggggtttttgggagcccataaaccaaaaaacccagcacggggtgggttggcccggggttccaaggccgggcggtgggggagggcggcgtagggcccggggaaacctgttttaaacctcttttccgggccttncgggccctttcggggggttccacctacagaacccccagaacgaccctccccgtttcccggggtccccaaaggcccgcctgggacaccctgggccaggtt

SEQ ID NO: 135098 - DNA, 347 bp, Glycine max
  Clone ID: PAT_MRT3847_93001C.1
tggattccttaaaacgggcggtttttgtttttttttttttttttttttttggggaaaagaaaagttaattttggcttattacccaaaaggccaaaaacttattgggccggtttctatttctttccttttaatgggaaaatggaaaagctaccccaagggcattcctaatttattaaaggccttccttttaaaaaatgacccccggatttttccaaaaaaacgtttttaaaaaggacgggctaaagggggctttttacaacaaccctggttacttttttttttttaacaacctttccttttcattgcttgggaattttaagttccagtttaacaatctctggaggggg

SEQ ID NO: 135099 - DNA, 367 bp, Glycine max
  Clone ID: PAT_MRT3847_93002C.1
agaattcggcacgaggaaaatattcatatctatttatagcttctatacaaatcttaatttcaatgcttaacttttttttcctatagcaacttccaccctctgccacacaatgtctaatccactatagtgaccacatgacaatccttagaagatttgaacctccactacaatggaatgtcatcgtgcttcacaatgagattggtgatatttatgtcgttcagccttggtataaattccttcaagaaagcgatttcagccacggagacgaagtgtcattctactataggcgtgatgaaaaaatctaggaagttgttattagacgccaaaaagaatgggacgataacgacatagattaggttttagcgtt

SEQ ID NO: 135100 - DNA, 327 bp, Glycine max
  Clone ID: PAT_MRT3847_93003C.1
gatttatgtttaaaccgcgagcataggatgccgcaccttaagaccgtaaacaaaagcaatcgttccttgattgcacgaatttttcaattttttcctacttaaatgtggacgattacttaagggaaagaaagtcacttctctgagatggtcacagacttcgtgaagcattatgtttaccattcttagaatatttgctgaacactctcctattcgatataggacattgaggcagatttaaacatattttgtttcttttgtagcgtgtctggttaatctaaacgatcaggccggggaaaattatggattacaggtcccacttttctattt

SEQ ID NO: 135101 - DNA, 522 bp, Glycine max
  Clone ID: PAT_MRT3847_93004C.1
tcgggattgttttgtataaaagcgaagtttgtgctataaggtctggggacctcgtaagcttttcagttttcaccgccgtcactcatggcttcccaatctcaggttcagatcagcaagctccgtgtttcggttttaccggaaagtgacagtggaacgacgtcgtcgcccaaagggcagtgcctctgttctccaacgacacatgaaggctccttccggtgccgttttcatcgatcagtcgcagcttcatcatctccaccttcttggatgaaacgctccgacaacaattagctaccctctcgtttatgtctctctctcgatccattggttcgtgtctatgttgttagtccttatgtttatccatcaataactacgtagtactttcagaatttgcacagttaattaatttatcatgtgctaaattctatgtaagtgcttatatactctaaagagaggtaataattaatgcttgtgttgtgtagctccaaattcagttgctacgaatcactatttaacttgttcgct

SEQ ID NO: 135102 - DNA, 499 bp, Glycine max
  Clone ID: PAT_MRT3847_93005C.1
gaagaaaaagcggcgtacgaactctctgtcagactctcacgcactgaggcataactctatcatctttcattacttactcttctctctctcaaacatccaaagctccaaaccaaaacctgttttgttcccagtctctgaagacacacaagtgttagtgttacagacacaccatccatacaaacagatgttggaagccaagtgtctcaaaaaagcagtggttccttccactttgattcaagacccttctcctggaagccttcagtgcacacgccttgctctccgtgttagcgaggaccaaagttcttgttttgtttacattgcctccggtccccacatttataggctccacattgctctgggagaatcttcaatcagcgaaggaaaagatagcctattgatacctgaacacactgagattattgccttcgtcgttactcagtcgatgccctcatcgttcagaaattcagagtattgctcttgctgaggctgtggctatgta

SEQ ID NO: 135103 - DNA, 642 bp, Glycine max
  Clone ID: PAT_MRT3847_93006C.1
agtacatgcctcgctttccccacggacctcgatgctgagatcccgatgctgtgtaatcgatctcgggtttctggaactctactcggacgttgcgacatgattatgcttggcttgttggctgaccctctgtctcgacccgatcccgatctagcctccctacttctcttccgttgtatctctggctataactaatgcccgatgtataggatgtgaggacacggacagcggatagggctcctcctgcatgaccatttgagcctccaggcgacaccgatactgaagctgagcagatgatatagaccagttacacgtacatccatcggtaagactgcataatgtagatgtcgaggaagatcaatgctgtcgttaccgtatggcataatattagagtatgacgggagtatatgtatgtataacatactgtacggtgtatgaatgaaaagtaacttatattatgatatcgttgtgcttgctattaaaaaagcgaaaagaggtccctatggactcaagagtgcgatctacgtgatacatcgccctaatcaagatttttgggccccaagggccgtcaagcgctcgatctaaaccctacatggagcccccgagttataggttgacggaggagaccgagagaacgtgatcaga

SEQ ID NO: 135104 - DNA, 184 bp, Glycine max
  Clone ID: PAT_MRT3847_93007C.1
ccattcttttttttatctttttatttttaaattaaacacagaaatttgttttaacatcacacaaaagcagggggactcatagaaattaaaacaatctatcattcattttgacccaccttacaacccatgatatttaaagggacagtcctgactcttcatcctattcaagacggacgcctgatca

SEQ ID NO: 135105 - DNA, 1443 bp, Glycine max
  Clone ID: PAT_MRT3847_93008C.1
ggctgcgagaagacgaccacggaatggggagacatgactttgacaaccgcgttttcttgttcgctcgccgctgcttctctctccaccgccgccagtttccgccggaataaatgcaccaccagcaagatttttcattcctcttccacgtgcatgccctctttcttgcatgatcatcactaccactctttcttattgcgagttgccaatgatgctgatagaagtgaagtgtcatctgatactgcaatcaagacatcgtattcagaagccgataagatggttgatggtatggactttggtgagctttgcaatgagtttgagtgcatcagcagtcccttggtagaatccactgcaagacaacttgcacgagatatacttgagctaagggagggaaatcgagcacttggaatctttgctgtttctgtcgcatacaaggatcctattaggagctttaccggtcgtgaaaagtataaaagacgactatgggcaaccggtgcactagacaacccatctgtgactgtgcaggaaatggtgatgctgtcaaccagtgttttaagtatcaagtggacaataagagggaaaccaaaatctgtgttaggaggagatctgataattagagttacttccaaatttactcttaaccaaattagtggccaagtcattgagcatgaagaattctgggacttatcagcttcatctgctagtgctcaggcatttttctggacatcacgtgctctctttgctgctgttgaatctgtcaaagatttgggtgacagtgctaagaatttgagtagtaaaatgtcaaccaaaaaagagaacttggagatgtatccagatccttcaggtgatccaaccaagttcttccagagggacgacagttttcaacaggatgcataccagattgcactactcctggcagttatttatttggtggtacaatttctaaggacaactttgtaaagctagcctgccattttatcaactgaacttgtatgtctttgttctccaagagttatcattataaagtgtgactatcagctcataatcatcaggtgtcatcaggttgttttgtcaaagtaaatatgttcacatttgtaagtgtacctataaactgtgacgtttccttcttttgatgccacaacctcaaaggaccattagattattatggtattaaacaagctaacaaatattcaggaatcaagatgtgtgtgatagtttgcttaataaagataagttttacttcttgctggtgaaagtcaaaacaactcaagatgagatgacaacaaaaaaatagggagaaaatcacttaagttttacaattatcatttttttcatcagtaattaatatatgattacgctattttaaaatgtgattacatatacaaaattcatgttttccttttaagagggtgataatgatttactaagcaaaaaaaatatggaaat

SEQ ID NO: 135106 - DNA, 262 bp, Glycine max
  unsure (1)..(262): unsure at all n locations
  Clone ID: PAT_MRT3847_93009C.1
angaaacnttgtggtgtgatgtncagagatagatngccggtacctacgnnnaccaccagcgtcacgtgctacanctggttatgtcgttccggaaaatcaccgcccaggtcacaaacaccaccacatcctccatcanagccatngcttcancatcggagcaggaattcgttgcncacgaccgcgctcagcttaattcgcgtcnccagatcncaccncntnggggncgctaaagtgcctctngngtctggataatntngcngtc

SEQ ID NO: 135107 - DNA, 193 bp, Glycine max
  unsure (1)..(193): unsure at all n locations
  Clone ID: PAT_MRT3847_9300C.1
ggggggggggtggttttttttaaacacaaccatcgggggcggggatgtattattcgtagnagatagaagatagggagagctcaagtttttatagtaacatgggcagatacattccacgctcacgaagaggtcttaccggatacatttacctagttatttggggggggagccctaaaattgaaggaaaaggacc

SEQ ID NO: 135108 - DNA, 826 bp, Glycine max
  Clone ID: PAT_MRT3847_93010C.1
ccacgcgtccggaatagagtagcactactatcagagcaccctgctatggcgaacactagcaatgacgctggcgtcaaagccctacggcggctgaaagcgacggaaccaccatcatttcttgcttcgaaccctgcgctgtcggatgttgctcgtacagcatcacaatatttgttctcttcccaaaatccgttttccccaaaatcaccaggaagatgacgaagaagaaagtgataagaattggtctcggtattgcacaaacatggacacaatcttcctcccatggtgtttcctacattacaacagcaacattgatcccgaatcttcatcttttttagaaacaaaagagagaaagaattcattattactattagaggctttgaaaagctcttatttttcttgattccaccacttcagtcagggagctagcccgcatggattattacttttggcgaattaatctgaaccatatatactctacagtagaacaaggctgaaattgggtgcattaaaaggataaactctaattccagtacccaatgaagcaaagggtatctaagtacatagtcatgtggatgagatgcacactgtgcaggatctgtgcagcttcttgattactgcactgtcacattcaaagcataattgtgtaactaccaattacactagcataacttctaagaaatttttttgatgaaaaaaccactactaccactttactttgaccacctaattttgttgactccttaagttgcacctgtgccagaactttttaaagatgctaattttaatgttatgtagaacataatatgacttacataagtgataaaga

SEQ ID NO: 135109 - DNA, 475 bp, Glycine max
  Clone ID: PAT_MRT3847_93011C.1
tattacggggtctagccagcgctgtgagtattcaggctgtttatgtcgtggggagtgcccgcgtttgttttgccccctaagaattgcatgcgcttagtcagctgtgcgagcactgaggccgtctactttgccccttaaaacgcttctgttaccattattgtggtacggaggtctgtatgtcttgttttccctgaaagagtcttgtatttggttaactgtaggaatcaataaacctaaggtgtatatagtatgcgtctcaaatcctttaaccgtccaattatgctcctgccctccatctcataaagacctctcataaccttataccaccccccccttagctacccattttatttcgtaactgcatgtagaaatttgttaacgcgattttacgttttgatgaattggagtgctggagtcagaataggggtcgtgttacctaatcgtcgttgaaattaccgcagggtggtgcgttctt

SEQ ID NO: 135110 - DNA, 305 bp, Glycine max
  Clone ID: PAT_MRT3847_93012C.1
cttagactggtgctgttcagaaaattcgagaaatgatgcactaaaacttggcagacaaaaatctgagacgggatatgctccaacgggggaaacagctagaactgaagcaagaaaggatgttacaaagaagtcaaacagggatgagaaaatattggacgaaaaagaagacagaacgagctgggattgccctgaagtgcagtaagtatgacatgataccagcgccaacagggcctgactgtaaatgttgcagctgctggacattggtccgcagatgctggtctcactgtggagatggcaacaggggg

SEQ ID NO: 135111 - DNA, 237 bp, Glycine max
  Clone ID: PAT_MRT3847_93013C.1
taattttatttttaaaaagtttctactatcaactatgcccagggggctttggggtgtctatgaccaagaaaataacatatagcaatgtgggtgcagaactttattagcacttcttataaacaagggggaagagcaccatataacagtgtccttaggactcttgccataattccaagtgcaacaactattattttgtagtctttcacactttttattcttgcacccttagcttattta

SEQ ID NO: 135112 - DNA, 333 bp, Glycine max
  Clone ID: PAT_MRT3847_93014C.1
gcatttcggattttccgcgatcacaggttgccggacgtcaaaaccggaaacaaaagccatcgtgccttgattgcaagaatctctcaaattcttgctacttactagtgctcgatggcttaagggaaagaagatgacatcttgtgctgtgtacaggctaccgagaatcgataatcttttgcactcttaagctatgtgctgaacactctcctatatgatatacgatatacgagtcagatttaagcttcaaatgtttcttgatcagatctcagtgcaatggcaaagttcaagctggtgaaatcttggattagggcttccagtttcctatctggtata

SEQ ID NO: 135113 - DNA, 649 bp, Glycine max
  Clone ID: PAT_MRT3847_93015C.1
tccggtccggaattccggtcgccacgcgtccgataacgacggtcgaataaaaaaggaaaagaagcgaggcaagtggtgtgttgagttaaacgacagacagcgacagtagtgtagcagacacgataaaaataaaagggtaaccaaccccagaaacctattcatctactctctttagctgcccttgttcctccaaaattctatgtggtgttgcagatggtgatgattactgcttggatcactgaccttttcacttgtatggggtgagtccctccattcccaatatttcttcttttttattcttagatacttagctagatacacaagtatttgcaatcattttgcttgctttgattcaattcaatgaatggctttccgttttgggcaatatggtagtttgggtaaatagtggttggtgtcagttggcttcaattaggggttgattcgcctaaacctttcaattgttcactgaaagggcttgaagattgggatttgggattaaagttttcgtcttgagaagtaaagttaggtgtttagtgttgactactcaaagcaatgcaattagtgtagtaatttgacactggccttggttgttttcatccttgttggggtctgctgtaaggtggtccctcggtcatggctatttgatcgt

SEQ ID NO: 135114 - DNA, 157 bp, Glycine max
  Clone ID: PAT_MRT3847_93016C.1
accagtccccaattccccattcgccgcacgcgtccgtccacccttccggtcggttaagacaacagacggctgaagaggatcttgacctcaccgtcggggatctgggggtcccaccaaacaggtctgctatactagtgtatcccctgaaggcccatgt

SEQ ID NO: 135115 - DNA, 597 bp, Glycine max
  Clone ID: PAT_MRT3847_93017C.1
gatttgccgtgctacatgtgtggagtgccgccttcttgggggggggggggggacgcggcgttaaaggatgcccaaaattacaagggataaacctgcaacagcctgggttgcaagtgcaacggctgggtaagcaacctgggatgggacgaagagtgcaaggttgagttgtacaacgcgggctgggcggggttaatacgggaaagcaattgggggcggtaaaggctgggctaatagcacgggtagtgccacgccatgtatccaaggtatttaatgttaacgttcaaactgtgtgggcaacccacagattgtctttaggacggataccccaggtagtaaaattaaggtcaggcggcgttggaccgcagcggtttaacgcgcatgcgcgatgggcgtccttggttgggaagggattaattagggtattggcgggggccgaagaacaagttagccagacgcatgcgggatggctaggatgattagtttgccaaggttgccccatggggggtgtaagcctagcaagagtggtaggtaaccaagtgtgatgacagggagtgcgtgctatacaacagctggtatcgcgagcaaacgttgggttgc

SEQ ID NO: 135116 - DNA, 260 bp, Glycine max
  Clone ID: PAT_MRT3847_93018C.1
aattagtacatgtttgataatcccaggaagttaaaaaatgtagattataatttgctttaagcttttactcagtcaagttttttgtttactacatcaaagggtcagaaaaaaaaatctgctgatttggttttgatgtcaaggagtgatgctcaagaggttaaggctagataatcctgtgtgagcaggaaaactgcacacagctgttggttaattgctcaatcctcaacagtattggtctgaactattgaatcttaagttat

SEQ ID NO: 135117 - DNA, 390 bp, Glycine max
  Clone ID: PAT_MRT3847_93019C.1
gtatctgtgtatattgggaatttttcttttttttttttttgatttgtttattttggggaagggaaaaaaaaaccaaagtttaaggggtgggggcaaaaaaaaaatcctccataaaagggggaaaccaaggggggggctccaatggggggaaaaacccctttggacggagaaatgttttggaaaaaaaaaatttgacactaaaaagcccgaccattttgggaaagttaacccccccttgaaaaaagtccgggggcgggggccccatttttgggccacccccccccccaagggggaaaagggaaaccaacaggttttcgtgaggggggaatgaggggagagcaatgtttatccattcaggggcaaaaactttttatttgaacgaaggggggg

SEQ ID NO: 135118 - DNA, 1493 bp, Glycine max
  Clone ID: PAT_MRT3847_9301C.1
ccacgcgtccgtcccacgagaacactcgatccagcacataacaatggaaacgcagctttacgtgttttctctctagattctgctcttaaacgccgtcgttttcaaactctttttttccccttcgcttctctgtctttgtaaccgaaaggggggaaaatataattaacaccgatttcgcgaccaattcttcttctgcgttgaattgggacaacgagaaattggatctcagtttttggcaggaaataaaaattgcatttgagtgtaaaataacagagtatagtgtagggccttgttcttgatactgtgctaaatttgttggatggcggagaaatcatgcatcaagcgccttcagaaggaatatagagccctttgtaaagagccagtttctcatgttgtggctcgtccttctccaagtgatattcttgagtggcattatgtgttggagggaagtgaaggaacaccttttgcaggtggatattactatggaaaaatcaagtttcctcctgaatatccatataaacctcctggaatcagcatgactacacctaatggacggttcatgacacagaaaaagatctgttttgtctatgagtgacttcatccagaaagttggaatcccatgtggtctgtatcaagcatattaacagggcttctttcattcatgatggacaacagtccaaccactggcagtgtaaacaccaccactgctgagaagcagcgtctagcaaaatcttccctttctttcaactgtaagaatgctacattcaggaagatcttccctgagtatgtggagaagtacaaccagcaacagctttctgagcaggctgctccagagagggtctcattggatacgtctcccgacaagagttcaaggccagttttggaaaagaaattagaatccaatggagaagacatgaaaagagtagatgggttgaaggaagtgaggaagaacagaaaaccattcccaacgtggatgatgctattactcttctccatctttggggttgtaatggcattaccactgcttcagctgtgatgataggcaaagaaatcttcataggagggtataaggggtccagaaagtgttctcctggaactggtactatatgttctgctaaggttgtcatgtctaacagaatttgtatagggaaatgaaatgatgaacatggaggctgcgttttactatgggctgaatttactcctttgtgtctatgttgccagcttcttggtggtgaatgttaagaagttacatgcttgatacttttgactttcttctaaatgtttttgaggtttgtcttgtggtgttggtcaccctgcacgtgctgcttgggtacattatgctttttagaatgggtaaattatatccgataaaaccataaacgtaattcgcagtcaagttttgatccctttagtggcagtgtgtataaagactgaaaagttaagaatggaatatgctactttctatgaagaaatatatggtacttggatttctc

SEQ ID NO: 135119 - DNA, 112 bp, Glycine max
  Clone ID: PAT_MRT3847_93020C.1
cttcagttgtggagtgataattactgagtattactttacttgtacttggtgttctgaattaagaattgagaagggaaatgatgaaatcaacaaatcatgaggtgaccttaaa

SEQ ID NO: 135120 - DNA, 321 bp, Glycine max
  Clone ID: PAT_MRT3847_93021C.1
gcaaatgccatttttgggacatcactctctagcaactttttacaggggcaaaagaacatttggcccccccgtgtcttctaagggtaccatggaggaagctgcatccacctgattaccaagctacttctgttattttgatgaggcaaggactaacatgctgtacccggttacgcttatatgctaattctctttgtggcaaaaataacaggagaaccccttttcacagatttggcacactctgtaaacaccaatggcttcggtcaggcacaaatggctattcaccccaatgccccactgacccatcacttttagattccacca

SEQ ID NO: 135121 - DNA, 311 bp, Glycine max
  Clone ID: PAT_MRT3847_93022C.1
ctgctcaagacgatttctggcccctcgaccaaaacttcaccacggtagaccgaccagggtccaagtctctttgagtctaccgagactcagctttcagtcacgtcaagtcagactggacagctcaacatcaccatgtcattgatcagttacttcagcgcggtcctgcccggtctttctgagcacgtaaattgcggctttgcctatcaccctctgctttcgccgcagcttggagagaaatccgttgacatggcgtgatgatactccttaccactaacgcggccagatctacacatctatagctcacctacagc

SEQ ID NO: 135122 - DNA, 2559 bp, Glycine max
  Clone ID: PAT_MRT3847_93023C.1
gcttcagtcatgtctctctctgcattctcattccctctccatctgagacaaacaacaccaccttctgatcctaaaacatcatcaacccctttgcctttgtcttctcactcccattggggtgcagatctgctcacacaatcccaacgcaaactcaaccaggtgaaaagaaggccacatggggtatgtgcatcactatcagaaatgggggagtattattctcagaaacctcctactccactgttggacaccataaactatccaattcacatgaagaatttggctaccaagaaactgaaacaacttgcggatgagctgcgttctgatgttattttccatgtttctagaactgggggtcatttgggatctagccttggtgttgtagaactcactattgcccttcactatgttttcaatgctcctaaggacaaaattttgtgggatgttggtcatcagtcttatcctcataagatactcactggtagaagggataagatgcataccatgaggcagacagatggattggccgggtttacaaaacgatctgagagtgattatgattgttttggcactggtcacagctccacaacaatatcagcaggactgggaatggctgttgggagggatctgaagggagacaagaataatgtagttgctgttatcggtgatggtgctatgacggctggtcaagcttatgaagccatgaacaacgctggatatcttgattccgacatgattgttattctaaatgacaacaagcaggtctccctaccaactgctaatctcgatggtcccataccacctgtaggtgctttgagtagtgctctcagtaagttacaatcaaacagacctcttagagaactcagagaggttgctaagggagtcactaaacaaattggtggcccaatgcatgagttagctgcaaaagttgatgaatatgcgcgtggcatgatcagcggttctggatcaacactatttgaagagcttggactttactacataggtcctgttgatggtcataatatagatgatcttgtgtccattctaaatgaagttaaaagtactaaaacaactggtcctgtgctgctccatgttgtcactgaaaaaggccatggatatccatatgcagaaagagcagcagacaagtaccatggagttactaagtttgatccagcaactggaaaacaattcaaatccaatgctgccacccagtcatacacaacatactttgcagaggctttaattgctgaagcggaagctgacaaagacattgtcggaatccatgctgcaatgggaggtggaactggcatgaatctcttccttcgccgtttcccaacaagatgctttgatgtggggatagcagaacagcatgctgttacatttgcggctggtctggcttgtgaaggccttaagcctttttgtgcaatttactcatcatttatgcagagagcttatgaccaggtggtgcatgatgtcgatttgcagaagctgcctgtaagattcgcaatggaccgagccggattagttggagcagatggtcccacacactgcggtgcatttgatgtcacttttatggcatgcctccctaacatggtggtgatggctccttctgatgaagcagagctttttcacatggttgcaactgcagctgccattgatgatcgacccagttgtttccgatacccgaggggaaatggtattggtgttgagctaccactagggaataaaggcattcctcttgagattgggaagggtaggatactaattgaaggagaaagagtggccttgttgggctatggatcagctgttcagagctgtctggctgctgcttccttgttggaacatcatggcttgcgcgcaacagtggcggatgcacgtttctgcaagccattggaccgttcccttattcgcagccttgcccaatcgcacgaggttttgatcactgtggaagaagggtcaataggaggattcggatctcatgttgttcagttcatggcccttgatggccttcttgatgggaaattaaagtggaggccaattgttcttcctgattgttacattgaccatggatcaccggttgaccaattgagtgcagctggtcttacaccatctcacatagcagcaacagttttcaatctacttggacaaacaagagaggcactagaggtcatgacataaaacaaatgcaaaggggttcaatttttgttccctgcaatgtacaaagtagcgtgattcacccagtgtaatacaaatgtgtttgttaaaaaataatagaaatggaaaatgcagattgacaaataatagtgccaacaaatggttaaacgaataaacaaacacaattggtagtgtatcttcatattttgatatgacggggaaaagatttagctgaaggcatgacagaaacgaatttttagctatgagaggactcttgaatgtgaatgtcgaagatgacgttggtatgccattacatcttagtcattgaaaatgtccctaagaggtccacctaaacatttgcattacgttctagtggaaaaagtaaagtccaaaaaaattattatcctc

SEQ ID NO: 135123 - DNA, 257 bp, Glycine max
  Clone ID: PAT_MRT3847_93024C.1
cccacgcgtccgctccgaaggattcaagttcagatggattcaatgtgccctccccaaaaggacatgactatgttaatgatacactcttttttagtattttttaattcttttgcgacgaagcgtaagttagctttttatattccgtcatccacaggacaaatttcgatgtattagtatattgatactatacttatacgataagcgtggtaaattccaatttaccagcgaacataatatttctagcaaatgatataaat

SEQ ID NO: 135124 - DNA, 236 bp, Glycine max
  Clone ID: PAT_MRT3847_93025C.1
aacaaactgaaaccaaaggccaaatcatgaagggtggtggtgaggaacaaggaagaagaagagaagaaaataaacaatccaacctagaagagatctctaagtacagtgaagtcaacagaaaacaatgaaagcaattgaaggtgctaaggagagatacgagagagcacaacaagaagcaagtgaagcatccaaagagagaaatggtcaggcaaatgagggggctgaagaaggcagaa

SEQ ID NO: 135125 - DNA, 375 bp, Glycine max
  Clone ID: PAT_MRT3847_93026C.1
ggggggggggggggtttttaaaaaaaaaaaaggggatataccaaatgtcaatctaataatccaagttgaatttggtcccccaaattaaaattcccaaaatttttgccttatttagtttcatgaaattttttaaaaattattcaaaaatcccaaatgaattttttaactggggaggctttaattataatacagctccccccctttaatggggtcttgtttttttggattcaccggatggggggggtattgtttttataaaaaaacaaaaatttttcccccaagggtattccggggttcctcggaattttaataatttttcccccccattttttggggccccactttttttttcctttttttgggggggccccaaaa

SEQ ID NO: 135126 - DNA, 178 bp, Glycine max
  Clone ID: PAT_MRT3847_93027C.1
aggtattactataaccttctttattacaaaactaaacgtacacctgagatgattgaagatggaaattttaaggttaaagtcaagcatttgcaaaataaaagaaaaacttaattgcaaaaccaaaacagagaatatactggagtggaatgcttgctggcatgaatagcccgtgcttaac

SEQ ID NO: 135127 - DNA, 240 bp, Glycine max
  Clone ID: PAT_MRT3847_93028C.1
tgttcgcgtcagaaaggtttcacaggttcctgtgttagaaaccattgccgaagaggctgaagaatgtgaccaagagtttagtcctcactagctagctattgttggtgaatatattacatatatatcgttgttgttcactttaatttgttgtgtagaatcatgaagtttcacaatcgattgaaagtttttgttgtcgattcgtggtaattaatgaagcttttgtatgttgattgcctagct

SEQ ID NO: 135128 - DNA, 1171 bp, Glycine max
  Clone ID: PAT_MRT3847_93029C.1
cttcccttcccttctcttccctctcacactagggtttacctctcttacacttgacacctcccccttccacactctacacattgccatttgaacactatttgggaattagtgggtcagggagtttaaagaagtgatcttttcgttttcctttgtatccctaggctttgggagattataatatgcagacaccaaaagcaagagtcggtatgtcagaagtgccccaaaagaaatctcctgcaacccctcgaactgcccatcagttgaagacaccaaactctgatgcagactctgtctcctctccaaatgctgcaaaaaagacttcaaaagatagaagtccaaagatcattgaacgcaggtcacctcatagtccaatatctgagaaaaaacgacctagtaaggtccaggaattggaatctcagattgctcggcttcaagaagatctgaagaatgctaaggatcaacttaactcatctgagtcatggaagagaaaagctcaacaggaggctgaagaggcaaagaagcaacttgtagacatgatgaaagagcttgaggaatcccatcaacagcttttggacttttcggcttctgaagaagtgaggcttcaagagctccgcaaaatttctcaggatcgagatcgagaatggcaatctgaaatacaggctgtccaaaagcaacaggcaatggattcggctgccttggcatctgccatgaatgaaatacagaaattgaaaattcaacttgaaagagtatgtgagtctgaagctactcagatcaacagtgcagaatcagctcatgctgagattcaggaattgaagatggagcttgataaaactctctttttggtagaaaagctaaaaagtgagctaagtgattacaaagaatccgaatccagggtcatggaagtagttggtaaaatgcaaatgcaattggaaacagcaaatcagactgtggaaacacttaggtcagatggcatgaaagcagcagaagcttacaaatctttggctttagagttggagcaatcaagaactcaagcaaaatcattggaagcacttgtgagtaaacttcaggctgatttgcttagcagtgcaaacaaaagtatatcaggttcaactcccaccaatgaaaatggaccttctcaggaaaatgaagaaaatgaggaaataaaccagct

SEQ ID NO: 135129 - DNA, 356 bp, Glycine max
  Clone ID: PAT_MRT3847_9302C.1
gggggggaaagggggaaacaaaagccggttttaaggtaaaaggaatttccacatggggacggggaaaaaaaatttccggttaatttcagggggcttttaaaaaaaaggggggggcctaaaacccaccacggtaagttttaaaaagttttggggggcaaaaggaaaactagcttcaaaaaaaggggatttccccaaggcaaaaaatttgggggggggaaattttggttttttttttttggggcatttgaacaaacgttggggcaaagcccccagggtcaaaaatagggccccccccaaaatcattaggccctttggggggaacaatctttcccggggtttttccaaaaaaggggaaa

SEQ ID NO: 135130 - DNA, 402 bp, Glycine max
  Clone ID: PAT_MRT3847_93030C.1
agcggaggcctagggtttaagcgacgagagcgaaaataccccaaatcctccctttgaattcgaagccacccacttctgatttcgatttcgtgccgattattatagttaacaatggctttccaacacgaaaacgggtcgaatattgacccgaatcctattggggtggagacagcaatggcttcccagcacgaaaatgggtcggaaattgacccgaaccctactggggtggagacatcaatgtcttcccttcacgaaaacgggtcggaaattgatcagaaccttattggggcggaggcacatgaagcggaggctgaaaagtttggaactttgggttgtgctggtcctattgaggaaggcttggagaagatcactttggtgggttactttctttcagttgaggag

SEQ ID NO: 135131 - DNA, 594 bp, Glycine max
  Clone ID: PAT_MRT3847_93031C.1
ccacaaaaaataaagctttattgccacataatatacataaccggataaactaccaacgataataaatgagcgccataagcaattggatttccactacaagtgcggccaatcaatcatataaccatatgtccactgacaatgtgtgactcacttgcgatacagaacttcatcattgagcttcataggaaattgtctcactaaacttaatgcgaaggatacgggtatgagtatcagaccgagcatgaagaactggacttcattcactataagacaggctcatgtctgcacttctacatattctttatctggataagcacatgatgaccttgtgcattacgcccaaaggatcaatgcgttatgagccaaagtccgctcccattgaccttcacttccaatggcttggccttgctctcgacacaagtgccaacataattgtccaactctgcataatgagtctgaccacgacccttgtgttgttcacagtcagtaacaccctaaagaggacctccatcccacgctacgcaagcattaaccaactgaaccatgacagaactggtaatacagagagcacatctgatacaaaagtcacagaca

SEQ ID NO: 135132 - DNA, 489 bp, Glycine max
  Clone ID: PAT_MRT3847_93032C.1
gggggttataaatggagtctgtctatttacccaactgggaacacaaaaggaggtggtgaaggtcatgtttctatttatttggtgctcatggactcaagttcgttacctgttgattgggaggtcaatgccattgtaaatttttctgcatataattttattgacgatgagtatgttgcaactcaagatacaaatgttttgcgtttccatgtgctgaaaactgaatggggtgtcgcaaaattcattgacatagacacatttaacgacccttcaaatggatatctgatggacgatacctgcgtgtttggagctgaggttttcgttgtcaagaccacgactaaaggcgattgtttatcaatgattcatggtcctatccctctttcccatagttggaaatttgataacttttccttggcaaaattagacaagtaccagtctgaatcggttgtcggtggaaactatagatggaaccttatcttataccctaatgga

SEQ ID NO: 135133 - DNA, 821 bp, Glycine max
  Clone ID: PAT_MRT3847_93033C.1
acaaacgactgattgataaatttattgtcagagtaaataaactttagagtaaataagcttagacttgggtctcaagagatgacatcaaactatgtaacaaaaggtgcttaagtggagcatctccaggaatacaacagatcaaaaaaaccaaaatctcccatgtcatttctataataccaaatgtatgtggagggcattacctcctctcaaactcagattcttgacaatgtggatctaaccagtccttgggagattcctttgcattgttgacacttaattttcccccacccacaagctccctcaggttatccaccttattctccctacccgtcccactaattctcttgtcagcttctttcagcttttgcttgaacttctgcttccggttagatgaatttagctcttgctgctttgctagtgaaggatgcgctccatgcggacccaaatagatgttttcatccttcttagcctttgatgcagaatcagaagattctatatcaagaacatgaggtttatcttgatctgagtcttcaattcccaaacttggaatcacaaatccttcagtgtcccactcgtcgtcttcttgttgttcaatatgatgagagggatccatcctaacaatcatggatttgaacgtatagtggacaataaagccgattgaagagatagcagcaaaatttcaccaacacaaatctcgatggaataaaacacaaaaaatcaatcaaattagagaaagatactttctcgtggtggaaattgagagggcaattaaaccctaactctagggtttctctgtgcacgatcaaagcaaacaaacgtgc

SEQ ID NO: 135134 - DNA, 199 bp, Glycine max
  Clone ID: PAT_MRT3847_93034C.1
actcttgatcaccataaccatgtcaatcgcaacaacatcccctcacaccgccctcttcccaaaccgcaccaaccctttcactctctcctcctctcaaacccacatccatcaaatgctccatccaactccatacccaagccccgcacctcacccactcccaagatcgcgtcttcaacttcgccgctggtcccgcaacctc

SEQ ID NO: 135135 - DNA, 318 bp, Glycine max
  Clone ID: PAT_MRT3847_93035C.1
cgcatatagcagagattgaaaagatttaaagagctcagtacacaaaatggattcttagattacatagtgtacgtgagcggaattgactaataaatagttcgagtatgtgtgatgagtggaagggtgacctgacaaagttcagagagagagattatatggttggatatagcctattttttatagtcagatagtgttcagatgaagaacatgtttataagaaagaggctcactaagatattatggctgctcagagagacactcatgaaaccatctctgaggcaaaagtgtgcttgcttatggatagatttgtgccatgct

SEQ ID NO: 135136 - DNA, 431 bp, Glycine max
  Clone ID: PAT_MRT3847_93036C.1
gggtgttttcttcaacattacagttacttttattttaagttgttaatgtttatctatatacacacaaatgggaaagacatgagggagagaaatcaagagggtggtaccaaaatgaaattaaggaaatatttaatttatgatttaagagaaattaagaagttacaaggccatatatatatatatatatggaaatatttaatatagctatctagccatagcttgagttatggaatgtcgttactaccattaccaccaccactcactactgatcttggcgaggatgagtcgaccacaaagaacttaaggctctgtgacaatggaaggactcaaaaatggtcaccaaacacattgcacattggtgtgttgttagaaattggtgcacacggggaattgtctggggcctgaggttattagcctgtcttacaaagctt

SEQ ID NO: 135137 - DNA, 341 bp, Glycine max
  Clone ID: PAT_MRT3847_93037C.1
atgatggaacatacatttttttcgccaaaccaacaaagcatcctcaaagacacgggggcgtgatcttatacatacggtaaggggggtaaacaaaatcatagcccattctatataaaactcattaataccttaactccaggacctgaaagacaacctaccctacaatcattaaacaccctaatctataccacctatgcccaaattgatatagatctatataaaaaaccaggtggaagaggaataacagacacgtgcataaaataaacatgcaccctccacaattgtatgcccaagccccaagcttatatttgaagatgtttatccaacaactccagatccta

SEQ ID NO: 135138 - DNA, 842 bp, Glycine max
  Clone ID: PAT_MRT3847_93038C.1
acaacaaaacattatggcattatttaatccatgtaaacaacctcacccagtgagaaaaggattggttgcttgaccaagtgcattgtcatgcaaattaatgaatatagaaactgagggtgttaaccggaaaattgatgtccagttgcaagtgaacaacatactgaaagggtagtttaaaattaggaattcattcatagaaaaacagcaatacaaaaatttatgaagagcacaaacactcctagttcacccccataaataagtagtcaatgtatgttctcatgatcctttatcactttgcggctgcttcagcaggagtgcttgtagtcatctgatcaacagcatgaactacagtctgaagttcctcccatatagctttataaaccatcctttgcctattaacggctgattgtccctcaaaggcagaagctaccacatcaatgctaacatgccgaccatcaccataagcatccttgacggagaccgattctgcattgagttgttcctttatcttgttctgcatggactgtataagaggagagtcgatagagccagcatcgttgagatgggtggcgcgtgaattaaaattacgaagagaagtagtagagaaaaacgtgacggatctaagaaattgagtattgtgagaatgagatgtggaggcaggggagctgaagaggaatgctcgagagagaatggatttgtagggtttgaccaaaactggaacagcttgtcgcagtaaggaagggttggctgagagagaccgcattctcgaaacaaatggatagcccaaccctccccttctgtcgtcttctcgcagccgtacggacgcgtgggcggacgcgtgg

SEQ ID NO: 135139 - DNA, 551 bp, Glycine max
  Clone ID: PAT_MRT3847_93039C.1
caatctcacctagtgagaaaaagattggttgttgttgttgtatgcttatacaaatgggagcgtcacaacaattagataaattatagcattttataatgtctacaataacaatttttcactattaaaacatcgattatctctttttatttaagatttgtgttttatgttaatcttatactaatttacataatatcattattatagctttgttgtgtcttataaattttaaaatttgtcatatatacctgtgtttgtgttgaatcatatgttctatatcgtattcatgaccattaaacacattgggacagaaaatcgttggtgcttgattcccattttgaggtcacggggtgagcgtgtggtgttcactaattgttagcgcaacactgataaaactagcatttgcaatttgtttttatcttctcgatttcagctataccattgaccatgaatcatctgtttgcaaaatttctttagaattagatacctgcctaacagatatcctaaactatgtatctatttattgtttgatttggatttgagtttgcagattg

SEQ ID NO: 135140 - DNA, 439 bp, Glycine max
  Clone ID: PAT_MRT3847_9303C.1
agcccactgatatcacagactttacacaacagatcatcattcatggctgacatgggggcaactgtttgcacggctatctcatccccatcctcggttaacaaggacgctactctgagcccagctcccacagaattgttaacggagagcatgatgaagaccgttaccgatcaagtgttctcaggcagacaaagctactgtccaaacggagacatcgacgcggtcccatactctagcgagattgagtactacctaactggcgagaacgccggatactacggttgagacactgctgatcttagcgaacacccagacacctgaacacagaaccgcgatctcgaactgattcactccacttcatccgatgtcggaacctagtactgtgtcatgaactagtaccagtcccttaacgctgtgctgctcgaagactccggcagcatca

SEQ ID NO: 135141 - DNA, 252 bp, Glycine max
  Clone ID: PAT_MRT3847_93040C.1
gttctagatcgcgagccgcgcccctttcctttttttttccctcctttttcgggttcggttactcagcactagagttacaaatgcattaggtggtggaagtccacaattggcacaagtgtctgtttctgctgctatgactcttgcagcatccggggccattctggtgagcccaatcatatttgcttgcaggcaggttgaaggttatgcatttagcaatgagctggacgtggtggattatttcacagaaatggt

SEQ ID NO: 135142 - DNA, 513 bp, Glycine max
  Clone ID: PAT_MRT3847_93041C.1
acctatacatatgattttttttttctcaagtgcggggatgaacataataattcctccacacaagaagcaataaaaaataatgcatcccttttgcctgctacttgttatttttaatggtaaaaattagttccaatacatgtgtttttctcttttccctaaattgagggcatcaattgtacactctcgttttcctcttttccctaatagagcttgattaaaaccaaattagtacattttacacacacacaaattccaaattaagaaaatgcaagctgaattaagcaatatggccggccaaagtaagaatcttgacatggttgttctgcctgagttcatgaggcactggcccaaaaactctagtcccaatgggttggccttgcttgtcatcaaacttgacctcactttcatcacaccctccccctttgcatgtgcctccttcactgatgctattattgtgtcaccttcttccctttcaatgcttgaatgcacgttacttttttctcccccgagtta

SEQ ID NO: 135143 - DNA, 2706 bp, Glycine max
  Clone ID: PAT_MRT3847_93043C.1
agttcggcgtccaggcgctgtctcagggtggggaggcgcgcagtcccagagtttcccatgcctgggttcctcaccctcgtgtccgcatgttgagcacttgcatccaactttcttgaaaaaccaattcggctcgaagcaatactatcttattttcctttttcttaatttattcttcgtcaggatttctctgttatctctcagttctccaactcccaaattcttcccagtttgcttcaattgtttgttctagggttagggttttcgatccatttccccctcaaatttcaattattaacaagtgcagagcctgattttcctcccgtcgtgctttgaggaggccatgggaggtgacgccactgccgccgctgagagtgcgaccgcggagtcgaacgccgcaaatggagtcaacatcaacattcgctgctccaatggttccaagttttccgttcagattggccttgattccaccatcagatccttcaaggacgcggttgcacacaactgtgacatatccgctgatcaacagcgcctgatttacaagggccggattctcaaggatgatcaaaccctccaaagctatggtttggaggctgatcacactgtccatttggttcgtggttttgctccatctaacactactggtggaactaatagtggtggtggcggcaataccacaactgctaacacgagaggggctggtgctaatgagcggtgggggtttaggagggccgaggattttggagcttcactgtttcctggacttggtggtaacaatgggatgaaggggtcatttcaattcctaatttggtcaaataagagcaggcttttccggatcttgaacaaatgcagcaaccactttttgtcaaatcccaatttaatgagagatataatgaacacacctgccatgcagaatttaataaataatcctgacatagtgcggaatcttataatgaataacccgcacatgcaagaactaatggatcggaaccccgagctggcacacatactaaatgatcccagcactcttcgtaagacacatgaagctacaaggaaccctgagatcatgcgcgaaatgatgagaaatacagatagagcaatgagcaacattgaatcttcgcctgaaagattcaacatgctgaggcgcatgtttgaaagtcttcaagaagcgatttaaaaggccactccaaaaatccctcccccactagatgttaagcaactactggtgctcccttacacaaaactatccaaccactaatactgaagctactctccctgtacccaatacgaacccaatacctcatccttggtcctctactggaactggaggaggccagaataacaccagaaggtcaactactactggtggggaagctcgacagtcaacacccactggtctaggagggcttggactgccagatcttgaaagcatgttgggtgggactgggatgccagatcctgctttattgacccagttaatgcaaaacccagctatttcacaaatgatgcaaagtatactttccaacccacaaacattgaatcagattcttggggtcaataatgagcagcgtggcatgcctgatttaaattctcttagggaggtgatgcaaaatccagaattccttcgtcttgttttcctcacccgagacactgcagcaactcttgtcttttcagcaagctcttatgtctcagcttggtcagcaacaatcaacacaggaaccaggtcaaacaggtggaggcactggaccgatgaacaacttggggctggagatgttatcaagcatgtttggtggactcggagctggtagcctggctgttcctaacagatcaaatgagccgccggagcaattgtatgccacccaactttctcagcttcaggagatggggttctttgacacgcaagagaacataagggctcttattgctacatcagggaatgttcatgcagcagttgagcggcttttggggaactccggacagtagcaggtggtaagaagggacacaagactagcaattaaatcccaaacactagaatctggtgtgagatatttgtccatttagctttgattttcatcatggaattatgttcaaacaaatctattgatttttttttcatttacatgatatccagagtttagtattatatccaatactcagatgtccaatgattaattataccttcagctacaagaaagtacaaagccttttgtaccatatatatgtaattctaacttgcctgtttgcaaggattgggttcacagatacattcaaagaaggggtttatattggaacatgaatttagacatatgattatgaactacaatgttggcaagttctcttctgtcgatttccaaggttggtcactatgaaatcagtggtgtttaagtgccttgttgaatattaaataaaatcagaaatctgtccaaattatagtggccagagctgaaatggtgtaggttatatacattggactgtgattgtttcttctaatggtccacttttcttcatgtacatacttaaattgaaactagttttagacgcagcagatcttaaatatttcaaatgaattgatttttgtgcttttttgtttctattattaatgcttaataaccccacaattactgatttggcatgtgggaagggccctgagactatttgttaaatataaaatggtagaatgtgatgtgaactcccgtattgagtggtttt

SEQ ID NO: 135144 - DNA, 892 bp, Glycine max
  Clone ID: PAT_MRT3847_93044C.1
cacagaccatgaatcagattcttggggtcaataatgagcagcgtgtccggcctgatttaaattctctaagggaggtgatgcaaaacccagagtttctacgcctgttttcctcacctgagacactgcagcaactcttgtctttccagcaaactcttctgtctcagcttggtcagcaacaatcagcacaggaaccaggtcaaacaggtggaggcactggaccattgaacaacatggggctggagatgttatcaagcatgtttggtggacttggagctggtagcctggctgttcctaacagatcaaatgagccaccggagcaattgtatgccacccaactttctcagcttcaagagatggggttctttgacacgcaagagaacataagggctcttattgctacatcagggaacgtacatgcagcagttgagcggcttttggggaaccccggacagtagcaggtggtagggacacaagactagcaattaaatcccaaacactagaatctggtgtgagatatttgtccatttagctttgattttcgtcatggagttatgttcaaacaaatctattgatttttttttcattttacatgatatccagagtttagtattatatccaatgctcaaatatccaatgattaattataccttcagctacaagaaagtacaaagccttttgtaccatatacatgtaattctaacttgcctgtttgcaaggattgggttcatagatacattcaaaagaaggggttatattggaacatgaatttagatatataattatgaactttttgtttgtcactgtagttgttaatcttgttgtaaattccataacaatattaatgactcgtggcaaacaaatctttataaataaactttgggttaaacaaaaa

SEQ ID NO: 135145 - DNA, 687 bp, Glycine max
  unsure (1)..(687): unsure at all n locations
  Clone ID: PAT_MRT3847_93045C.1
gggatttaaattctcttagagaagtaatgcaaaatccagaattccttcgtttgttttcttcacctgagacggtgcagcaactcttgtctttccagcaagctcttatgtctcagcttggccagcaacaatcaacacgggaatctggtcaaactggcggaggcactggaccaatgaacaacttgggattggagatgttatcgagcatgtttggtggacttggagctggtagcctagcggttccaaatagatcaaatgagccgccagagcagctgtatgcctcccaactttcacagcttcaagagatgggattctttgacacacaagagaacattagagctcttatcgccacttcaggtaatgttcatgcagcagttgaacgactattggggaactctggtcagtagcagacaatgttggcaaattccttttggcaagttctcctctgtcgatttccaaggttagccactttgaaatcagtggtgtttaagtgccttgttggatattaaataaaatcagaaatctgtccaaattatagtggccagagctgaaatggtgtaggttatatatattggactgtgattgttccttctaatggtccaattttcttatgtacatacttatattgaaactagttttagacgcagcaggcgatcttaaatatttcaaatgaaaaaaaannnnnaaagg

SEQ ID NO: 135146 - DNA, 522 bp, Glycine max
  Clone ID: PAT_MRT3847_93046C.1
aaaaaaaacaaacaccccctttcatttatttttttttttggttcccaactatcaaaaaaaaccaccggggggaaacttgtttttttttaaaaaagaaaccccgcctccccttttattcgggttttcaacagggaaggggggcaaactaaattaaatttttttgggacccctttatcaaaaaggggaaacccaaagctccttttatcgttttttgcccccggcccaaaagggaagttaaacccttccttgggaagggggggcgtatcacggggggccaaaagggggcaacaaagggagaccaattttttgacttgaggccccgaagggacggggtttggaccaccttaacataatcaaaagggggccccccggcggggggggaatatgcctcccaaattttttttaaaaaatcttgcccccagggaggaaaggattgttcgaaagggccaaaacccctggggccccatgttactattattataggggccccgggggctgttacccgagctaactttccaacaa

SEQ ID NO: 135147 - DNA, 2273 bp, Glycine max
  Clone ID: PAT_MRT3847_93047C.1
gtgggtttaagaagcgtggctccttctctctttctctcagttctctcatttggagggttctctatttattttaatttttaattgtccgatttcacagccatagcataagcctagcaacacagtattttttttattttcttaattaattttccgtccggattcctgtgtgtcatctctcaattttccagttttcaatttctcccaaattctttcaattcttcctcaatctttctagggttagggtttcaattcctttctccctcaatttcaattatcaaggagtggtgaacatcaatctcctcccccgccgtgctttggacggacaacatgggaggtgatgacgctgccgctgagagtgccaccacagagcggaacgccgcaaacgaagtcaacatcaacatccgctgttccaatggttccaagatttccgctcagattggcctggattccaccgtcagatccttcaaggaggcgggtgctcacaattgtgatatatcctctgatcaacagcgcctgatttacaagggtcggatcctcaaggatgatcaacccctccaaagctacggtttggaggctgatcacacttgccatttggttcgtgggttttctccttctaacaccactggtgggactaataatggtggtggcggtggtggaaataccacaactgccaacacgagaggctctggtgctaatgagggtgggggtttaggagggccaggatttggagcttcaccgtttcctggacttggtggtaacaatgggatggggggcggtggcctcaatggcttatttggagcgggctttccggatcttgaacaaatgcagcaaccatttttgtcaaatcccaatttaatgagagatataatgaacacacctgctatgcagaatttaataaataatccagacatagtgcggaatcttataatgaataacccgcagatgcaagagctaatggataggaaccctgagctggcacacatacttaatgatcccagcactcttcgtcagacactcgaagctacaaggaacccttgagatcatgcgcgaaatgatgaggaatacagacagagcaatgagcaacattgaatcttctcctgagggatttaacatgctgagacgcatgtatgaaaatgttcaagaaccatttttgaatgccactacaatggctggtaatacaggaaatgatgctgcagcagtttcagggtggtggccatgcaagggaccactcaactaatccctccaccactaattctgaagcaactgctggttctcctttacccaatactaacccgcttccaaatccttggtcctctacgggaaccggaggggctcaaaataacagcagaaagtcgttgactactggtgtggatggcagacagcagggacctactggcttaggagggcatggtctgccagaccttgaaagcatgctgggtggtagtgctatgccagatcctgctttattgacccagctaatgcaaaatccagctatctcacaaatgatgcaaagtatgctttccaacccacaaacattgaatcagattcttggtgctaatactgagcagcgtggcatgcctgatttaaattctcttagagaagtaatgcaaaatccagaattccttcgtttgttttcttcacctgagacattgcagcaactcttgtctttccagcaaactcttatgtctcagcttggccagcaacaatcaacatgggaatctggtcaaactggcggaggcactggaccaatgaacaacttgggattggagatgttatcgagcatgtttggtggacttggagctggtagcctagctgttccaaatagatcaaatgagccaccggagcagctgtatgcctcccaactttcacagcttcaagagatgggattctttgattcacaagagaacattagagcccttattgccacttcaggtaatgttcatgccgcagttgaacggctattggggaactctggtcagtagcggacaatgttggcaagttctcttctgtcgatttccacggttggtcactatgaaatcagtggtgttcaagtgccttgttgaatattaaataaaatcagaaatctgtccaaattatagtggtcagagctgaaatggtgtaggttatatacattggactgtgattgtttcttctaatggtccacttttcttcatgtacatacttaaattgaaactagttttagacgcagcagatcttaaatatttcaaataaattgatttttgtgcttttataaaaaaaaaaaaaatataaaa

SEQ ID NO: 135148 - DNA, 678 bp, Glycine max
  Clone ID: PAT_MRT3847_93048C.1
ggtccggattccccgtcgacccacgcgtccggtgagaacaattgtgtgttctggagctacgtctatttggttaatggtagtcctatggcggagtttggagtcgagcggggtttgaaacaaggtgatcctttgtcaccttttctctttctgatggcggtggagggtctttgtgggttagtgaagaaggcggagttggttgatgtttttaaggggttcagaataaatgactctatctcatattcccttctctcccatatgcagatgattccattttggttggggaagcttgctagaagaacatttggcaatcaaaggcatcgtaaggagttttgagcttatgtctgagctgaaggtaaattttcttaagagtaagatctatggtgtaaatgtttctaatgactttcttgatggtgcctcagattttttgtattgttattctgcaatgattccttttaagtttctagggatccctattggggctaggtggaagaataactttgataaatgcagtgctatctagtctacctgtatacatgttttctgttacgacgtgctgtttgttggtgcttatggcttactcaaaataaagcgaactttcaaggaccagtctgtcatttaacttataaaaggtgtgtcatggattctgttttagacataagggactatgctcgagttgga

SEQ ID NO: 135149 - DNA, 405 bp, Glycine max
  Clone ID: PAT_MRT3847_93049C.1
tacggctgcgagaagacgacagaagggatgtcttagacttctgaaaagaaaagtctatgttaaaattagaaatggaaggagtaagaatcaagtgttgtacttttaatataatagatacttttttcgaacttaaatacaggtaaaattaattaacttttatgataattaagaaattacttaatattatttaattattcttatttcattttttttctaaagtatctttcataacttgattccaagaataagaaaagtaatcgaaaataatattctgaattaatttagggacacttttggaatagtatcataaataagatgaaaagtagtaaattttacttttgtttgagtctattttttttacttaataataacgtctgtataaatactaatatatatatatatatt

SEQ ID NO: 135150 - DNA, 610 bp, Glycine max
  Clone ID: PAT_MRT3847_9304C.1
ggggaaaaatatttttaattcacaaacaattaaatcctcaaggggttaccattaacaactttttgaactaaacaattaattggtcctcaatgggggaaaattttaccaaaaattcctttcgcaggttttggttaaaatattttaatataacccaatcaacataccggcaataatgactttttggagagtttgttgataagcatcaacaacattgaagcatttggtttcctcagttcccaattggtttggccattgccatttttttgatagcctttaccagttccataaaaattagctccatgatgtttagggggagatgtattttcacgtttttgaactcgagctttggcatgacctggggaaatacctggttttgggccaaaaccacccccagcaggcaaattttttttttttgaagccttttttttagcagctttcaatccctggggcaaaaatttttcactttcacaaattttggaaagttctccaaaataaaacaggcagggctccaatgggacaggtctttttgtgggccccggaacccttatttccttttggtttggccggccaacccaatgggcgaattcaatatttttaggaacccgggggg

SEQ ID NO: 135151 - DNA, 369 bp, Glycine max
  Clone ID: PAT_MRT3847_93050C.1
aaatgccattgattctccatttgaataaactacatatgctcgagagctggttccaaaagtcccatgttgcatttaaaatgaaggggctggccacatcacacagactctctacctattctggaaatgctgtcaaaataagggatattagcccccaacttgggacatattttcttcactttgaagtgactaacatttcttaagccctcctacaagttgctcccagaagcaaatacctcaggcctacaaactgggcaaaccttgtctattttcaaccaattgtggatgcactctggatggttcagatgcttgcaggacataactgtcaaggtctcaccatctctataagccacccggcgaatgacacactaa

SEQ ID NO: 135152 - DNA, 222 bp, Glycine max
  Clone ID: PAT_MRT3847_93051C.1
atggagcggcgcaagggttccggcagcttcttgacaacggaggatctcaggcgggagacggggattaactgcagcggcaggcacgaggagctcgtcgatcatcgaaggcgcgcggtcttccggcaccgtgacgcccttcagcgtggaggagcgaacgcgcagggaaaatggagcaatgaattacttatccagaatgttgaagcacctcaagtacaatgttga

SEQ ID NO: 135153 - DNA, 354 bp, Glycine max
  Clone ID: PAT_MRT3847_93052C.1
aaaaaccccgcatttgtacccctggggacccacaccgggaaaataccggggcggggacctcggaggaggtaccaagctttccccaagggggggggcaataaagcctgggggaaagaagggcaaaagcgggccccggggaaaaataaaacccggcccaaattgaaaaaaaaaaaccgcccggaagccaaaagggaaaaggccggggggccaaaagggggaacccaccgacactaaatggggggggcccaccgccccatttgcaggggggaaaccgggcggtccaaaggggaaaaaaaaatgggccaccccccgggaaaggggggtcccataatggggcccaggggggtttttttt

SEQ ID NO: 135154 - DNA, 382 bp, Glycine max
  unsure (1)..(382): unsure at all n locations
  Clone ID: PAT_MRT3847_93053C.1
tataatgaggattgaccaaaaagtaagcctcaacagccttaaaaatatcatcagacttgactttaccaattttgaagtcgtctaaattaaactaagcatctgctttaatttaatatttaacaatgaacttcccaacagaccctccattgtcaccaacaaccaatttacattcgaatatgatcttctccactatgtctggcgacccaactccaccaactacgctatagctgtatccgcaagttacctcgtcgactgattctatgttgtacaacacagacttacttgctgcatcctcaacgaaantnatcttggttattatgtccaaacccaccattcccctcagattggtcaacactgcttgaaactggggacgagcttgtgg

SEQ ID NO: 135155 - DNA, 246 bp, Glycine max
  unsure (1)..(246): unsure at all n locations
  Clone ID: PAT_MRT3847_93054C.1
ggagagagtgttggagtcttttgaaaaaggtggaatggatggtgatgtggcgaagttgaagggtttgtttgataactccaaagagaagaatattgctatagtgtgtaggattgtgaggnacaatgtgtggggtgatgatgttgagaagcagattgaggacttgaatgttgggttctccagcgaagtcgttaagacagttttggagagtttggttttggaacctgtgaaggcgttgatatttttccg

SEQ ID NO: 135156 - DNA, 495 bp, Glycine max
  Clone ID: PAT_MRT3847_93055C.1
attcggctcgagaattcatatcatatcatatcttgttcgctatattctctctgacaccccccggaggattgtgttgaggacaaacacaacaacaaacatataacattccgacaggatggtctttcggagctccacctccctaattggcctcctgtccctcctcttcctcctctccgtctcctccgccattcgcctcggccttgtccgccgtccttccccggagctccctctcttccgggaggcccctgccttccgcaacggcgaggactgcggctcctcgccttccgccaccattaacgtagccatgaccctggatactaactatcttcgtggcaccatggccgcggtgctctccatgcttcaacattcaacgtgtcccgagaacctggccttccacttcctctcctcccatgacgaccctcccgaactcttctccagcattttgtctaccttcccttacctcaagatgaagaattacccgtttgactccaacag

SEQ ID NO: 135157 - DNA, 3136 bp, Glycine max
  Clone ID: PAT_MRT3847_93056C.1
ctagtacaagtacagtacatgtagagaagtattagcattttctacgaggaggctaagaaagagaagatgacacaaaatccaaaacaaagctccatttaagccatgcctccactcgttgctgtcctgattatatgatccaatgacaacaaagacgaagaaaccgagcagcacaagaggctgatgaggccaaatcacttgctcaggcagctcacgcagagctgatggaagcacaagaagaggttgaacaagccaaggccaaatcaagcacattggaaagtagtttattggcagcacaaaaggagattgaagcagccaaggctgccgagatgttggccagagatgcaatcacagcattggagaagagtgaatcagctaaaggcaacaaaaatgacaaggactcttcctcaatggtgacactcacactagaagaatatcatgagctcagcaggagagcctataaggcagaggagcaagccaatgcgaggatcgaagctgctacttctcagattcagatagcaagggagtctgaattaagaagcctggagaagttagaagaactgaatgaggagttgtctgtaagaagagaatctctgaaaattgcaactgggaattccgaaaaggccaatgaaggaaagttagctgtagaacatgaattaagaacatggagggctgaacaaaagcaacaagagaaggctactgaattgaatgaacaaacttctgatccaactgagcctgcacatgattcatcaagcccaaagggaaaagttccttccaataacactgaagctgaatcagcctcaaataagaacaaaaagaagaaaaagtcatcatttccttcaaaggttgtaatgttctttgccaagaaaaaaacgcacccaaccaagtgaatgtaatccttcaacagaaggtagtacactaaatgatcatattttctccttgcgaccaaagaacttgatacaaattctcacaattggcaaccaatacagaagctgttcagaaattagatttgttacttagtgtactaccttctgttgaaggattacattcacttggttgggtgcgtttttttcttggcaaagaacattacaacctttgaaggaaatgatgactttttcttctttttgttcttatttgaggctgattcagcttcagtgttattggaaggaacttttccctttgggcttgatgaatcatgtgcaggctcagttggatcagaagtttgttcattcaattcagtagccttctcttgttgcttttgttcagccctccatgttcttaattcatgttctacagctaactttccttcattggccttttcggaattcccagttgcaattttcagagattctcttcttacagacaactcctcattcagttcttctaacttctccaggcttcttaattcagactcccttgctatctgaatctgagaagtagcagcttcgatcctcgcattggcttgctcctctgccttataggctctcctgctgagctcatgatattcttctagtgtgagtgtcaccattgaggaagagtccttgtcatttttgttgcctttagctgattcactcttctccaatgctgtgattgcatctctggccaacatctcggcaaccttggctgcttcaatctccttttgtgctgccaataaactactttccaatgtgcttgatttggccttggcttgttcaacctcttcttgtgcttcaatcagctctgcctgagctgcctgagcaagtgatttggcctcatcagcctcttgtgatgctttttgcagtttcttgggcaactcagtcatcatctctcttgcttcattttctttcatttgaatgaaagctatggctgacctagacttctccagttcagcttggagattcacaaccgcagccgaagccttttcctcactttgcttaagggatgcgagaaccgacttctcttcttctagttttgattttagtgacacagaagccaccctcaatctgttaacatcagaagttgctttttctatgttcagttttagttcctcaacttcctctttttgttctttataaaattcctcatttacttttgattccatatatgctgctaattcagctttcaaaccatgcagtaaggaggaagctgattccaattttgatttaagaaccctggctgacaaaacttgctcattaagtctttggagctcctcttctacttgttcaagttccagcttcaaattgttcgactcttgatcaactactcctagtctttgttcttctacttccaaatgcgcggttcgcatggaattcaacgcctcttttgttgcaatcaactcagcagtcaaatcttccactgccttttcaatttgcttggatgctgcaatagtctcttctgcattattgattgctatatcccttccactcgccatagaagcatactccttacgcagtgagtccagttctcttttaacgaattcaaactccgaaagcgcttctgtaagcatggctttttcagcctcaagttgtgccttggcttcaatactagcttcacttacaatgtcctgctccatctcttcaattttgagaatcacacgttcagcctcttcttttgcttgaagctcatctttttctatcttttctaagctagttttgagttcttctataagcttcttagtgttttccaattcctctgcagtttcttcctttctaaagtcttctacgagcttgcttctctcctccaccagactctgggttcgacgagatttccaatcaattcttcctccaaacttggacacagcatctttgacagattcaaagggcgcagctgtctcaatgacatgctttgaaggcttagaagaatcggcacttcctgtagaatcttttcttcccaaaggggattctaattgtggctccatggtatattttgaaagtggcccgtctttaatatttctcacagggtctgccaccaaaatttcttgatgagaagaaggaaaataatgtggaagactcagggaagggaagaataaaaagaaaggaattaattaaaaaggcaaaaacgtgttaggagtggtcctatcctatgatacggtggaagaaggaggtaatgttgatgaggcgaacaatgaaggaggaaggaaccgttcacatctgtttacggc

SEQ ID NO: 135158 - DNA, 420 bp, Glycine max
  Clone ID: PAT_MRT3847_93057C.1
tgcgttatcgtgattgattccagtcaatgcagtcgtttgccgaccgcttttaaccctcctaaactccgttggtattgtgaaccgactatatgcagaggtaagagacacgccgtaaagtcatcatgaaatattcaaagcacctcaggacctgcttagatcttgatagcgctctcaacagccttcctgcgcttctccatgcgggcgttggccttggcacccatgataccacctccccagtgacgggcagcgtccttgtggtgtgactcgaggtagccgtcgttgacagcggtgacgagcttctggagctcgttcttgtcctcggagcggacctcggtgagggcgagaacagcggcggtcttctggtggacgaccgtaccgagacgggccttgcccttgacaatgacgtaagggacacccatc

SEQ ID NO: 135159 - DNA, 580 bp, Glycine max
  Clone ID: PAT_MRT3847_93058C.1
gtgaacggttccttcctccttcattgttcgcctcatcaacattacctccttcttccaccgtatcataggataggaccactcctaacacgtttttgcctttttaattaattcctttctttttattcttcccttccctgagtcttccacattattttccttcttctcatcaaggtttcaatctcttttttgttcttgttatgatattgctttgaatgccttttgttcacataaattttggtggcagaccctgtgagaaatattaaagacgggccactttcaaaatataccatggagccacaattagaatcccctttgggaagaaaagattctacaggaagtgccgattcttctaagccttcaaagcatgtcattgagacagctgcgccctttgaatctgtcaaagatgctgtgtccaagtttggaggaagaattgattggaaatctcgtcgaacccagagtctggtggaggagagaagcaagctcgtagaagactttagaaaggaagaaactgcagaggaattggaaaacactaagaagcttatagaagaactcaaaactagcttagaaaagatagaaaaag

SEQ ID NO: 135160 - DNA, 469 bp, Glycine max
  Clone ID: PAT_MRT3847_93059C.1
acccgtttcttttatgcccgcgcgtccgataaaaacgggggtcctcgcatccattttcggtggcaatctccaaacatgtccgccggcttacaactcctcgtactttttgtctgactgttctcactactcaccagcgcccaagccgaggaccagcgttaaagccttctgaacctaaaatactgcctccagagttcaaattccaaactcctttactgatggaacgcctccaattgcgtttgcaccttgcagggagttacttgcaactccgtcaatttcgtcaccgaaatcaacctttcgaaccaaactctctccggtgtgcctcccttcgactcactctggaaacttccgttcctccaaaaactcgagttcggcttcgaacaacttaatcggcgtcgtttgagaggacattagaaacttggtaaacttgcgctacttggacttgggaacaatcttttgtccgaccctcccc

SEQ ID NO: 135161 - DNA, 1894 bp, Glycine max
  Clone ID: PAT_MRT3847_9305C.1
acttgatactcccattggaaccattttgttttccaatccagggagtgaaatataggagaaaccaaggaagaaacagaacaactggaagaacttaattttttctacaagaaaatgggcgtagatgtatatagcttttaattgaatgaatcaacgggcttacaagaagaagaaatccgacaaatgcacatctaggaaataacagttgcaacaagaaaacaacataaattgcccataaactaaactatgtcaacggcattatatgatcaaaacagcaaaaccccctcttcctcaagttgcagatgagattcaaggttgttgctgagcatcaatgtagccagcatcaacaagaaccttctctttcttagccatctcaatgtcccggtcaaccatcatcttcacaagctgctcaaaccccactttaggtttccaaccaagcaccttcttggccttggaagcgtcccctttgaggttatcgacttcagaggggcgaaagtatctcttgtcaatgacgacatggtccctccaattgagtcccacatagccgaacgcgacttccaagaactcctccacggtgtgggactcttcagtggccacaacatagtcatcgggcttctcctgctgcagcatcagccacatggcttcaacgtagtccccagcgaagccccaatctctggaggcctggaggttgcccaagaagagcttgctctggagcccgaccttgatgcggcccacggcccgcgtgatcttgcgggtcacgaaattctcgccgcggcggggggactcgtggttgaagaggatgccgttgcaggcgaagagggagtaagcctcgcggtagttcacggtgtaccagtgggcggcgcatttggaggcggcgtagggggagcgggggtggaagggggtggtttcggactgcggcggaggggtggcgccgaacatctcggaggagccggcttggtagtagcggatgtgggagcggccggaggcggcgatgtgggaacggacggcctcgaggaggcggagggcgccggtggcgacgacgtcggcggtgtagtcgggtatctcgaaggagacggcgacgtgagactgagcggcgaggttgtagacctcgtcggggaggatggtgtcgagccagcggcggagggaggaggcgtcggagagatcggcgtagtggagcttcatgcgggccttgtgggcgttgtggggatccacatagatgtggtcgatgcgctgcgtgttgaagttcgaggagcgacggatcagaccgtgcacctcgtaacccttgtctagaaggaattccgtcaggtacgaaccgtcttggccggtaattccggtaatcaatgccaccttgcgcgccagaggcagcaccccgttcgtcgcagatctggatccctcggtgttctccattgattgatgagggagtagagacgtatcggatgtgggagctgtcggtgtcagttttgtgggcagctctccccctcctggaactgcgaggggccgcgtgccgtggacgtcagtagtactattgcgcatgttgaatgaaacgaatgcgtggtagtgggctgcgagatagaagagccctatggggaggatgttataagagccagaggagctgtgctggcagccgtcggagttctctgcgaactggaacttcatgcgtgctgtgtggatgttgttgggatccatgaagaagacgtttatgcgccttgtgttgtagctcgttgatcgtcggttcaggccgttatgcacgtaccccgagtccaatatcctgttgggtgggtcggtgacggtgtcgccggtgagtctgtgagttgtgagtactatgcgtcaggattcatatcaccaggtcgcaggacaagcgaagcactagatgaacgttattaattttttttaaaaa

SEQ ID NO: 135162 - DNA, 450 bp, Glycine max
  Clone ID: PAT_MRT3847_93060C.1
tccaggaaggtttcccgtcatcactgtatgacgtcctccttctttggggggggggggggggggggtttgttgcgcgtgaggtggtgctgaacggacgcgcgtcgaatatgtgcaatgctagcactgggcgccagagagaagagaggctaatagtacaaaaacaacaaaagaaggtaaggtgggtgccccgcggtggtaggcaggaaggagttgactgcgtgacggaaggagtaaggtggggaatttatgaaagtttctaataatggtctactaaattgtgggtgcggggcaagcgtaacgtgtgtagaatgcagattgcacgcacaacaacgccccagacgcggcagcgtattataaaatgtagtaggggtatgcgggtgtaggtttaaacatagcggtgcgcacacccaagttagcgccctgcgtgttgcacacctaaaccggaggtgt

SEQ ID NO: 135163 - DNA, 545 bp, Glycine max
  Clone ID: PAT_MRT3847_93061C.1
gaatacttcctagaggatatactatttctagtttggatgctctgcagaaggtgggatctctgaatattcaagcgggcacagcctttgtagattttgagtttcaagaagaagttaattctggaaaagtatcagctacaacattgaacaaattttcatgtatagcattggctggggtgtctactgaatatcttatatatggattttctgaaggaggtctggatgacataagaaagttggatttattgctcaagggcctaggcttcacacagaagaagacagattctcaggttagatggtctttgctaaacacggtcttgctcttgcggaggcatgaagcagctcgagggaaggttgccgaggccttatcaatgggaaaatctgtaggatcctgcattgacattatagagaattctatcgatgtttcagatctctaactgaagctttgacccccttgattattcccttctgttactctaaactctgctctcagatatgttgattaatatttccataaattttcatatggtattattaccttgctcata

SEQ ID NO: 135164 - DNA, 301 bp, Glycine max
  Clone ID: PAT_MRT3847_93062C.1
aaacggtcttttctagctgggtccgaagccctccgtcctgtaaggaactgtggtgattgatggcttcctctctatcccacaatggcacatctctggcttcgtggagtacataaatttctgccataagctatgtgacatgctgctcgaggtcccttagggggccttcgcatcgcgcctcttgatcgaggcctccatcaagcatacgatcaaggtgatcatcggcatatactactccatcaccttgcttgcggtccgcacctgctcccaggaggagaggctcaatatattcctcacttcaaac

SEQ ID NO: 135165 - DNA, 244 bp, Glycine max
  unsure (1)..(244): unsure at all n locations
  Clone ID: PAT_MRT3847_93063C.1
gaactagtctcgagnttttttttttttttttttttttttttttttacatgccgagcatgatattgttgaaaggtcataaagatgccgctttcaaatcagacgtcaaactatgcaacaacagtcacaatatgactttattttatgtagaatataatttaggttatgtttagtgaaactattgcaaatatgtaaaatttatatgttctaaaaatgaataaaatattttattagaccaaaaaaaaaa

SEQ ID NO: 135166 - DNA, 233 bp, Glycine max
  Clone ID: PAT_MRT3847_93064C.1
tgcttctgtttgattccttggcagaaacatagatgcaccatcatctgaggcatatcaggtgactgtgggtgaaatgatgtcacatctatcctactgataaataccttgacagaaacagccgcacctttaagaagaccgcaatccactcgcaagatgtatatcactgctccaatggctcctgagtcttactcttctcagaaacaagcatacttgcaaaataaggttcaatctac

SEQ ID NO: 135167 - DNA, 730 bp, Glycine max
  Clone ID: PAT_MRT3847_93065C.1
aaggcccttgccttatgatgcagacctcaggtttttccgttcacagcgtgaaggactagtgtcaagacgtgagaagggttctagtcatttgaatgaagagtcagaacctctaagaggtgatgtagatgctgactcagaatctttaaattctggtggcaaatggaatgataccagtgaagatggatcaaaggaataccgttccaagtcctctgtaagactctcatcagcaaaacttacaactggagctggggttgtctattcatcctcagaagaggaggatgtctgtccaacttgtcttgaagaatacactgaagagaatccgaagatagtgacaaaatgctctcatcattttcatcttggttgcatttatgagtggatggaaagaagtgacagctgtcctgtttgtgggaaggtgatggtatttgatgaaacgactgattgaaaaggtttatgtcgtggatgataccaacaacagaggaaaggaaatatacagtatagacattgtgaatacttcagattaagcgcttatcatgtatagtaagtatataacatttttattaaccatcactgtaagttcaatctcatccaagttgtttctatatttatacttttctcccttgccaaaacatccaagattaaaaaaaaaaaatgccattttagatggcaactttgtcatggtttcaacagtttgccatttaatagaatgatttcctcctctctttttcttttt

SEQ ID NO: 135168 - DNA, 408 bp, Glycine max
  Clone ID: PAT_MRT3847_93066C.1
gttcccttattggtttggctaaacctaaggggttgcccccccttgcccgggggcttccctttttgcgtttttttccaacccttcgaccccttggccgaccccttggccgaccccttggccgaccccttggttcaccccggaatttccgacccgttccttgaggccttccaacttttccttttagggggtctattaaaacttggcgtaattattggcattagttgtttcttgggtaaaatggtattccgttacaatttcccaaaacattccaacccgaagccttaaagggtaaagccggggtgccttattggggaacctaccttcatttattggctttggcctacttgcccgttttcaattcggaaaacttttctgcccacttgatttattgattcgcccaccccccgg

SEQ ID NO: 135169 - DNA, 431 bp, Glycine max
  Clone ID: PAT_MRT3847_93067C.1
ttggggggggggggggggggggggggggggggggggggggggggggggggggggggggggggggggcgcggaataaaaagttttaacccccccccccaaaacctagagacccaataagaattagcagaatggtaagttaaaatccagccccttaacagaaagggatttataaagggggcccagtagtaaagccatacccaactaggcctaataaaaaatgaaaaacggaaggggagtttagccacccaaaaaggttacacaacgtcccaagtggagtaataactggccccctatttgaaccgcgagctttacggtcagacttattagctcccaaactggttataaccctcccatgaaaaggggcccttttccaaatggtagccccgggaataatcccatgtaaggcttcggttatgccttaaaagccttgt

SEQ ID NO: 135170 - DNA, 153 bp, Glycine max
  Clone ID: PAT_MRT3847_93068C.1
gtatatgaaacatgagcaaagaattgcaggaactcattatcttttaggagcgaggcatgcatgggtcacatactactttaaaatatggggcaaccccatcaccaggcggttctacttcatccacgggatagtggcgaggggggccttgataaa

SEQ ID NO: 135171 - DNA, 594 bp, Glycine max
  Clone ID: PAT_MRT3847_93069C.1
gtctcgccgccgattcgcgaggttcaaaatcaatatcagtttttgttgtttgattttcttaagtagaagaaacgcgcatacgaaagatggagaaacaaagtgaaaaattacaagtagatttttatggagaaattcctaacagtgatacaccagagagtgaaaactctgaaaataacaacaaaaacataataacaacaataataataactagtcttgcatctgctattatttatagtgctccagcacgtagcacggagatttctgttatcaatagttggaaacttgcattttccgcaacttacaacaagattatcccccgactttatcgtctaatcactcacgacacaatacaactattcaataattatgtttcattcactactcaacatggaacttttattggtttaattgctggtgttgttttaaataaacttccagaaactcaagattttggacaagtcccaacaattactggaagcttgttctttggaaaattcttaggtccttacgttgtacctctttctgtggcctattacttattcaatcgtaataataaggtgtaaataatgttgaataaataatataattactgac

SEQ ID NO: 135172 - DNA, 1482 bp, Glycine max
  Clone ID: PAT_MRT3847_9306C.1
gtgagaaattgtgaatcggagggcgttgaagagttgtgagcataataaattgagaagcaaaagcgaaagggtctgtgtcttcactcattcttctattctattccatcatcaatggagaacaccgagggatccggatctgcgacgaacggggtgctggctccgccgcgcaaggtggcattgataaccggaattaccggacaagacggttcgtacctgacggaattcctcctggacaaggggtacgaggtgcacggcctgatccgccgctcgtcgaacttcaacacgcagcgcatcgaccacatatacgtggatccccacaacgcccacaaggcccgcatgaagctccactacgccgatctctccgacgcctcctccctccgccgctggctcgacaccatcctccccgacgaggtctacaacctcgccgcccagtcccacgtcgccgtctcattcgagatccccgactacaccgccgacgtcgtcgccaccggcgccctccgcctcctcgaggccgtccgctcccacatctccgcctccggccgctcccacatccgctactaccaagccggctcctccgagatgttcggcgccacccctccgccgcaatcggaaaccacccccttccacccccgctccccctacgccgcctccaaatgcgccgcccactggtacaccgtgaactaccgcgaggcctactccctcttcgcctgcaacggcatcctcttcaaccacgagtccccccgccgcggcgagaatttcgtgacccgcaagatcacgcgggccgtgggccgcatcaaggtcgggctccagagcaagctcttcttgggcaacctgcaggcctcgcgagactggggcttcgctggggactacgtggaagccatgtggctgatgctgcagcaggataagcccgatgactatgttgtggccaccgaagagtcccacaccgtcgaggagttcttggaagtcgcgttcggctatgtgggactcaattggagggaccatgtcgtcattgacaagaggtactttcgccccgccgaggtcgataacctcaaaggggacgcttccaaggccaagaaggtgcttggttggaagcccaaggttgggtttgagcagcttgtcaagatgatggttgaccaggacattgagatggctaagaaggagaaggttcttgttgatgctggctacattgatgctcagcaacaaccttgatctgatctgcaacttcccaaatttttagataaatgttttaattgaggatggaggaggggggtttttctgttttgatcttataatgccgctgttcttttaaatcattcttcatagttgacacagtttaatttatgagtaatttattttgttttcgtgttgcaactgttatttattagtcgtgcattttttcggactttattttattttttgtaagcctgctgattcattcaattaaatctatatgcatctacatccatagtcttgttgtagaaa

SEQ ID NO: 135173 - DNA, 388 bp, Glycine max
  Clone ID: PAT_MRT3847_93070C.1
ggttttcaggtgtcaagcatgcaacacgacttaagaatcgttgggttgggttaaagatgtctttcatcactgagcaccgccattggagggggaggcgttaatgagggaacttgattatgttattctgatctttcatggcagtaaagaccccctaagaaggaagctattttgcaagagtttgatctcaaggaaaaatttttgagtataaatatgctgtaaaagcggggtgcccgtctatgctgatgtttcttcaaactcttgaggtggactcttctatatgccattcaaatagattacgtggaatgctgattgcttcacttgacgcatgcgataaaactgctgaagcggtgcatgacgctgttagaaagatagtaatggtaactgatga

SEQ ID NO: 135174 - DNA, 340 bp, Glycine max
  unsure (1)..(340): unsure at all n locations
  Clone ID: PAT_MRT3847_93071C.1
gaannntccaaaannnnnanaagnaaanaaagacgnaaaccnctaaaagnntgggggcaacccaacccgaaaaaaacaccgccccgggttctttagacggaataaaagaaaccccaccttcaaatgaaaaatcagccccgggcactctggcgagacacaaaccaaagcccttctgaaaaaccaagacagaccggaatccccaccgcgggtggcgccagaagcttaacaggaaaaagggggaatcaaactgctggaggagccaggcctttggcaacatctacaaaaaccaaaatgctcaaaggtcaccaacccaaagcttttaaacggcgcaaaaggcccc

SEQ ID NO: 135175 - DNA, 1435 bp, Glycine max
  Clone ID: PAT_MRT3847_93072C.1
aaacgcaggggttaaataggtgacatctgtgctgaagcatattgggattttaagctagggttaaaagccgcgacaatgaaagagcatttgacaatgatcctttctgccctttcagcagcagcaacagcagctgttggatcaacatcttcattgcttatgtctactacgctccctccaacaaaaccctgttagtactcctcaacagactaacagtactccttaccatcacaaggtggggcaaatatgattcaaccaaatgcccttcagtcaggttccagtgcacttcaacaccaactgaaacatcagcaagaacagcagatgctgcagagtcaacaattcaaacaacaatatcagcagcgacaacaattgatgcagaggcagcagctcctgcagcagcagcaactacaccatccagcaaagccacagctatcttcacaattgcagacacatcaaatgccccaacttcaccaaatgaatgatataaatgatataaaaatgcgacaaggaatgggtgttaagtcaggtgtctttcagcagcatcttacatcgcgtccgcgctcaacttatccccatcaacagatgaaagggagtccttttcctgtttcttctccccaactccttcaggccacatctcctcagattccacaacactcatctcctcaggttgaccaacaaaaccaccttccatctctcacaaaagttgctacccctctgcaatctgctaactcaccttttgtggtacccactccttcacctcccttggctccatctcccatgccaggggattctgaaaagcccatttctggtgtttcatcaatctcaaatgctgcaaatattggatatcaactaacagggggtgcagcagcacctgctcaatcccttgccattggaacacctggaatatcagcctctcctttacttgcagagttcactggccctgatggtgctcatggtaatgctttagcacccacttctggaaagtcaactgttactgagcagcctattgagcgcctaattaaagcggtcaaatcaatgtcaccaaaagcattaagttctgctgtcagtgatattggttcagttgtcagcatgaatgatagaatagcaggatcagctccaggtaatggatccagagctgctgttggcgaagatttggttgctatgactaattgtcgtcttcaggctagaaattttatcacccaagatggtgccaatggaacaaggaggatgaagcgctacactaatgcaacacccttgaatggtatcttgtagcatgaatgacagtatcaagcagtaactgctgtctgaggattgcacatctcgtgtcaagaaaccaaagattgaggttaatcatgcccttttggaagaaataagggagattaaccaccaacttattgacacggcagtagaaataagggagattaaccaccaacttatg

SEQ ID NO: 135176 - DNA, 371 bp, Glycine max
  unsure (1)..(371): unsure at all n locations
  Clone ID: PAT_MRT3847_93073C.1
atcacaggacgccgggttttaaaactggaagcaaaagcctgcgttgcttgctcacaagaacttntaaaaatcttcctacttgtttgaggacgattacctaaggcgatgacactcactctctgtgctggtcacagactataggaatgatgctcttttccactcttagagcattggctgcacactctgctatttgagataggactacaggtcagatataaacatcttcccgctctatcacagtactctgctcgatgtcaagtacaagctcgtgaaatgatgcattagtgatcccactcttctatcgggtatgggacttcgtgggaagactactctatttgactacagtctcaaactctcgtctggtgactgat

SEQ ID NO: 135177 - DNA, 468 bp, Glycine max
  Clone ID: PAT_MRT3847_93074C.1
caacacaattatgagaataatccctatgcaaaggagtttggcatcagcatagacagcaagcttgcatcagttgaggctcgggttcttccggctccatggttgaaatatcatgacactggaagagagaaagaatactgtgccacaagttggtcagtggaatatgatgaacaagaaagttgtaagtggaagtactgtaagatattgggcatgtatcaacttctcacgaagtgtacaggaaagtgcagctcgtggattttgccaacagttagttcagatgtgccaaatctcaggcatggaattcagtcaggaccctgcgattcctatacattcggctagaccagatcaggtaaagaaggctttgaagtatgtacattctgctgttatagacaaacttgatgggaaagagctagagttgctgattgccctttttccagacaataatggctctttgaatggcgatctcaaaag

SEQ ID NO: 135178 - DNA, 287 bp, Glycine max
  unsure (1)..(287): unsure at all n locations
  Clone ID: PAT_MRT3847_93075C.1
nnnggtggtttttttaaattttttgggtttaaaaaaaaaatactggagcgagcaatattaatctagcacaacataaattcaaagtttaaaataaagtcaactagtaaaactatttgtggtaagcatttaaaatcacattaatttttccaggctacaacttcaaacccccatttttttatgatttttgcatgaagacaagcacaaggggagatttttccaaaaaaaaaaaaaccgaggggggactcttaccttcccttttccataaaaggttaaccttaaaaggactt

SEQ ID NO: 135179 - DNA, 759 bp, Glycine max
  Clone ID: PAT_MRT3847_93076C.1
gacagaagaaagggctgcaagaagaaagaagaaacttgaagaaaagttcaatgctaatgaagcacaaaaagtgcagctgcataccaaactcaaggagaaaactgagaccgagattattagaaaactacgccaaagcttttgcttcaaagccaggccactacctgatttttacaaggaaaggaaaacatcaacgaatgagacaaaaaaggatccactgacacattttgaaacacctaaagacggaaggaaatccaccccaagtatggcagacagcaagacttcttttcctcccaacagacctgtattgaaaaacagtggcaccaagcatttcctaggaaagagtggtcgcaccttgtctcaccctctaacttcaacttccatgattattccaactcatgagaatacatcaccaaatattcagaatggataccagactggtagaaacttaaaatattaaccatgttgagagcaaagcatcacttgacaaacttgtaaatgatgtagcttcatggagatggggttgtattgtatcacactagttagacccaatgttcataagtatgacccttgttgtattctaggtatatagcaacattggtcagagtggcccttctgacatgttattcctttttctatttccaccctcaccatctctatttttgttcaaatatctttcccatgtataaccattggttgagctattcgttatttaaatgaattagaatttttgtaaaaaaaaaaaaaaaaacggacgcgtgg

SEQ ID NO: 135180 - DNA, 337 bp, Glycine max
  unsure (1)..(337): unsure at all n locations
  Clone ID: PAT_MRT3847_93077C.1
aattccctngtcgacccactctacctttacatcccatattcgatcaaaccttcaatttccttaaatatattctaacacttcagtctagttcaaattacaagcccgctcataagaatccatcttcataccagatcaacacctataaatctccatcttataacaatcctccaccctacaacaatcttcccaaacactcctccattaccatatttaacatatccaataataccattgacacttacaacatctacatattcacatttctcaatcacttacatacctacatcacaatctctatcaaatccatcttcattatcaacatcttcatcaactacat

SEQ ID NO: 135181 - DNA, 505 bp, Glycine max
  Clone ID: PAT_MRT3847_93078C.1
ccacgcgtccggtcgacgggtcgagatcgagcctcggaagagggaatcgcagcgaagtccactatgccgaagcaaattcatgagattaaagacttcctcctcactgcaaggaggaaggatgcacgctctgtgaaaatcaagcggagcaaggatgtagtgaagttcaaggtccgttgctccaagtacctgtacactctgtgtgtgtttgattctgagaaggctgataagttgaagcaatcacttcctccaggtttaagcgtgcaggatgtgtgattcttactgctgttgatgaagatcaagttttgctttggattttggggattcatatttagtgaaatggttcacagatttttcttatctgttgttattttttgggatcatattagtattaagtttaagacataaccaacttggttggggattatgtgactagttgattaaacgtcgttaatttggcgtcaaaaaaaaaaaaaaaaaaaaaaaaaaaaaaagttctagatcgcga

SEQ ID NO: 135182 - DNA, 145 bp, Glycine max
  Clone ID: PAT_MRT3847_93079C.1
tgttgaaattctagaacctgttgatggttcgcaagatgctactattcctatgtctagtctcccgtctatcgattgtttgtctactagttatgactgacccatgcacatgatagggaatccactcacatgtttcaggttggtaact

SEQ ID NO: 135183 - DNA, 484 bp, Glycine max
  Clone ID: PAT_MRT3847_9307C.1
ctcatgtgttggtgctttgaccaaatggggccaaggaggagtcaacactgccaaaaatgttaagatgcgaaccgatcgattgggtctttaacctaacgctttagacgtacgtagaaaggcctacacagtgcatgttttggaggtgaacacataccacacacacactattgcactgcaattgcgggaaacttgccctgggcagatgagattgactgttgttgataaatttgtttgcgagtaattcaggagtgtgtattcgcacgtaccgtaaaggaagggttctgtcgaactggaatttaccgcaatgttaccaaatactttggacttttcgaattgtactttagatagctgaacacagtcatgcgatcttgacgattcatattaagatacgcattcgtcagacgaagtagctcatctatgctgttatctaccaacatgtcgctggccgtgaatagacaacgctcagactgggaaatatattgcg

SEQ ID NO: 135184 - DNA, 3271 bp, Glycine max
  Clone ID: PAT_MRT3847_93080C.1
cccacgggaagatgagaagtgtgagcctgagaccagagcttcacattccaatttgttcttcaaaccctccatcatgtgtcaaacccatcaaattagtggtagcatcatcgtatgggaaaaatttgaaaaatccaccttccaaatttgcaatcactcttagagagcacagaacaactttggagcatgcggcgaggttgccattactgaaacatgattccggtattgtggtaatgggagcggtgtgtgtggtggggatattggcggtggttctgagcgaggaaaaggccttggctttgggcccagaaggcccacttgtggaagagttttgggacaacgtgaggagatatggactctacgctctcaccgtcagcacaggtgccctttacaccatcttccagctctataactaaacttcaattataattctcagacaccacttgctcatcattataccttcctgtctacgtgaaataataataatacattaaaccaaacctaggtccatctgctactttttctacccttttcctttttctccctaaattcttttcaaaattttcttttgctttgcttacccaaattcctcttgccagatcccaacttcacagcaatccgggaatctgatcaagacccaccttccaaaaatgcaacttgggaaatgggttatatacctggttctcatattttcacttctcagtcaattctcagaaactgtggcagagacatcatcctattcaacaccacagccacagcctccaatctgttcagaagaagacagagcttctcttctcagcttcaaagcaagcatttcacaggacacaacagagacactgtccacgtggactggcagagattgctgcgatggtgggtgggaaggagttgagtgcaatccatccacagggcgtgtaaacgtgttgcagattcagaggccagggagagatgctgatgcaacttacatgaagggtactctttctccttctctgggcaacttacatttcttggaggtaatggtcataagtggtatgaagcatatcacggacctattcctaatagtttctcaaacttaacccaccttacccaactaattctggaagacaattcccttggagggtgcattcctccaagtttaggtcgtttgcctttgcttcagagcctttcattgagtgggaaccatctgaaaggacagatcccaccaacacttgggggtttgaggaaccttgcccaacttaatttagcaaggaattctctgacaggtcctatccctcttagtttcaaaacccttattaatttgcaataccttgatctcagccacaatttgtcatgacatcccatcccggattttgttggggacttcaaaaatttgacgtatttagacctatcctctaaccttctaaccggaaaaattccagtttccttgttcagcctcgtcaatcttttagacttgtcattgagctataacaagttcgcagggaacattccagatcaggttggaaatctgaaatccctgacaagtcttcaactcagtggcaatctgctcacagggcatattccactgtccatatcaagattacagaacctttggtacctcaatatatcgagaaattgtctttcagatcccttaccagcaatccctaccaagggcatcccttcccttttgtccatagacctgtcttataataatctcagccttggaattttacctgattggatcagaagcaagcagcttaaagatgtccatctagctgggtgcaaattgaagggagatcttccacacttcacaagacctgactctctcagctctattgacctatcagataactatctggtggatggtatttcaaatttcttcacaaacatgtccagcttgcaaaaggtcaagctctcaaacaaccagctgaggtttgacatttctgaaatcaaattaccaacagaactgtcttccatagatttgcatgctaatctgctggtgggttcactatcaacaatcataaatgacaggacaagcagctctttggaggttatagacgtgtcaaacaattttatttcaggtcacattccagaatttgtggaaggctcaagcttgaaggtgttaaacttggggagcaacaacatatcaggttcaatcccaatttctatctcgaacttgataaatcttgagagactggacatttcaagaaatcacatattgggaaccatcccttcaagtctaggtcagttgttgaaactactatggcttgatgtatccataaacggattaacagggcaaataccaagtagcttgtcacagataactggtcttaagcatgcaaacttcagggcaaacaggctgtgtggtgaaataccacaaagtagaccattcaacatttttcgaccagttgcttacatccacaacttgtgcttatgtggcaaacctttacaaccatgcaagaaacaatggagtatgggtcagtgagatgctgactctatcatagtaatatgctcatgccttgtgaccattgttacatgagcaaaatagaatagggcactaccacatctgaatatttcttttcaaggtcgacaagttcaattttataattcaatattgtttttaataaaaatatgcactcattttataaaatgctttagattctagctcaccataggataaggcacgctcataatagtccggtaaaacccaaaatagtagggattagaaactttcttttacatgttttgtttaggctgtttaagcatggcaacgggcttgaacccgtggagctcaatgtccccattttaacagaaaatccgaagggtcgagtttgggtttttcccacggtgttcgaagtccgatcaggagtcactctcaaatccacccatatatattgaagccctgaaacggatttctcaattttcactctcactcaccaatactactccgccgcttctccgttctcactccccaagacctcaagccagaaccctctcgcacctcccaggccaacattatcgcacctccacgaccaacaacaacaaccttctcgtacttttcactcctccaatgaacatcgtcagcctcgatctcacatttttttcccgtttcacgctcatagcttagtttctccttctgttattttttctttagggttgggattgatttcgaatttgggggtgtaggattgttggtattttctttcaaattttgttaatttaagttgtgatgattcttgttatgcacttggatttggattgatttcttcaatttgtcaatcctaattggttggggtttttgtgt

SEQ ID NO: 135185 - DNA, 464 bp, Glycine max
  Clone ID: PAT_MRT3847_93081C.1
gtttttgaaactacctcgacgcaaaatttttgggaaacctaagacgcgctgctggactattctccccatggagtggaagcttgtgggtcggcagaagttgactaaatgattggaggttcattatgaagaaaagggacgagcttagttgtcaaagttggagtcaacccatactatcatggaatggactgggttggcaatagataactgatataagggcaactatattctgcgtagcgactatgctagctatgatggcttgattaccaaacaagacttgagcaagatcgcgcaaatgataaatagcctgtgtggaggagatgaaaaattgatgcgagaagggacacacctgatggtggcttgcagttcaagaatgggaattgggaagaaagatatttgcagagtttgatgagggatcccttgtgtgttggcgctcacagtgatgagcaataggatgtttaatgaga

SEQ ID NO: 135186 - DNA, 885 bp, Glycine max
  Clone ID: PAT_MRT3847_93082C.1
gagccactctgtctctccctctcgccgctccgctgcaaactacaacactaacagaatgaatcgccgcgaaaagctttccctcttgaacgcgttcttcagaacccgacgcccttttcaccaatccccaattgttgctcccttcactccaccgacccacgtcgcgtccacctcaaagttccactcttttcccacaatctctcacacccacttcgcgattcggcaatatccgagaagtttcgctggtgggtctggcgcgttggaccacaccaaggaggtggacaccatcaacctcaagtttgcagaggcgagggaagagatagagatggcgttggagtccaaagataccgtttatttcgacgaggaagccgagtgtgcacgcgccgccgtcaacgaggttttgggcatgttcgagggattgttggctaagttgccagagagggaaagaggggctctgcagaggtctatgggtctcaagattgaacaattgaaagctgaacttgcacaattgaatgagtaagagcttgattgtgcggctgatagaattgctttagggtgttttattggctatagttttgaataaatgcattgaaagccaagccaactctaagtcacttatatgtgagctctgactagtgactactactatggttctttttatttaaagggatgttgatgctgttattcttttggtattctcgttacagggtttgcatttgttgtattggttttcaattaaagggatgttgttataccaattcttagatttgctgatagtgtgacgaggacaggggaaactagttgattgaggtgcttattaggaaactgaaagtaacaaattgacaatcaataaacttattttaataattacaactctaattgttgttt

SEQ ID NO: 135187 - DNA, 416 bp, Glycine max
  Clone ID: PAT_MRT3847_93083C.1
gaggctgacgtaaacaggacatgggccctaaattctggaaagactcaaagcatagattgcagacctgtgaagatccatgcgttgatgacacgctgtgtggttgatgctggatgttgaaacacacgttgtcacacaaagggtggggctatgttaaatttgacaagcgagaggattacttggagtatggtattgtatgaccaaatataagtgtggtttaggactaggtatttggattttggcgggtgtttttatattcttcaactgggaatgatacttcgtgggcctatatgtacatcacatgcgcgaggatttttccatcgtagttcctggaggagccaggaacctgacccaatgaagagaccctattctttgtttctaatgtttgtaaagattcattgtttaatccaatggaaact

SEQ ID NO: 135188 - DNA, 767 bp, Glycine max
  unsure (1)..(767): unsure at all n locations
  Clone ID: PAT_MRT3847_93084C.1
gtaaagagaaatgaatgtaatgatatttttgcgtttggagcgaaacagaacagaacagaacagaggaaagacattgatagattgatcatcgatgaagagggagaaggagaaggagaagggcgtggctgtgacaagccctgtgagtggcgaagacagcgatgataagcaacgcccttcctttccctccgtcagattctcttcccgcaacgcttcctccaaatacgatttcgtcaaggtgaaggtgtggttgggtgataatgcggatcactactatgttctctcccgatttttgctcagcagaatgctaacggtaaccaagattccaaaccacgttgctatcaaaattgctctcgaattgaagaagctgctcacagataacagccttctagatgtctctcaatctgacttggaagtcaacctatttaagcttatggagcggcggggatatggagaagaatacataaatcgttacaagatgatgacgagatttcatcatcaaagagttccgttagtaatccttgtttgtggaactgcttgtgttgggaagtctactattgccacccagcttgcacagaggctaaatttaccaaatgtattacagacagatatggtttatgaattgttgcgcacatcaacagatgcaccattggcatcgactccagtatgggctagagacttcagttcatcagaggcgttaataactgaattttgcagaaaatgcanggttgntcgcaaaggtttggctggtgatctgaaaaagcaatgaa

SEQ ID NO: 135189 - DNA, 455 bp, Glycine max
  Clone ID: PAT_MRT3847_93085C.1
cttctgtgaatgagccagtcactgaggttggaggagacagtaacaagaacacaactgacaacggaaaagctgtggatgagttggtcactgaggttggaggagacagttacaaggacacaactgacaacaaaaaagctgcggatgagttggtcgctgaagttggaggagacagtaacaaggacacaactgacaacaaaaaagctgtggatgagttggtcgctgaggttggaggagacagtaacaaggacacaactgatgacaaaaaagctgtggatgagtcggtcaatgaggttggaggagacagtaacaaggacacaactgacaataaaaaagctgtggatgggtcagtcactgaggttggaggagacagtaacaaggacacaactgacaacaaaatgggagtcaaacatgaatagattatgtaaattcttgtgaactggcttgggtggctaatc

SEQ ID NO: 135190 - DNA, 130 bp, Glycine max
  Clone ID: PAT_MRT3847_93086C.1
cacagatgtagatcttttgcttcgtctccttcatcgcctaggcttgagttgcatcaagactccttcctcttcctctttctcgtccagtttagttcaatctgtgaattctcctccttatcaagtcttcctc

SEQ ID NO: 135191 - DNA, 273 bp, Glycine max
  Clone ID: PAT_MRT3847_93087C.1
ggggctaaaaacatccattaattaaactcggatcccaggtacacctttccctgggctaaactctactacaccaaggaaaagctcccggttttattaagggaaccatacataaaagaaaaccgaaaagaaaagaaaatcaaagggaggagtagggggcacctaagggtcactaaattgtgagaacgagatacaaaagggggggcaggccacatggaactttggggctatatcccaggggagggaaagggccctttcagagcgcatcttttcctt

SEQ ID NO: 135192 - DNA, 202 bp, Glycine max
  unsure (1)..(202): unsure at all n locations
  Clone ID: PAT_MRT3847_93088C.1
tttttcgntnnnnnnntttttttttttttttggaagcaggaactatcaggatcatttacgggtatgatactcgcctagggagattcaaccaattcctgggccttattaaattggccaccaaaataagtacggggttgttatacataaaataacccacaaatcccaaaaaaattgcctttttaaactgtaaaaaactctttgt

SEQ ID NO: 135193 - DNA, 371 bp, Glycine max
  unsure (1)..(371): unsure at all n locations
  Clone ID: PAT_MRT3847_93089C.1
aacttccttcgagccgagcgacgcacggggaccaatgccagctttggaacacaccacacaagagggccaaagagcagcaaaagcaggagcccgcggcaaccaccaacaccngccaaaaccaaaaccaaacgcaagaaaggccgggcaaaggcgaagcggaaaaggaggaggaggccgaggccccancagcccaaagcgggacacacaagggngcgcacacgccgggagacaccacaggagggcccgcaaccacgcccgcgcaacggcaccaaccagggcagaaacgcaccgccaaccgacgcacaacgggcaccccccaccgagcacccagcaggccagacagcccgggagaacccaacgaggacacgaag

SEQ ID NO: 135194 - DNA, 241 bp, Glycine max
  Clone ID: PAT_MRT3847_9308C.1
cccttataaacgcggcaagacaccaaagccagccgggggggatccacaggcgaccgccccctcccccgcaaacgcggaagcccccgcatgaaccggaacacgcgccaccaccgcctgcccgcccgcccaatacaacaaaggaaacgaggcaagacccctccagctgagcacgccctgccaacgagaaaatccccacacctccttcaaccgccgcaatgacgcgcgaagcgcgcgccacccc

SEQ ID NO: 135195 - DNA, 279 bp, Glycine max
  unsure (1)..(279): unsure at all n locations
  Clone ID: PAT_MRT3847_93090C.1
gcatcgaaaggagaagatatgcggtactttgatgtattttcaagtcgcttctgtgtcctctttgaagagttgacgccaattcatagttgaatgtgcataatcaaagccaatccaaacacgcacttactctctgtccaggtgggattggtganaagaccccccttatgggagtttgagtagtttagccattttgaaatttggacctcggtttagaattttantancaatgtagcaatggnagaaagcagagcggnatgagaaaatgtgacaaaaagtcaa

SEQ ID NO: 135196 - DNA, 364 bp, Glycine max
  Clone ID: PAT_MRT3847_93091C.1
atccgaaagattcatttaagtcatgcatgaaatacgcagaacgagtgatttccaattcacatagttttcaatttttagccccctgtttccggggttgggactgtatcattgaaagaccacatgcacggacccctctgagctgacatttatgatggcaatattattgtgaaagcctaacaataaataaatggagccagcttctggttctattttaacccataaaggaggcgtggacaagcttttatatatgggtactttcacaatgctgccactccctctacaaccggacttaacgtcagcctttgttggacaatctttgccttccaagaatacacagggaaaggcggaataagcccctaatacc

SEQ ID NO: 135197 - DNA, 129 bp, Glycine max
  Clone ID: PAT_MRT3847_93092C.1
cttgcttgggcgcgcacacgaacgcgaaaacatggagggtaaagctgaaaagcaaacgggggcgcccagagccagagaggactacgctaatgtgcggaaggaagtgctgacgggaccaggggggaaaga

SEQ ID NO: 135198 - DNA, 572 bp, Glycine max
  Clone ID: PAT_MRT3847_93093C.1
tttcccttttttttttttttttttttttttttttaatcgaagttgaaattggatattccaggttttaaaggcactcagcaacacccatttgtttttaccacacagtacctaagattaaaaaaaaaaaaaaaggcggagggtttccccagtagcacactttaggatgggccaagttcttttttaaaaccaagggaaataaaagaaccaaaggcacccaaatcgcatagagaggaaatatgttatccatgctttgggattcaccaactggttttggttttttaacgggcatgaaaaaaaactcagggagcttccaatactccatgtggggagcctgggatctgcaccgccaccgcccacaaaaggattgagagggggggaccagcaaaaactaaaatctgcatggccaccaaccaaggcttttgatcccaacagggaaaactcaaatttgccccaccaccgaccatggctttcaatcttggcagaaaaaactaaaatctgacccgccaccaaccatggttttgggttctaacagaaaaaacttaggtctgcaatgtttggttttgaaggggttg

SEQ ID NO: 135199 - DNA, 287 bp, Glycine max
  Clone ID: PAT_MRT3847_93094C.1
gcttgggtcattcttacattgggcagttcaatatgaggaccttttccctcttttcttgtctttttttctttctttctgtcttatccaccactctgttccaccctggtcattcccttcaccaccaccctcactctgtcacacacaactacagagatgctctcaccaaattcatcatcttttttgagggccagcggtcagggaagctcccttctaaccagaggatgtcttggaggagagactcttgtctctctgatggctcaaccatgcatgttgatttggtttgtggg

SEQ ID NO: 135200 - DNA, 559 bp, Glycine max
  Clone ID: PAT_MRT3847_93095C.1
ctcgagccgaatcgatccagcggctagagggttgaggaactttgtgcacacaacataatcagatattggtttgtaccacctcctagactcggggtgtgaatcttccatctcatctactgattatacactgggacagaatactatgatggaaaagcacagaacgtatgtagatttttcaatcactgatatttacgcaaatcattggtcgcgctgtgacgaccctcaatctgatcaacatgggaaagctgctattcttgttcatgaacccagtaagagcttgtatgaaaagttcttgtgtgaacccttcccagacgagagtagatggagacatcaatcgcatgaacacattactgccgaaattatttgtgaaaccattcgccataaacaagaagcagtgcattatcttacatggacttacttatttagtacactgatggataatcctgctaactatggataggacgatgctaaaattgaaattataaatacatattcatccatcctacttcaaacgactatttatgattaggaaaatcggcgtagcttaaaaaaggatgaa

SEQ ID NO: 135201 - DNA, 523 bp, Glycine max
  Clone ID: PAT_MRT3847_93096C.1
ggaaaaatgagcatgaaggaaagctaaataagtttgatttatgatgttgcacgtattcgctgatatgacagatcactctgctagggatctattggccagagtgagaataggtgcatgggattctaggtgtgatacaagtcagcatcaccttagagcagcgttttataggatcatcatacgatgatgtggagggaaaagctcagggcttgatgtagtctagaatggtgaatattgaagcaatagtatgcttgggatgaccaccgttagactttgaggggatgaatcggaaactcgccgtatgacagacgatcttgcgaagtctactgaattgtgtgagtcgctaactaaacgttgcattagataaagatggatgtgctgattatcaccctaatattactgcagaaatgatagctggaccattaacgaatatagtatcgttgggatggcaatgacctaagctagagaactaactgaacaggcgggtacaacaggagttcaagtacacagtgcatgacgtatcgac

SEQ ID NO: 135202 - DNA, 363 bp, Glycine max
  Clone ID: PAT_MRT3847_93097C.1
atctgtctggtcagcccgtgaatgacttttcagcattacaaagttttcttaagtattcacacatacaatatgaatttctagacaagcatgattgcggagacccaagcttataacgaatggagaacgaatgtgttgagattgatatcaaggatgaacgtttcatcttgcgtcatcacagccaacttctactgctggcttcaaatcaacatacactatttactgaagacttggatgactatgcactgacgacgttgtctcttgaagctcgctaaaaactatacaaggttaggcctcaaaccattgtccatgcaagcagagtaagtggagtgagccctgctgatatcactggtctagtcattgtgc

SEQ ID NO: 135203 - DNA, 265 bp, Glycine max
  unsure (1)..(265): unsure at all n locations
  Clone ID: PAT_MRT3847_93098C.1
cnattctggagtntggagtagtaattccaaatcacntactactnncattctntnagtntggagtagtangtgatttggaattactacagaangattgtcatgttcttgttctgnagtaatnnnaaatcacctactactccntactccagantgcannaatctnccgctttggaagttttgganctggaaaccccctttctggatctgggtcntntacntcnagtgcctttgaaaagnagcttggaggatanatctgggngnanat

SEQ ID NO: 135204 - DNA, 273 bp, Glycine max
  unsure (1)..(273): unsure at all n locations
  Clone ID: PAT_MRT3847_93099C.1
aaatttgatttaatatacaaattttaaaagcatgcaaaatctcatgaannnnnnnnnnnnnnnnnttcaaatattataattaaaatttcgnagttcaattttatttttaaacgccaactctaaatttaatctcatgcattaaacaaatacttcaaaactttcaaacgcttacttangttttgattattggtgtgaataatatttattatttttttcaacaaaaattctttggcttaaaaattgattggatcacctttaataaatttttatttc

SEQ ID NO: 135205 - DNA, 707 bp, Glycine max
  Clone ID: PAT_MRT3847_9309C.1
ctcgagccggtgggaacttgggctcggtggtggatgaggggtggatgaggggaattgggaaggatgaataagcactgcgctttagaggcgttttggtgtttcagggttccaagtcgaatgcttaacttattaatgatgtgaagatgaagcttcatggttatcaccgaattgccactgaatgtccttgccatgaacctgccatgatggctctgaaatgctcttctcgtgcaaagtgcttgggattatgagtccagaggaagctatggagcaatatatcagccttctatcagaaaacattcctgattggattgtagaaaatccttatgataatgctaaaccggcatcagcctaactaacctgatgattcggcttctgcacctaaccttgccatttgaaggcagctctaatataacaaagaagccgaaatttgtaaggtatatccttatgagatttgacgtcaagtgtgcgtgtgtaaaagtaaaactgcgctgcagggaagattaatggtagaaggatgccattgggtacttaacacatgataatggagttggggtttaccatatttggtattctttgttacctgcacaatactacagatccctgggatcaacgaactgaagaagcaaattcgcttgtaaaattatggttattgagttgtagttgtaggcacattatcaaataattctgcttctctctgtaaagaggaa

SEQ ID NO: 135206 - DNA, 557 bp, Glycine max
  unsure (1)..(557): unsure at all n locations
  Clone ID: PAT_MRT3847_930C.1
tggaaatcaaaaagaggtaaaataataataataataaaaaatataccttttagtaaaataaagcgaaaaatcaattggacgttttctctttgggatttctcattcttaatcgaattgactagtaactaaagtgaaactaaggctaaaatcaactcgcctagtcaagctcgtccataaaaataggtttttttaagtttatcatttcaatttcttactaagtaaaaaggatcactttcaaggtccaacgccttaaaatgatcatcttttaaaacaaaaaagaatcacttgataagaaagaactacgtaggtctgattttctcatcccaattgaggaatacattggagcaaagggaaacacccttgtcaaccacaaaaaaagaaaagaaaaaatataaaaagggtataaaggatataatgacataaaagggaacgtaaaaatcaaagtcatgtttgcacattcgattaagggttgtcgtcccttgtgacggacgtgtggggtgctaacaccttccccgtgcgttaatacaactnccgaacctttcactaaaagttcgtag

SEQ ID NO: 135207 - DNA, 445 bp, Glycine max
  Clone ID: PAT_MRT3847_93100C.1
gcacgagctcttgccgaattcggcacgaggataaatctacttaattatgtatttaaccttgaataggcaaaaccaaccttttgattcttatgcatatagcagtaagaaaagaacccagataataattttgtttcccaaatatttgataatttccaaactagtacagatagtatagctaactagattgaacatccagacctaattattttgaattttcaacatgtgaggtgaaaaataagatcatctatatgaacccacagtaacaaaattatcacagtacaatacatataagacaattaaaacacatataggggacaatcaaacctaattttgtaagtgtgtgcagtgtaccagacttaatcccttgtagcgccataatataaaaccattcatgtcaccatgtgtcttcatctagcagtttataataacttaatcactgttagct

SEQ ID NO: 135208 - DNA, 633 bp, Glycine max
  unsure (1)..(633): unsure at all n locations
  Clone ID: PAT_MRT3847_93102C.1
ggtgaccctctagaaagaggatgacgtcgcatgccaccgccgtaccgtaagncttggnatccttctagaggcggcgcgccctcttttccttttttttttttcttttttttgtgatgaattagaagcgaatgctgctgacacctcattctaattcacaataaggtgtgagtctatacaagccaacagagcgaacaggataatattggagggtttaccaatactcatatttacagcttacgcgttataaacactacgctaacaaaaaattcacattagtattctcagcaactgccactgcttatctatccctgatgcatccatactatactagaatgtttcctctgcctttatgaaactgaaatattcaaggtgggtcatctctccaccagctgcaaactcaaactgacatggattgaagctgccatccatgcctaggattacaacagcacccttttgaaggacaaatgctgcagcatattgttaaccttcttgcggcgaagttgatccacaaaccactctgaactcaaaacttgggtagcacacctttacaacaggaaagaaacgaacgtctcattgttggtatcacaatctgcctgaaaaacactcgtgctagctatcatgccccaacagccc

SEQ ID NO: 135209 - DNA, 795 bp, Glycine max
  unsure (1)..(795): unsure at all n locations
  Clone ID: PAT_MRT3847_93103C.1
cggnaattcccggcgtcgacccacgcgtccgcaggaaagtggaccagataataaacaaagtacccttgttttccccaagggaaatcccataccaagtgtcaaggcactgaccatctacaggggctcgagcttttctattgatgttcagtatgatgacgtgagtggtttgcaaacacctgcaaagatcagcacatatactattggccctttccaatctacaaaaaatgaaaaagcaaaagttaaagtgaaagttcggttgaatgtgcatggaattatatctgtcgaatctgcaactctactggaagaggaagaagaaattgaggttccagtttacaaagaacctgcaggagaaaattccaagatggaaactgatgaagctcctgctgatgctgctgctgctgctgcaactcctagcaccaatgacaatgatgttagcatgcaagatgctaataccaaggcaactgctaatgcccctggagccgaaaatggtacccctgaggcaggagataagcctgtgcagatggatactgataccaaggttgaggctccaaagaagaaagttaagaaaataaacattcctgtggtagagttagtttatggagcaatggcagccacagatgtccagaaagctgtagagaaggagtttgaaatggctttgcaagatagagtcatggaggaaacgaaagataagaaaaatgcagttgaggcttatgtttatgacatgagaaacaagcttaatgacaaataccaagagtttgtcattgattcagagaagggagcatttactgctaaact

SEQ ID NO: 135210 - DNA, 1819 bp, Glycine max
  Clone ID: PAT_MRT3847_93104C.1
cccaatatcttttccgggggtacaatacaaattccgaaccccccatattcctccctcgccgatcgctcacgtcagatttgtttttttttttctttctgttttggaatgcgcaattcttagtccaacgttcaaagtacgagaatttcaggtcaacgaaagccttcctttctcgatttctctttcatggaaaggttctggtccagatgcacaggacaatggatcagaaaatcagcagagttcccttgtttttcctaagggtaatcccataccaagtatcaaggcactgacattctgcagggcaggaacattctctgttgatgtattatatgatgatgcaagtgggctgcaaacacctgctaagatcagcacatatactattggtcctttccaaactacaaatgctgaaaaagcaaaagttaaagtgaaagttcggttgaatcttcatggaattgtatctgtcgaatctgcaactctgctggaagaggaagaaattgaggttccagtttccaaagaaccagcaggagaaaataccaagatggaaactgatgaagctcctgccaatgttgctgcacctcctagcaccaatgacaatgatgttaacatgcaagatgctaattccaaggcaactgctgatgcccctgggtccgaaaatgggacccctgaggcaggagataagcctgtgcaaatggatactgataccaaggttgaggctccaaagaaaaaagttaagaaaataaacattcctgtggtggagttagtttatggggcaatggcagctgcagatgtccagaaagctgtagagaaggagtttgaaatggctttgcaagatagagtgatggaggaaacaaaggataagaaaaatgcagtagaggcttatgtttatgacacgagaaacaagcttaatgacaaataccaagagtttgtcgttgattcagagagggaatcatttactgctaaacttcaggaggtagaagactggctatatgaggatggtgaagatgaaactaaaggtgtatacattgccaagctagaagaactcaagaagcaaggtgatccaattgaagagcgttacaaagaatacatggagaggggtacagtaatagatcaacttgtctattgtataaatagttatagagaagctgcaatgtcaaatgatcccaaattcgatcacattgacatcaatgagaaacaaaaggtcttaaatgaatgtgtggaagctgagaactggctcagggagaaaaaacagcaacaggactctcttccgaaatatgtcaccccggtacttttgtcagctgacataagaaagaaagctgaagctgttgacaggttctgtaagccaattatgatgaaaccaaagccccccccacccaagccagctacaccagaagcaccagcaaccccacctcctcagggtggtgagcagccacagcagcagcaacaacaaccacctgaggagaatcctaatgccagtactaatgaaaaggcaggggacaatgctaatccagccccaccaccagcatctgctgaaccaatggagactgacaaaccagagaacacaggctctgcttaatttttgttgattttgtctggtctctacgttttgtataacaatttgaattgtacctggaaaaatcgtcgtgggtgagagttgatgctgggattctttgctggaaaaattggtaatgggtgaattatctgagattcggattatttttggtcaaatctacgttctataagtggaattacaatgcttgtttacatttgagttaaatgaccctattttccttttgcgtggcattataactttttcattttgttc

SEQ ID NO: 135211 - DNA, 197 bp, Glycine max
  Clone ID: PAT_MRT3847_93105C.1
taaaaactgatattcagcaacgatatggctttcgtgtgtactatctgtctgctcagatcccacagatctgcatcttcttattcttcctttccatattgtgtgtgtgaattagaattctgcaagatcagatctctctctgcgagtacatcagatctccgatgtctcagtcatgcgctcaggtggtccacttcgacaac

SEQ ID NO: 135212 - DNA, 128 bp, Glycine max
  Clone ID: PAT_MRT3847_93106C.1
ctgctcgaggatttgtctgatactgcttatatcattcacttttgctgctgcgactggatgtatcgacctttctgttgggcaggagaaattccatggtcaagccttggatacccaccatttttttgaca

SEQ ID NO: 135213 - DNA, 359 bp, Glycine max
  Clone ID: PAT_MRT3847_93107C.1
gaacacaccacccctacactatcttctaaaacttaaagcagtgatgagcggatctgagatgaaaaagaaaaaaccgaaacatacttaaactgatgctaccgatgaaaccatttagaccaaaacaaaaaaaacaagaaagtaatatgaccctactgtgactgcggttaaataaaagaaatagaacacaggacttgagtacgacacctcgattcctttcgcccccgccattaaaaattcgctagggtcatgtactttatcgaataacggccgtgattctatccccgtgatcgcattatatttggggcgggggggcaacaaccccggagtgtgtgatccattcaaccaacccaaagacctta

SEQ ID NO: 135214 - DNA, 229 bp, Glycine max
  Clone ID: PAT_MRT3847_93108C.1
tatagcatgtaaactttatatttcttgacttcttcctctaggaactgaggtttcgatgcttcttcaatcccttttgcttcttcttgatctaattcgccatcattctcaatccctagtttctcctcaacgcgaaatgcttgatcctcttcctgtttctcaagggcattggtgtttatttctgcagtctcctaaggataatgttggggagtctccacctctccgttaaact

SEQ ID NO: 135215 - DNA, 256 bp, Glycine max
  Clone ID: PAT_MRT3847_93109C.1
ttttttttttttttttttttttttttttaatttggtttttatttgataagtttggccaccgggacaggaggagaaaaaaacgtgcacagcgcattcaggagaatgtagcagcccatgtattaacaattctctggggcgagaacggggatcgaggacggggtaaaaaaaactcccccatgagggggaggaggaactgggaggcaaaaaaaaggtggatttggacccaaaaggtagccccgattttccctttttttat

SEQ ID NO: 135216 - DNA, 263 bp, Glycine max
  Clone ID: PAT_MRT3847_9310C.1
ttcgagttgtcaataatggttctgattctgctctttgaagcaggaactgtcgttgcttgagtttggagtcctcgctgctctcagatgtcatcctcctgaatgtctccgttagcaccgttgaggtcgaatgcagatgtagcatttggatcggtggatcaggaatggacctgaggagcaaagcaaggactctcccaggaccagttagcgacccttcagagctcccaagtggaactatgatggttccagcacaggtcaagctcctg

SEQ ID NO: 135217 - DNA, 569 bp, Glycine max
  Clone ID: PAT_MRT3847_93110C.1
gtcagctcggaattcggctcgagttgagctgacacgaggagaatcagagatgggagtacaaggcactatggaatacttatctgacttacttagcaccaaaaagaagaagaagaagaagcaagtccaaactgtagcactgaaaatcagaatggactgtgaaggctgtgcacgcaaggtcaagcatgttctttttggtgttaaaggagctaagtcggtggaagtggacttgaagcagcagaaagcaacagtgacaggatatgttgagccaaagaaagtgcttaaggctgctcagtctactaagaagaaggttgagctatggccatatgttccgtacagtatggtggctaacccatatatttctcaagcctacgataagaaggcacctcctaatatggtgaggaaggtggctgacactgccaacatatcagaaaccaccgtggatgatcgctacatacaaatattcagtgatgaaaacccaaatgcctgctctatcatgtaaaatattaattgattaatatttgtgtagtcaatttcacattaaatattgtataagaagataatattaaaaa

SEQ ID NO: 135218 - DNA, 1442 bp, Glycine max
  unsure (1)..(1442): unsure at all n locations
  Clone ID: PAT_MRT3847_93111C.1
gccccacgtctcgaactgagattaatactttggtaccaatctcattgattaaaataaaaaagcttgtgagagacagataagggaaacggtgtgccacgaacacgagctacttgttacagaatacaactaaagtaataataacgtttaaaatgtaactccaaggtccaaacttcgcttctgggtgtgactccaaacaaaaactactacttgcttagcacacaatattatgaaaaccaccgcagaggttgtttcatctcattgtcttgttgtagcagagtgctctcaatccagccccacacaactttctgctatggaacctcagattctgaatttggggtgcatgcattacagaaggagatgcaagatcagagcgccgtgctgtgatgaggtttttgactgtaggcattgccataatgaagctaagaattctgaggaggttgatgctgtggatcgtcatgatgttccacgccatgaaattaagaaggttatctgctccttatgtgatgtagagcaagatgttcagcagtactgtataaactgtggaatatgcatgggcaagtacttttgtactatatgcaaattctttgatgatgatatttcaaagaatcaataccactgcgatgaatgtggcatttgcagaactggaggcaaggataattttttccactgcaaccgatgtggatgttgctactcaaaggtaatggaaaaggggcaccgttgtgtagaaggagcaatgcatcacaattgccctgtttgctttgagtatctttttgatacagtaagagaaatcagtgtcttaccttgcgcgcatactatacatttagactgtgtaaaggaaatggaaaaacatcagaggtactcatgtcccgtttgctcaaaatccatctgtgacatgtcaagtgtgtgggagaagcttgacgaattgattgcctcaactccaatgcctgaaacctacaaaaacaagatggtgtggatactttgcaatgattgtggagtaaactctcatgtacaattccatattgtggcccataagtgcttaagttgcaactcatacaacacaagacagatacaaggagtacctgccacatcaagctcttctagggtaactgaaatggtgagatgaacatttgattgcaaaaaggtctcttggaatggaaactgttagactattgatgtgatagagaaattagttgcaagttgttataatttaaatttcaatagaaacagctcttgttgaacagagttactctgttatgacactaaaattaaactctagttatcaaacttagatattaggaggataaacttggtttaggatgtgttgtattagtgttcttaaaacctaagaaacaattagacttcattgtcaatgccatcatggcattatctgaaaatcatgtaaagattcagaacaccgataannnnaannnannnnnaaaaaa

SEQ ID NO: 135219 - DNA, 382 bp, Glycine max
  Clone ID: PAT_MRT3847_93112C.1
gaaaaacaagtggttgagaactaagaagaaggaaatggcttcctcaatgatcttctccccagctgataccaccgtcaaccgtgccggtgccggcatggctggtccattcaccgggctcaaatacatggctggcttccccacggaggaagaccaacaatgaccttacctggattgctaggcacgggggaaagagaccatgcatgcacgtgtggcccacaattggaaagaagaagttcgagactctttcctacttgccagacctcgatgatgcccactggcaaaggaaggccaataccctctaaagaaaggatgggatcccttgttgggaatcacgctggaacacaggtttgcgtaccctgagcacaaaaaggcacctggatac

SEQ ID NO: 135220 - DNA, 363 bp, Glycine max
  Clone ID: PAT_MRT3847_93113C.1
catttgctttagctgcctcaccttgtagtacacctgttctggccactcttttgggatatgttgctgcatccaaggtacttcctattaagaaccaataggtattcattattcctttctggcaacatttttgtgcagggttagcaaaagaacttaagcaaactagtgttatttcctcttctgtttcagttaatcagttcaaaaactcaagagggttctaatatgtcaaattacttctgtttacaaaactttgaatctaatatggctctgtttgaatatatttcttcatgaacacttgtaggagaagatactaaggtaaattaaatatagattcttccataagttaaacttttatgaaagctttct

SEQ ID NO: 135221 - DNA, 235 bp, Glycine max
  Clone ID: PAT_MRT3847_93114C.1
gcgcattagttatcaggcgctaagcatgctttttccactgaacctgtgcttcgcgctaagcgcctgagacatgctaagagcacctcttcaaaatttcaatatgttcttttggactttactttactcattaagcatcataaatttatcaacttttaatattttttacacaaaaacttaaatgatgttaaaataataattatttgcacaaaaaaaaaaaaaaggggcgcccgcggct

SEQ ID NO: 135222 - DNA, 461 bp, Glycine max
  Clone ID: PAT_MRT3847_93115C.1
agacgaaactaaaaaaaatctcattatttagcacagtcgtgaacagaagcaacacggtatgcttaactcgtagtctacttgagctagctagcacgcctaccaaagacacaagctaatggatagaataattctcactaaccccaagccagaagttttcgaagatagccttggcaatagcatggattgcatcatgggcaatctgatgctggacggagctactggttataacagtgatctgtacaatgagcttgttgatcattccagcacgaacagccgccttataacctgtgccaacagaaattgggaactgaacagtggcccctaaagcacggtctgccatccactttacaaaagaaaatgctaatgaagactgggcctggccaaatggaaaatctgcctctgtaaaccttacttcaacggtggcaccctaagcagaagcaagtttagacttgacaacccct

SEQ ID NO: 135223 - DNA, 435 bp, Glycine max
  Clone ID: PAT_MRT3847_93116C.1
tttttataaacatttgcttcttccatttgttaggagatcaatttcatatataatctatattctcaattgcaagtagtaagattaggtctcaatcagttaattattacaaaccatatgcactacataacaactaagcgttgacaaacctacaattcctcctaatttccccctcatttcctgtaagaacattgatgtttcccatcttaatcatagatttagcaaatgaagcaaagaaaagtttttcattagaggcataagcccacacctgctctgtaatctttccatctaagtcatggctgataagaacattgtcagaacctaacaagcctttcccttcaagaatgtttatgaagtagtgattgtcaaatctttttggggtttgaaaatccaagggtgcaaatttattgtcccttccctcaacagggcatatggacc

SEQ ID NO: 135224 - DNA, 132 bp, Glycine max
  Clone ID: PAT_MRT3847_93117C.1
aattaggcaagtagtatattaataatactacgtctccctttgactatagacattatcagacggccatctccaattccaattctcgtgaactccattcattcattttcttttctttgtgctctgcacatccat

SEQ ID NO: 135225 - DNA, 396 bp, Glycine max
  Clone ID: PAT_MRT3847_93118C.1
acgcgtccgttccgctcacgacaagcaccacacacggggggtataggctttctaaggggggcggaagagagtgagcaaatgagagctatttctcacatgcaaggggtcctttgttaaacaagagccatgatgattggaccaccctttaataaagcccctgccactcaatccctgccattagggcgtcaagaggctcttttatccccactcctggaactgatttcagctgaaatgggtcccacattagcgcatggccttgcttagctgcatatctggattctcaacctcagggcttaccagatgagaatgttccaaatcctgctgctatttttgtgggcgatttagatcctaatgtcactcgcggtcacactgggcgggaggccaaacgtgctgggc

SEQ ID NO: 135226 - DNA, 1869 bp, Glycine max
  Clone ID: PAT_MRT3847_93119C.1
ggctcgagggctgcaacaacacactttggttatgattcagaagctgaggagcggaggcttaagaaacttgctcttcgggctaagtttgactctcaatttgatgatgactctgggtcatcagaggaagatactggtaatgaaaatgactcgagccgattcggctcgagagctaatgaaagtagctattttgacaagttgaaagaggagattgaactccagaaacaaatgaatatagctgaactcaacgatcttgatgaggctacccgattggagatagaaggcttccgaacaggaacttatctaagattggagattcatgatgttccttgtgagatggttgaatactttgatccctaccatccaatattggttggagggattggtataggggaggaaaatgttggatacatgcaggccaggttaaagcggcacaggtggcacaagaaagttttgaagactagagacccaattattgtatctgttggatggaggcgttaccagacaaccccaatttatgccattgaggatagtaatggaagggatcgtatgctaaaatatactccagaacacatgcattgccttgctatgttttggggccctcttgctcctcccaacactggggttgtagcctttcagaacttatcaaacaatcaggcaacatttaggattactgcaactgcagttgtacttgagtttaatcatgcagcaaggatagtgaagaaaatcaaattggttggttatccatgcaagatattcaagaagacagcacttatcaaggatatgtttacctcagatcttgaagtagctcgttttgaaggtgcagctattcggacagtcagtgggattagggggcaggtcaagaaggctgcaaaagaagagataggtaatcaagcgaaaaggaagggtgggcaaaccaaagaaggaattgctaggtgcacttttgaagacaaaattctgatgagtgacatagttttcctgcgtgcatggactcaagttgaagttcctcagttttataatccattgacaacagcattgcagcctcgtgacatgacctggaaaggaatgaaaactgttgcagaattgagaagagagcataatcttgctattcctgtaaataaagattcactttacaagaaaattgaaagaaaacctagaaaattcaatccagtggtgattcccaagtctctacaagcgagtctaccctttgcatcaaaaccgaaggatatttccaagcgaaaaaagccgttacttgaggagagaagggcaaggggtgttgtcatggaacctcgagagcgcaaagttcatactcttgttcaacacctccagttaatagatagggagaagatgaaaaagcgaaagcttaaggaagagaataagaggaaagcacttgaagcagagagtgcaaaagaagagctgttgttgagaaagcgccggagagaggagagaagagacaaataccggaaggaagacaagcagaataagaaaattcggagagcagaggtttgagtttacgacttgaaccaactccaaaaaagagaaaaatgaaagaggaaatttcacgtattcagcatcgtgtcgtttgtttttgaaatgttgctctacggatttgtggaattacggggcaacattgatagataaaaatgcttggggattgaaattagtgagcttagaattaagcgtgcttcggcttctaaatcatgttagttacatgtattactacacaaatttataataaaattgttttgcatgttgttactatcctgaatatcatcaattttgatcgaggatttgaccttcaaccgtgcttgtgtaaaaaaattatttcaaattccatggaaaataatttctattggtttatgaactgtgctt

SEQ ID NO: 135227 - DNA, 918 bp, Glycine max
  Clone ID: PAT_MRT3847_9311C.1
ttcacctcaataaacaacccttcctctgcttcagtgccttcccctgcttcagtgccctcccctgccttttcagctaactttttcttttaatatcatatcactcatgtcttacttacagtctcaggtctacaaagagagaaagtttgaagaagaatcagaagaggtcactcttgatgggagtgttgatttccatggacgtcctgcaatcagagccaaatctggcagatgggtggctgcaattatcatcctcttgaaccaagctctggcaactcttgcattttttgggattggagtgaacctagtgttgtttctgacaagggtggtaggacaaaacaatgctgatgctgccaacaatgtgagcaagtggaccggaactgtttacatcttctctctagtgggtgctttcctcagtgattcttattggggaagatacaaaacttgtgctgtctttcaggtcatatttgtaatagtctaattaatatcctctctatttcatttccttttccttattcttcctctttaatttcaagctaatacattccttaggtaataaactaatcttctagtttgaaataacagggtctagtatcattgtccctttcatcatacctctccttgattaggcctaaaggttgtgggaatgaaacaattccatgtgggaagcattcaagcttggagatggggatgttctacctctcaatttatctcattgctttcgggaatggagggtatcagccaaatattgccacatttggagctgaccagtttgacgaggagcactcaaaggagggttactcaaaggttgccttctttagctacttctacctggctttgaaccttggttcactcttctcaaacacaattctaggctattttgaagatgaaggactgtgggctctagggttctgggtgtctgca

SEQ ID NO: 135228 - DNA, 897 bp, Glycine max
  Clone ID: PAT_MRT3847_93120C.1
aatctgactatataattcaaccacgatttatcatttaaacatacagtcatctcattcatataatcacaggatatcaataagtttcaaagtaaaaaacgaaaaccatcattaatgtcccaaaaacaaacaatgttgctaaagaaaaaaaagttgttaggggaaaaggtgcacgatcaaggccaggagggaaaggtggagcaataaagcagttgattctaatgttaggtgccatagcagctgctgttggtgctgctgccactattggaaccagtgctcacactctcactttctttactcaattctctctttttgccgctttttattatttcttcactacttattaggttttcacttgttcttatcctttcgtttctctatcgtagtcatcattacgccctcatgcagttggaccaaggctttttctcattatcttagacactgtgtttctggctgttgcaccagcgctttgcctcttcactttagccactgtttttgttgctctagctgctgccagcggttccttcggactcgccatatgcaaccaatttagaaaacttctgtgcgcaaaccaattgggcagtggtgtcatccttcgttgctgtgtttgtgttgctgattttgggggttatgtctgctttgtctcttgggaagcgtttataattaacatgcttattgcttggggctttggcttttttatctgtgtattattcctcaggattttgaggtttccatcaagttaatgaattgtgttcttgtaaaaatttgcgtacagcgtgcttgccttggctcgggtgggcttgttttgcttggcgtgtgaggttttaattttcttgaagtaattactgatgtgccgaattgatgattacttgtataaatttggtcaggtgttaatgaata

SEQ ID NO: 135229 - DNA, 478 bp, Glycine max
  Clone ID: PAT_MRT3847_93121C.1
ttgagctattggttgatgctctaccttagctttgaaaattttgctcctgcactttatattcttcatttttgttatgactaatttttgtccttgagggaccgttaccacttgttttattgccctcaggttgaaagtgacactgcataatttttcaatcacaatttcagctctcatcagaaattttcagatataaagtttaattcagcttgccatgcatgtacaaattgtaaatatgtgtacgacacttgcggatcttgtcggcagtacagtgtcacaactacttcctctctgtttcagcattccttttaacataagtgaaaaagattatacactataaaaaattttatatcctgagcgaattagaactcatcatacataataaaattattaatttttatgataattattttaaatatcataccaatgatgatgtataattagatgacaatttttataataattactttaaatatcaaaa

SEQ ID NO: 135230 - DNA, 482 bp, Glycine max
  Clone ID: PAT_MRT3847_93122C.1
tagtaaagaatgcataataaaatatattgcctgcgttttactagaacatattttagtccaaagtaattgagttcttctagttactgaaaatccacaaacactacaggatgaaggtagggttattctcccctgcttctttgatcataaactattttaatagagaaaaacgaatccacaaagactaccatataggaatggatgcggaatgcctttattcttccttttgagtaaatccacttttctgaagcaacttttgctaattaaaaaaggttgatgattgcctccattgaatggctcccctgaatcaagtgaagaagatgtgattctcaaaggaagagtcccaaacgtagtcctggttctggttgaaagtagtggagcaatccaagctggtgttatagcctcctttacaaacacacacaaacccattcccaggcggcgcaaagccgcacacaccggcggtactatcacacccactggacttg

SEQ ID NO: 135231 - DNA, 558 bp, Glycine max
  Clone ID: PAT_MRT3847_93123C.1
aaagaaaaaaaaaaaaaaaaaaaatcgaagcgaggacaatattaacggggaaaaacttcgcaaagggaaaaaaattatccaaggggcaacaaaaaaaaaaacaactatgcaggggggggccggagctcatgaccaggggaggggtctctgacaaatgggggaaaaaattgccacatggggaggcagccatagtggggaaaaacggccattttgttcaccccggtttgatatgcgggagaaccaaaaactacggggggggccaaaaacccggggggggcaacgggaaaggccttaaacgggttgcaaaccctttccttatcggtttaaaaaaaaagtttttcttcgggaagaaggtttttctcggccttaaaacattttattccctcaagaaaatttccattggttttttggaaccccggggcttgggtttaaagggggctcaaaacttggatggcataatcaagtatagggggtttattggttccaaaagggctcccgggctccaaaacagagctaagggcacaaaacctttcatggagtccctcccttcgaaatttt

SEQ ID NO: 135232 - DNA, 243 bp, Glycine max
  Clone ID: PAT_MRT3847_93124C.1
aggtaccggtgaaaaattcgggggacgacccactcctacaggtgtgagaaaaaaacaaaaagggttccggtgtgaaaaaaccccacaaaggggggttatataacataatgggtgctccaaagccggcggtttaaaagaaccaagcttaactacccctgccttccaagttaaaaattttttaatagggcaactaaaattaaattaatggcccgccgtttaaaaacgtcggaacgggaaaaacct

SEQ ID NO: 135233 - DNA, 524 bp, Glycine max
  Clone ID: PAT_MRT3847_93125C.1
atcttcagtacttggcttttcccttttttgttctagatcaacggaacagcagatgaataagctctaccgatggcgggttacacaaccaaagattactactagtaccttttcaaggtggtcctcatacgcgactccggtgtgggcaagttcaagctgatatcgcgcttcaacatgaacgagttcaacgtggagttcaagtccaccattggccgtgtgagttcacacacaccgcactttgaacgtaggtttcaatagtgatcaaggcccatatctgggataccgcaggccataaaaggtatcgggcgatcaccagggtttactatcgtggggcaactggagcacttattgtgtttgatgtacctcgccatgcatgattggagaatggagacagatgattgaaacaattgctgaaccatatagacgtcaatattgttgtgatgctatgaggcttgctagcatactcttcgcctctctgactggggctgactgaagatgggtactcctatgctgatacagaatgactt

SEQ ID NO: 135234 - DNA, 163 bp, Glycine max
  Clone ID: PAT_MRT3847_93126C.1
gtgctctagacggttcatgttcagatggaacttgaaattctgagtgtaaccaattcatgcgagaagaatatcttgatgctcatcaaaatgcgtagcgagatttgctatggagaagctcaaacgaatgtttgcaagtgcaagtggaaggctagggtactattga

SEQ ID NO: 135235 - DNA, 299 bp, Glycine max
  unsure (1)..(299): unsure at all n locations
  Clone ID: PAT_MRT3847_93127C.1
aaaagcccnacaaggacccancacccccaccnccaggnnacaaaaacaaaacaccaccaccaccggggnacaaggacaagggcccaccaccaccaccaccnaagaaggccgacaaanacccancnccnccaccaccggggnacaaggacaagggaccnccgccgcccgacaagaacccnncnccaccaccaccaccanacaaggacccaacnccnccaccacccccagcggatgactacaaaacaccgccaccaccacccaagaaaccacacaaggatccancnncaccgccaccacac

SEQ ID NO: 135236 - DNA, 502 bp, Glycine max
  Clone ID: PAT_MRT3847_93128C.1
gagtgttttggacgaggccgccaagcgcgcccgcttgcgcctgacggaaaatgatctccgacctatagtacgcggaggatctctttggcgacattgaccttaaccgcaaccggggcaagaacaagacaattgttgtgcatgacgcctcgggcgacccgacgcaggctgtagatctttccgcgatgcccctgttcaagccggcgaccaaggagcaatttaccacgttgtcgaacacgcttgtaccgcttttgaccgcgcagagcaagaagccgcagtatgcactctggctgccggagttcgccaagcagctggccaaggaattgcctagtggagatattaagaaggtggctagtgcgttgacgacgctgagcaatgagaagatgaaggaggagagggcagctgataagggaagcaagaagactaaggcggcttagacaaaggtgtcgctagttgcgtcgaggagtgacaaaattgagacgaccgcttatgatgatgatggttt

SEQ ID NO: 135237 - DNA, 1296 bp, Glycine max
  Clone ID: PAT_MRT3847_93129C.1
gcgtgcggctgctagaagactacaattcggcacgagtgtaggtgtgtgtgttgttgcacactctccacacttacacagagagaaaagagagagaaagaaaaggatcaaatagttaaaacctttggttctttccctccatagttccatttttccattcaacaacacaacacctcagacagacatcatggaggcaggttacaatcctcgtaccgtcgaagaggtctttagggatttcaagggtcgcagagctgctttgattaaagccctcaccaccgatgttgaagagttctaccagcagtgcgatcccgagaaggaaaatctttgcctttatggatttccaagtgagcagtgggaagtcaatctgccagctgaggaggtgccccctgagcttccagagccagcattgggcattaactttgccagagacgggatgcaagaaaaggactggctgtctttggttgctgtacacagtgatgcttggttgcttgctgtggctttttattttggtgctaggtttggatttgacaaggctgataggaagcgactatttaatatgataaatgatcttccgacaatatttgaggttgttacagggatggccaagaaacaaggaaaggaaaagtcatcagtttcaaatcatagcagtaccaaatctaagtcaaactctaagcgaggttctgaatcaaagtatacaaaagcaatgcaatcaaaggacgaggatgatgagggtggtgcgggtttgggtttgggtttggaagacgaagacgaagaggaacatggagataccttgtgtggggcatgtggagagagctatgctgctgatgagttctggatttgctgcgacatctgcgagaaatggttccatggaaagtgcgtgaagattacccctgcaagggctgagcatatcaagcagtacaaatgtccttcttgcagcaacaagcgagctcgaccttgacaaacatggctaggatggtggtgactataatcttggcaattttatgactactaatttgtttagtaggtcaagtttattagtcttgctgtgaatttcaggtatattgtttcagatgttacattaggtatattatgagctgctgtcgattcatctaccattaggatgtttatttcataagtggacttgaatgttgttctgttatgtgtttctttaaattttatgtagctgtgtaactgtgttgtgtccatagcttattatctgccgtggtgtaattctgctctattttttttttttttgggatacatatatatattttttaattcaagttctaactcatgttt

SEQ ID NO: 135238 - DNA, 442 bp, Glycine max
  Clone ID: PAT_MRT3847_9312C.1
cctactcgtccgcggacgcgtggggcgatcacaggttgccgttccttaaaaccggtaacaaaatcaatcgttacttgatttcaagaatcttccaatttcttcctacttcttggtgttcgatttcttaagggaaagaaaatcactctctgtgctggccacagactttggtgaatcattttcttttccactcttagtttatttgctgaacactcttctatttgatataggactttgtgtcagatttaaactttttctgtttctttatcaggttttctgcttaatttcaagttcaagtctggtgaatattttggatttgtggctcccactcttactatctggtataaggactttcccgggtagacattctcctatttttgtactcttctttaattctatacttctcactgatacgatttgtcgttcaaagtggttttatttgaaa

SEQ ID NO: 135239 - DNA, 381 bp, Glycine max
  Clone ID: PAT_MRT3847_93130C.1
cccacgcgtccgcccacgcgtccgcccacgcgtccggtccacggacttcagagaaaagatgggtacattgcaaagacaattgatgaatgtgagattttccggaagtgccatgaaactgactggagaaatagaagaggaaatagttaatgtctctatcgatgatgttgttttgcaacttaagaatggtaaggatgaagaatttgcggttgcacttttgagactaaaggagttcatgagcagtgaaagactggatggtggcttgattgatgaggaaagcaactctttccattcttttcaatcgtctaggttcatgtaaggctgacaataggttgaccatcattcgattgctaagaagtattgctttaggaaatgatgagaaaa

SEQ ID NO: 135240 - DNA, 1276 bp, Glycine max
  Clone ID: PAT_MRT3847_93131C.1
tacggctgcgagaagacgacagaaggggacgctatgttaatgtagttgtgtgtgttgtgttgcacactctccacactccacagagagagagaaaagggtcaaatagttacaacctttgcttctttccctccatagtcccattttttttatttttttttccattcaacaacacaacacaacaccgcaacctcagacagacaaacatcatggacgcaggttacaatcctcgtaccgtcgaagaggtctttagggatttcaagggtcgcagagctgctttgattaaagccctcaccactgatgttgaagagttctaccagcagtgcgatcccgagaaggaaaatctttgcctttatggatttccaagtgagcattgggaagtcaatctgccagctgaggaggtgccccctgagcttccagagccagcattgggcattaactttgccagagatgggatgcaagaaaaggactggctgtctttggttgctgtgcacagtgatgcttggttgcttgctgtggctttttattttggtgctaggtttggatttgacaaggctgacaggaagcgactatttaatatgataaatgatcttccgacaatatttgaggttgttacagggatggccaagaaacaaggaaaggaaaagtcatcagtttcgaatcatagcagtaccaagtcgaagtcaaactctaagcgcggttctgaatcaaagtacacaaaagcaatgcaatccaaggacgaggacgatgaaggtgtgggtgtggaagaggaagacgaagatgaacatggagagactttgtgtggggcatgtggagagagttatgctgccgacgaattctggatttgctgtgacatctgtgagaaatggttccatggaaagtgcgtgaagattacccctgcaagggccgagcatatcaagcagtacaaatgtccatcttgcagcaacaagagagctcgaccttgacaacatcatggctaggatggttggtgactataatcttggcaattttatgactactaatttgtttagtaggtcaagtttattagtcttgctgtgaatttcaggtatattgcttcagatgttattacattaggtatatgagctgctgtcgattcatctaccattaggatatttgtttcataagtggacttgaatgttgttttgttatgtgtttctttaaatttaatgtagctgtgtaactgtgttgtgtccatagcttagtgaagtttatattatcccccgtggtgaaaaaaaaaaaaaaaaaaaaaacaccccaa

SEQ ID NO: 135241 - DNA, 266 bp, Glycine max
  Clone ID: PAT_MRT3847_93132C.1
caacatggcacatgggatacatacgcttaatcccaattccaattgccagtgaaccccaagttcctaaatccacaagtgcactaggtgttggatgtattaagctgaatcatatagctcattctaagctggctttgaaaaaagattcaatgcttatgcaaaatggtacgtctctctactactacagcttaacaattttctgcctgcgtgcttaacatagttggtatgtcttagtggtgccagacactatataattgccgatgatttta

SEQ ID NO: 135242 - DNA, 269 bp, Glycine max
  Clone ID: PAT_MRT3847_93133C.1
ctaggacgtgcacggcacgcgtacgtaggctgggtttttttggagggggccgcctctttttttttttttttttttttttttttttttctttttgttgttaccataaaaaattataaaatttttatttccgcccagccctagtccaatatatggctagacacgatatacctcaaggagagtaagatgactgcctaaggggattgtacaccacaggcgagaatagggggggggggaccccctgttttttttgagactttcgtctacactta

SEQ ID NO: 135243 - DNA, 285 bp, Glycine max
  Clone ID: PAT_MRT3847_93134C.1
ccctattggactgtgtctgcacataccactacctgtgccttttagaccgatatatcctgcaagaccctctccgagccgaccatcacgctcgaagaaactagctctgacaccactgtcaccggataggccaagactcaccacatggtgcgaatacccgccgaccagcatcgtttcattattgtcgaagagcaacttgtggactatcgctccattgacgactacaacatccagaacgagtgtactcttgacctcgacctccaacttattagcggctgcatattttcg

SEQ ID NO: 135244 - DNA, 439 bp, Glycine max
  unsure (1)..(439): unsure at all n locations
  Clone ID: PAT_MRT3847_93135C.1
aaggtttcccgtcatcactgtatgacgtcctccttctttgggggggggggggggcgggcttagttcagatgtactcggctgacgaagaactagcaaggaacaataggccaggacatattagacagaaaaagaaaaagaaaacctggcctgctactaagggcacagcgcaagggtataccgtttttaaaaaaggcaatagagacgtacaagagtagggggtagcaatcacaccacaagatatacgagattatagaggctggtctatagatgttatacgtgtagtgggtcatagagcccaaacggtggcccgttttatagtattagggttggtgcttacggtggtggtaatgcgtgctgtcaactatagtanttttaattgtgcttcgaatagtgtcgacgtgagtaatccagccagagaaaaggttggggaacagagtgg

SEQ ID NO: 135245 - DNA, 253 bp, Glycine max
  Clone ID: PAT_MRT3847_93136C.1
cacacgcgtagagccccaaatttttgacgctcgctatcgactctatcgagcgccgatctaacactacgtctggagcgcatgcgactacaatggcacttgccgatcgcttaacgtaggcgactgaataagccctagaagatcctgttaacatacatgacaatcctgatgaaagaaccatacaaataaaaggcaaaatgatagagatgatgagtatataacacaacacttacagaagcaatactaaacagattca

SEQ ID NO: 135246 - DNA, 374 bp, Glycine max
  Clone ID: PAT_MRT3847_93137C.1
gttgatgggctagagggagctgctcacattggcgaattgaaatcgggtgtctataggccactgcctacaaaaactaatttggaggaaactcccaaggaatggtgactggatctaccttgtgacaaaattcctagtgggttgactacaactgatgagagattgacaggcacacaacatgagggatatcatccttttcttgatggaattgaaaaatatgccactcccatgatgcccctagatgaagaaattctttctatggctgtacaatacatggctgaggaatggattgattgtgttgatgaggaggatacctttgaggaagatggtttgagtgcagcacttaatggggttgatgggttggactatattgaaag

SEQ ID NO: 135247 - DNA, 177 bp, Glycine max
  Clone ID: PAT_MRT3847_93138C.1
ttggctagcgaaacatataaaatcacttaaatgtataaaactgaataacgaaaagttatatttatccatattattctattcattatattccggtctttcttaatttgcattgcgatctttgctcaaaaatattaatgatacgagtttttgaattgttgaaccaccaaaaatgcaatg

SEQ ID NO: 135248 - DNA, 266 bp, Glycine max
  Clone ID: PAT_MRT3847_93139C.1
actccatgcacgctgctactcgattcggctcggggatcttcatcttaatggcttactatttaagggagcactaacctgtgacagcggatgatatttggcttcaaaatattgtggagacacttggttttgaaggaacaatggaaatgcgttgagtgaggcgcttgtctggcagacacatgcctattggatttatcaacatgcacctagagtttgcactgattatgctgacactaactttttgtgatattatagcaggcagcattatt

SEQ ID NO: 135249 - DNA, 355 bp, Glycine max
  Clone ID: PAT_MRT3847_9313C.1
gtctgctcttatcgcagaatgattcagatcgaagaatgagcgcgtcatgaagattgtctgaagagggtcacgggatctgcggtcacagcgtatatgatttgaacgtacatttatcgagtggtgaagagtgcgagttgtaggtagggtgggatttgctgttatatctttcaatgcctgtcacattatgggatgcatgcttgcttagtccgttaagatgcatctgcctgtgatcgtgcttaccgtggatgcacctgaattatatactgccttgattgatctgctactagatgctctgtgaaccgacctgttattggaatgaagcgtgctgatggccttggatgcggctgccaacaat

SEQ ID NO: 135250 - DNA, 480 bp, Glycine max
  Clone ID: PAT_MRT3847_93140C.1
gggtacctggtttagggttcgaacctcagaaacctcgcatctccaaaaattttaaattcatagaagaaaatgggagacgcagaagaggagaacgcttgcatagctgaagtatttgatttcaaggagaagaagaaaaagaacaagaagaagacggcgaagaagagagtaacatttgctgagaacgaagcaaattctccaacggtagtaaacaatgatggcaatgaagatagtgctgctgctgccagcggcgttaggatttctctgttcgatttctcggtcgagaatttcttccgagacatggacaccattgccagactctgcgggaaagaaaacggtgctgctttggaccagagcgaggttcagagattgtcttcctcagtcactttcttaagagaatggagagattttaaatatccctcaagaagcattaagtttgcttatggacttgagagctctgattgttctgaggggagaaatatc

SEQ ID NO: 135251 - DNA, 258 bp, Glycine max
  Clone ID: PAT_MRT3847_93141C.1
cttggcttctctcaaagattattcttctttctttttgccctgctctgtggggttagtttctgctctcaaatgctcttggcccttccttacttcttggcctttgcttctgtgtttgctgttgcactttctgggtgtaaggattttcagctgctcccgttgttccttttgtcgagcctgtcatgcctacccttgtcaattatagtggtgatgatgagctctatcatgggggttccttctgtcaaaatccattgatttggg

SEQ ID NO: 135252 - DNA, 400 bp, Glycine max
  Clone ID: PAT_MRT3847_93142C.1
tcgcgaaaactatacgattcgatttcttgttttcaataaaaaaaaaaaaaaaaagggaaaaggaaaaaaataaaaaaaaaaaaaaaaaaaaaaaaaaaaaaaaaaaaaaaaaaaaaaaaagggggggggttttttaaaggataaaagtttattttcgcttgtttgaaaggtaaaattttttttatagggccacctaaattaaattaattggcggttttttaaaaacttggtgtttggaaaaactttggttttccaaaatttaatttttttgaaaaatattttattttaaaaaagtgttgaaataacaaaaaagcccaaaccattcgctttttaaaaaatttgttaaacttaaatggaaattgggactccccttttagggggacttaaaatccgggggttt

SEQ ID NO: 135253 - DNA, 371 bp, Glycine max
  Clone ID: PAT_MRT3847_93143C.1
ggccgccctcgtcctttttttttttttttcggaataaaaagaaatctatattgatttaaaatcagcgttgtaaaacaagggcgaccatatacaactgacatccgttcacatcatacaaatggattatcatttcctcgcatagctcgcacattgatataatgacagaacgtgcgtagttcataacacatagtattggacatatacagtcctacaggcaccccttttttcttcttaaacaacactttatcctcggcacttttaaagtctgcatgagccaccttcattcggcgctctcgtacaacaagttatccggccttacaccatatggcctttatatcagcggcagagaattcatcttcaggcatatcaaa

SEQ ID NO: 135254 - DNA, 353 bp, Glycine max
  Clone ID: PAT_MRT3847_93144C.1
atacttgggttacaaattaacattgatcgccctatacctggggccctgttaggggaccaaaccaagacctgcatcaacgacgaaatctcgcatgcggctgatgcttctaaatggtcgctacgccccaaataaagctgggctaattgcattggaaaggatgcacagacctccgaaattcccctaaaagagcgaacatactgaagcctatcctaaaaaaaccccccgtcataaaccaccttgacccctgcgggtttgccaccacaactgttgatatgcccagttctagggatgagatcatcaaggccatgaccgggttgtactccaagaagcacgcccttaagacacagtatgag

SEQ ID NO: 135255 - DNA, 462 bp, Glycine max
  Clone ID: PAT_MRT3847_93145C.1
gcatagttatcagcaacagcaacagaaacaagaagaagaagaagaagagaaaaaagtagtgtgtgagaagatggagaggtaccctagggatttgcttcaaggattttccttgagtggtgttactactgttagggatggtaataataataacaacaacattaacaataacatgatgcatcaacatcatcatcatcatgttcttcatcaccatcatgagcaacagcaacagcagcatgaggtggatgatgaagaggttgagttgaaccttggtctttctctcggtggaagatttggggtggacaagaacgccaaaaaaaagaagcttttgcgttcttcttctgtggtggggacaatgcctcttttccgggaggacgatgcggtggcgccgcgacggaactcaagggcgaagacgtaattttggcaaaggtgggttgcccccaggagaatgatttggcgcaacag

SEQ ID NO: 135256 - DNA, 330 bp, Glycine max
  unsure (1)..(330): unsure at all n locations
  Clone ID: PAT_MRT3847_93146C.1
catcctcatgcaaatgctacntcganttnactngctntncggaggttgtcnccataacaanagcnancannattgantcccctgcacntgctagagantcagatgaggtgcctaaggacctccttggaaccaacatcaagaaacaggtgtcacagcncattncntgacgncacttgnntanctaacaaagtcactganggatgttgagctgatgttgcagtcaagctagagatgaggcaacctactgncagcacnaaganagaccagcatatgcaatgatcanagntgctgaggnnaaaganctgataacnccttgaaagactacctgat

SEQ ID NO: 135257 - DNA, 916 bp, Glycine max
  unsure (1)..(916): unsure at all n locations
  Clone ID: PAT_MRT3847_93147C.1
gcaccagagagagagagagagagagagagagagagagagagagagagagagagagagagagagagagagagagagagagagagagagagagagagagagagagagagagtgaactagtctcgagttttttttttttttttttaaaagacaaaattgtactatatatcacttttacatgactttcattcacagaattctcaaaatattaatcaccagtagtcatttcctttcttctctttcctctttttttaatccaaattaaattatcaagggaaaaaaaattatgtgaaactatcattactcttaaaaatataccataagggagtatcttttttcgttaaagtaaaagagaacaagacttgttttaagttctcaagccaaaagcagcccatctcttttttccttccttcttcatctttaaggaattggaatctataaggttttcaagtgattttttcccctttcctttccgaactcttcctgccttctgtcagaagctcacacagccgtttcttttcctcatcaacatctggatttgcagttccaagtttttcttccctcatctttagtatgtattctaatatctcaatggcatcctcaactctccccaaggcatcataagttgctgcaagattgctgtacaccccaagagtgtcagaatgatatgttccacactctctctccaatatctctttcgcttcttcaaaatgtttggcagcatcccctattttgtacagttgcacacatgccagccccatctggttcaatacaactccaaaaaaggcagatttcttctccccgcttgctctcagcnnnnngatagcattctcaaaagacntccaagcatccatatacttccnnnnnatgtagnacatcactcccannnnggcnnctantcctgctactggcctatatt

SEQ ID NO: 135258 - DNA, 282 bp, Glycine max
  Clone ID: PAT_MRT3847_93148C.1
gaattcggcacgagctgccttcttctcttttcttttccacactgtgtgctgtgctgtaaccgtacgatctcattctcaaatctcactcactttttgtctcttagttgagagaaagaaatggacaaggctccaaaagtgaggcgtggaagcagtgcgttctcaaactccaacaagcgacgacatatatctaaacaatctcgacgacacaaacacaaactcttcgctgttattagccgtggggactttcgattctcgaagaaggaaaaggtgagaagcttgagt

SEQ ID NO: 135259 - DNA, 211 bp, Glycine max
  Clone ID: PAT_MRT3847_93149C.1
gacgccacggcgtaccgcctcacgcgtatcgggaaagtcctcacatctctgagcagccaagcacgtctctatctgtgctctgcgaaaattatcagcttgcagtagaaaagctgaatcatgtcgcggcaagcgcatgtcgacgagcagcttttgtgagacatcgaaggtaaccacctcactcacgctgctatcagtcagccagagacgggca

SEQ ID NO: 135260 - DNA, 545 bp, Glycine max
  Clone ID: PAT_MRT3847_9314C.1
gtaagaaaatcactctctgtgctggccacagacgtgagggaatcatttccttttccactcttaaattatctgctgaacactctactatttgatataggacttcaagtcagatttaaacttcttctgtctctttctcagttctctgtttaatttcaagttcaagctggtgaaatcttggattagtactcccactctcctatctggtataggatttcgtgggtagactattctatttctttcctttctttcactctcttcttatgactgatccgcattgccgctcaaagcggtcttatttgacaatcacttgggcgttggtgcaaatgtctgcttctgtaattttctctggagacaacaagctcactgagaaaacaatctctacttgcagagatttggacatcttgagtgtttattacacaatagcaactcaacttagaaaatttcttccagagtacattaggtagcatatgaataccttgttgtctacattctcccatcttttatcactgctgaactaaatatagcggaatttgagaacattcata

SEQ ID NO: 135261 - DNA, 398 bp, Glycine max
  Clone ID: PAT_MRT3847_93150C.1
ctgtggagaaactgcagctggatgtccaaccatttgatccaccaactcccataaatctttgccaaaaattgggaaatagcatggattcatttgagcacacaccaagcagccgtatctccaaagcacaagatactgaagatgactctgttgactatatggaaaaaattggtcagggaaccttcatacggcggataggtctgaaaggaatgcagctttggtttcacctttgctagccacatatactcagagaaagaacaagtctgttcgttttgaaagtgaaactgacttggtaacctatggaagctcatcatatgattgggatatgaaggaaaacaagtcaccaaatatccaaagtgcatattaaccatctccttatcctaccccgttgaagttaattg

SEQ ID NO: 135262 - DNA, 342 bp, Glycine max
  Clone ID: PAT_MRT3847_93151C.1
gcacgagcgcgaatcttttaatctccctctctcctcctcgctctctcaactgtgctccgaactcgagtcccggctcctccaacacctcacgaaacgcaccgtttcgtggatctctcgctccttcagcgccaaatcctcgctccagcgtctctccctcgcacttcaaaatctctccctccgcacttctccacgtataaaaaaggggattggttcgaagaggtttcagtgggtgttgagtgaggggattcctcgattggcgagcgaaatgaaccgaattgagtctcttcggtgttatcttgttggaagctctggttggggatcttgaagatgctgctctctttg

SEQ ID NO: 135263 - DNA, 258 bp, Glycine max
  Clone ID: PAT_MRT3847_93152C.1
gggcaaacgaagacccactggccataagtctctaaaacagacgatcttaccagaaatacactcatgagagggacaacacgacatgaaaccaatcataacagcgatgccgactccgtagtactgcaaagacccaagggcaatgcgagatgtataacaacaaacaacgcggggggggaccagaggcgtgcgaaagatttcaaggacttataagcctggggccctggaggccacgaatctgaggcacagcactgggccaac

SEQ ID NO: 135264 - DNA, 715 bp, Glycine max
  Clone ID: PAT_MRT3847_93153C.1
gcaattgaagcattgcgcacagctgcaaaggggcactctttattttcataaccccctaacgtagattaaccgaacttaccctcttattcttctccttcttcttcttctgcatcctttttccaccatgaccgattctgacgccaatcacaatgacccatctctcgctaccgataccgatgcacccaatgatgctgaagatgaggtcaagttgaggtctagggaccaaagactgggtcctgcagttttggagtgcaaacaagcactgctttgcaggattgccaaatcgtcgtctccaccacctaaaacgattcctgcagctgatgagtgcttttatgttaaagatgctgattacgaatcggggactgtatctatgggtagtgatcttagaaagaaacttgacattcatgtgaagggtgatgtagtggcaccagttttgtcattctctgcctgtaacctccctgacaagcttctccacaacatagaagcagcaggatatgaaatgcctacacctgtccagatgcaagcaatcccggctgctttgacgggaaaaagcatgcttgttttggctgatacaggatctggaaagtctgcttcgtttcttattccgatagtttctcgttgtgtgattcatcgtcgacaatatttttcaagtaagaagaagcctttagctatggtgttaacccccaccagagagctctgcatacaggttgaagag

SEQ ID NO: 135265 - DNA, 818 bp, Glycine max
  Clone ID: PAT_MRT3847_93154C.1
gcatttaaattttttactctcataatcaacaaaaaaaatgagactaaaaataagtgtaaaagataatgaggtacgtaaggctgaggctgagagtgacccacaaaaatgaaaccattctagcttggtagctttaagggaagcaaaaatgtcggtgtgcttggtttgtccaatataattgtccgcgagaagacgacagaagggggagttctgacgtttctatattcacttcctctgaactttagccatatccctcatcaagttagttttcacttagtatatatttcattgatacaattaccctaacactgttttggatagccatggaacacaaagtagccacaacaactgaaggacaatccataagatgtaaagcggcaatttgtcgcaaagcaggtgaaccactgtgtattgaggagatcattgtggcgccaccaatgcctggtgaagctcgcattcgtattatatgctcctctctctgtcaaaccgatatcagttttcggaacatgcaggaccatcctgccatttatccaagaattctgggtcacgaggcaataggggttgtggaaagtgtaggagaggatgtaactgaagttacaaaaggagatgtggttgttccaattttcttacctgattgtggggagtgtatcgattgcaaatcaagcaagagcaacctttgcactaattttccattcaaggtgtctccctggatgcctagagatgccaccacaagattcactggccaaaatggagagatcatataccatttctggatcaatctttatcagattagcaatgtccaccacagctcgagccgaatt

SEQ ID NO: 135266 - DNA, 194 bp, Glycine max
  Clone ID: PAT_MRT3847_93155C.1
gggattttgtcgggggcttccgaggttcagtttccaggctacctcgataaattatgcccctgaatcagactttcgtggtgacaggtaatgaacattggaatttctcgagaccatccgttgttcaattccgagcgtcttcgaatttattatgcgcccgaatctgactttcgtgagacaggttatgaccttttgga

SEQ ID NO: 135267 - DNA, 389 bp, Glycine max
  Clone ID: PAT_MRT3847_93156C.1
ctcactaactcgctggccgccctttttttttctcttttacaaacaactatttatataatttcctacctcctactactccgggggagttttagataaacaatatcaatccttccaactcactcactgccctctttattttctatgtatatcctagtacaattcggccgctgcctatgcacatcacccacttgcatttaacacttacacacaccattcatttttgacattgatcttgtttctattcaacacaaactttttccaaatgggattgattcccatactgattctacataagaatctgtttagaacccactaacttgccattaactcatgaactcgagttttacagcggttttttttaagaaccttgcaagaagttaattaaactc

SEQ ID NO: 135268 - DNA, 556 bp, Glycine max
  Clone ID: PAT_MRT3847_93157C.1
tccgggtcagcccacgcgtccggtttggaattgctgggattggagtgggaggagttgaattagcgaagaagtaatcgatgtcgaaggcagtttcagaatctactgatattagggtttacgatgttttcctcagttttagaggagaagacactagacgcagtttcacggggaatctctacaattgtttggagaaaaggggaatccataccttcattggcgactacgattttgagagtggagaggaaatcaaagcatcactttcggaggcgattggacattcgagagttttcgttatagtgttctccgagaactatgcttcttcttcttggtgcttagatggacttgtacgtatccttgacttcactgaggataaccatcgaccggttattccagttttctttgacgttgaaccgtcccatgtgaggcatcagaaggggatctatggagaagcactggctatgcatgagagaagactcaaccccgagtcgtacaaagtcatgaaatggaggaacgcactgcgtcaagccgctaacttgtccggttatgctttcaacat

SEQ ID NO: 135269 - DNA, 829 bp, Glycine max
  unsure (1)..(829): unsure at all n locations
  Clone ID: PAT_MRT3847_93158C.1
caaacatacaaactctcctctcacaagggcaagacagtaattccacattcccaacaacggagccaaccaaccaaaacctttctccttcttcctcttcctccccaattcccattcagatccgattaagccttaaccctaattcccctcccaccacccaccaacaatgggggacttcaacctggcgctggtgatcgtggcgatcgtggtgtgcgtcatcgtgttcctcttcaacgtctacctcctcgtcaacttccagcaccccgacgacgtcaaccaggcttacttccccaaattcgtcgtcgtcctcggcctctccgtcgctgccatctccatcctcatgctccccgccgacgttgccaaccgccaggcctgccgccacgccatctacaacggcgcctgcaacctcacgctccccatgaaggacctctggctcgcaatttacatcctcgacgccgtcctcgtcttcttcgttatcccctttgccatgttctactacgaaggcgaccaggacaagagtgttgggaagcggattaagagcgcgttgttgtggatggtgaccactgccattgtgtgcgctcttgttttggggattttgtatggacttattgggaaggtggactttactgttaggcatctctcttcttccacaagccaatttcctagcacatgggacttcaatagtggtcaacaatgtattggaaacacccatcagtgttctgcattcactgccagtccttcatcagaaaaaacatggaccatgcgtactacctttcctgaatatgtcgttgctcttgccactattgntggatctgtgctttttgctatattt

SEQ ID NO: 135270 - DNA, 160 bp, Glycine max
  Clone ID: PAT_MRT3847_93159C.1
ctatattctctaacaccccaacaaaaacaccttattcggggtttttactaaaatatggggcgccccaccctcttaactcaactctttaattactatccatccactttatgctataccaacaccatattactttctagtatacaaaacccttccacctaca

SEQ ID NO: 135271 - DNA, 591 bp, Glycine max
  unsure (1)..(591): unsure at all n locations
  Clone ID: PAT_MRT3847_9315C.1
cggtcgcgttttcgcgancataggnngccgcacctgaaaacttgaaacaaaagcactcgnnacttgattccaagaatctctcaatttcttcctacttttttgtgtacgatttcttaagggaaagaaaatcactctctgtgctggccacagacttcgngaatcattttcttttccattcttagtttatttgctgaacactctcctatttgatataggacttcgtgtcagatttaaacttcttctgtttctttttcagttctctgtttaatttcaagttcaagctggtgaaatcttggattagtgctcccactctcctatctggtataggacttcgtgggtagactcttctatttctctcctttctttcactctcttcttctcactgatccgcattgcccgtcaaagtggccttatttgaaaacacttgggcgtggtgcaatgtttgttcgtaattttctttgagacacacgttcactggacaccaatttaattgagagattggcatctggtggtattatccaagcactcatttagaaattttccacattccattagggcattgttaccctgtgactcatttccatcttttta

SEQ ID NO: 135272 - DNA, 704 bp, Glycine max
  Clone ID: PAT_MRT3847_93160C.1
cgctctcactgcggcaacacaacctagtaagctcttttaaagttctggcccgaaccctttctttcgtcacaatcacaacttggtaaaggtactccgtgcaagaaagatgaagctcgagttcgcaaatgtgctacttctgtgccttgtccttagctcttctttcttggaaatctcaatggctggttctcctttctgtgactcaaagtgcgcgcagaggtgtgccaaagctggggttcaggacagatgcttgaggttttgcgggatctgctgcgagaagtgcaactgtgtcccatctgggacttacggaaacaaggacgagtgcccttgctacagggacatgaagaactccaagggcaaggacaaatgcccttgaagaatatctaatttcatcatcacactccattccaataaactaccttgtattgtatcttcagccttccttttcagagtattgcattatgccacggatctatgtacctacccttcaacttaagtattccgtctagttaattagcatagctacccttcaacttatgtgttccgacctagttaattagcttattaattatttacgagagtaaaacatcgttttagttctgtcatcttagtctttgaagttatataaagaaattcaaattaaaataaatttgtaacatgttaaataaatttataaactttattgtttattattaaaaaaaaaaaaa

SEQ ID NO: 135273 - DNA, 439 bp, Glycine max
  Clone ID: PAT_MRT3847_93161C.1
gtaatcaggggtgtaatatactattatagagacttcattatagtgtataaaactatgtccagaagtaacataaaaaagatagcttatgcagttattttatatgcatgttatttttatctttttattacaggaaatctcattttgcttcacttgcattatttttaggaaactttatgtaccacatctggtctaacttcattttttttttctttatccatgctttctatttttaccttaaaaaacagaaagaaagaatgtcctgttgacacattctctatagtttaatgtttggaccagatttatgtggcacggatacaaagaagctccatgtgatactctcctaccacggtcaaaattaccccataaagaaggacctgcaatgtgaaactgacaggttaactcacttctacacattcattctcaggccagatgccacata

SEQ ID NO: 135274 - DNA, 551 bp, Glycine max
  Clone ID: PAT_MRT3847_93162C.1
ccacgcgtccggaaagtcgcactgcttcctctttatctttcgcccatgcgagcactggtcgttcttgatctgttggccacgatgtcatattcacggagatctaggtattctccttcttcgtctcctatgctccatacaagctatactgtaagtccgcgtccaggcctctctcaatatcaccatccacataccgttcaaggagcttatcaagagatgcaggaaatccagccatacaatcaaccatgtgacatgcaccgcctcctatgatacatccactacagaactgatagaaacatttcgctgctgaaagaaaagcgacagacgtccatctgagagcagacccttggacaaaggaatgccgcaggcatgcctatgtgacaaaggacactcttgaggaggctgaacgacgtgcaaaggctctgaatcgatgctggcttagaaggcgagacatcacgtgcgagaaggctaaaagacaacgtgatcgaaccccaacgccagggaggtatgtaacactgagaactatgaatgctcgacggcactctacaagggac

SEQ ID NO: 135275 - DNA, 341 bp, Glycine max
  Clone ID: PAT_MRT3847_93163C.1
cgcacccactcgtccgacaaaacggcggattaaaaattcttttgtcgttttcaatcggagcgggggagagagattgggaatttctacttttgaggaattctagagaacacgagctatggaagaatccatcaaggaccagcaatctactccatttcctggtaacgcagccagacccaagcttcagcgctatgctttgcgttcggggaataataaatctaaagatgacaagcttcctgctcctgaattgtcgaatcctccttcttctgcctcaaagaggggaagatctgtgtccagtgtgagcaaaagtgttggagtccttgaactatctgccaaggacaagt

SEQ ID NO: 135276 - DNA, 261 bp, Glycine max
  Clone ID: PAT_MRT3847_93164C.1
cgtcgctccctatctatataatgtaatatgcgactccgtcggtctctataggggtttcgaagtcgtaagctgccgtcggtcatactcgtagcgaggatgatgtctagtaaatcatcgacagctagactaccgtgagtccagacactgacgatgagataggtgacaacgatgagctcatatcacaggcattagcagtagctcgtgcagctcggaggcttctcactcggagtctgtgatgacctaactctcgcgttaaacgac

SEQ ID NO: 135277 - DNA, 460 bp, Glycine max
  Clone ID: PAT_MRT3847_93165C.1
accttggcttatcttcagttattgcatgtagcatctagtcacaaatgaccccatcatgtaattaaataattaacctacctaggtctaactcttaactatacttcatggtgaacaatgaacattatttgattttgggcacaacttgtcaattgattttgtgataattaaaaagggattatactttttgggaaaaagaaattaattgagagcatggttgttgttgtgtgagagtgtgatatacaactaactggaacaaggcttggatggtgacactcttcaaaatcagtcacacacaccctttggcctcagagttacacagacacacagctggaacaaaactgatagtggctaacatgcgccaaaataggtgcaggggtgtggtgggacctacttcagtgtgagccgtcagatgcatggactcctccaccttgttgggcccgattctctacggtcatggaat

SEQ ID NO: 135278 - DNA, 989 bp, Glycine max
  Clone ID: PAT_MRT3847_93166C.1
gcgttcgagaagaattgccccaagagtaatccttgtgtgactcagtctgtgcttggtccaaggttcatgtgacacaactggatccccatctctttacaacaaaaatgggttcacgcttgtaggaagcccatgaggtcaactagcaattgggcccctttgtgttgtgagctcgctccttccttctcttaggcagatgtgaatgtgagagacacccatgaatgacagaaatgaaatgaactgagtaagcaccaacgctgctttcttcattctttcattcattgaatttgttcttttctcgcgattgaatttgagggaacaatcctcgattttctctttctgggcacccctgaattcgctctgaaagtggttcagttcgaacaacgaaaacgatgtcggctcgattgatgaagaaggttctgaacgaacagcatcaccttccgcaacacgtgagcggaaaagaagaagaagaagaagagaacgattctgaacccatcactcgttcctccatcaaccccttcgacctcctcaacgacaacgattctgagcccgaagaccagggagatgagttgatgtccaccaatgaaatattggcgagttatgatgatgaagaggagtcatcttcattgaaacctactgctgaggtttctacatcaaacccaaaatcgaagaagaagaaaaagaagaagaacaaggatagtgctgttgtgaataaaacgggagaagataaagaattggacttgattctagaaaatttatctctgaatgtcaactcttcagctgagcaacctgtttctaccaaagacaaaaataaatctgttaaacagcaagcagcctccatattgcaagtggatccttaaatgtttgaatgcagaaaatgagctgagaagaatatttggatctaaggttgtgaaataatttggtgagtagcaatcaagtgggacagtttctaggcagatgccaagggtgaggggggcgtgtccattataatc

SEQ ID NO: 135279 - DNA, 1422 bp, Glycine max
  Clone ID: PAT_MRT3847_93167C.1
cgccgcagggtgaatgtacccaaactttgttatccagggtacttccccgccaccaaaccctagcttagcaaaatgccgagggaaatcatcactcttcaggttgggcaatgtgggaatcagatcggcatggagttctggaagcagctctgcctcgaacacggcatcagcaaagaaaaaaaagttaaagaattggaattatgataattcataaaatacaagaattgtgtgaattcgtattcaaacaaaacaaaacttatttctctgtgcaagctaatcaccttgccgacaatatgtaaaggccctagttaactctcctagtaatgttgcaaatgtagcaacgaaaaatatacacaatgcgtatccaaagggtatttttaggcatgagaaagacaattattggattgttacttattagtaggtgttcactgatgagtgatacttcttgaaatgtcaggaacatgattcttctgggcatgagtggtctgctgactcattgaaatgtcaggatcatgattcttctgggcatgagagtggtctttgacttattgaaagattgttgtctttgacgtaatccactactatgctaacctttacaagtggagttaaaagcctccagcaaaaaaaatgcaagtatattctatgatgaagtaggatgtctaagctgcaaaacatacttgacaacttcataaaaggaaacaactatcccaaccgatggaccagcacgacctacacggggaccaacacctgtaaatagccctcttaatcctccatccctccaaatctcaagtaattgttgttcttgttgtcatctttaatgctctttcaggatctttctctatttgccgtcgagtttttggcacacccagtggacatgtgacagctgatgctaatgttccggcatcaaaaccagcggatatggttgctgggaaaatgcaaataggaaacgtaatttagaaagaaaaaaaaaatgaagtcatcaaaccatttattttttgtatgtgcaaattaattcaatgtaaaatggtgataactgatgagcgagaatcacaccaaaacattgagaaaatatcatgtaagaatcattgtatactcatcattctttagagattaaagttgctggaaaaccattatcaatggtcagttatccaactctgcaagttaatctgcattatgatccaaatttactaaaatttaagatcaagtatattattttggtaaagttgattttagtctgcattatgaaccaaagtactacaatttaagatcaagtatagtattctggtaaagttgattttagtcagcagctagcagtgtttttaaaataataaattttaccttttacaagaaaatacgttgactacttttcctgatgatgcaaggtccaaatttctgccttttcttggcaaggacaggatgattaag

SEQ ID NO: 135280 - DNA, 1731 bp, Glycine max
  Clone ID: PAT_MRT3847_93168C.1
cggacgtccatttgtagtgtaactgagatgccgtggtattgattggattatggtttcgcatcagaaagcaacctcagtgatcgaaacagtgacgtttttttttgcaacttccacctaatattaatcattctcttcgacttcaagatactaagaaggaaggaaggcggggaagtgagaagtgtaatggcttctgagagggaatgttttgacctctctggacccttacatttaacttatgttgactgggataatgcatatcatcgaaagtcggttgctgctagtttggtccaaggtgtttatgttctagagaaggacaggcaagaacggcgtgaaggtcctgatgctcttgcactgccttggtgggcgttcttccactttaagttgttttgttcgcttgtcgatgatgttgattcttccatctttggtgctatttatgagttcaagcctccatcatctatgtgcaatgacaccttacatagaagtccacgttatgtaattgccttccgagggactataaccaaggcagactcagtttcccgtgacatcaagttgggtatccattttgtgcgaaatgggcttcatcaaacttcacgtgctgagatagccatccaagctgttcgaaacatggtggctactgtgggtgcttccaatatctggttagctggccactcgctaggatcagcaatggcaatgctaaccgggaaaaccatggccaagactggcatatttattgagtcttttctcttcaaccctccatatgtatctgctcctattgagagaattaaggacaaaaaattgaaacatgggcttagatttgctggcagtgttgtaacagctggactcaccattgctatgcaagccaagcagaagaagggtttgtcttttgacccatctgctgctcagtctgcctggtccatccttatttgtgaatccatctgaccatatctgctctgagtatgttgctgctttggctgcctgggtcccaggtttgtttgtgaatccatctgaccatatctgctcagagtatattggttactttgaacatagaagaaaaatggatgagattggagcaggtgtcattgaaaggttagcaactcaaaattcacttggtggcctactgatgagtgcatttgggaaggaatctgaaccccttcacctcattccttcagcttctctgacagttaatgttactccttcgcgtgatttcaaagaagcccatgggattcaccagtggtggaaaccagacttgcagctagaacgcaagctctacaattacaaatagttcctgtagttatttatttattgtgatacattggggggtgctggttctagtttttttgtatagactgatgaaattcattaggaaagatcaaggtaaattatgaatgattgaattgtcattttgtataaattgttagataagtggctgttgtgacttcttacagctttggcctattttggattgaggaaaccttctcggccttaaagcatttaacttttgtttactagaataaaaaagttgatttgattctttttttttcccattgaaagcataacaactcattggtgctttcagattttcatgtattttgggtgatttttgggtactcactgttaatccaaacacgctgatattatgttggtggatgtataattgtatattgccttgaattatgctggatctggttttccatgtgaagtttaattttgtaaatgacccgttccggttat

SEQ ID NO: 135281 - DNA, 215 bp, Glycine max
  Clone ID: PAT_MRT3847_93169C.1
aagttcagaacaggtcgcgcgtctgaaagcgctgcgcgaattcctcgacgcatccggctatctcgacgcaatgcggcggcgcatggccggcgacgcctcgacacggtcctacgcgcggctgctgcgcgacgacgagatcgtcatcctcatgaactttccgcagcgccccgacggcgcggcgctctacaacggaaagtcctacagcgccgggaagc

SEQ ID NO: 135282 - DNA, 500 bp, Glycine max
  unsure (1)..(500): unsure at all n locations
  Clone ID: PAT_MRT3847_9316C.1
acgnatantcgaccgaccacatggagatataattgggggcactttttggactgccaccccaatgcaggatgttcaggttacaattgattggtttatttcctctcaacaatgtgatatcagaacctattgtgtttaaaatccacaaaatccttttgtgttaaataggaggatggggaaactgactttcccccagggcacttcccgaagtgttaaaagaatgcctctttctatagggggaggagctggtgcaaagaattctattctcatgaatatgccaaacgctgttctttcaatgtggacatattttgttggagatctcatttttgaagtttctaagatgacttcttactacattaaatgtacagattatattttcatagcatttggaaattcggttgatgacaccattcattttgagggttttttctcacaagctggtgtatatttggagagaattcatgacaaagatcttttgaaatttttacaagaggaatttttta

SEQ ID NO: 135283 - DNA, 409 bp, Glycine max
  Clone ID: PAT_MRT3847_93170C.1
gtttccggtcatcactgtatgacgtcctccttctttgggggggggggggggtggtggtggtggtggtggtggtggtggtggtggtggtgccggtggttaacctaccccatcgaaggcactgctaaggcaaatttcggtagcgttgttagcctgggccatttaacagttccaagcgttcacaattagcgcctaaagctggtggaataaagccccagttacgatgcccaagggttattcgggcaatatttattgaaagcctaccccggcttgaattgtgaatttccaaacagtgtcagatagaaaatttgttcatccgaggcccgatattcttcttgccgtggttgttagaagctcttcatctggttgccagagtatttttagcaacgttacccggtcaggtgtgtgggag

SEQ ID NO: 135284 - DNA, 554 bp, Glycine max
  unsure (1)..(554): unsure at all n locations
  Clone ID: PAT_MRT3847_93171C.1
ctagctatctcgatcgaactgtccaaggtcgtggcggggggaggctaaagggtagccttaatcggataggaggatgaacagataacagaccaagacgaattcggggcgttggtgctggttagacgtctgaaccagtactgtcagtagcacaaccgagcgccgagagtgttcgaaggtcagcaatgaggaggccnagcgaatgcgtgagttaagcggtaagagcacagccccgaacaccgaagtgcatgccccagtgcgaatgggatgaatttacacgccggacgtataagcaaagtgccacagcgatacagaggagcggcatttgaatggtattgccaataatggtatgtgtcaccaatacgttaacagcagcaacgtgttcaccagtaataagcagtggcatgtgcttaaaggcaacaaacgaagggttacaatgcggcttgaggaaccaggtgtggaggaacgagcgtggtcacttaaattacaacggaaactgtactgtgaaccaggtacgtggggtgtagggggagtagtagaggaggaggaggaggagg

SEQ ID NO: 135285 - DNA, 220 bp, Glycine max
  Clone ID: PAT_MRT3847_93172C.1
gctaatatgaaaagctacattttggggggggttaaacggcagaaagcactatttatcttataattacatctgtaaaacaccgattacaacaatttctattgaacacttaaaattaacatatcacctttttcaatgtttgaaaaaactaaggtacactttattaccaaaaaaaaccttgccctttggtatccctaataccccacccttcatttaccacatt

SEQ ID NO: 135286 - DNA, 838 bp, Glycine max
  unsure (1)..(838): unsure at all n locations
  Clone ID: PAT_MRT3847_93173C.1
atggaattggatccgaaatcccttgaagacttttttaacctttttttgcctatccaaactagccactctcggacgcgtgggtttttttctatttttccctctgttaacccaccacacccattttcacattctccaccactgtgtgcggttattttcagcttcaacggaaagtggcaagagaggggtggtcatacctcattctctgatggtatcttgaagttggtcggagcctccgtgccttgctgcagaggtcgctgcggcatagaaaagaaaaaaaaatgaattgagaacgctcttgggttcgtgtacaaacaaaaggaaaagccaaagaaatcaaagaaataaagagggaagaaaaagatcagcttcatgctattctgatttctgattatgctccaaattcttctttttcctttttcttggttgctcacagctacagactttgcaccattctctcaacgtcaaacagagattgagcccagtcacccgcttcagaccagaattcaaccaccaccacaggcttcatttctatgccaatgctaagtttttcggtaaatgtagcaaaaggaaaaattatgaactcttcactttcttggaaaaaatttctatatcataacaagaaaaaatattattaaattttatcattgaaacaaagtagagagcaaaagaatggtgggaacagaggcagcagaaaaaatgagtgtcaatgaagaaaaagatttgattagcactcttcctgattcagntctggtctctatcatttctctccttccctgcaacgaaggcgtgagaaccntgtgtctttccaacccgatgaaaaccatgtggaaaccatgtc

SEQ ID NO: 135287 - DNA, 1339 bp, Glycine max
  Clone ID: PAT_MRT3847_93174C.1
gtttttactctaaatttcttatcttgaaattttgcgcagtttcagatttagaattgttgatcagaaaaggttgagggtgaagaaagagactagtgaaaagcaagtatggggatggactactatgggattttggaggttgacaggaatgcctcagatgaagagttgaagagagcctacagaaagcttgcaatgaaatggcaccctgacaagaacccaaccaataagaaagaggctgagattcaattcaaacagatatctgaatcctacgaggttcttagtgatccccagaagagagcaatttttgatcggtatggagaaggtggccttaatggtggaatgcaaacaccggatgaaggtgtggcttccttcttccgaactggggatggcccaacagcatttaggttcaatcccagaaacgcaaacaacatttttgcagaagtgtttgggtgttcaagcccatttggtggaatgggaagggggtttggctgtggtggcagtggcagaggcagaggcatgggcatggggggtggatcgtgggtgtcaaggtcctttggtggaatgtttggcaatgacatgtttagagaaggcaggtcaatgaatcaaggtccacgccgcaaggcacctcccattgaaaatacattgctttgcagccttgaggagctctacaaggggagtaccagaaagatgaaaatctctagggaaattacacatgcaagcgggagaatttttctggtggaggaaatattaaacattgaaatccatccgggctggaaaaagggaaccaaaatcactttcccagagaaaggaaatgagcagccaaatgtcattgctgcagatcttgtgtttattattgatgagaaacctcacagcgtatttacaagagatggttatgatttggttgttacacaaaagatatcacttaaagaagctgaagctctaacaggctacaccatccaacttacaactctagatggcaggggtctgaacatcatcataaacaatgtgactgatccagattatgaagaagtggtcacaggggaaggtatgccaatttccaaagatccttcaaagaagggtaaccttaggatcaaattcaacatcgaaatcccagacatagttggtgcctgagtggaaagccagaattgagaaatttctggcaccataagagtgtcaagcgttgcagagtgtatctagtgtataataaaatactctttggttttgtccccattcttcgcttcatttttccactttttttagatggatgtgacttgcatagtttgtgttatgcgttaacaatatcattggcgcaaataacatccgacatattagattgaggtat

SEQ ID NO: 135288 - DNA, 357 bp, Glycine max
  Clone ID: PAT_MRT3847_93175C.1
gaatatgagtgaagctgaagggacttgacattgatacatttcttctttttaaaacaggagcctgaaaggggcctagatttcattaacattctctaagcaagacgaaaagtgactcctatcacccacgttttttggacttgaattaaagagtataccattcaggttgtgggtgccaaaaggaccttcattctaaatgaaagacggtttaacttaaggcttcattacattggtggtactagttactggaaaaccaccaaagagagtgttgctgaaaggttggccaaattccttaaacttgtttaagctgggggattggatcaatggcaagtcccttcagcttcactactgattaaaccg

SEQ ID NO: 135289 - DNA, 513 bp, Glycine max
  Clone ID: PAT_MRT3847_93176C.1
aggttgtgtactggacatccttgcttcatggtttctttccatcatctaaatatgactacagaatgctttggttttatttgttttgaacttaatttaacacattgattacatctattgttaccttattatctgagtgcaaccactactatttcgcaatattacagtgaatagaatagtcataggcttgacaagttatacatcttcacagtcaacttctcaactgcttgcctggggggaggggattcaaactcaacctctctcccgcctcccttttctcttcaccatttagccaaccttataacccttctaacccttcctggtgctttaactttgtcaatgagttgtgaaactcttgcaacctgtattgctagtcctcaaagggtatgatgcagaatactcgagaaccatgaagttctagaaatacaatttcatgatatgtttttgcattttattttttccacaatagttgaaattgaagggttaattttattttctcagctggttgttgatttt

SEQ ID NO: 135290 - DNA, 417 bp, Glycine max
  Clone ID: PAT_MRT3847_93177C.1
ctctttaatattaaaaagtataaaaaaatgctagtttggcagaatatttcttccgaaatatttgtcaatccacttaaaacatgacagttatcaatctatttaattataccttctaaaaaaacttcgtttcaaacgcattttttactcttatctttattattttattttaaaattgttcatggaattatttacttatgctatttatataattcaaactaaatttataaaaaaaataatctctaccatttctttttctttttcactcaccttttccatcatattaacgttggactttgtaaggtggacatctaaaatggtgtttgatccatctttacatcaaagttattgcattatatttatgttaggtatcagaaaataaaatatgcacacaaaaggcttcaggacaattaacaatgc

SEQ ID NO: 135291 - DNA, 350 bp, Glycine max
  Clone ID: PAT_MRT3847_93178C.1
atcaaatttaataaccaaactcttccctgtagttgtgttgaatgctaaaaactcaacaggttaatgattacactaactgatgactgtcacctaacttcaagagcgagacaagccggaccttacagatattaatgcatctagatcaatctttatcactatgcttctctattgactcatcggattaccatcaacgcttaggacatataatatgatatgtacggagaaacaagcatgtcacaaagacataactcggatcctgggatacaaattgcagctcatagtgagcagaggacggggaatgctcactcatcaataaaggacgggattttgcattacgagggagaactacg

SEQ ID NO: 135292 - DNA, 536 bp, Glycine max
  Clone ID: PAT_MRT3847_93179C.1
accggtccggattccgggtcgacccacgcgtccgacaaaaccgaatcgagcgggttgtatcagcaaggagacgtcatggtcctatggagccaagaaatggtgggctatgggcctgctgtcggcgatggtagtggccatgctcccaggacataacccgaagtgtgcaacagggatctgtcaactgtggccctagacgtgctggcttggacaccgggggcccaactacattgatgatgctgagataatgtggcgaggcaggaacaaccccagcatacatgttgggtacacgcagaaagggttaaggctctgacgcggagcatacacaatggacgtggaaaaggatcacgcataatcagagctgaattgccgatcgggtaggcagtaaaaaacctaattgctgggtagtcaccccaggccgcgacgaggccggccggattataagaccctacaacacgaacgcctgcatcgaataggatagcaatgccatggtgctacatgaaatcaagaggactgtcctggctgtgacaacatcctga

SEQ ID NO: 135293 - DNA, 459 bp, Glycine max
  Clone ID: PAT_MRT3847_9317C.1
cccacgcgtccgaattttttgacagagggcaattttagagcaagtgttgatttgcatcgcactcatcgtattaaaggaatgattaaaatggtggccacagttggtattcctgagaatacaggtatagcattagcctgtgctatgaatagttcctttagggggcgtgccagttctgatatttacaccatctgctttcaagactgcgaattatggaatcctggttgcacaaaagcaatgactttttcatttaatccaaacccttgttatgatgcatggagtttggaatttctgaatcgtaccggatcttattgtgatatcatttgtgtaacttggatggactgccactccaatgcaggatgttcaggtttcaatctattgtgttatttcctttaagaaattgttcccaggacctattgggttttaatccccaaaaccttttgagttaataggtgattgggt

SEQ ID NO: 135294 - DNA, 720 bp, Glycine max
  Clone ID: PAT_MRT3847_93180C.1
atgagcaggaagtgacatatgatcgtgactcattctcaagctttctggttcaagtgccatggtctgataccaaactatactctcaacttgctttcctctgcaacatggcctatgtaataccccaaatcaaggctaaggacttgcgaagatactacagccttcaatttataacatcttctttagagaagaaagctgaagtggccaagttaaaagtgcaacttaatcaggactccacttgcgttcctgtagatgactcggtagcctctcaagatgtatcaaagaaaacgagagacagtataaagaagcctcaaatcaaactagcttatgatattgctgcctcagcagcctcttatgtccaattacgagcgaaggatctcttacaccgtgctgctaagtcacgagacacacaacagactgaaaatgaagattctaatggaagaggagactcaccacgagaagagctagaaagcacttcgcgaggttacaaatcagaggttgcagcttatgttgcagcgtccacaatgacagcagtggttgcagcaggggagaaggaaaaacaagaagcagcaaatgacctccaatcacttcattcctcaccttgtgaatggtttgtttgtgatgatcccggcaattacactcgatgctttgtaattcagggctctgactccctggcatcttggcaagcaaacctcttctttgagcccaccaaattcgagagga

SEQ ID NO: 135295 - DNA, 952 bp, Glycine max
  Clone ID: PAT_MRT3847_93181C.1
tgaagaagtagtggaagataacaagccaccacttccctcgtttcgaaggttgctcgcactgaacattcccgagtggaagcaagcatgtttagggtgtttgaatgcggtgttgtttggtgcaattcagcctgtgtatgcatttgcaaggcggtcagtgatatctgtttacttcctcccagaccataatgagataaagaagaaaactatgatctattcactttgtttcctagggttggctgtgttctccttagtggttaatatcctccagcattacaactttgcttacataggagagtacttgactaaaaggatcagagaaagaatgttttccaagatactcacttttgaagttggatggtttgatcaagatgaaaattccacaggtgctgtttgttctagacttgccaaagaagccaatgtggtaaggtctttagtgggagatagaatggctctagtggtacaaaccatttcagcagtggtaatagcttttacaatgggcctaatcattgcatggaggttggccattgttatgatagcagttcaacccattatcatagcatgtttctacacaaggcgtgtccttctcaagagcatgtctagtaaggccatcaaggcccaagatgaaagtagcaagatagctgttgaagctgtttccaacctcagaacaatcacagcattttcttcccaagataggatccttaaaatgctcgaaaaggcccaagaaggcccgagccgtgaaagcattcgacaatcatggtttgcgggcattgggcttgcatgttcccaaagccttacattttgcacttgggctttggacttttggtatggaggcaagcttgtgtttcagggcttcataaacgccaaagcattgtttgagaccttcatgattttagtgagcacaggtagggttattgcagatgctggtagcatgaccaatgacctagctaaaggg

SEQ ID NO: 135296 - DNA, 627 bp, Glycine max
  Clone ID: PAT_MRT3847_93182C.1
ataacctgggctcctctaagcttcttcatccatcagcaatggctgcaccaacaaactcatatctgagaatgagaatgtaacaacactcaacattccatggcttcacattgcttccttcgttttcctccttcctctttttccttaaaccccaaatccaaaaggcttccaaaacctcgttatcacccttccattttctcgcgaattcaaaccccaaatcccgacgaagacgacaaagtcccaaatgacaaccgcatcgactttctcaaactctccgtcaccctcaccgtcatctccgcctccctccccaaacctgccgccgctgccaccactaaggtaaagaaacggtcaccgaaaaaacaatccgcgaaaaagcccgaaggtctctcgccggaggagctgaaaacatggacaagtggccttcccgtggtctccgatcgcctcccctacagcgaaatcatcgaactcaagaagagcgggaagctgaagcacgtaattaaacctaattccgcgaaattgaggcaacgcggcgaagcagttcttgtaggtttggatgattcgagagtgctgaggacagtgttgccctcgcttgagagccatagcaagttttgggattcatgggatgagttg

SEQ ID NO: 135297 - DNA, 345 bp, Glycine max
  Clone ID: PAT_MRT3847_93183C.1
gcttaatttctactctctacttctagctaacagagttaagtaaactgtcgcttcagtactggatgtgtatataatggcggtggctgtgacgattctggtgacccttctctcggtactcactactgcatcgcgtgtttgagtggtagacacatatccctgaatattgaaccaacaaccatgtgcaagatcactttccttgcgcattgagctactatattcgtgctgcacagcttataacgcacagctgatgctaacttgcgattcaactgctgcgctgttgagggttctgtattgcatttcacagttttggattatcacattaagctccaaattgagacctgttcc

SEQ ID NO: 135298 - DNA, 330 bp, Glycine max
  Clone ID: PAT_MRT3847_93184C.1
ttggaactgcctgaactagatgttgagtgtgggaactcggggttagcagggttctcagtcaattctcttggacaagatgccttgtctttcttcaaaaagatgctactactcggcttcttcccttctgagttttcttttgctaccgtaatgagctcttgtgcaaaactctcttccttatttcaaggtcaacagttttatgctcagatcgtaaaagatggtattctagattacatatatttgtggagttctcttatagaaatgtattgttaatgtgtgtatttaaacagtgcaagatgtttctttgacgtgatgcctgttataaatactgat

SEQ ID NO: 135299 - DNA, 1021 bp, Glycine max
  Clone ID: PAT_MRT3847_93185C.1
gtttatagattaggaagaccggaatagccaaccaaacccgtcgtcgtctagttatctatctcctccaccagcgaaaaccccaaaaccctagaattcaagaatcgaaagcaatggacttcgacgagtacgattacttggagaaaacagtggaggagcaagaggaccacgacagcagccggaagaagaaggagagcgagaggagctacaggaagcgcgaggagatcgacgagggaatcgaagagacgaagagcaagaggtccaggggcgacgaagagaacggctccaagaaggataaggaccgcgaagaacgcgacagggagcgccgcagggacagggatagagatggtgagagaagtagcagagacagggatagggatagggatagggagaaggagagagagaaagggagggaacggagggaaaaggataaagagagggagaagagggagaaggagaaagagaaggagaaggagagggaaagagaaagaagggagagggaacgggaacgggaagagagagagaggtctcggaggagtaggagtcgttccgagagagaaagagaaagagaacgggatttcgacaccagagatagcaggagatttagggacaaaaaagaggcagcggagcccgaggcagatccagaaagggatcagagaactgtttttgcttaccagatgcccttaaaggcatcggagagggatgcttatgaattcttctcaaaagctggcaaggtgagggatgtccgtctgatcatggataggaactcaagacgatctaaaggagttgggtatattgagttttatgatgcaatgtcagtgccaatggcaattgctctctctggccaacttcttctaggacaacctgtaatggtcaagccttctgaggctgaaaagaaccttgtccaatctaatgctaccagtggagctgctggagtagtaggaccatatggagctgtggacaggaaactatatgtggggaaccttcactttaacatgacggagagtcaattgagagagatttt

SEQ ID NO: 135300 - DNA, 781 bp, Glycine max
  Clone ID: PAT_MRT3847_93186C.1
cccacgcgtccgggaagaccggaatagccaaccaaacccgtcgtcgtctagttatctatctccgccaccagcgaaaaccccaaaaccctagaattcaagaatcgaaagcaatggacttcgacgagtacgattacttggagaaaacagtggaggagcaagaggaccacgacagcagcagggagaagagggagaaggagaaagagaaggagaaggagagggaaagagaaagaagggagagggaacgggaacgggaagagagagagaggtctcggaggagtaggagtcgttccgagagagaaagagaaagagaacgggatttcgacaccagagatagcaggagatttacggacaaaaaagaggcagcggagcccgagcagatccagaaagggatcagagaactgtttttgcttaccagatgcccttaaaggcataggagagggatgcttatgaattcttatcaaaagctggcaaggtgagggatgtccgtctgatcatggataggaactcaagacgatctaaaggagttggcaatgcgataatgatgagggatgatgggggaataccttgcactcatgtataatcaattcatgctgcgtactcaaggtatattgagttgtatgatgcaatgtcagtgccaatggcaattgctctctctggccaacttcttctaggacaacctgtaatggtcaagccttctgaggctgaaaagaaccttgtgcaatctaatgctaccagtggagctgctggagtatgtaggaccatatggagctgtggacaggaa

SEQ ID NO: 135301 - DNA, 260 bp, Glycine max
  Clone ID: PAT_MRT3847_93187C.1
tcgctgccctggtataggacaaggactcctcctgggaggagtgcgtaaggaatgtatacctgatgcttcaccaaagtgttttaaaaggggaagaggtttcagggaaagatcctcttatgcaagaaggtatagaacccccttttggtctcctgtgaggaaataccggtacaatggaaaaaatgaccgggacaaatattttacttacagaaggtttttcccttagcgttttaggagcccaccaccacctggaaaaactcccc

SEQ ID NO: 135302 - DNA, 506 bp, Glycine max
  unsure (1)..(506): unsure at all n locations
  Clone ID: PAT_MRT3847_93188C.1
agcagacacatatgggggcggggggggggggccaataataantcccagggggaaagggtcctangaagcagcttgcaaccaagggtgcacgtaagtctgcaccaactactgggggggtgaagaagccccaccgttatcgtcctggtaccgttgctcttcgtgggagggggggaggccanaanagtacccagcttttnatccggaagctccccttccagagggggggtcgtgaaattgctcaggacttcaagactgagctgcgtttccagagccacgccgtgcttgcattgcaagaagctgctgaggcataccttgttgggctctttgagggactaacctgtgtgccattcacgccaagcgtgtaaccattatgcccaaggatattcagctgggaagaaggagtcctggggagcgtgcttnagttggtgggtggaaagatgaanatgattggggcctgcgggtggtgtttttggttttcagattcctttttttattcaatagatggg

SEQ ID NO: 135303 - DNA, 182 bp, Glycine max
  Clone ID: PAT_MRT3847_93189C.1
acacatttatcttcattcattcggaggggctagaaaacaggatgtatttagccgttagagctatataaaactactgcaataacccacgcttggcccattgtgaacagacataggcttatgatcaaacattcaacaggggaccccgaactatgttatttattactgcgaagaactaattgttc

SEQ ID NO: 135304 - DNA, 473 bp, Glycine max
  Clone ID: PAT_MRT3847_9318C.1
aaaatagcacaccttccacatcattacgacaattaaaagagggggggaaattgtcaaatgggcgaaccctactcaacaagagggtcatgcctaatttcctttattgaattaatcaagccaccaagcgaaggaagacacaaattgcacatcatgcagaggattcccaattttcaaaaaatctggcagtagcctgtcggaacagaaaaagctggcttaaaagaattaccagcaattgcaaaatcttgagagattcccaagagaatatcaaaaactgtagactggttgggattgtcaataaggaaactcaaatgccatgaagtttgatttgcccactcagaactgcacatttcaaaaccattattaggaccacatacctttattgggaagatcaattgccaggaatgcggatctgattttggccacttacatgcatcaaaaggctctgtactgttgctggtggttaaaaacccttg

SEQ ID NO: 135305 - DNA, 425 bp, Glycine max
  Clone ID: PAT_MRT3847_93190C.1
ggaagcccttgagaaaggtgaatttgttaaagatgacagaagggtactacagcccttctcgaaaggaccaaggagctgtatcgggaagaatctggctctgcacgagatccgcctgaccctagcttatcttttatggcatttcgacttatatgccacgagtgcgagcgagaactggcttcagcaaaaaagttatcttgcgtgggataggcctgcgctacaagtcgtagtcaaggggaccgacactgcctccattttctaacattgagaatcgattgtctcagtgtctccttttagggcttgcgagtggctaaaactgaaaatgtcggctggatgccgaatacgaggccgagttttatgtgctgtggatgtcaaattgaaatatgtaaaagcagtggtgagataataaagctctaaactacgaggaa

SEQ ID NO: 135306 - DNA, 249 bp, Glycine max
  Clone ID: PAT_MRT3847_93191C.1
cggcggccgtttcgcttttttttttttttttttttttttaagcacttaaccttaaattaaattttaatttggcaaaatcaaaattcctaaaaactttattgggggttttgccaaacccacccctttggaattacctatttaaggcgaaggcaaaacggttaagtttcaattggaccactttttttaccactaggcccttacaaactcctgtggggtcctataaaaattggtggcttccttcgaatgggg

SEQ ID NO: 135307 - DNA, 460 bp, Glycine max
  Clone ID: PAT_MRT3847_93192C.1
cggccgctcgagccggcgggcgggatcggatgcgtaggattacgactgttcccagcagcgctcgctagacgaccgacctgaagcgacagccacggggagaccgcctagaaccatgtcgacgtaggtgacggcgcgctcgcgacacttctgacgtctctccagtcaccatgcttctccccctctccttttcaacgatagactcccctttcctcttccctctcttgatcccctcacacactcctctcacatccacatcctcgttcgtcaaacccaaccccaatcccgaactctagctctaaccgaaaccccttctccaccactaacgttcccgcatgcattaccactactattcttcttcctcttagaagagatcctctcatagaacgaccgggcctccatcactcacagcgtctaacacggcttctgcggccgatgcgaaatgctcctcaccgtgctcgat

SEQ ID NO: 135308 - DNA, 546 bp, Glycine max
  Clone ID: PAT_MRT3847_93193C.1
gcatggtctagctatctcgatcgaactgtccaaggtcctgtcactgaaaaataacgtggtgagtaccataagcgtacaggggcagaaggtaaaggttgagttgggcgtagttatacaaggctaggtaaatttgcaaagcctgcttaggcgggctaaaggttagggctacacaaactgcaaagataaacacccagcaagaactgaacttaggtaaaggacgcagtgtgtggtacgcgacagtacacgacaaacacttggtagcagacaaacgttgacaatccggcaacgccgcgtgattaagttccgacgttagccggggcgttaacagcgtgcaaacgttaccgcagtattggtaggttggaatggcgagacaagccgaaagtagcgcagccacccggcagcaaggcagccgtccatgcccaatagccgtggcagttttggaggtggggacataagttgactaggtaaggggtgcaacagtctatgtggagccaccagagtacatatgccaatggggtatgtaccacgttaacacacaatgttgat

SEQ ID NO: 135309 - DNA, 2251 bp, Glycine max
  Clone ID: PAT_MRT3847_93194C.1
attcccgggctcgacgagacatggaatgtatttattttgcagtaacggaagagagtggaactggatccccgtcatcggataaacacaatagctgtagctagagaagagtgccattattgattcgcagaagaagataagcgatgtttgggttaatcggaagaaaggcctctttgttgggaggatcaggaagaagaagaagatggttgagcttcgcagcagcagcagcagcaacaaccactaccaatggtggggccatggaggagttgctttcacagctccaatctcatgtccagaaggctcttgctggtggaggacccgaggcagtgaagaggaacacgagtaggaacaagtttctgccccgtgaaagaatcgatcgcctccttgatcccggttcttccttcctcgagctttcacagcttgcaggacattacttgtatgaagaacctttgccttctggaggggttgttactgggataggtcctgtgcatgggagactgtgtatgtttgtggcgaatgatcccactgttaagggaggtacttattatcccattactgttaagaagcacctcaaggcacagggagattgctgctcagtgcaaattgccctgcatatatcttgtcgacagtggaggagcttttcttcccaagcaagccgaagtgtttccggacagagagaactttggtagaatattctacaatcaggctgtaatgtctgctcaagggattcctcaaattgcattggtgttggggtcttgcactgctggtggcgcttatattcctgctatggctgatgaaagtgtgatggtcaaaaggcatgtttacatttttttagcagggccacctcttgttaaggctgccactggagaagaagtctcagcagaagatttgggaggtgctactgtgcactgcaagacgtcaggtgtttctgattattttgctcaagatgaactccatgctcttgcgcttgggaggaatataattaagaatttgcatatggctgggaaagatgtcttggcaaatggattgcaaaatataaattatgaatataaagagccactgtatgatatcaatgaacttcgttctattgcccccactgatcttaggcaacagtttgatatccgatcagttattgatagaattgttgatggaagtgaatttgatgaattcaagaaattgtatggcactacacttgtgacaggatttgctagaattttcggacagcctgttggaattattggaaacaatgggattttattcaatgaatctgcactgaaaggggcccatttcattgaattatgcactcaacgtaacattcccttggtcttccttcagaacatcactggattcatggttggctcaagatctgaggcaaatggcatagcaaagtctggtgcaaaaatggtgatggctgtttcttgtgcaaaggtacctaaagtcactataatggttggaggaagctttggtgcaggaaactatgcaatgtgcggtcgtgcctatagtcccaatttcttgttcctttggcctaatgctagaatttctgtgatgggtggtgctcaggctgctggtgtgctggcccaaatagagaaaggcaacaagaaaaggcaaggaattcagtggagcaaggaagaagaggataagtttaaagggaaagtagtggaggcttatgagagagaagcaagtccttattactcaacagctaggctttgggatgatggaatcattgatccagcggatacaagaaaagtcattggtctatccatctctgcctccttgaaccgtgacattcaaaacacaaaatatggtgtatttagaatgtaaatttcaaaatttattctgccctaaaatatgtggttatcattcagcaatggtgttattaagaaaaataaaaatttaaagtgtgcgcgttgctgggggttgttgaagggcaagaccccgatatgaaagagaacaagcggagtggtgccccatacatttttataataaaaatgtttcttgtacgtcaatttgtattcccaacaaaattttgcatgcggatttgtttccaaagcaactccctgttagaattggaaccatttgtagcacccaaaataaaatgccattttatttaattttgggaccattagttacattcaaagtaagttaagtagaaaacagggggggcgactctgtttactgtaatttatatacgatgcatctagtgtatctttttctatttccaattttaaaaaccaaaaaaaaaaaaaaaggcggc

SEQ ID NO: 135310 - DNA, 849 bp, Glycine max
  Clone ID: PAT_MRT3847_93195C.1
cccacgcgtccgtctttagctgtgtatagacttaacaactacaaaggcagagtaagttaatctacatgtaatgacaagtgtcttggaagttgaaatgtgattccatttgggcaagtaggttctcctacatgaaagaaagaattgaaggtacctaaagtcactataatggttggaggaagcttcggtgcaggaaactatgcaatgtgtggtcgtgcctatagtcccaacttcttgttcctttggccaaatgctagaatatctgtaatgggtggtgctcaggctgctggtgtgctggcccaaatagagaaaggcaacaagaaaaggcaaggaattcagtggagcaaggaagaagaggataagttcaaagggaaagtggtggaggcatatgagagagaagcaagtccttattactcaacagcaaggctttgggacgatggaatcattgatccagcggatacaagaaaagtgattggtttgtgcatctctgcttccttgaaccgtgccattgaaaacacaaaatatggtgtatttagaatgtaaattataaattttactgtgccctaaatatggggttacctactgttattaagaaaaataaaaatttaaagtgtgcgcgttgctgggggttgttgaagggcaagaccacgatatgaaagagaacaagcggagtggtgcaccatacatttttataataaaaatgtttcttgtacgtcaattcgtattcccaacaaaatcttgcatgcggattcgttccaaagcaaactcactgtaagaattggaacaattcgtagcacacaaaataaaatgccattttatttaattttggaacgtaaattataaatttttact

SEQ ID NO: 135311 - DNA, 460 bp, Glycine max
  Clone ID: PAT_MRT3847_93196C.1
gcgcccggccggaattccgggctgatatacacctaactgcaaagatgaataccaagcccgtttttttcttgagctgactctggggactgggagtgatgtctgttgggggcactgagccatgcaaagatgagacacaagaagaacctaagacacagtcagattcctggggaagaggtggaaatggggggcatgattgaagctgtggacacggtggagactgggggcatggaggaggaagacaccgtggatgacatgtcggacgaagacaccgtggaggacatggtagaagatgcacatgcttgtgtcgaaagggctgtaaatgttgctgaaataaaaatcacacatatgtgaactggacacactcctatacatgactgtactccatgtcataactagaatatctggaagaacatagacatgctcgcatggactctattcgggcttgagcatgcataaggtg

SEQ ID NO: 135312 - DNA, 1611 bp, Glycine max
  Clone ID: PAT_MRT3847_93197C.1
aatcgtaaatatgttgaggcgcttcacatgggttccattccaatattattcacacagcggcatggggcccataactttctttggtgtgtaagatcaaaaaatactagtagtttggtcgttggaaggaatttaattatcaaccagagctttgaacacagatttggttattctctatttgtgtgctcagtatggtgggaatcttttcgttgattacagggagaccgggatgtagtggattcggatcttcctcaactgctgaacaggttatcggaaaaattgatgccagcaacctcacaccgatctggtttttctctatttgcgtgcgtgctagtatagtcgttgctgctcagtatggcgggaatcttttcgttggttactgggaggccgggactaagtggattcggatcttcctcaactgctgaacaagttactgaaggaattgatgccagcaatctcactgcaatcatcacaggaggagcgagtggcatagggttggagacagcacgtgttctggcaattcgaaaggtccatgtaataattgctgccaggaacatggagtctgcaaaggaagctaaacaactcatacttcaggaagacgagtcagcatgtgtggacataatgaagctcgacctatgctcattgaagtctgtcagaacctttgtggacaacttcattgctcttggtcttcctctcaacatcttaataaacaatgctggagtcatgttctgcccttatcagcaaacagaagatgggattgagatgcagtttgcaacaaattatcttggtcatttcctcttgacgaaccttcttcttgacaagatgaaacaaaccgcaaaagacactggaattgagggcaggatcgtaaatctgtcatcaattgctcatctctacacttacgaagaaggaattcgatttgataccatcaatgatgaagatggataccatgagaagaaggcctatggacagtccaagttagccaacatattacacacaaacgagctttctcgtcgcttacaggcagaaggtgttaacatcacggccaactcagtccacccaggggtgataatgactcctctcatgagacactcttctttactaatgaattttctgaagatgttctccttcatgatatggaagaacgtccctcagggagcagccacaacgtgctatgtcgctctacacccaagcttgaaaggggtaacggggaagtaccttcaggattgtaatgagtccccaccaagtgcacatgcgtcaaacgaactcttaggaaggaaactgtgggattttagcaacaagatgattaattcactttcaaaagcttgattgattgcactatagtatttgtgccaaaccctcgtcttcctcatatcagtgtatcaaaactcgttaattatgcttaatatacccatccaccctacagttataatcataagttctaaacatatgattcgtggtcattggtccttgactccatttgtattttgtacgcgtaatatagaggtcttatatactcttatttatgtatcaaacgtatcctttaaattaaaattaaggtaaaagaagtatgttaatgatgatttaggcgaatatgctgactagtttaatcaaaaa

SEQ ID NO: 135313 - DNA, 772 bp, Glycine max
  unsure (1)..(772): unsure at all n locations
  Clone ID: PAT_MRT3847_93198C.1
ctccggaattcagcatccttgtgtgctatcattctcaccttatctttttctccaatccataagttggtagcctctctccctcatttcacatgccatccaatttagacatgaaaggaatgaaaagcaggttccatagaaaattgaaactcattccaaccattaccaacttgaaacaaggcctagtccttcagctcaatccaccaatctatgatgatcaagatcacaagccccacaacatggctgaactagagattggccccaaaggaagtgaagatgataaacattatgagttaaaagaaatgcaatttaaagccacacccaccaaagggtccaaggagaaaaacttagtggctactagtcctagtaaaagcatgcatcaaaaaattcaaggcatcgaagagtacccatctctaacagattttgaagagatacatccaccaggtggaagccaagcagtgattctctacacaacaagcatgagaggcataagaaaaacctttcaggactgcaacacggtatgctttttgttgagaagcttcaagataagataccatgagagagatgtttctctacacttggagtatagagaagagttgtggaagatcttgggtagcaaagtgatccctcccaggcttttcattanagggaggtacattggaggagctgatgaagttgtaggattgcatgagatggggtggcttggaaagcttttggaagaaacaccaatggactttgctgatggtccttgcaaaggtgtgcctgcatgagggtt

SEQ ID NO: 135314 - DNA, 452 bp, Glycine max
  Clone ID: PAT_MRT3847_93199C.1
tagaaagtggaagatttggtggataacagcaacaatatctatttggaactttagaaatgatatgatctttaaaaatcaaccgttcgttatctctaagttggtggataatgcaatctttcttacctggtcttggttgagggggtgggaaaaggactttgctgttccttttcagcaatggtcctcatctatgtctcttgccttcacctagtgtgggacgtttggctgggttttgtagttttacttgttggggtgttattttgttgattatgttttctagtctcaggaatggcatcctatatgtatctttgtagtacccctggtactattcatatctaatatataaatacttttggccgttcaaaaaaaaaaaaaagaagaaattatgatcttctcttgttgtaatcttactcataagttgaagtgtttcaagtcaggtaatactgaatgattta

SEQ ID NO: 135315 - DNA, 584 bp, Glycine max
  Clone ID: PAT_MRT3847_9319C.1
ctcgagccgcaacaactctgttggctgatgggtgtacatatttgtatgcattggcgcatgatacttcagtgcctacaataccagttgattttgtcattggtgtcaagttgacaaccataaacaatatgtgtgcatatgggctcaatcctggaatttcacgctctcgtctttggggcaccattcctcattccatttcacagcatactgtgtggaatcaaatggcaacagtgagaacaccattgaattttgattctaccatgcataacttttgtcagatttctattgaccttatcaaaggtatgaatcttacaggacaaaactggtatattggatcacacttatacaaaattatccaattacaaacttgttgagagttgctgcttggaagaaaggctgttaaatggtcaagattgatatgtctgggaatgcatcactcaaaaggagcgattgggcctcattggtacaagtgtttttaacataccgcagatgttcacagcattttgatgcatgtaaatggacaaaattagaaccacattcctgggaattgatcttgccaatacaggtatgtggtcctaatactggtt

SEQ ID NO: 135316 - DNA, 1813 bp, Glycine max
  Clone ID: PAT_MRT3847_931C.1
ctgcgaaatatgcaacaaagggttccagagagaccagaaccttcagcttcaccgaaggggtcacaaccttccgtggaagctaaggcaaaggtccaacaaagaggtaaggaagaaggtttatatctgccccgaacaaacctgcgtccaccacgaccctgcaagagcactcggcgacctcactggcatcaaaaagcacttcagcagaaagcacggtgagaagaagtggaagtgtgaaaagtgctccaagaaatacgcagtccaatcagattggaaagcccacaccaaaacctgtggcactagagaatacaaatgcgactgtggcaccctcttctccaggaaagacagcttcattactcatagagcattctgcgatgcattggctgaagagagtgctaggctcacatcagttacaacaacaaatctaaatttcaagagtgaagagggtggtaataatgtgatgaactcgcagcagcatggtttgggaggacatggactaattggagcacaaagtcttcaaaatgtttctggcattccacaatttggttcacatggttttcgtttggatttcaatggaatggaacaacaaattaggccaagtttgtcactatggttgaaccaggggaatcaccagatgaatagtaataataataacattaatagcaacaacaatagtgcttccgatgcgggacccaattacatgtcatcatcaggtttgcctgagattgtgcaaatggctcatgctaatgctttgatgggttgttcttcatcgatggtgtctaattttggaggagttcatgcgggttctaattcgagcagtgcaaatctttcactagggaaaagaggggaagcatgtggaagtactgtagtggacttggcttctatttataataactctgagggtcaaaacaagaattcaaagcctgcttcacccatgtcagcaactgcgcttcttcagaaagcagcgcaaatgggttccaccagaagcaccaacccttctattttcagtggtagttttggagtgattaactcaccttcctcacaaactaccagtctcaacaacaacaacaacggaggtgcagccatgatgctggcaagtaacacttctactgctgctgcaaatgcaaatgactttagctcattgaggcattcatcaaacagttttgaccagcttgtgatgcaaaccaatgcgcagttgcaaagtgagcctgtgaagttgaagcttcattcaaatggtgtggagaacaatttgacaagggattttcttggtgtcagcggtggaggaggaggtggtggtggacctcagtttcttccccaagaacttgcaaagtttgcttccatgggctcaccaatggggttgagccaattcacaagtaaccaatgaacgaactcgttttgtttatgagcttctaagataacctcaaacttcaaaggtttgatggaaggagaatgaatgagttggagtgtaccactgtgagagattgctcgatcatgattatgttgtgagtgggggacccacacttgttgaacgaaaagagaatatcgaacaccacgagtcgtgcatgttctcccaatattgttattgttgtttttttcttctgtctttattaaaccatgttatcgttttttgcttctcgatcttttccttgagagaaatgaagggaggcataaaataatgaaaggaattcttagtgaatcgctgaaaactactagttgcgtactactgttgttgaccgtcaaattacggttactcgtgtaccatggatatatcgttaattacaaaataatataatataaaaatttagatattacaagt

SEQ ID NO: 135317 - DNA, 465 bp, Glycine max
  Clone ID: PAT_MRT3847_93200C.1
cccacgcgtccgcagcagttggtacttggtacacaacttcacatgttcttgttacgatttgcgttgcgtccccaaacccaaaaaggctagctagggttttagatcagatcagtgtgtaagaaaatcagtaatcagtaatcactcagcataaaatttgtttttttttttttttgtttccgatgcaaaaaatgttacacagcaacacattcatcattcacttccttttgtgacaaatcgctcttaccgattaagaagatctcgtgtagcagactcaccgacatgggtccggggaaggtccactggaacgtttttgacggagtgaagataatcgcggcgacgccggaggcactcatggcggagatcgactccgcgatctcgaatctcgaatactcacgcgccaccgctcttatcgacgccgacgagggatacgacgcgcgcgtggccgacgaagcctacaaggcgggc

SEQ ID NO: 135318 - DNA, 306 bp, Glycine max
  Clone ID: PAT_MRT3847_93201C.1
ggctcgagcggctcgaggggcagagcctgcccgcgctgaagtttgctaggatcatgagcagggtcgggaggagttaccgaagctaggaagagatgatgtaaaggtactagatattctcgcaaaatcttaggttcatccgctcccacaacaaagaaccggttgccctacactctctctggcaatcattttgctgattggacttgggaggagttcaaatgacacacactaggcgctacctacaattgctctgccactcttaacggaaaccacaagctcactgatgctgttctttctcccaccaaagac

SEQ ID NO: 135319 - DNA, 202 bp, Glycine max
  Clone ID: PAT_MRT3847_93202C.1
ccgaaatggggatacttagcccaggaccagctccaattttcaaactctgatggtaatctggtgattgagtctttcccaggtggcgataagattgagtccatgttgcaaaggatggagcagttggtggatgagtttgacccttcttcaaccgcctaaatttgttcaaccaagaaccaccaaaagtggactgatgataactttt

SEQ ID NO: 135320 - DNA, 393 bp, Glycine max
  Clone ID: PAT_MRT3847_93203C.1
tcgcgctcgagcattgagtagggctggtttatatgtcgtatctgatttggctgaatcggaaccttgggggttttatgcatctgttgagtatccatgctcagcctgcgatgaactcaaacactttttacaagctcttggatttgtggtcatacatcagaaaccaaataaaacatttagtgaaataagccatgacctgtgcccagtcaggtcgagaaacctttgtcattgaaagatctgctatttaaaatgaggaccattgtgtttctgtgtacaggtgcttattatacagcagctatattggatacgcaccatgttttgtgatgacaaatacaggacgcatagtgtgtcctccgatgtaatatgcattatgacagcgttgacgactgtagattc

SEQ ID NO: 135321 - DNA, 358 bp, Glycine max
  unsure (1)..(358): unsure at all n locations
  Clone ID: PAT_MRT3847_93204C.1
aagaatgttctataccaatatgatcctactaccacgtngaacttatatactatcaggggcaaaaccaattttttctggtcccaacaaacttttctatatgttgttagtaattgcctggtattactccatccttaccctcttttatccactttcctcaagtggtgttactacttttctcaaaacatacaaaaatctattgaatgtgacctattgcatggtaaccaacttattactttcatttcaattaattccaatatgaaataaaaataattggatttgaagccaacaacattttatattatcaattttcgtacatattattaacttaattttaatgcatttttacattctttactaa

SEQ ID NO: 135322 - DNA, 490 bp, Glycine max
  unsure (1)..(490): unsure at all n locations
  Clone ID: PAT_MRT3847_93205C.1
ctagaaccatgaaaggttgttatgacactattatgtggaaacatgaattgaataaacttgaaaatttggagatgggagaagaggtgaaggaagaagtcttcacagtactaaaacgtagctatgataatttaattgaaaaggacctgcaaaagtatttgttatattttgcacagataccaaacaattctggtttccagtcaaaaagctacttagttaaaaagcttggtgagagntgtttgttaaaaaatgtaaagaggagtttgagggaagtatttgatgaggcgtgtgccatggcgaataaactcgtagaccattctttgtttgtgggttatgattaccctacaaaaatgcatggtctggtgaggaacatggcatgccgtatcttgaatgagagtaacaattacatggtgaaatgtgaaggaaatttgagtgagatacctgacgtgaaggagtggatagtgaatttgaaggaacttccttggggggaaac

SEQ ID NO: 135323 - DNA, 151 bp, Glycine max
  Clone ID: PAT_MRT3847_93206C.1
taaaagacaataacctccaaaaaatattatggacttaaaggccgatcggatacaacattgcactcttgaaattacctaaacatttgctcactacaaacttatttttgggctgagcaataatgcatgggtcactttctcgtgagtcacacat

SEQ ID NO: 135324 - DNA, 456 bp, Glycine max
  unsure (1)..(456): unsure at all n locations
  Clone ID: PAT_MRT3847_93207C.1
ggctcgagcatttgcactatctcctggggtggaagcaggtaacgctctagtgtttttgattgtgatgacttttgggtcgttttactcggtctacgcagctgggggggattctattaaaggtgatctctcaatgttctctcgctttacggaacacgggaccgggaaactaatgagttttcagcttcttgctttgtaactgccattacggatgctctaaatcgaacatatggagagccgtngnatgtcgtacctaatcccaccactcactatattaataccctcttggtaccaagaaatggtgaaattccagttgatgtggactgtctggctgcccaaggaatatttgacgtgatagttgttgacctccctaagaaatcctaaagtagctnngccttcctttgttgacactgatctgtgaatttttggtttgcatttcttgatatcaaatgatgggtc

SEQ ID NO: 135325 - DNA, 337 bp, Glycine max
  unsure (1)..(337): unsure at all n locations
  Clone ID: PAT_MRT3847_93208C.1
tcggaatcggctcgagcacgaacctcttcatcttgttctatctgtgatgagcatcatggcctcaagagcagtggtattgttcgctatatgtgtgcttccagcgctagctgtggccattcgcccagcatagaaccctgtttgcgcgaagggtcgtctctactgtgacacttgccgtgctggtttccagacctcagctagcagctacatggctgctgctgagattctgtggccctgcatgagcaacgttagctacgaaggtgtggacacgaatattgggtacacgactcagacggaggctacagaagctacgtgcatgcngatcacgcagatcagctct

SEQ ID NO: 135326 - DNA, 345 bp, Glycine max
  Clone ID: PAT_MRT3847_93209C.1
agcaacccgagaaaacgacagaaacagacgaaagccacgcgaaaacgaccaccagagcccgcaaacagcaaggcccacggaccgggcccacgaaaccaacagcacaccacccaacagccaggacgacgacgaagaagcaggacaccaaaggccgaagcacaacgagaaagacaaaccgaccaccgaacaaaaacgaaaccaccaccagaagatacagcctaaaaagccagccctccaacaccaccagcgcacacagaagagcaaccgggccgctctccccatccagaccgggcggcaaatccactcagaccgacaaaggggaaatgcgaacgaacccgggcccgg

SEQ ID NO: 135327 - DNA, 349 bp, Glycine max
  unsure (1)..(349): unsure at all n locations
  Clone ID: PAT_MRT3847_9320C.1
agcccggaagggggggcgaggaagaaagagcgcangngcgggacattttgtttacataaatacaactgaaaatcttagggtcctagaggggaggagggggaaccaagaaagaagtgggacatggaaagcgggcagaagcgagacaacgtggattaaggaaaggactgaaatatggatttatgcgattagtttcaatacgatcaaaaacatcgcggggagctagtcgggcgctgaaaggaaagaaatgtcggagcgaaatgaatctagcgggctcatggcagatagaacgggatgcatgccctaaggacaaagatgcatatctttaacacgaagtggatacggggacaga

SEQ ID NO: 135328 - DNA, 400 bp, Glycine max
  Clone ID: PAT_MRT3847_93210C.1
cccgcgtccgaaattaagcacagagacaattaatcaagcactaagcatgcatggattaatagcgacaaatacaacgtaattggtgaagaggaaaaactgatcagaactcaatagtaataacaaaacctcaaagagagttgtgcttgatcctcaagaaaaaacaacgctagagacttagccttccattaatcagtagaaaacgaaattgtagattgaagcagaaatgaaatcgcagaaaatgaattttactctacgtgaacagtgcgcatgaacagtaaaaactgaaattctaaaatcctagaattattctcctctccaaaaactccataaactaaaaccttggtgctgttatataggtcctcagccccaaagcttacaaatctattttaagttcaagccc

SEQ ID NO: 135329 - DNA, 182 bp, Glycine max
  Clone ID: PAT_MRT3847_93211C.1
aaagagacatcatggcttctctagcaacctgtgctgctgctcaaccagctacgatcaatgagcttgcttaaagttccctctctggaactaagctctctttcaagccctctcgccacagtgtcaaatccaagaacttcacgagtattgccgtggtagcaaagtatattcacaagagtgtgtac

SEQ ID NO: 135330 - DNA, 225 bp, Glycine max
  Clone ID: PAT_MRT3847_93212C.1
acgctatgctctaaactaaccaatcttatttacgcgtgcgtgcgccgtattaccggtttgatagttatatcaaaatgcaaaacagtgaacagcagactacaacattaatgctgaaactaccgtgccagctcccaactttgttgcctcatgcaccatattggtttctgcaggtcctgtactatctaagaggcttgccactatcgacattgcgaacagttactcatt

SEQ ID NO: 135331 - DNA, 241 bp, Glycine max
  Clone ID: PAT_MRT3847_93213C.1
aagctaccagtaccaggagctccctatctacagtgtctctctctctctgcaaaagcaacgctgctgtgttctgatccttcaaattaggatcactctcgtgcgcctgacgccgcttgtaatttcccctccaacgcgcaatacagcttttgactgctagtaaaatcaccatttattgctggttgtatgtcattttgggagacttaaatggatgcttagccgtggattaggtcaatttgatctc

SEQ ID NO: 135332 - DNA, 1270 bp, Glycine max
  unsure (1)..(1270): unsure at all n locations
  Clone ID: PAT_MRT3847_93214C.1
cccacgcgtccgacggctgcgagaagacgacagaagggggttgccttctgttgtgttgtgtgtgcataaacaaaacaaaaacaaagagcgtttcaattgctatctcccacaaacatctatagttaagatctgcgttaaccactaagatctctgaagcagagggcattgtctactgtcacaggcatgggtgaagaaaagaaagacgaaggaaacaaagaagaagccaaggaggaaaagaaggaagaagagaagaaggaggagccaccaccggagatagtgctcaaagttgatatgcattgtgaggcctgtgcaaggaaagttgcaaaagcattgaaaggattccaaggagtggaagaggtgagtgcggatagcaggacaagcaaagtggtagtgaaaggaaaggcagctgaccccataaaggtgtgtgagaggctacaaaagaaaagtggtaagaaagtggagctgatttcacccttgccaaaacctccagaggagaaagaagaaccacccaaagaagaaccaccaaaagaggagaaaaaatatgagcctcctcctgtggtaacagttgtcctaaaagttcgaatgcattgtgaagcatgtgctcaagttatacagaagcgaatccgcaagattaaaggagtagaatcagtggaaacagacttggcaaatgatcaagttatagtaaaaggtgtggtcgaccctgccaagcttgttgatcatgtatataagaggaccaaaaagcaagccattgaaggacggagaaaagaaggaagaaagaaagaagagaaaaaggaagagaaagaagaagagaaaagaggagaagaaggggaagagaaggatagaaaaactgaaatcaagcgaagtgaatactggccatcaaaaaacaccaagtgatacatcgactacccttatgaccctcagattttcagcgacgagaacccaaatgcctgcactgttatgtaaaccagcctctgttagtaattccgtatttcagagtaattagctgaagtagttttcttttcaatgtttttaataatatgtaccagtgtgagtatgttaagggtacattggttcctttacatagcgtccctcaaagttagatgtcttatttcttgtgctttgtgaggtttcaagtagtatattcgttgccatatcagtttgtgtaagtgttaacatgcttcagtgaattttggcctaaaatctctttgcccctgaatgttgacattaaattgcatgctctcgccgtcatgtcatgatanaacttgctgcg

SEQ ID NO: 135333 - DNA, 459 bp, Glycine max
  Clone ID: PAT_MRT3847_93215C.1
aaagtaaaaaatagctatttttaaagggaatcggcaaaggctcgacaaacaaaggcaaccttgcggaatttttcacaaaaaaatgaaattgcaacaaaaaaaggggaaaaacaaaaaacaaaccaaaaaaggagaaaaaaaagaaagaaaataaaaaggcaacgaacatccccagatcattaaaatcaaaatccggttggggggcggcgggggaaagccccaaaaagccaaaagcagggcgggtccaaaaccagcccggctccaccccccttgggcaaaaacggaaaaaccaaacacggccctgataccatgcggaagtggccctatcgaaagcataaacaacacccccagtaacagccccatcaaaacaaaaaccaatggggtaaaaacccggggctggggctctacccttaacaggagcaaggaaaaaaacggcaccggaaaggcccccagtttttc

SEQ ID NO: 135334 - DNA, 443 bp, Glycine max
  unsure (1)..(443): unsure at all n locations
  Clone ID: PAT_MRT3847_93216C.1
cgaaaaatgaggcataccaacatccaatagaatatctaaccaagtttgttctaacaacttatgctaagccccttgcaatttttggaaatgaagaaattctcaaccatgtacatataggctcaataagaaatgatggctttttggttatgtagtctggaatttccaacttcacattaacgtttgataaaagtttcaagtcttatttttctgaatctgaaaaatgagttatagattctgccttccatttgcaacatgtggatggaagtgtatttttttgggttgaaaagatagaattgtacttctaatgtaattcagtagtccatggtttgaatctatcattatcttaagactatggttagattggtggaagaggatgaaatgaaggagaatgttaacatatgagaaaaaaaaacacctgtaatncatgacccaatttaaaactt

SEQ ID NO: 135335 - DNA, 176 bp, Glycine max
  unsure (1)..(176): unsure at all n locations
  Clone ID: PAT_MRT3847_93217C.1
gtttatcctttattaaaatacttttaagggtataatttgttgacatatttgtaatanatagatatagtgaccatagatatttcccaatagagaagcgttatctatnatcnatcactanaatatnaacgntatagtgatatacccatttggnttatacagttttttttaggactntc

SEQ ID NO: 135336 - DNA, 275 bp, Glycine max
  Clone ID: PAT_MRT3847_93218C.1
cttaaaaaatagcacttgattaattcaactgtctcaaacaaaatattatcataagatttcagcactgcactcatctctatgccaaagtttatacatcgggatattctttttctgctcccgttaaacaaagtggaatacaaaaaagggcaaaattaaggggacttgcaacctctctagtgtgcctaaaatgccaaacattttatcaccagactagaatccacacttctcttcctgccccttttctcgccttttcacagccgacgaacaccaggcct

SEQ ID NO: 135337 - DNA, 1335 bp, Glycine max
  Clone ID: PAT_MRT3847_93219C.1
atggagagtaagccacatgtcttaatgcaaagatatgagttaggaagattacttggccagggaacctttggaaaggtttactatgctaggagtacaataactaaccagagtgtggctattaaagtgattgacaaagataaggttatgagaactgggcaagctgaacaaatcaagcgcgaaatatctgttatgagactggccaggcaccccaatattatacagctttttgaggttttggccaacaagagtaaaatttactttgttatagaatatgctaaaggtggcgagctcttcaacaaggtggccaaaggaaagctcaaggaagatgttgcacacaagtattttaagcagctaatcagtgctgtagattattgtcacagtagaggcgtgtaccaccgagacataaagcctgagaacattctattggatgaaaatgggaatctaaaggtttctgacttcggtttaagtgctctcgttgattccaagaggcaggatggcttactccatacaccttgtggcacacctgcttatgttgctcccgaagtcatcaaaaggaagggatatgatggttatctcccttttcacgacccgaatttgatagagatgtataggaagataagcaaagcagaattaaaatgtcctaattggttcccaccagaagtatgtgagctattgggcatgatgttgaatccaaatcctgaaactaggattccaatatctactattagagaaaatagttggtttaagaaaggacaaaatattaaaaacaaaagacctgtagtggaaaacaacactgtctcttcttcaagtactgttcttcttgatcaaaatgattgtgatggtctagcagcagaagcaaatggggagtcagttgtgcccttaagtataaacgcctttgatattatctcccgttctgttggttttgatctttctagattctttgatgaaagttttaagaaaaaggaagcaagatttagttcaaggttacctgcaaatgtcatcatctccaagctggaagacattgctaaccaactgaggatgaaaataaagaaaaaagctgcgggtttgttgaaattagagagcctcaatgaaggtaggaagggagttttatccattgatgcagagatctttgaggttacaccttgtttccatatggtggaggtgaaaaaatcaaatggagatacattggaatatcaaaagatattgaaagaggatattaggcctgctcttcaggatattgtttgggtctggcaaagtgaccaacaactgcaatcacaacagtcagagcaacagcaacagacagatgaccagcagcaacaacaaccacagtcataa

SEQ ID NO: 135338 - DNA, 355 bp, Glycine max
  Clone ID: PAT_MRT3847_9321C.1
atcagccccaagagagggttttgttttagggaaatttttcctttgatactaaatctcgctctaggttggaaaaagtttcctttacaaaagcacaatttgttagtggaaaaaccttcaaatatgatataattggtgctggttcacattcttcagaagattttcctgaaaaggaagatcaagaaaaacccaaaaagattgatgccagattgagacaaagaattagattctcaatccaatgaggttcatgcttaaatggaaacaaatttgtcttaattgtctcttgatgaatgttgaaactactaaaggattcatgttggaattttaacatttttcaattttaaattgcactttccat

SEQ ID NO: 135339 - DNA, 184 bp, Glycine max
  Clone ID: PAT_MRT3847_93220C.1
atttctgcgccaaggtgccctacgcttcctctttaaacaccctcttcctcattcaccgcatgccaataacccaaacactctacaacccctttatcaaatacacaaaattcccctctccaaggatcctgaaccgcccactgagttcccagagcgccctggatatcctgaccgtgatcatccgacc

SEQ ID NO: 135340 - DNA, 2171 bp, Glycine max
  Clone ID: PAT_MRT3847_93221C.1
ggcttctgctgcttggtttgtgcagcatcttcaatgtgtacctgcatgtgtctcttcaatcctgatctctctaacaaactattattttctgaaaatcaagtatgcggctgaagttcatcgatttatggtttccatcacatactctcaattgtggttgacagagacaccactgggaatgccaaaaaaatgtgccttcttggttgcagctttgtggttgagattcataaggtgatacctttgctattgattccccacttaatgcttgacaagagtggaccacaagtttgtagttcattcattagctattccttgatgcaaaataggcacacaagtttttgtagagtgcctgttctgcttatacacgatccatgtgaagacgattgaaatgccttttttatgctattatgtatataggtatagttatatacatttcataatagtaaatgatatagaaattaagtgagctgaggaagttgtggaaaatttcatactactttaaggtctcatatggagagtaagccacatgtcttaatgcaaagatatgagttaggaagattacttggccagggaacctttggaaaggtttactatgctaggagtacaataactaaccagagtgtggctattaaagtgattgacaaagataaggttatgaaaactgggcaagctgaacaaatcaagcgtgaaatatctgttatgagactggccaggcaccccaatattatacagcttttcgaggttttggctaacaagaataagatttactttgttatagaatgtgctaaaggtggagagctcttcaacaaggtggctaaaggaaaactcaaggaagatgttgcacacaagtattttaagcagctaatcaatgctgtagactattgtcacagtagaggtgtgtaccaccgagacattaagcccgagaacattctattggatgaaaatgggaatctaaaggtttctgacttcggtttaagcgctctcgttgattccaagaggcaggatggcttactccatacaccatgtggcacacctgcttatgttgctcctgaagtcatcaaaaggaagggatatgatggtaccaaagctgatatatggtcttgtggaattgttctgtttgtcttgttggcaggttatctcccttttcacgacccaaatttgatagagatgtataggaagataagcaaagcagaattgaaatgtcctaattggttcccaccagaagtatgtgagctattgggcatgatgttgaatccaaatcctgaaactaggattccaatatctactattagagaaaatagttggtttaagaaaggacaaaatattaaaaacaaaagacctgtagtggaaaacaacactgtctcttcttcaagtactgttcttcttgatcaaaatgattgtgatggtctagcagcagaagcaaatggggagtcagttgtgcccttaagtataaacgcctttgatattatctcccgttctgttggttttgatctttctagattctttgatgaaagttttaagaaaaaggaagcaagatttagttcaaggttacctgcaaatgtcatcatctccaagctggaagacattgctaaccaactgaggatgaaaataaagaaaaaagctgcgggtttgttgaaattagagagcctcaatgaaggtaggaagggagttttatccattgatgcagagatctttgaggttacaccttgtttccatatggtggaggtgaaaaaatcaaatggagatacattggaatatcaaaagatattgaaagaggatattaggcctgctcttcaggatattgtttgggtctggcaaagtgaccaacaactgcaatcacaacagtcagagcaacagcaacagacagatgaccagcagcaacaacaaccacagtcataacctgttctcaattttgagatgtcatgcttactgcatttcatggcaatcccagttctttctttcttttttttcttctaatatcttctcatcacactatgacctcattgtaacattttttctctcctcatttttagctgtttcaccttgttgtagcatatcttgtctcagaattttgtttgccaagttgaagtacatcatttctcaaattttctgtatagcaccagtcttaggaactttattacagttttgattcaatcaaagtagaatttaaataa

SEQ ID NO: 135341 - DNA, 373 bp, Glycine max
  Clone ID: PAT_MRT3847_93222C.1
tacacacgttcgtacaaaggatgatatagcagatatgatagcagctgagatcagcgctaagacctggactgtacattagcctctgtattaacgtctctactcaagcctgaactggctcatgacatgactgaacggacgaatggacaaacttttggacaacctgctacatgcaacgcgagatgcaaatcaagcatcacaataagagttaccatcaaagctgattactatgctgataagctcattacgaccgctaaaacagtgactgtaccagtgaccattaatgaggccatggatgactgcaatgctacctgggctaaaagtgtgccttaaatcactctagataacactcaagcttaccgtaaggcataccgta

SEQ ID NO: 135342 - DNA, 235 bp, Glycine max
  unsure (1)..(235): unsure at all n locations
  Clone ID: PAT_MRT3847_93223C.1
cantcgctcatcnaaaattatgatcatttctgtggccgtaaattcgccggcaacacgagatgngcaanttcgcgncgccgttttctnttccccctttanaaaaattanangttcaggttaagttggggtnccatggcttcggagacgncngtcgtnaatctgggtnaggaaagccagagtcgcgggnaaanggntangggnncgcnanaagggttttnncnncnctnaaaaatcc

SEQ ID NO: 135343 - DNA, 325 bp, Glycine max
  Clone ID: PAT_MRT3847_93224C.1
ggtgggggccctatataataaagagatgcatatatatgactctggtgttattaaaagatttctgctatcacattacacaaacacagtcgtacatcacacatgagtctgggcctcttaaacttataagcagaggataacattggcccatgacgcgacacatgcaccacaaacattggcttgatttttgatggtgatgtggtacccacctggactaagcatgaaccgtttgatctgattcacttggacttgaagggaatggcccggacgcttgggtcacacctgagaattaacggacctggtaccatagctggctacccagactctt

SEQ ID NO: 135344 - DNA, 510 bp, Glycine max
  Clone ID: PAT_MRT3847_93225C.1
aaccaaacaaagggttaaagcccaaaaaaaaggcaggggacaaaaaaaaaaaaaaaaacggggggaacaattatttttttttttcgaacaaaaggaaaaaattggcaacggggaaaaaaaggccaaaaaaaaaaacaacaaaaaattctcaaaaaaagggacaaaaaacggggtggaaagaaaaaaaaaaaacccgaacacagtaaacaaaattctgggggggaaaaaaggaaaaaaacgggcaaaacagggacaaaggaaactggcattccaaacaaaaacttggggaaaagggggatgaaacataaacaagcaaaggcaattcagggcccagggggcattttctcgcattcttcccgaatggacgggaaaaaaaaagttgacaaaaatctttcaccaaagctggggaaaacaaccccaaaaagctttcctggattctaaggcccctttccaaccctaaaagcaactgcagctgcagcccctgaaaaaattcccaccagcaagcccccc

SEQ ID NO: 135345 - DNA, 289 bp, Glycine max
  Clone ID: PAT_MRT3847_93226C.1
ccttctttactgtgtcttggtggatccaacagtgatcactgctggaaaaatacctggatgccctaatagaccggtgcctatgagaatggcctgcattggctctaatatagccgcacgaggttatgaccgccaggatgggatcaacactgtagctgataacaggactgatcttgttgcttatggccgttgggtcttgcttaatccatatttgccaaaacgatttgctgttcttgccgctctcaacaagtatcacctggagacattctacactgctgattcggatctgggg

SEQ ID NO: 135346 - DNA, 206 bp, Glycine max
  Clone ID: PAT_MRT3847_93227C.1
tttttaggaaagcaagcaaaattgtcttttgccttatggatggtgtgaagaacatactatgatcactttcacggcaccaaggttctgcaatttataaaacacacatcttctcctgtatggatggtaggcaccctaacaaaattctttggtctacggacaaacaaaggcccctcttcatactcaggctggaagatacagttacgcat

SEQ ID NO: 135347 - DNA, 473 bp, Glycine max
  Clone ID: PAT_MRT3847_93228C.1
cttatataataaaattagagaccatgtaatagtcagctgcattatcaatgttacagtggattacagatcaggtctgatatctttagagaggacaccgacaacttggcatgcaattcctatgccggatgtgaatattcacactacagaatatctatatttatgtggaactattctgcatcaagaatcttgtgaaatgctgcatgatcttggataataactgtgaaaacaattctgaattgacatgatcaactgtattgagatgctcaacgatatatatattataccatggcaatacatttgatcaaagcagggataatacgggacattactggacgaattatacaatgttgaatctttaaatgactgcttgtatgacgctcacagaactctggatgacattgatgagaatcaactatggtacacttaattcatcagttactgctcgttggaacacgacatcgtatgcgctaaca

SEQ ID NO: 135348 - DNA, 117 bp, Glycine max
  Clone ID: PAT_MRT3847_93229C.1
gtccaagtcctgtcactgtaagtgtggtggagaacagagtgtaatgtaaccgaatcgcttaggcgctcagggtcgtgaaggaatatgcaagtaatagtttggattcaggttgagaca

SEQ ID NO: 135349 - DNA, 427 bp, Glycine max
  Clone ID: PAT_MRT3847_9322C.1
caagtgattccagaactgcaatggtgagataaaaatagcaagcctcaagctactgcaatgcatgtgggagctatagaaattatcattgatagctttgcaagtcctgactgcaacatagttggcgcaaagcctttggttgatacttatcataccaattctgaaaatgcaggtcgaagtatttttgttgtgcctttcataggcggaaggcccattcgggtggttacatttccgaataccatagggcaaattgaaccagacatgaatccaagggttcagcttttgagtaccactaccaatggtgattttgtttaaggaaaagatctccgcaatggttaaagtttaaggaagcatgtgcttgtgttggcttgacattcatgttccaactcaactcgctctgttggaatactggctagcaaaaaaacagaag

SEQ ID NO: 135350 - DNA, 406 bp, Glycine max
  Clone ID: PAT_MRT3847_93230C.1
ctgtcgtcctttttttgaaagtgagaacacattttcttatatgaaaaccgagagcatgctgatacaatggtgcataagtgcacgttataagctctcattgacgtgcctaatgtatatgtaccatatgagaggagatatgactgggaaaggacaaactctttttaataacatagaaagactggtgggaattttacatgcaagacaccgtctgttgcttgaacgagggactaaaaggaatggcttctgaactggtcgaggccgggtacgcacactggtagaacagttccctagactgctctgaccattaatcccagcctgaatgtatgcacacggatccaagggaattagcgcctaatatgaagcctcccctgtaggggggaaaacctctgcacgtgatagcagaaat

SEQ ID NO: 135351 - DNA, 207 bp, Glycine max
  unsure (1)..(207): unsure at all n locations
  Clone ID: PAT_MRT3847_93231C.1
aaggaaaaaacttnnnnnngggttttaattgatttgatgagatacaaaaatacaaaagcatttcacaaactatgcaacaacattgatggaaagaggttcctagaccgacaaaagaaattaacaataatcatggggaaaaataaaagggggagcattctttgaatgttaaaatgtgccaaggcaaaagctattgagctaactaatatt

SEQ ID NO: 135352 - DNA, 173 bp, Glycine max
  Clone ID: PAT_MRT3847_93232C.1
ggctcgagatatcattgcttgagattatcactaatgaacatctagtgtaggattaagagagaatcactaaattagaagtgagatctacaagattactaatcagcgactttccatcaattaaatttctaaatcagaatatgcatcgtgtcttaaaaataacgtgtaactaatat

SEQ ID NO: 135353 - DNA, 530 bp, Glycine max
  Clone ID: PAT_MRT3847_93233C.1
ggggcttcctccaccctttttaatgtaaccctcttgcatttggtccacctttcgcatcacggcctctgttggttcttagctgttttcctcacatgaccaaacccatcttaggcaagtttctatcatcttctcaataggtgatactccaacatattcccaaatacttccattcataatcttatattcttatcttaatattcaacttatccacctcaacattctcatctcccactactccagcatccaccaaaaaaaatcattcctagtcatagaaaactaacataccctggtgtcagaaggctcctcgcttcgcgaaagtatgggggaggatcattgtacgcagtctttcccttgcatttgcaaagagattatttccagattcaagcccatgaccaaccagtcaccaaagcacaactttaccattgtttcagggctcaccctcattgctagtcatagaaatagcagaaaaatatgtaagtagctttcagcaccaacaatgccccattcatcatcatttattacatagcaat

SEQ ID NO: 135354 - DNA, 253 bp, Glycine max
  Clone ID: PAT_MRT3847_93234C.1
tatttcagtactctgaaaaattacaacaacctggggtctcttgtactaaggggtatattctcgacacgaagaacactggacacacaggccgcaacataatcttacttaaagaaggctgactaccacacatgaaaaaaattaattctcaaggatccacaaaatccttacaatccaaatgcaggataatacataacagcagcgagagaaacactcataaggctgctatacaacattgccacgatcattggacacc

SEQ ID NO: 135355 - DNA, 242 bp, Glycine max
  Clone ID: PAT_MRT3847_93235C.1
atgatgaagagagagaagaaagcggtaaattttggctgctggcttatgcagctgaatgctgatgttggtggtgttcagttcagcgtattaaagggatcacggtctacccacttcagttcaacccttctgtccaactttccaacaacaacaacaactacaaagtactccaacttcgagctagaaaacagaagcttccaacctagatgccgggagcaacctaaggactaaggaggagttgaacg

SEQ ID NO: 135356 - DNA, 886 bp, Glycine max
  Clone ID: PAT_MRT3847_93236C.1
acatggctcgagggcagaaatcctttctatgttgcttaagaagttacctacttatagcaagagaatctagctctattggttgtgtaaggtaaaaaaaaaaaacgcataaccatgtcaaccaaattgattgaaacaagccttagccttatggtatggcttgtaattgcaacatcagcaatagcacaatctgataaccccccagttcttgacacagaaggccaccctcttgagcctggcagagattactacatcacaccagcggtaacagacattggaggccgtgccactatagtagacaacggcacatgccctttatttgtaggtcaagagaacacttttgtagaagagagctttgccgttttcttcaccccttttgcaaaggaagatgatgttgtgaaggtgaatagggactttcaggtggcattctcagctgcaacgttatgcttgcagggcacagggtggactttgggtgaaagggacactgagagtggaaggaggctcattgttgtaggaggtgttggtagttactttaggatttcggagacacaagttaaaggtgtttataatattggttggtgtcctattgatgtgtgccccttctgtaagtttgactgtggcattgttggtggcttgcgtgagaataagaagattttcttggccttggatggtaatgtgctcccagttgtgtttgagagagcataataaatgtgtatcttcaattaatttgtgtttgtgttgtgtgcttgaaatttcttttcctgtaatgttggctaataattggagctaccgtatgtcgatgtataagaccaaggaaagatatacatgtctcttttttattttattaatttatggaataaaggtacaaactaagttgttgtattcatgt

SEQ ID NO: 135357 - DNA, 190 bp, Glycine max
  Clone ID: PAT_MRT3847_93237C.1
gcgtaaactcaatagtctaccgagtttacttagagtttatagagtctacctagagtctactaaaagagtttacacacaaatcaacttgcagagggtaagtggattcgtaaacttgtaaaagttagcgagttaactcaagagtttgataaccatgggaatatgtttttcataggattcaagtattttgggg

SEQ ID NO: 135358 - DNA, 298 bp, Glycine max
  Clone ID: PAT_MRT3847_93238C.1
ggggggttttttttttaaggaaaaagatggatcccacagtctaaaaaagtgcttgatggccccttaggtctaattacaagtgattaaatatgaccttgtctcacctaataaaggattcaaaaagctgatcttcaccacatatggatactacttccccatataattggttaccgagcaaaatgggaaaattaaaactttatttaaaggggtaaattttccctctctgctatggggagaatcaactccaaatcttcattcaaggtgtcttttcgtgcattgggaaggaaaatggtttttg

SEQ ID NO: 135359 - DNA, 304 bp, Glycine max
  unsure (1)..(304): unsure at all n locations
  Clone ID: PAT_MRT3847_93239C.1
tttttggctaaactcaaaaatcgttgattatatgggnaactggtgcgtgaaacaatgtttgttatctacaaattactcgtacagattgtgaaaaacggctttaaaaggaatcgtcactttcatggttgcttaaataaaaaaccctgggcctataaaactactgatgggcgtgtggaaaaaaaaagtgcgtggggtcgacaggggctgtcaaaacagaatgggttttccacacatgcaaaatatttgaaacttgtttttttatccttaacacttttaactgggaccgttcgggggccgatgttat

SEQ ID NO: 135360 - DNA, 468 bp, Glycine max
  Clone ID: PAT_MRT3847_9323C.1
tatgaaaattatttctttttttgactcacaggataaaacttttaatcacttctaatcattattgtgtattatgatgatcatcactactaggaaaatcccattttacatcagtggaaaacgtatttcaaagacggtggacgcccgtctttgaaagagtgttgttgtagaggacggatttctacgacggtcgtaaaaggaccgtcttagaaacacgtgattttctacatcggtggtgttgtagacacgacttcttttatgacgtgttctacgacggtccttttatgatcgatgtagaaagttatgatttctacatcgctgcctgcatagaaacgactttgtttatcacatgttctacatcggtcattttacgacggatgtagaaagctttattttctagacatattcatacatcggtgcctatttatatataaattaaccaacataatgactttgtctcatcattcaatt

SEQ ID NO: 135361 - DNA, 1572 bp, Glycine max
  Clone ID: PAT_MRT3847_93240C.1
tgcgattggggggacctcagggttagccatctctttgtctcactggttttctctataggtggatttgaggacttcttctatattaaactgtgttttcttgtttctgagtgctgattttggaggagaaatgagtagctatttgggtgtaggtgttagtcctgggaatgtcccagtttaccacagcacaaatgtgaacgtgttagataggaggatcaagataacagagttggtgttgaggtgtgtgatccttggtttaggggttcttgcagctgttcttgtggggactgattcccaagtcaaggagtttttctcatttcagaaggaagctaaatttacagacatgaagtctttggtgttcctggtggttgcaaatgggttagctgctggctactccttaatccaagggttgcgctgtatccttagtatgatcagaggaagcgtactcttcagcaagcccctagcttgggccattttttctggtgatcaggtaatggcctatgtaacagtggtggcattggcggcggcagggcaatcgggtatgattgcaagggttggtcagccagaactgcaatggatgaagatatgcaacatgtatgggaaattctgcaaccaagtgggagtccggttgatcttaaaggggaaaatgagttacttgggtttgggtgtgtctccaagtactgttcccatgtaccatggaacaaaacttaaagtgttggataggagggtgaggataacagagctggtgttaaggtgtgtgagccttggtcttggagttgttgcaattgttcttgtggtgactgattcccaaggcaaagagtttttctcctttcagaagaaagctaaatttacagacatgaaggctttagtgttcttggtagttgcgaacggactaactgttggctactccttaattcaagggttgcgctgtgttgtgagtatggttaggggaaatgtacttttcagcaagcccttagcttggctcattttctctggtgatcagccatacacaaaaatccactcaaatacataccaagtgtataatttccttagcactgcaccatgtccaaaagccaagtatcaatactttttgggatcttcttggtagcagctaatgtagcaactgcccaaagctgaatctagactatgtggtactattcattttttctttctttctttctttcaaggagttcatcccaagttctcaaactttttaaatgaatgcatcaaattgatcaatgaatggaatggtgagtccatttttatttatccgcaaatgttaatcattagtttgttggtttttcgttagcgggggatttgaacctgtcacctatctcttaactctttatcagcaaaccaaccttatatctcttagaagggggagccatggaaaactaatcaggcaaatccaccaaaggagggagggagcgactttcccttgagacattggatcctgccctaagcattgtgctatatacataaatacctggggtcagaatctgaaaatgggggccgggttgggttatggttgtggttgaaaatccggggcttaataataagtcaaaattgtgggaa

SEQ ID NO: 135362 - DNA, 362 bp, Glycine max
  Clone ID: PAT_MRT3847_93241C.1
cgcatctaacccctcatttaagaccttgtccaaactaaataaacctgtagcgcaggatcttcctaagaggctcataaacaagcccaagaaatttcaaacttgccatgaaattccactttccatcattccattccaggctactaatcttggcttgtctcgagccgttcccactggacactaaccaatattaatattccctctggatcaaataaaaaaagggaaacagggtccttttttttttttttatttccttgggcacaagtttttttaaaacttttttttggaaacccttatttggggttatttttgtaataatgaccaaaacttcccaggcgcccttgttaaaacaaatttttttaacc

SEQ ID NO: 135363 - DNA, 488 bp, Glycine max
  Clone ID: PAT_MRT3847_93242C.1
agctcaaagtggaaaggagattaagctttaaaatgagtaataataattgtcatgatgatcaacatgttattaacaaatgagtaatccttataaatcaaggtaatagtaacatatttcaattttcaagggccacaacttgaactagtaatctaacatattactatgaccatggccacttagcatctctccatctaaaccaccggttctggggacttaattcagctaaacaacaacctggatcgcttcctctttgttgcagatgctgcctattatcatcactcaatccacaacactgcaactttttgtcccgcatcaaagcttcatccttatatgtgggaatgctatatctagggtgttggacaaaacgcacgtttttccaccagagttttatagcctgcagaaaacaacattgaggaagattaacatattgcacacagtacaatcataaatcaattgaaaacataaaacagttcctaaacggattgatg

SEQ ID NO: 135364 - DNA, 387 bp, Glycine max
  Clone ID: PAT_MRT3847_93243C.1
aactgcccatatatacacatgagattcgcaccttcctccaagttcttaggcttttcaaatctctttcactatcttatcgcaccctctttctctccgaccccaaagttctcatcttccatttccgctaccatgtccactttttccactcagaacgacaccgtcatccacaaaacgcagcaacctttgcagttaagagagtttggttctgttttgtaactggcaatggcatcttcagaccaaactaatgccaaaaaacatggattttgttttggttctgttctgtacctggcactgggttgttcactgtttgattcttgttgattgtcatttggttgtcagatcgcaaagcgcttagaaaaatttcagacacaatcttcactcaaatga

SEQ ID NO: 135365 - DNA, 765 bp, Glycine max
  Clone ID: PAT_MRT3847_93244C.1
gcggttatatcttcgttgaggaggttgaaaccgaggatcgtgacggtggtggaggaggaggctgatttggacattggattggaagggtttgagttcgtgaaagggtttgaagagtgtttgaggtggtttagggtttactttgaggccttggacgagagttttccgcggacgagcaacgagcgtttgatgcttgagagggcggcggggagggcggtggtggacctggtggcgtgttctccggcggattccgtagagaggcgggagaaggcggcgcggtgggcgaggaggatgcatggaggtggggggttcaatacggtggcgtttagcgaagaggtatgcgatgatgtgagggcgttgttgaggaggtatagggaagggtgggcaatgacacagtgctccgacgccggaatattcctgacgtggaaggagcagccggtggtgtgggccagtgcatggagggccttgacgtagagtagaggagaatgacttgacgtgagtaaggtgttgagggacggattcccacgtgctctctgttccggaaacacgtgcccaacgctgagggttctttttttcttttttcttttaaggtaattaattaatggctttttttacttcctgttttgagtttgctacgtaaggcagtgggattaattggaaggtatgagggtgataggaggaaggggattttcctgtattattcaaaaaaggaatcatcatcaagtaaattaattttcattattaactttttttcacatttcgtttttt

SEQ ID NO: 135366 - DNA, 478 bp, Glycine max
  Clone ID: PAT_MRT3847_93245C.1
aacgcaaactgatgaacttgctcaggtaactgatgaggttgcgaatgaaacggaatggaatttgcgtgaggagaagcctgcagttgcagaagatttagctggtgtaagcaaggactgccctactaatgaaacacgcgaattatagcctggtgataatgaaatgactctggatgaatgtgaaaaagtgttggaatagagaacgattgctttcccagcgctcaagactgatgagagagaggtgtacactatagagtttggatccatgcatgccttatcaagcaagacagataatcatgacgtattcatttgactgggatctgatgaagatatgctaaacgaggcttttgccaaggtagaattatacatcacgcgcgtgagcatcactgagcttatgatgcctgctgatggggaagcatactataactcaccgcgtggtaagcgtcgtggacgtggttcatgatgcggaggcagaggcggt

SEQ ID NO: 135367 - DNA, 524 bp, Glycine max
  Clone ID: PAT_MRT3847_93246C.1
tgaatatgcaaattttcaatcttatcttctagaaaatgatactgagatttttgtgtgtgtgttaatgtaattttaagaacaaacgaggtggaaaagtgaagttgcaatccatagtgatgcctctttctgagtttgaccatgaggaaaagggagatgccctgtatgcaatggaacttgctctgtcgttggagaagctaaccaatgaaaaattacttaacttgcacagtgttgcctcaaagaacaatgatgtgcaattggcagattttattgaaagcgagtttttgggtgaacaggtggaagccataaaaaaaatctctgagtacgttgctcagctcagaagagttggtaaaggacatggtgtgtggcactttgatcagatgctgctgcatgaggagggcgttgctgcttgattatctttttttttagtatttgaattgatatttttaatgcacttccatcaaattaaatcaattgatatgaagcaaatacaatatacaaactcaaaataaagttttgtttttttt

SEQ ID NO: 135368 - DNA, 422 bp, Glycine max
  Clone ID: PAT_MRT3847_93247C.1
ctttatcttggttttacacacacacccacttccgggcacacatgatctttaggactaataagagcaggctacacttcgtttggtatttaaaaagagcccccagcgagaacatccacttgaactcttgtttcttgcaaacacaccttttgtgagaatgacacagaccttttcggtgcccgcaatatacacgcctatacatgacctgtgttcgcacttcagctaccgaccccccattagtacttgttgagacgtgctgcttggaagaaaggcgtgctaatggttaacactgcgatgtccgcgaatgcagcaattaaaacagagcgtatgggcctccaagcgtcatgacgtttactcaaagatagacctagcccaaggtctttgtccccttttggtttcggaacacggaacccacattcctggga

SEQ ID NO: 135369 - DNA, 315 bp, Glycine max
  Clone ID: PAT_MRT3847_93248C.1
gcaactgcacacgatgtccgcaagtgaaacctttgatgtcgaaggttgtccaaccgcgtacttcacgacaccacagtggaaagttatcacaatactaaggggggaggaccaccgaagacatcatagagtacatcgaaaagaaccgggactaacctgctcagcgagaacgaggacacgatatacctgctcatcatgagcactgagacgataagcatgacaaaggggaagatagagctttgaaagggagctgtttctctacctgggatatatgccccaaagtacatgtgggctgcacacccttttgtatctcggtat

SEQ ID NO: 135370 - DNA, 1493 bp, Glycine max
  Clone ID: PAT_MRT3847_93249C.1
ggagcgtgccgaaagaatcccgtagcagtataaaccaattggagttggagagaaaagaagaagaatcttcaaagctgaaatgaataggattcacagcagatatagcaaagctcacactaacatcaatttatgataacaacctcaaaatcaagttatcagtgtgtcaccctgacttttcaaaaacaattatttgttgcttcatatttcactgtgatttcataatagattttcactcatcttacttgactccaagcattctatatatctagtgcctccacgcatctctaccctcaaatcttcaccacacaacactacctcaattactcaactaaagcttcattcattcatcgtgtcgtgttgtgttctttgcaaccatgcttcttagaacagcgtcctctttctctctcttcaacgccaacggcgaccatatactactcccttcctctgttcgctactctcagggcaaacacttggttccatgcgctaccaagaactccaataaccggcccttaaccggcgtcgtatttgaaccctttgaagaggtcaagaaggagctcgaccttgttcccactgtcccacaagcttcccttgctcgccagaagtacaccgatgagtctgaggctactatcaacgaacagatcaatgtggagtacaatgtttcgtacgtttatcatgcgatgtttgcctacttcgatagggacaatgttgcgctcaagggtcttgccaagtttttcaaggagtcaagcgaggaggaaagggagcatgctgagaaattgatggaatatcagaacaagcgaggtggaaaggtgaagttacaatctatagtgatgcctcttactgagtttgaccatgaggaaaagggagatgcgctatatgcaatggaacttgccctgtcgttggagaagctgacaaatgaaaagctgcttaacttgcacagtgttgcctcaaagaacaatgatgtgcaattggcagattttattgaaagcgagtttttgggtgaacaggtggaagccataaaaaaaatctctgaatacgttgctcaactcagaagagttggcaaaggacatggtgtgtggcactttgatcagatgctactccatgaggaaggagttgctgcttgattaacattttttttctacctctcgttcgtgcatctagttagttattcggattagtattttcaggtcttttaatgctagagatgaacaaagtggatatggagtaatattggtcatttgtatgtcgtgttttttttagtaatattggagtaatatggaatttgcgtattggactaatatggaattgacgtattgttggagtaatatggaattgaaactcaaattacaattaaaaatatggagtaatattggtcatttgtatgtcgtgttttttttagtaatattggagtaatatggaatttgcgtattggactaatatggaattgacgtattgttggagtcaaaaaaaaaaaaaaaaaaaaaaaaaaaaaaaaa

SEQ ID NO: 135371 - DNA, 398 bp, Glycine max
  Clone ID: PAT_MRT3847_9324C.1
aaaaaaaacccacccttgacacattattaccacaattaaaagagggggggaaattttcaaataggcggagcatactcaacaagaggggcatgcctaatttcctttattggattatccaaacgaacaagcgaaagaaaacacaaattccaaatcatgcagaggattccccattttcaaaaaatctggcagcagcctgtggaacaaaaaaagctggcctaagagttttacccgcaatttcaaaattttgagaaattcccaagagaatatcaaaaactggagactgtttgggattggcaataaggaaacccaaatgccatgaagtttgttttgcccactcagaactccacattttaaaaccatttttgggaccacacacctttattggaaagaacaattcc

SEQ ID NO: 135372 - DNA, 1682 bp, Glycine max
  Clone ID: PAT_MRT3847_93250C.1
ctaaaagataaaagataaggactttactttccaaagttgatgtgctcaaactcaaacttatatatctacttgccactgtaaccccaccagaggcacaggtgcaagttgagattttgattggtgtttggctcccaaattccaaaatggggttctgcattccttgttgtcgtctggcatgtcttcatccaaagagtgaaagtgacttgacgataaacaagcattttcatcaattgaagtgatgattgagagtgggtatggcactcagactcagaggaaaatgggttttgattccattcttttggttttgcctgattccgttttgcttctcacaacagaagctgcgcttgcgctttggaaaaaatggagagttcaagatcttgcaaattgctgacttgcactttgccaatgggaagactacccactgcttggatgtgcttccttctcagtatgcttcttgctctgacctcaacaccaccgccttcatccaaaggatcatcctttctgagaaacctaaccttattgtcttcactggagataatatatttggatatgatgcttcggatccagctaaatcaatggatgcagcatttgcacctgcaattgcttcaaacattccttgggtagctgttttgggcaaccatgatcaggaaggatccctctcaagggaaggagtgataaaatatatcgctgggatgaaaaatactttatctatagtcaatcctccggaagtacacataattgatggttttgggaactataacttagaggttggaggagttgaaggcactgattttgaaaataaatcagtgctcaatctgtactttcttgacagtggagattactccaaggttcctttcattcctggctatggctggatcaaaccctctcagcaactttggttccaacgaacatctgcaaagcttaggaaagcatacataagtaaaccagtgcctcagaaagatgctgctcctggtcttgcatatttccacatccctctaccagaatatgctagtttggactcatcaaaacatgacaggtgtgaaacaggaaccggctggcaattctacttctgtgaattctggcttcttcacaacattgcatgacgtaggttgcagcaggagatgtgaaggcagttttcactggccatgatcacctcaatgacttctgtcggcaatctaatgaatatacaactttgttatgctgggggattcggataccatgcatatggaaaggcagggtggtctaggagagcaagagtggtggtagctagcttggagaaaacggagaaaggaagctggggagatgtcaagtcaattaaaacatggaaacgccttgatgatcaacatcttactggaattgatggtgaggtcctgtggagcaagagcactggtggtaaccaaggataaaaacacatgaagttgcttgcgaatttaaaaataatgcagaaagatattggcatccacaattccacatggcggctatatatcttggaacttgtaatggttgctattcaataaattttattcatggaaatttgaaactcgttgatatatacatcctgtgattctatagatgatgtatcttaagaatttgcatgatgcggaaaatatgttagtagcatgaaaggatattttggaatgaccaattatgtttttgccacggattttttaatttttaattta

SEQ ID NO: 135373 - DNA, 163 bp, Glycine max
  Clone ID: PAT_MRT3847_93251C.1
aaccggtggacgaaagggagagatgaggattgtcgatcctgagagcgggcatgcttaacccagaaaataagccggcgcgaggcggataggaggggacccgactgtgaaagggtatcaaaatgatggagagggtaccgagagaaccatagacaaagcaggctgg

SEQ ID NO: 135374 - DNA, 203 bp, Glycine max
  Clone ID: PAT_MRT3847_93252C.1
agctcacttatttcgtcaaccttatgcacgagggtcacaaaatgccatggggtcatacattcataacctaaatacattgcccaactagagagacggccaactgaatggaaaatttgctcgtgtccaaactggcccaaagaccagggaccatggcgcctcaataacttagaaccgtacccctggtgaaagagctttattccctt

SEQ ID NO: 135375 - DNA, 268 bp, Glycine max
  unsure (1)..(268): unsure at all n locations
  Clone ID: PAT_MRT3847_93253C.1
gncagagtgagcacgataagcaaggcttccatcgncatttatatatattaaaacttcaaataaagnanaacaaacagaanaaacagctgcaacttttttacagggtttttttcccgggaaaataataacagcctctgngcagttcgttcgttctttctcagatctcaccaccggaaccgccatggangactcgtccggccacctgaatattcctccggttnnngnggcgcgactctccggcacgtgaccgcatnatcaactccaacct

SEQ ID NO: 135376 - DNA, 1534 bp, Glycine max
  unsure (1)..(1534): unsure at all n locations
  Clone ID: PAT_MRT3847_93254C.1
ggctcgaggttacaacactccttaacttatcaatcaatgataacaacaaagctgttattgcaaattctggcgcaattgaacctttgattcatgtccttcagacagggagtccagaagccaaggagaattcagctgtcactcttttcagcctatcagttactgaggaaaacaagatcaggataggcaggtctggtgcaattcgaccactggtcgatttattagggaacggaacgcctagagggaagaaagatgctgccactgctttgtttaacttgtcattatttcatgaaaacaaggatctaattgtgcaagccggtgctgtgaaaaaccttgtagagttaatggacccggcagccggaatggttgataaagcaggggctgttctagcaaatcttgctacgataccagaagggaaaacagctattggtcagcaaggtggcattcctgttttggatgaagatatcgagatgggttctgtgagaggaaaggagaatgctgcagcggctcttctacatctatgctcagacaatcacagatacttaaacatggtgctccaagaaggagctgtaccccctttagtagcattgtcacaatcaggcaccccaagggccaaagaaaaggccttggctctccttaatcaatttagaaagccaaagacatgggagcgctgggagagcttgatcttgattttccaaccttgtgagccttccaaaggttttgaatcaacttacaaaatatgtaagatttatacattgcattgtgcacataatatgcgtaaagtttttattttttttatttttttattgtttacacatgcttgtaaagggggagaatatgtatggaggaggagaattgattgtgtcctcatgtgacacacctctctgtgatgtgaagaaaaattatgcatgcaagtgtaacttttgtttctgagctaaggcaaaatgttagtggacaataactagtatttggtgatgtattaactggccctctcaatacgatagggatctggatattgtcttcatccttagatgcttggtgctcccagaaggagctgtgccccctttagtagcattgtcacaatcaggcaccccaagggccaaagaaaaggccttggctctccttaatcaatttagaagccaaagacatggtagtgctggaagagcttgatctcgattttccaaccttgtgaggcatccaatggttttgaatctacttacaaaaatatgtaagatttatacattgcattgtgcacataatatgggtaaagttgtttttttattgtttacacgtgcttgtaaagggggagaatatgtatggaggaagaggattgatcgtgtcttcacgtgacacacctgtctgtgatgtgaagaaaaattatgcatgcaagtgtaacttttgtttctgagcccaggcaaaatgttagtgggcaaatagttgtatttggtgatgtattaactgtccctttcaataagacagggatctggatattgtcttcngccttagatgatagtataanacaagcatttgaagaaga

SEQ ID NO: 135377 - DNA, 496 bp, Glycine max
  unsure (1)..(496): unsure at all n locations
  Clone ID: PAT_MRT3847_93255C.1
agaaggggacaaaattgacactagaatatagcatgcaagctattcatccaaatgcagcagtggtttaaagtttgaactacaaatgtaatatgctagtttttataaaacaagaatgggattttttagatcaaatcaagtgttgaagacattagattatggtagagttgtaaaagtccaggaaagttgatcctccaatttatcccgcttatctcttggaccacagtatttgccaggagttggagtcctgccacgactcctctttgcctgcaaataagatattgacaggtagggcatttagaacttactgataaaagatttaatcacagaaacaggaactacacagttgcaaggacaatttactatttctaaggcttaatgggtaaccagtaagccattattgtaatgtcatttcccagcaaaaagtttagatttagacaccactattttaattaaaacaaataagnttacttttgatctttatgtgttttattaaact

SEQ ID NO: 135378 - DNA, 241 bp, Glycine max
  unsure (1)..(241): unsure at all n locations
  Clone ID: PAT_MRT3847_93256C.1
cgtcactcctttggataatagcacatgaatcccaatgaccaattgtgtcatcttttgagcttcataatgtaccagttcaacattttttttagtttctgacaagtttgtggtcgcccaaaggaaaagtatggccaatgtacacttttaactgacgcataaattttatttttggctgtaatgatattcttatanaaaaaagangnnnngaaaaaanaaaaaaanggggggnccccgnctntnt

SEQ ID NO: 135379 - DNA, 496 bp, Glycine max
  Clone ID: PAT_MRT3847_93257C.1
cagactccaacttgaactatcgtgatttcttggctctctctgttcaagataaacatgggtatggtatcactagcttcgctattaccattggctatactggggctcatattaagcacaccttgctcaggtgcttttgggaacagtggaactaatgtagaaaacacttatcactcgtgaccccaagtttgaactatggaccatggtcggtggtcaatcaatatgagtctgacgctgatattccgagaggtcatatcgcatttaagagagccaaatggtgaagtatgcagatgaatgcgcggaacctctgcgtgtcttcatgatacttatctacgccactgggttgttgtccgatgctatcgacctagatatgagacgacacacacaagctatgatggacataggacactggacaacttctggccatatatcagcgaggaacagcaggttatgccagtgagatacatctggacaatgctatggccttggatctgaaaca

SEQ ID NO: 135380 - DNA, 584 bp, Glycine max
  Clone ID: PAT_MRT3847_93258C.1
caataagatcaaaatttacttgtattttttgttctagattttcaaaagggcacctcagtttgcaaccatgacagatggcatataaagggcctcacagtccatattcatttctgtatgaattacctatggttgcactggtcggatgagaatgcaatgagccatgattgctttctgaggtcttcgagtttgggctctcttcacgaattttattcaaacaggttggcaacaaagagtgccaccactgtggccaccagtgttcctccaccaatcatacatgccatgcctccaggacctatacgtttcttcttgtgctcacttactctgagaggagcctcatttactccgggaagagcctcacttaatctagggggagcctcatttactctgggagtagccacacttaccctgggaggggaataattctttatggcatttgcttgatttgtgggtgggctactagtgttatgctcaactgatacagtatccagaggaaaactccagggaggagtgttgtccgccacacagaatttattctctccaatcctaattgaaggtatagtgtgattattcaatgttatacgttc

SEQ ID NO: 135381 - DNA, 600 bp, Glycine max
  Clone ID: PAT_MRT3847_93259C.1
taaccatataatgaacatctgcctcaaccctttcatcccggctcgagcggctcgaggtgaattctagaaaagttcattgagaaatagaaactatcttcacaaaatgaagaaagtgtttgtagcattcttaacactgcaagttgtattagtccttacaattatagctgcagagccagcagggaagggctacaattgtgaaaaggcaaaaagctcagtgacaccatgcataaaatacctcactagtaaagttgataccccttcagctgcatgttgcaatggtgtcaaggaagtgaaatcatcagcaccaaccaaagatgaaaaaattgctgcatgtcagtgccttaaagaagtaacaactcacattcctaacttaaaggaagacagagccactgcacttcctaaacaatgtggtgttgatgtgggttttctcatcaccaagaagaactgtagcagcattgcttgagcaaatggcagaggaggaaatagtacattaaaaaggagggatgcttgtaagtagttttcgtgtaaaaaataaaagagtttgttgaatttatgtggaacaagcatttaatgattaatgactatttccatttgttctta

SEQ ID NO: 135382 - DNA, 910 bp, Glycine max
  Clone ID: PAT_MRT3847_9325C.1
atcgtacaattcgctacactacttacattccccagcacagttgtatttatcaatcaaacaatagcgctcacaaagaaatgaacaagataaaaagagaaggcactattgtaaaataaaatacattgagatgggaaaaaaattactgatcatgaatatcacacaaccttgacagtaaaatttctgtaaacatacatctaatagtgcaagttatgaataaaatttataaactaaactcaatttcagaaactaatgtgagaaaaataagcagattgccatctgagtcaacaagtctgtaagtactttcttcaagcgtcacctttaaatttggtttcatacatctgaggtagcatatagatagcagatatcattctgcctgcaaaccaccttgtgtgcattgcacgttgagcagcacttgctgcttccactgtttcaaactgcaaatacacaaaacctgcacttcttttgtcaacataaatatgcttcactcgtccatatttggaacactcttcttctacatcctctttaatgtctagatcaaaatctggttcggtctcagtgtttggatcaaacatgttcttcaacagtaaacactcactggggtttccaacaggttcagtcactgggataggcataatttgtgttgggacagctggtgcaactgctggtactatacctggattaccaataggcataatagcctgttgagcaggagatgacccattcgcaatgggcagaccaatgcttgcagcaatgccagagcggtccagcttctgcataagcaatgctcttgattgggcatttaaagacaatccaccttcatcatcatcaaaatctgcagatttggcagttgtatcttggtttccaacatgatctgttacagatgaaaccctttatagtcctgcctgcaatt

SEQ ID NO: 135383 - DNA, 317 bp, Glycine max
  Clone ID: PAT_MRT3847_93260C.1
agcacgcgagggcttgaccattgcatcacttgactggtcgaacaagcccgataaatgtgctaaaacggccgccccaatgacctactaccagatctcgcagaacaaagaggcctaaatcctccagcacaatgacggagatggcaggcttactactactgaacaaggtactgcacagctgctattcagtctatatcaaaccgtgacatacctgggagatatgaaaaatgaggatgctgctaatggcctctgaaccatagaccttataaacatgattaaccggctggatagcaagaagaaagacaccgactccgaggagg

SEQ ID NO: 135384 - DNA, 766 bp, Glycine max
  Clone ID: PAT_MRT3847_93261C.1
ggtcattttttgccagtggagtgattgatgggatgatatatgtagctgggggaaatagtactgatctttatgagcttgattctgctgaggtgttggatcctctcaatgggagttggcgccctattgccaacatgggaacaaatatggcatcttatgatgctgcagttctcaatgggaaacttctggtgactgaagggtggttgtggcctttttagtctcagagaagggtggaccggttcgagtgtggttgtttacgggcacttatttgttgtttcggagctcgaaagaatgaagctaaaggtttatgaaccggaaaatgattcctgggaagccatagaagggcctcctttgcctgagcaaatatgcaagccttttgctgtgaatgcttgtgattgtcatatttatgttgtgggtcgaaatcttctggttgccgttggccatatcactagactgaacccaaaagaaagctgtaaggaaaaatggaacttcagtgttcgatggcatgtaattgatgcaccagaaagcttgtcagatctgactccttcaagctctcaggtgctgtttgcttagttttttcattatcctgtaatattatgctcacgaatgttgtatcaataaaatgtaattaatataattattagaggtctaaaagttgtaatagctgtgtgaaggaacactttaaatcagttttttgaattgtatcagtgaaggtatcttcttgtggttgcttggcagtgttagttgtacatcaataattatattttct

SEQ ID NO: 135385 - DNA, 678 bp, Glycine max
  Clone ID: PAT_MRT3847_93262C.1
catggcgaaggtggcgattgttgagctcaatagaaactgtgccaatacagtggaagagatagtgaaaatggagagaaagatctttcccaagcacgaatcactggcttcattctttcacgatgaacttagaaagaaaaacagtgggttgctttatattcacgtgaatggcgtaattgcaggctatgtcatgtattcttggccttcttccttgtacggctccatcacaaagctcgcagtgaaggagcaatggaggggacaaggccacggagaggctctgttgaaagcaggaattgagaaatgcaggacaaggaaagtttcgcgcataatgcttcatgtggatcccttgaggactcctgcagtgaatctttacaagaaacatggtttccaaattgacactttggttgaagggtactactcctcagatagagatgcctatagaatgtacttggacttcgattcaagttgaaggagaaattaaaaatacattttacatatgaccagtggttaatttaaaagaacaaatttgtaactctgtgtatggagtcatgaaagacaagcatttaataaagagggcttgtggttttactattgttttccttttcctagcagaaaatgaagatctatgtaatgtttttcaattgcctgtgttaaaaaaaaaaaaaaaaaaaaaacaccccc

SEQ ID NO: 135386 - DNA, 456 bp, Glycine max
  Clone ID: PAT_MRT3847_93263C.1
tgagaggaaagggagggcctcagaactccaaatccctactcccactaaagggagcaaatagttaagaacaaacacatagaggagttcagttcacgatagcaagtttcattgaataaaccatgacggaacctcagaatccttcaccattgacacattctccagcgttagaaatcacacctcaaccactgctacctcccaaaaggaaacgaagcctccctggaatgccagatccagatgctgaagtgattgctttgtcaccgaagacgctgttggcgacgaaccgtttcgtgtgcgagatctgcaacaaaagcttccagcgcgaccagaacctacaacttcaccggcgtggccacaacttgtcgtggaagctgacgcagcgagggagtacagagccgcggaagaaagcttacgtgtgtcccgaaccttgctgcgttcaccacaaccccgcaagggcgc

SEQ ID NO: 135387 - DNA, 772 bp, Glycine max
  unsure (1)..(772): unsure at all n locations
  Clone ID: PAT_MRT3847_93264C.1
cgaattcgagctctgtacccggggatcctctagagtcgacctgcagatgtcgtatcttgtagaggaatgggaattaatggcactaactaggacaatacataggatgcagataaagtgcaagaagcagtgcaagtagatactgctttggagaaagttttggacaaagtaggagctgatcctaactccaaatctgggtacactagagcaggccatgttggtatatgagagaatgaagaaaagagtggcaacagcagaaagaaaaggaagagagagaaagtaacagaacagccagctggtggaaggagaatggaggagggagattcatgaatcctggaatgagagagagaaatggttaaatggaggaggaggggggaagtaactgaaaggggtatgacaaaatttgttaagggtctcggtggtcaggttagattgagtagatgagctggtcctctcagtcaggtatttaccatttctgtgatcatatattatctattttctatcttgtaaggagcttagctccattccattgctattgtagtagcagtatctgcttaaatcctgtaacagaggcttcttcctttgagtattacgagtatnttcatatacatttcagtccagtttcttctatatcggggtcctatcaattgcttatccgtaaggcaatagagatcatgtgcaaaatctttgcacagcaacgcatgctttctactggggcttgggcacattctttgttggatcatgcaaattgaatgggctagcataatgttgtgca

SEQ ID NO: 135388 - DNA, 270 bp, Glycine max
  Clone ID: PAT_MRT3847_93265C.1
cgaacatggtaaaattatcataaatgctttgattgatatagtagacatcgtcatgaagaatttagaggctgatgttgttaaaagattggattttggtgatcttgaggctgcatatgagttttactattggtatgcaagaatcaatgggttttgtattcggaagagtaaaactgaaaaataaagtgtgaaataacacagcaaacctttgtttgttctagagaaggtcgaagagaagataggggattgacaagtgaaacaagaaagcgtgaa

SEQ ID NO: 135389 - DNA, 527 bp, Glycine max
  Clone ID: PAT_MRT3847_93266C.1
tatcagggtatttctgtgtttagaaagcattattttccaaaaaattaaaaaagaaagaaaaaaaaaaaaaaaaaaaaaaaaaaaaaaaaaaaaaaagaactaaaacaaaaaaaaaaaaaaaaaaaaaatacaaaaaaaaaaaaaaaaaaaaaaaaaaaaaaaaaaaaaaacaaaataaaaaaatgggggcggccttttaaaagacccaaggtttgggaccccgccaggcgaaataaaaatttttttaataggggcccaaaattcaattccggggccctattttaaaaaacaagggtggggaaaaaccccgtgactaacaaatttaaaaccttttgtaaaaaacccccttttccctgggtgggaaaaaaaaaaaaggccgctacaaagatccctttcaaaaaaattgcaaaactgaaaggcaaaagggccccccccatatacggaccaataaagggggggggggggggggattcccctaaggggacccgtaattttgccagggcctaaaagccgggttttttggtttt

SEQ ID NO: 135390 - DNA, 625 bp, Glycine max
  Clone ID: PAT_MRT3847_93267C.1
cggccgggctctactgtgatacattttcatctctccactgatgtagcttcccgtggagaacgcaaaatttgtagtaaaaccagagtgaataaaaaaaaaaaaaaaaaaaaaaaaaaaaaaaaaaaaaaaaaaaaaaaaaaaaaaaaaaaaaaaaaaaaaaaaaaaaaaaaaaaaaaaaaaaaaaaaaaaaaaaaaaaaaaaggggggccttgaaaataaaatttttggttcttttaaggagggttaatttccctggggggggaaaaaaggcaaaaatgggttacttgaaaaaaaaaaattccgtttaaaattacaacaaaaataaaaaccggaaaaaaaaatgtaaaacccggggggtctaaaaaaaggaattaacccaaaataattggggtgacctaaattacaattttaaaagcaaaaaaacttttttgcaaagttaaataaaaaattgccaaaaccctcaaaaaaagggttttgggtttgggaaagtttttccttttcatggtaaattaatgcgttgctttgggaatgagggtggggggaggggttttagtttaataaaagggggaaaaaaggtttttcaaaaaataaggggatatacccagaaaaaaaggtttaacaaaag

SEQ ID NO: 135391 - DNA, 537 bp, Glycine max
  Clone ID: PAT_MRT3847_93268C.1
ataaattctcacaaatttaacacattacataggtacagggctgtaacaagtgcatactacagaggtgcattaggggcaatgctggtctacgacataacgaagaggcaatcgtttgatcatgttgcaagatgggtggaggagctgcgtgcacacgcagatagctccattgtgatcatgttggtggggaacaaagctgaccttgtggaccagagaatggtgccaactgaggatgcagtggagtttgctgaggaccaaggcctcttcttctctgagacttcagcactcagtggtgacaatgtggagagtgcatttctcaaattgctagaagagatcaatagggtagtgtccaaaaaggctttggaatgtggttatgggaaggagaatggtgacaacaatgttgttgcctcactcaatggaacaaaggttgatataatcttgggtcctgaattggaaattagtgagatgaagaaattgtcttcgtgctcttgttaatattggtattgagatttaagttagtgtatttgattttgagtttgg

SEQ ID NO: 135392 - DNA, 270 bp, Glycine max
  Clone ID: PAT_MRT3847_93269C.1
ctctcgagcgggatcggctcagtgaagacgtcacgtggtacgctgggtgctgacgtcatataccagtcgatcgacgtggacgtgacggacgataagcccgaaatcgtagtctctggcggatagacggctctcgatgtccagactagatcttggacgtggagctgccagctacgagcagggcaattgaggtgctagtggagccgctggaaccctgagtagaggtatctctgaatgtgttgtcatggctggtgatactgaaccccgtgaaat

SEQ ID NO: 135393 - DNA, 529 bp, Glycine max
  unsure (1)..(529): unsure at all n locations
  Clone ID: PAT_MRT3847_9326C.1
gttgcttcctttcnngtttgttttttattattttaggtgggggatnaaaggaagcntttagaaagtgtgcgccnctaccactattctgtctttagtgttntnnncgtagtactagatgcctccaaagttcnggactannntagaatttgaaacacgttgtttggccctggtctccggtgagtttcctactcccttagagttgagagccctgtttcagagttcccacccncctttgccctgtnnnntggccctggcttgtgaatgatggtcttgtttggagaggctgtctganttggtggctntcttccagtttcggcggcgtgagtccatgggcagtcgtcggcgggccgggttgtggtcttcttcgttacttcgccctttgttgttacgtgtttaaggaattccacctcggttttttttcctggccatccccttctgctccgggtctttagttgttgatcggtgcgctcccgtggctcctttctacggtgggtttcccttgcctgctgctcctcatggtggtcgtggg

SEQ ID NO: 135394 - DNA, 866 bp, Glycine max
  Clone ID: PAT_MRT3847_93270C.1
atccaaaagagatttccactatgatcagatgaaaatattaggaaacaaaaaacaaaaaagtaccgaataaaccaaattagcagcacacttaaagaagccagtgctaggatttgttagtgaagcaatggctcaaaccatgttgctcatgtctagtgtctctagcagttattccctagatttggttttactaagcagaacgagctctttgtgggtcgtgttgctatgcttggttttgcagcatcactgttgggtgaaggaataactgggaaaggaattctagcacaattgaatctggaaactggaattcccctttatgaagcggagcctcttcttctgtttttcatcctcttcaccctgctaggagccattggaggtttaggtgaccgtggaaaatttgttgatgacgaacctactactggaggtgttattcctccaggcaaaggcttcagggaagctcttggtcttggttcaggtcctttatttggattcacgaaagcaaacgagctatttgtgggaagattggctcaattgggtttcgttttctcattgattggagaaattataaccggaaagggagcactagcccaactcaacattgagactggggtaccaatcaacgaaatcgagcccctagtgttgttcaatgttcttttcttcttcattgctgctttgaatcctggaactggcaaattcgttacagatgagggggaggatgattagacactaacccttttgtttgtttgtgtttaaacaaatactcgtttgctcatctatcataaaatgcattgagttcatcataaaaaaaaaaaaaaaaaaagggcggccaccgagcagtgagacccgtggaaccaattccgaaccggtac

SEQ ID NO: 135395 - DNA, 290 bp, Glycine max
  Clone ID: PAT_MRT3847_93271C.1
aaggcatgcgcaccaaaaggaagatgggataaaggtacgcgctatccaggggatggcttagttctgcactccgaaaccacagatacagcgaaggacctgattgacaaacttagagatgtacggacgcaaaccgcaaagccaaactgcggaggtggattcccacatattgactgcagacgatacattgagatcagtacagacacctggacaaacactacacataagcaccttaaggacacactgggggaggtgagtcacactgcatgaggatggggcaaagtacatacagc

SEQ ID NO: 135396 - DNA, 3335 bp, Glycine max
  Clone ID: PAT_MRT3847_93272C.1
gacggcatcttgctagtatacgtaggaaaacttggacagggtgctaattaatttctttattattttccaaattccaatcaaaatttccagtacgacagtttggaaagcgaagattgaaattacagaaagggttcattgattgatacgatacaaatgagtacgccttatcttctgaagcatctggcagattgattagttagtcccttttgtgtcaacgatttggtgattttgaatcttcggatgcagcgagataagataatcgtgaaaattgggtctccaaaatttgtttgagggaattttgttccttgagctaaaacaaaacatgtatgaaaatactatgaggtcttctggtgcggatctgacagctgctatggtaccattgttgaagctgttatgcttgacagtcatagggctgcttcttgcaaacccaacaatgcaattcattcccaaagctacatttaagcttcttagtaaacttgtgtttgcattgttcttgccatgccttatatttactgagctaggtgaaagcattactcttgaaaactttgtggattggtggtttatccctgttaatgtgctggtgagtactgctcttgggtgcttactcgggttcttagtggtgatcatatgccacccacctccagagttaaccagatttaccattataatgacgggatttggtaacactggaaatctcctgcttgctgtagttggatctgtttgccatactaaagataatccatttgggaagcattgcaacactagaggggtggcatatgtttctttatctcaatgggtttctgttatccttgtatacactcttgtttatcatatgatggaacctcctatggagtattatgaggttgttgaggaaggggccgaaattgagcaagagcggacactgaacgatatcagtagaccactccttgtagaagctgagtggcctggcatggctcgagaagagactgaacattctaagactccctttattgccgggatctttaaaagcatctcgggtgtttcctcatccaatattcctgagcttgaagtcacagcagaaagtggtgggactagtagtccaaaatccattagatgtttggctgaacctagagttgtcaggaggattagaattgttgctgaacaaactcccattcagcacattcttcaacccccaacaatcgcctctctattggctatcatcattggcacagtgcctcagctgaaagctgtgttcttcggatacgatgctccattatctttcattacagacagtttggagattttagctggggcaatggtaccttcggtgatgcttatattggggggtatgcttgctgaaggaccaaatgagtctaaacttgggcttaaaactactattggtattacttttgcattctttacagtagaaagaactcggtcctagggattgtccgtgaagcattagaccataacaaggaccagaagaatgttgataaaaagtgtactgcatttcgtaccattttggtaatctcttaaaatatagaacacactaccctgaacatagtaaagaagccagtgctaggatttgttagtgaagcaatggctcaaaccatgttgctcatgtctagtgtctctagcagttattccgtggatttgaagaaagaccttttcctccaattgcagagtcaaagtttaaggcctaagttctctcagctctcattcaacccacttccatcatcaacttcttccttttcttcaccccgtacattcacaactctggccctcttcaaatctaagaccaaagccgctcctgctaagactaaggttacaaagccaaagcaaaaggttgaagatggtatctttggcacttctggaggatttggttttactaagcagaacgagctctttgtgggtcgtgttgctatgcttggttttgcagcatcactgttgggtgaaggaataactgggaaaggaattctagcacaattgaatctggaaactggaattcccctttatgaagcggagcctcttcttctgtttttcatcctcttcaccctgctaggagccattggaggtttaggtgaccgtggaaaatttgttgatgacgaacctactactggaggtgttattcctccaggcaaaggcttcagggaagctcttggtcttggttcaggtcctttatttggattcacgaaagcaaacgagctatttgtgggaagattggctcaattgggtttcgttttctcattgattggagaaattataaccggaaagggagcactagcccaactcaacattgagactggggtaccaatcaacgaaatcgagcccctagtgttgttcaatgttcttttcttcttcattgctgctttgaatcctggaactggcaaattcgttacagatgagggggaggatgattagacactaacccttttgtttgtttgtgtttaaacaaatactcgtttgctcatctatcataaaatgcattgagttcatcataaacaacaaatctatattttttttctccctattacaccagagaagggagcaagattctgtatctgtgagcttgtctgtgaatgagggtatgtgacatccggctgttgggcattttcataagtaaactcgtgtgaagaagatgaaatgaatattgattttcctgagcagtttcagggggttcagattttaaagcctctgattgcgaaatggaggaatgctcataagtcccagcatccacaccagttatgtgagctaaattcccatcagaggtagtagtaagatgctcatcgccataatagtcaggatttctaacatctgaggacccaattgttgaaacatcgttagctccagatgtatcttccaagttacttttcaagggcctagatgcatatgggccagatccagaaagggaagcatcgtttgcagatccaaaacttccaaagctcagatttaagcattcagcagaatggagttgtaaatgatttggaattactacagaagaattttcctcttcttgttctgtcccctgatcatttgagtgtaaatttagatgctctaagtttgtggctactgatgaaacaccatcttccgcttctgtcttattctcgcaggtgttctgctgccaatcagcttcagcaaagcttgacgagtttgcatagcactcagaatttgcatgggcatccacatctatatcatttttctcaatagttgcacgcgtctcgatgtcatgattagacatcattttttcctttagtaaattaaaatcataggacttcgatttatctggaaaaatcataatgggacccaaatttaatctcccatgggcccaatattaaatgggatatcattccgcgggg

SEQ ID NO: 135397 - DNA, 291 bp, Glycine max
  Clone ID: PAT_MRT3847_93273C.1
aaaaatgacaaactaattgctttgtttttaatggtattgagatatgtgtcaaaacagtaattcatatacacccgcctttctaaccaataacgtttaaaaagagcgagaaaaaaaggccacagatataaagtacaaacttgatataatgaaagaattggacctgtccactgtctagtgtctttattgctacaatatgcgaacatagaatgagtgggccgctctatctaataggagaaactaaggcacactgtccagtgcatgcggcgttacattcaaacttgggcactaacc

SEQ ID NO: 135398 - DNA, 269 bp, Glycine max
  unsure (1)..(269): unsure at all n locations
  Clone ID: PAT_MRT3847_93274C.1
gttnaanaatgtnnatggtnatnattaanacttngtggaaacgttngtgncgannatattgtataattattgttatggtntgtcgtatctggtgtgngncgntggggangacncganattntntgcnagactttggnaatcacgtggtcagagnagtcatatgtggcgaaattgatcaagngnaaaggcatncaactcatctngacgnanaatctggttgngggtttgcctccggggagtaagggacatgtttggggtgttaggnatgc

SEQ ID NO: 135399 - DNA, 223 bp, Glycine max
  Clone ID: PAT_MRT3847_93275C.1
tttttgggaacccataccaatcgtttgcttatggcaaagactcaagaataatacattgaatagagtaagccatgggcatggattcccccacttgaattaacaggggaaggaactcaggaagactactacgatcaacagattcggtggatgagcaagtcagcgaaccaaaagaaatcctcaacaatgagagaaactggcgcaataataggcaccattataagca

SEQ ID NO: 135400 - DNA, 711 bp, Glycine max
  unsure (1)..(711): unsure at all n locations
  Clone ID: PAT_MRT3847_93276C.1
ttctgagagagaacccataacagctagttaatggccctcgctttcacttcttcaatttccgcaccaacttccaccttcccatcatcggaacccaaacttccgcaaattgggtcaattaggatttcggagaggcccattggaggcgccgttaatttcaatttatctcaaagacggagcttggtaaagcccgttaacgccgaacctccacgcaaggattccattgttcctctcgcagcaacaaccatcgttgcttctgcttctgagacgaaagaggaagattttgaacagatagccagtgatctcgacaatgcttcacctcttgaaatcatggatagagccctcgacaaattcggcaacgacatagctattgccttcagtggtgctgaagatgttgctttgattgagtatgcgaaattgacgggtcgaccctttagggttttcagtttggacactgggagactgaacccagaaacttatcaactttttgatgcggttgagaagcattatggaattcgcattgagtacatgttccctgatgctgttgaggttcaggcattggtgaggagtaaggggttattctctntctacgaggatgggcaccaagagtgttgcagggtgagaaaggtgaggcctttaaggaggggcccttaaggtctcagagcatggataactgggtcagaggaaagaccagtcacctggtactaggtctga

SEQ ID NO: 135401 - DNA, 402 bp, Glycine max
  Clone ID: PAT_MRT3847_93277C.1
agaaaattgaaggaggtaaacctaacatccctgaccttaatggtgtttctaataatggggttctaaataaaaatatactattgactgttgagaccatatgatgaaagaggagcagaagaagatagaatgaagctctcaaaggaagagcaaacttttctagaaggattgatgttaaacatggcacaaaatgttgatccacagccaaaaaaagttgttgagcaaggtcaggtggaccagattgctcaagataaagaaatcaacatcctgaatctgcatgtgacctcaaatatcaggttccatgtccttatggagatggaaatctccgtgaaagttactcctatcctaactcctcaagtagcaacttctgatgccacctttggcacaaaaagtattaataggttc

SEQ ID NO: 135402 - DNA, 238 bp, Glycine max
  Clone ID: PAT_MRT3847_93278C.1
ggcaaaaaaaaaagctgttaattttttcaactaaataaaacttacactcaccaaactatatcactcattacattctaactatctattaataaacccaattaatcattactcctctgctgtataacacttttctaaacacaattaattcaaacatattacaacttattcagatacaagttacaacatactctttttctacctaccacctctttgctttatatcccatgatcataacaca

SEQ ID NO: 135403 - DNA, 3254 bp, Glycine max
  Clone ID: PAT_MRT3847_93279C.1
gaattcccgggtcgaccacgcgtccgctctccttctcgctctttcagctttgacttttgttggaaactaaggcctaatcaaaatggggaagttcacagctgaagagctacgtcgtattatggactataagcataatatccgtaatatgtctgtcattgctcatgttgatcacggtatggatttaaaactaaaagatagcggttactttctctttgatgtacctgattgttatgattttgttcccctaccttttgtttttgaacaaagataaatatctttggtgtttgtttgacaataaattttaaagttaggcctttttaagaagttccttttgtatcaaaaactgctgtttatattttactaaagaatggtttataatcaaactgtgtagctgtttattagcatgtgatgttttttcaagttatataattgctttacttttcttgttcactgataatttattgttttgcttttgaattacaggaaaatcaaccctcactgattctcttgtggctgctgctggtattattgctcaagaagttgccggtgatgtccgtatgactgatacccgtgcagatgaagctgagcgtggtattaccatcaagtctacaggtatctcactctactatgaaatgactgatgaagctctcaagagttttaagggagagcgcaatgggaatgagtatcttatcaatctcattgactcccctgggcacgttgacttctcatctgaggttactgctgcactccgtattactgatggagctctagttgtggtcgattgtgtggaaggagtttgtgtccaaactgaaactgtgctaagacaagcccttggagaaaggattaggcctgttctgactgtcaataagatggacaggtgcttccttgaactccaggttgatggagaggaggcttaccagacattccagagggttattgagaatgctaatgttatcatggctacatatgaagatccactacttggtgatgttcaggtctacccagagaaaggaacagttgctttttctgctggtttgcatggctgggcttttaccctgactaactttgccaagatgtatgcatccaagtttggagttgatgaaggaaagatgatggaaaggctctggggtgaaaacttttttgatccagccacaaagaaatggaccagcaagaatagtggttctgctacctgcaagcgtgggtttgttcagttctgttatgagcccatcaagcagattattaacacttgtatgaatgatcagaaggataagctgtggcctatgctgcaaaagcttggggtcaccatgaaatctgaggagaaggacctcatgggtaaagcattgatgaagcgtgtcatgcaaacctggcttccagcaagtagtgctctattggaaatgatgatatttcatctaccctctccatcaacagcccagaagtatcgtgtggagaacttgtatgagggtcctcttgatgatcaatatgcttctgctatcagaaattgtgatcctgaaggtcctctgatgctctatgtctccaagatgattccagcatctgataaggggagattttttgcctttggccgtgtattctctggcagggtttcaactggtttgaaggtgaggattatgggacctaattatgtccctggggagaaaaaggatttgtatgttaaaagtgtgcaacgaactgtcatttggatgggaaagaggcaagaaactgtagaggatgtcccctgtggtaatacagtggctatggttggtcttgaccagttcatcacaaagaatgcaacattgacaaatgagaaggaagtcgatgcccaccctatccgagctatgaagttttctgtctcacctgttgttcgtgttgctgttcaatgtaaggttgcatcagatcttcccaagcttgttgaaggtcttaagcggttggctaagtcagatcctatggttgtttgtaccattgaggagtctggtgaacacattgttgctggtgcaggagagcttcatcttgagatctgtttgaaggacttgcaggatgatttcatgggtggagctgagattatcaaatctgaccctgttgtgtcattcagggagactgttttggagagatcatgccgcaccgtgatgagcaaatcacccaacaagcacaaccgtctgtacatggaagcaagaccattggaggaaggtcttgctgaggccattgatgatggcaagattggaccaagggatgaccccaaggttcgttccaagatcttgtctgaagagttcggttgggacaaggatcttgccaagaaaatctggtgctttggccctgagacccttggacccaacatggtggttgatatgtgcaagggagtccagtatttgaatgaaatcaaggattctgtggttgctggattccagtgggcatcaaaagaaggtgctttggctgaagaaaacatgagagccatctgctttgaagtatgtgatgttgtgctgcacgctgatgctatccacagaggaggtggtcaaatcattcctactgccaggagagtcttctatgcttcccagattactgccaaacccaggcttcttgagcctgtctacctggttgaaatacaggctcctgaacaagctcttggtggaatctacagtgttcttaaccagaagcgtggacacgtgttcgaggaaatgcagaggccaggtaccccactatacaacatcaaggcatacctccctgtcatcgagtcctttggtttctcgagcacattgagggctgcaacatcaggccaggccttcccacaatgtgtgtttgatcactgggacatgatgtcttctgacccattggaggctggatcacaagctgcacagcttgtcactgacattcgcaagaggaagggcttgaaggaacagatgactcctctctccgagtttgaagacaagctttaaatttgtttcatgaattattttactttgaacttagtcgaatttattttctcttgtgaacaatgctactttagatttaatttctgttagttttgtttgtggttttgcccgtgaatgttgtaatgctgttatttggtccttgcatcgatgtatttttgctctaataggattttgcatcggtgttggttcaaattattattttgcgaattttgcttgaaagatagtattttcaataattgtgtggcgcttttgtttttgtggcgaatgatcaaatgagaacttggtaattgaatgccaaaaaaaaaaaaaaaaaaaaaaaaaaaaaaaagaacg

SEQ ID NO: 135404 - DNA, 470 bp, Glycine max
  Clone ID: PAT_MRT3847_9327C.1
attcactatgttatcaatatctataattggatgaaaaataaatatcatttacacaatcatttacaattttaaaaatcatttacatggtccatagttttaaatgatctataatcaatgggtgttgaatctagcctaaggagttactccgttataacgtaactaatggagattcaaattttgttggaggaagtaattagcatctgattgtgattcaaataaaattggctctaaaaaaatatacatgttggacacaaaaaataaatgttagatatataattatatggtgaaatgaattagtgactaacttcttgaaaggattatatactaatgaaaataactttgctcattttaaatttcatataatttggtgttgtaaaattttcatataaagagttatgtgattcaatcacaaatattatgtacagtaaattggttgatttttatataaaaaaaatcatataattttgatt

SEQ ID NO: 135405 - DNA, 2949 bp, Glycine max
  Clone ID: PAT_MRT3847_93280C.1
ctctcacacacaccactttatatacgcacacgagagtcggaagcactactctcttcgccgcttgctctctctctctcgctctttcagctttgactttggtggaaactaaagactagtcaaaatggtgaagttcacagctgaagagctgcgtcgcattatggactataagcataatatccgtaatatgtctgtcattgcccatgttgatcacggaaaatcaaccctgactgattctcttgtggctgctgctggtattattgctcaagaagttgcaggtgatgtccgtatgactgatacccgtgcagatgaagctgagcgtggtattacaatcaagtctacgggtatctcactctactatgaaatgactgatgaagctctcaagagttttaagggagagcgcaatgggaatgagtatcttattaatctcattgactcccctgggcacgttgacttctcttctgaggttactgctgcacttcgtattaccgatggagctcttgttgtggtcgattgtgtggaaggagtttgtgtccaaaccgaaactgttctacgacaagcccttggagaaaggattaggcctgttctgactgtcaataagatggacaggtgcttccttgaactccaggttgacggagaggaggcttaccagacattccagagagttattgagaatgctaatgtgatcatggctacatatgaagatccacttctcggtgatgttcaggtctatccagagaaaggaacagttgctttttctgctggtttgcacggctgggcttttaccctgactaactttgccaagatgtatgcatctaagtttggagttgatgaaggaaaaatgatggaaaggctctggggtgaaaacttctttgatccagccacaaagaaatggtccagcaagaatactggttctgctacctgcaagcgtgggtttgttcagttctgttacgagcccatcaagcagattattaacacttgtatgaatgatcagaaggataagctgtggcctatgctgcaaaagcttggggtcaccatgaaatctgaggagaaggacctaatgggcaaagcattgatgaagcgtgtcatgcaaacctggcttccagcaagtagtgcattactggaaatgatgatatttcatctaccctctccatcaacagcccagaagtatcgtgtggagaatttgtatgagggtccccttgatgatcaatatgcttcggctatcagaaactgtgatcctgagggtcctctgatgctctatgtctcaaagatgattccagcatctgacaagggcagattttttgcttttggtcgtgtattctctggcagagtttcaactggtttgaaggtgaggattatgggaccaaattatgtccctggggagaagaaggatttgtatgttaaaagtgttcaaagaactgtcatttggatgggaaaaagacaggaaactgtggaagatgtcccctgtggtaacactgttgctatggttggtttggatcagttcataacaaagaatgctactttgactaatgaaaaggaagttgatgcccatcccattcgagctatgaagttttctgtctctcctgttgttcgtgttgctgttcaatgtaaggttgcatcagatcttcccaagcttgttgaaggtcttaagcggttggccaagtcagatcctatggttgtttgtaccattgaggagtctggtgaacacattgttgctggtgcaggagagcttcatcttgagatctgtttgaaggacttgcaggatgatttcatgggtggagctgagatcattaaatctgaccctgttgtgtcattcagggagactgtcctggagagatcatgccgcactgtgatgagcaaatcacccaacaagcacaatcgtctgtacatggaagcaagaccattggaggaaggtcttgccgaggccattgacgatggcaagattggaccaagggatgaccccaagattcgctccaagatcttgtcagaagagtttggttgggacaaggatctcgccaagaaaatctggtgctttggccctgagacccttggacccaacatggtggttgatatgtgtaagggagtccagtatttgaatgaaatcaaggattctgtggttgctggattccagtgggcatcaaaaaaaaggtgctttggccgaagaaaacatgagagccatttgctttgaagtatgtgatgttgttctgcacgctgatgctatccacagaggtaggtggtcaaatcatccctactgccaggagagtcttctatgcttcccagattactgccaaacccaggcttcttgagcctgtctacctggttgaaatccaggctcctgagcaagctcttggtggaatctacagtgttcttaaccagaaacgtggacatgtgttcgaggaaatgcagaggcctggtaccccactttacaacatcaaagcatacctccctgtcattgagtcctttggtttctcgagcacattgagggctgcaacatcaggccaggctttcccacaatgtgtctttgatcactgggacatgatgtcttctgacccattggagactggatcacaagctgcacagcttgtcaccgacatccgcaagaggaagggcttgaaggaacagatgactcctctctccgagtttgaagacaagctttaaattgtttgaactatttaacttacttttgaacttagccgaatttatttctcatatgaacaatgttactttagatttaagttttgtcgagttttgtttgtggttttgtccgtgaatgttgtacttctgttatttggtccttgcatcggtgtattttttatccataggattttgcatcggtgttggttcgaactatttgggaattttgcttgaaagataagatagtagtattttcaaaaaaaaaaaaaaaaaaaaaaaaaaaaaggaaaaaaaaaaaaaaaaaaaaaaaaaaaaaaa

SEQ ID NO: 135406 - DNA, 433 bp, Glycine max
  Clone ID: PAT_MRT3847_93281C.1
gcgactctcagacgggtgggtcagtagctcgctcaagggtagctcactagtgtcctcgcccccacgctggcacgacggcccgcacacttgctcactccagttatgcgcacttgcttcctcccccgcactgctgggtggtgtggtggagtggagcgggggggggcggggctggccgggctactcatcttttttattttttctctctctcttcccgtgcgctgtggcgctttctctcgtggattttggccggtcgttccggtggtttttttaggcgcctatccggtttggggggccaacctgagcctccaccattttggccaccccaaaggtccaggtcctttcctcggtggtttttgggggccccgtggtttgccttaaaatgaaacattgtaatcttgccatattacgtgatcagtaaccaactcccatgagt

SEQ ID NO: 135407 - DNA, 341 bp, Glycine max
  Clone ID: PAT_MRT3847_93282C.1
ctggctcgagctctctatctatctgtctctctctctatctatgtccatttagttgctccttcaagtgctgcataacccaactaatcactgaccactatttgctatgtagtcttcaatgaccacatctctgatgagcgcaaactgcgagactttgtatttcgaagatgagctgtgcctggtttcggactcgaattacgacctgagccaggacgactatccagaccatcgaggagatcacgggcactcaccgagcagaagacatctatgcagtgctcaaggcatgttgcatggattccaacgagaccactcagaagcttatccttcacgacacatttcatgag

SEQ ID NO: 135408 - DNA, 583 bp, Glycine max
  unsure (1)..(583): unsure at all n locations
  Clone ID: PAT_MRT3847_93283C.1
ggctcgaggacctgttatatttattgacactgacaagttgcctgctttagaggcaagagatcagaagattgtaaataaccctattgaagctcagataattgctgaggttgcaaaggaattggtaaagaatggaatcggaagtgaacacattggcattattactccctataattcacaggcaaacctcatccggaatgctgcttccatgacttccttggagatacataccatagacaaataccagggtagagataaagactgtatattagtatcttttgtaaggtctaccgaaaacccgacaagctgtgctgcttctctgcttggagactggcacaggataaatgtggctcttactcgcgctaagaaaaagttgatcatggttggatctcggagaactcttcttagggttcctctattgaaacttctcattaagaaggttgaggaacaatctggaattntaactgtgactaagaaggatatctatcgaaaaagtgagctcangagatgttctcaaatgagatgaatggaaattcttttacccttattttgagggttataatatatatcatcatacaaatctcat

SEQ ID NO: 135409 - DNA, 287 bp, Glycine max
  Clone ID: PAT_MRT3847_93284C.1
ttcgagggtttgggtttctcttcctcccttggagaaaaagaagagccaccgctgcgacgccgttcgtgcatttttgaggtgccgctgtcaagtttgggccttgtggaccaaaggagaatgataactccaaataataagaaaatccccggaattccaaaaatgccaatgaagatgtaaatcaaaaagggcaaaaaaaaggggggatttaaaaacccacccaatttgggaaggaattccgaaaaattttaggggtttgggccaaccaattaaattttaaagtgatccgg

SEQ ID NO: 135410 - DNA, 221 bp, Glycine max
  Clone ID: PAT_MRT3847_93285C.1
actcacgcctggggaagaaaggcacaaaagctcatgaatcttagggaaaattgaaagacaagccaacaaaaagggtgaaagtgaaaaatgctgcaactgcaaaagttttcggtggcgaatgccagaattcatgattgggaaacataatattaatgtgattttggtgggggcactatgagtttttggtcaaaacaaggagcttattcatcattagattaaca

SEQ ID NO: 135411 - DNA, 430 bp, Glycine max
  Clone ID: PAT_MRT3847_93286C.1
cggtttataatggatatctcagatctctgattatgatgcatctggtgccccgatttagtagatctcttatttcaaaactgtgaaaacaaacttaaattaagtaaactagagaaacaaaacttaaattaggtccttttctctgggtttccatgatagtatttaattttaacattgttcacagcagtcttgcttgactctgtgctcgattgattatatatccttctttttctctagaggttcatcgatctcgtactctaatttacgcaggtgctaatttatacctaagatatcagattttgttgtatttcgcgtccctaatttagaagacatgtgaggtttgaattgggagaatttaattcaattcaatgaatgccacggatcagttgaatgtgttcagatcttgctattagctcaatgtctttgcaaactc

SEQ ID NO: 135412 - DNA, 436 bp, Glycine max
  Clone ID: PAT_MRT3847_93287C.1
ctgtggtcgatcctttttataacatgtctttgttatttaataatcatttatttttgtttataaaaaagggaacggccatgggggggaccgaatctaatccgccaaaattagctaccaaaatggttttaaatgtaccaaacataacccagaaaaaacaatttctaattaaataaaaccaaacaccttttaccccctaaccaaatatcccttctattcctacaaaattggtggctggtttttaactttctttgaaacagcctataaaacagattaattttttaagaaaggaacttttggcaatcacaagaatggcatttacaattaattatcttcaataaagtttttcaatttatcacgggtcttatcagacaaattgcaatctttgaaacattaactttgggggggacatgatataacaatgttttaaatgggtgat

SEQ ID NO: 135413 - DNA, 498 bp, Glycine max
  Clone ID: PAT_MRT3847_93288C.1
cactaaaccaaagtaagaggtatagtgttctaagagtgagcaacttgtgagaaatggcttccaaggctgcacttctcttgtgtctcaatgttctctttttcactgtggttagttccacatatgtgctgatgtgttaggtttgattaatgtgcaacttgggaagccaccaaagaccccatgctgcaacctaattcatggtcttgctgatcttgaagctgcagtgtgcctttgcactgctctcaaggctaatgtgttgggcatcaacctcaatgttccagtgaacttgagcttgcttctaaactactgtggaaagggtgttcccaagggattcgtctgctattaaatcaaacacttataatgtgtagcttcctattgctatattcgtcattcatcattattctgtgtatttcagtatttgtgcccggcacgtgccaattagccaacgaacatttcgttcatacttggttactattactgttgtgatgcgctgaaacttga

SEQ ID NO: 135414 - DNA, 227 bp, Glycine max
  Clone ID: PAT_MRT3847_93289C.1
ggctcgagggtctatagaactagaaagagattaatcttgaacaaggaagatactctttacaaagatattcgtacacggaagaaaataatatatgattgctaagaaaacaaaagacatgtgatggcctgagggctgatcaaaaccaccaagacgtgaacacaagtatgggatgtgggcgtgtcatatagagagggagtggtaaccatctatcaagaggatcttctcac

SEQ ID NO: 135415 - DNA, 671 bp, Glycine max
  Clone ID: PAT_MRT3847_9328C.1
ttttcctcttccaattgtatgctcttgaaacccgaaaagatgggtttctttcaactctttatggtcttgtttggaagagacttaaataaaaaagactttgtgcactgccttgatcccattatcgagccaaggttctaccataagtggcttatatttgtatcgctcttagtacaaaaggttctgaactcgtgtgctcgtatattaaaatgtattggggatatttttgagtcaattttgaacccacaagcttcctccaacaaaatttcttcattattgtatttaactgcatccgaggtaagcagatactggataaaaattctgaatattacaagtctatagttggtcatttggacaatcgactggaattgttagacaatagcatcaagcgtgacgacccaaccaagtacaatgctgctttgtctatgatggcttctaaagtatcgtacgagaatcaagcttacgttcatgctgctgtcgtaaatcgctggacgatggagcttattgaatgtcgtgactactggaatgatcatcaagaaaaagctacaactcatgctttcatcatgctagacaaaagtgaagaccaagatacctatgttgtggctctcagaggaaccgaaccctttgatgctgatgcatggtccaccgatgtagacatctcatggtttgagatt

SEQ ID NO: 135416 - DNA, 1420 bp, Glycine max
  Clone ID: PAT_MRT3847_93290C.1
cagtatggataagttattataaattttatagtatatgtctttaatttttatgaataaaaaaattaaaataataataatttctcatatagtttgtcttagaataatttcatcggttaaagagaaaattttagttcttattatttttcttttgtattctttcgatttctctttatgcaaaaataactgaatagccttttcagtcgttctatggattcgatttagaaaagaaaaaaaaatgcagttaaacaacaatttttttactctacagcctctgtctctccataattattagagttctaatatgccgatatgcatacatcatttcctaagtgtgggcttcaatgatcaaaaggaaaataagaaaggaaataggagaaagagaaaaataaataaataaacaaaaagattggtagcggaaataattaatcatagcttaaataatgtagattatttattagtagaaatttcacttagaatacaaacgactttagtgaggctgcgacaaggaagaccaagaagcctttcaagtttcagcgcatcacaacagtaatagtaaccaagtatgaacgaaatgttcgttggctaattggcacgtgccgggcacaaatactgaaatacacagaataatgatgaatgacgaatatagcaataggaagctacacattataagtgtttgatttaatagcagacgaatcccttgggaacaccctttccacagtagtttagaagcaagctcaagttcactggaacattgaggttgatgcccaacacattagccttgagagcagtgcaaaggcacactgcagcttcaagatcagcaagaccctgaattaggttgcagcatggggtctttggtggcttcccaagttgcacattaatcaaacctaacacatcagcacacacaccgaacttaatagtgtctttggggcagcttgctagctttggggatggtggctttgggacaggtgggtgtttgggagttttggggggtggattacatggcacatatgtggaactaaccacagtgaaaaagagaacattgagacacaagagaagtgcagccttggaagccatttctcacaagttgctcactcttagaacactatacctcttactttggtttagtgagagcatgagcaagcacttgttgatgccattgcaaggattgcagatgcatctgatggtgaaagtggtaataattagccgtctacacaatcatgctgcatactgttgtatattagaagtcctaatttttttcgtttaggtcagacaaaatgagccttttgtaattggataagatgaacattttattatactgtcgtccacaacagatttaagcaattctctaacgaggaaaatatttaagcttttcttcattttggatcaaaaaaaaaaaaaaaaaaaaaaaaactcctggtgc

SEQ ID NO: 135417 - DNA, 898 bp, Glycine max
  Clone ID: PAT_MRT3847_93291C.1
acggctgcgagaagacgacagaaggggatcccaagctcacacaccaaaccaaagcaagaatagtgttctaagagtgagcaacaacttcaaacaccattgtgagaaatggcttccaagggtgcacttctcttgtgtctcaacattctcttcttcactgtggtaagctccacatatgtcccatgcaacccaccccctaaaactcctaaacacacacctgtcccaaagccaccttccccaaagcaaccaagttgccccaaagacaccattaagtttggtgtgtgtgctgatgtgttaggtttgattaacgtgcaacttgggaagccaccaaagaccccatgctgcaacctcattcagggtcttgctgatcttgaagctgcggtgtgcctttgcaccgctctcaaagctaatgtgttgggcatcaaccttaatgtcccagtcaagttgagcttgcttctcaactactgtggaaaggggtgttcccaagggattcgtctgcgcttaaatcaacacttcatataacttgtttcctaaagttaattagtatgcttaaggttctatattttgctatattggttatttattcataatattctgtgtattttggtattctgtttggcacgtgccatttaatctgtgcttgtttttctgttgagcaagcttcaaatgttcgttcaacgaaaagtaacacgtactcttaggcactcttaggaaacgaacatttcgttcgtactagcttggtcattattattgtggtgatggttaaagcatggaaggctccttggtcttccctgtcagcctcactagtcctttgtaatctaagtgaaatttctactaattaataaaagttctatatttaagctaaaaaaaaaaaaaaaaaaaaaaaaaaaaaaaataaaaa

SEQ ID NO: 135418 - DNA, 772 bp, Glycine max
  Clone ID: PAT_MRT3847_93292C.1
cctcgtgccgaattcggcacgaggcaaagtaagagtgagcaacttccaacaccatagtgaaatggcttccaaggctgcacttctcttgtgtttcaatgttctcttcttcaccgtggttagctccacatatgtgccatgcaacccaccccccaaaactccaaaacacccacctgtcccaaagccaccttccccaaagcaagcaagttgccccaaagacactattaagtttggtgtgtgtgctgatgtgttaggtttgatcaacgtgcaacttgggaagccaccaaagaccccatgctgcaacctcattgagggtctcgctgatcttgaagctgcagtgtgcctctgcactgctctcaaagctaatgtgttgggcatcaacctcaatgttccagtgaacttgagcttgctactcaactactgtggaaagggtgttcccaagggtttcgtctgctattaatgaataaacacttctataatgtgtagtttcctaatgtaaagtatgtctcaaggttctatttcgctatattcgttattcatcatcctttgtactttgtacttttgtattccgtatagccaacgaacatttcgttcgtaattggttattattattgttgtgatggttgaaacttgaaaggcttcgatctttcttgtagtctcacttctcttgtgtattctatgtgaaaaattctactaataaaaattctgcatttaagctaaaaaaaaaaaaaaaggcgcccttccgatctaacggacgcctgtggtccaacccgga

SEQ ID NO: 135419 - DNA, 173 bp, Glycine max
  Clone ID: PAT_MRT3847_93293C.1
ttttgggttaagttccggaattagtgcaaaaggctgatgttggaggatccagctgagattattgagcagatccactgatgtcaaacacggattaatgagtaatcacagacgacaccaaaaatgtagagtactatgattaagaagaggaaacaaatctacgtacaaagagaagc

SEQ ID NO: 135420 - DNA, 173 bp, Glycine max
  Clone ID: PAT_MRT3847_93294C.1
tgattcgtacgaagctccgaattcggctcgaggatctccctctcagtccgagtctaagattatctggttccgaacgcgatagactaaccataacagtaccggggaaattatcgacgacaacttcaaaggggacgccgacaccgacgcttccggccacaatagttgcaggactg

SEQ ID NO: 135421 - DNA, 799 bp, Glycine max
  Clone ID: PAT_MRT3847_93295C.1
acggctgcagaagacgacagaaggggaccaaaccaaagtaagtgttctaagagtgagcaacttcaaaacaccatagtgagaaatgacttccaagggtgcaattctcttgtgtctcaatgttctcttcttcactgtggttagttccacatatgttccatgcaacccaccccccaaaactcccaaacacccacctgtcccaaagccaccttccccaaagcaagtttcttgccccaaggacactgttaagtttggtgtgtgtgctgatgtgttaggtttgattaacgtgcaactagggaagccaccaaaaaccccatgctgcagcctcattcagggtcttgctgatcttgaagctgcagtgtgcctttgcactgctctcaaggctaatgtgttgggcatcaacctcaatgttccagtgaacttgagcttgcttctcaactactgtggaaagggtgttcccaagggattcgtctgctactaaatcaacacttctaatgtgtagtttcttaatgttaagtatgtcttaaggttctatattttgctatattcgtcattcatcaatctatgaactttgttgttttgtttttccgtctggcacgtgccatttatagccaacgaacatttcgttcgcaattggttattattattattattattattgtgatggttgaaacttgaaagtcttctcgtggtctttcttgtagcctcgctcacactactccttttgtattctaagtgaaaatttatactaataaaaattctacatttaagctaagatgcattaaaaaaaaaaaaaaaaaaa

SEQ ID NO: 135422 - DNA, 361 bp, Glycine max
  unsure (1)..(361): unsure at all n locations
  Clone ID: PAT_MRT3847_93296C.1
cagaggcttcatcgctgctgagacatgcgctcctctaccgctccgtttggcgtggtgctctgctgggccttacgacgtgagctcgctgaccggcggccccttcggagccattntgcacccctccgaactcgctcacggcgctaacaacggtcttgtcatcgttgttcggcttttggagctcctcaaagcggtgtttcctattttgagctacgccgatttctaccagttggctggcgttgttgccgttgtggtcaccggtgggcctggcgttcccttccatcctgggagagaggacaaacctgggccaccaccagagggtgttttgcccgatgccactaagggttctgaccatttgagagat

SEQ ID NO: 135423 - DNA, 472 bp, Glycine max
  Clone ID: PAT_MRT3847_93297C.1
cccggaatttcccgggctcgccccacgcgtccggctatatctagggtttacgatcgttactatgcgcagcagagtggctaatcctgtgcgaggtcgtcgatctctcatccgtttcgtttctggctcctccatctagctactcttccccctccatcttttgctcctccactcgctcgcgatccctttctcggtctcagtcgacgtcgcgctccaaatacatctgtgaccgcaactcctgctcttccacccgaagctcccgcagccgcagcacctttcctgctagggcgccgaagacctggtgactcaactaagtgaggttggtctcctccacctcagtctaaaaaagcttaacctcctccaaggaaaccttctcatgtacacgagtcacttgttcttcatgaagaaaagctcagtactaaatgtcaatgaagggcacttgagagaaattctcagtaacacttgtgaggttata

SEQ ID NO: 135424 - DNA, 359 bp, Glycine max
  Clone ID: PAT_MRT3847_93298C.1
attaaaccccttattacacccaaaggcaataaaaacaccccccgagcaagatctcgaaggaaagagaaccaacgcagacctttacaaaaacagttcaaccttccccaaaaaggagcggctcccaacacacaaccctaaagcacacaaaatgggggaccaaatattgcgccttttggctcgctccaacaaaaaggcaaaccctctggagcacatcacaaaaatagcttggatgagagggaggaaggcctcccccccggtgcgccctccccgagaatgaaccaagaccgtgaaatcatcgagaaaaaaaaacttatgaaccaaaacaaaatacccatggtacgccggcctactaaaaagaa

SEQ ID NO: 135425 - DNA, 456 bp, Glycine max
  Clone ID: PAT_MRT3847_93299C.1
atgagtcttactcagaaaagcacacataaagacacattcattctccaggcaagacttgatgatcatcacattgagacgattaacatgacaaaactcgatgctttcgaggaattgactcataagtcaagaaactacttgtgtaggatccgacttccttatgaacctaggagtaactcggaaaggttttttgagaagaggagaaggaggaacaaaaggacatggggctatgacatgaacgataatagcctccaattagggcataactatccctcaacagtgatgatgccaccaacaggggctgcaacgctgccattagggcaaaccacaccaccaatagtgagtgtcactggcagggacactggaaaaatgatcattggcaatgtcgaagccattaagatgatgagaaggatcgtcgttggaactttcccccgtcagagcattcagaacccctattga

SEQ ID NO: 135426 - DNA, 275 bp, Glycine max
  Clone ID: PAT_MRT3847_9329C.1
ggtgcttccattattcatattgtggatctgatttatacagatgtctggactgcgggtgaggttctgaggccgctggtatgaatcatcaaaaattttgcttcataagtcgacaattgttatcttgccacatataagacagatagcactcgaatcaagtggataaattcagtatgctggtggacgccatcctgctgttttaagaacatttagccagagactttttttgggctttaacgatgctgtgaatgggctcttaagttcatggctgttcactg

SEQ ID NO: 135427 - DNA, 297 bp, Glycine max
  Clone ID: PAT_MRT3847_932C.1
ccaagaggtttacttatgggggagagagagagagagagtgagagagagtgatagatggtgtctatgaaactttagaagctgcttgccgttagcgttatcatgtgtggtagaggcatattccggcttgaccctagttatgacaatgaagtctccatggctgacactagacataacataccgaaatcggttaaggatggtttcattatcatgtagccatctaacatccattgtagatcctgtgctttgataattacggatgccataatgaaagtacgtcactctgcttatggtaagcct

SEQ ID NO: 135428 - DNA, 1351 bp, Glycine max
  Clone ID: PAT_MRT3847_93300C.1
ttgacaacaaaatcctctctgcttccaacaacatctcaaccatgggtacttgggttcttcaacaagtgacctctattgattggaattggaaccatgaatcctacccagactttcgtgatttctctgttatacccttcttcgctctcttcttcccctcccttcgcttccttctcgacacgttcctattcgagcaagtggccagacgattgatttttggaaagggacacaagaagatggattttcaaacacttgagagaaaaaagaagattagcaaatttaaggaatcggcatggaaatgtgtttattttctatctgcagaaatttttgctttggcagtaacatatgatgaaccttggtttactgatacaaggtacttttgggtggggccagggaatcagatatggccagatcaaaagattaaattgaaattgaaagtgctctatatgtatgctgctggattttatacatactccatacttgctttagtattttgggaaacgaagcgctctgactttgtggtttccatgggccatcatgttattactgtcattctcatcgtgttatcctacatttttaggtttgttcgtgttggatctgtagttttagctcttcatgatgctagtgatgtgtttattgagacaggaaaaatgtccaaatacagtggtgctgaaacaacagctagcattgcatttattctttttgttttgtgttttaccgtgacacggatcatttactacccattctggattcttaggagtacgagctatgaagttgttcacgccttgaaaatggacctggtggatggtccattatattattatgtgttcaattctcttctatatttcttgcaagttcttcatatatattggtgggttctgatgcttaggatgcttgttaaacaaatccaagcaagaggaaaagttagtgaagatgtccgatctgattcagaagatgaagatgaacattaacatgaagattgaacagaaaagcaaaagcataataacaaagatgatttggttagcttcaatcgttttctgtgcctttggccacaaagctaatattttcaaatcttaatcaaattgagaggattatatttatacggatttgagtacagacttcggagctggtataaaatggcaacagatggagagaattttgattcttctaaactatgggtctatgctgcaactcctgaagtttaggtgtacttcctaacatttggttaagatattttgactttcttggttatttgccccttgttcgaattacaagttgtgtgtccgttaatgttttctgccatagatgttatccacttggttttgatttattgaagacgaaaattattggactt

SEQ ID NO: 135429 - DNA, 261 bp, Glycine max
  unsure (1)..(261): unsure at all n locations
  Clone ID: PAT_MRT3847_93301C.1
ggagcatagcagatgctgatacatgagagcgnaacctagctatcatcatcatcacnnaagaacaacaacagcggnnaaaagaaanannaanatgtcagaggtgannagaatcggngtggtgggggntggcccatgggatnnggnanagcgcaagtcgctgcatgnangacatcgacgttntggcttcacgngtcgaccctcaagctcnntcnngagcctcctcttccntctcttcctccatnaaccgtttcntttccngna

SEQ ID NO: 135430 - DNA, 397 bp, Glycine max
  Clone ID: PAT_MRT3847_93302C.1
cacgcgtacggaagcttgtttttctgtagagcggccgacctttttttctttttttttttttttttttatcaaaataaattgattcaataaaaagttccatataacatttcacttacacaaaacaaaatgagataaaatatatatactttgttaaatattccattaaagtatgaaaactcatattgcgtttgatttatagtttggttgatcataacatttttttctgggtgcttgataaagcatgaaaatgttcctcatcatctttcttaaaaaaataaaactctggttacttattctacacaaacatacaatcttttcttaaccgccctctttaaatcctaaaaccctacatgttcacctttaaacaccatatcttcccatgctactcacatcattc

SEQ ID NO: 135431 - DNA, 119 bp, Glycine max
  Clone ID: PAT_MRT3847_93303C.1
attaaacccaatgggtccgaatttggacaatggtagctgggggaggtgctagagtaatctatgctgatacagagggggatctggggtatgctactgaacttgtaaactatgcagaatat

SEQ ID NO: 135432 - DNA, 608 bp, Glycine max
  unsure (1)..(608): unsure at all n locations
  Clone ID: PAT_MRT3847_93304C.1
cttgttttttttgttttgatgatgatcgtgatgatttgatgaaaatgcgcttctcaagtttaattcaagacaatgatccaagaatacaagatacaacgtcaagaagatctctagtattttagaaagggaattcctaattgaaatagcaaaaggtttggccaagaaatttaagttaaaaagtctttttcaagagatttactctctggtaatcgattaccagaggatgtaatcgattaccagtggccaaaatgatttacaacagctattaagaaatttgaatacaaattttagactgtgtaattgattacacaatattggtaatcgattaccagtagttaataaacgctttaattcaaattttaaagcctgtaatcgattacacaaatcctgtaatcgattaccagaggagattttcagaaaattatttccaagagtcacaacttttcaaatggtttttacatgaccaccaaaggtttatttatatgtgacttggaacacgaatttgctcagagtttttcataacaaaaagttttattctctcaaagagcaaaaacattttatcctcttaataaattcttggccantacancttgcattcaataggaatt

SEQ ID NO: 135433 - DNA, 310 bp, Glycine max
  unsure (1)..(310): unsure at all n locations
  Clone ID: PAT_MRT3847_93305C.1
accccctgttgtacatcattttttttcagattctttcccctcatacgagctcttcatcacaaagcaagaatgggctccnttnacccctacacttatctcccacaacttactttaatttttcatcctcaaccacaaccactacacctaaatcctatttatttttctactaatacactctatcccctcaaatatcctcctcttttaactccaaacactaattcctctatacttttctatcaattaccctattcacaaaattttcccccctcttttttacacatataaattcatctatattttttccttttcc

SEQ ID NO: 135434 - DNA, 433 bp, Glycine max
  Clone ID: PAT_MRT3847_93306C.1
ctctctgcttgttcgcattgtggccttgtgactaagggacttcactactttaacttgatgaccagtgtgtataagattgttcctgattcaggtcagtatacctgccttgttgaccttcttggacgacgaggtcttataaatgaggcttttgaattcttgaggttaatgccaatggaagctgaatcaaatacattaggagcatttattggatcctgcaatctacatgaaaatataggaatggctaaatgggctgcagaaaagctcttcatcaaagaaccagagaagaatgtaaactatggggtcatgtctaacatttatgctttccatagacattggtatgatgtggaagagttcgaagaatgatggggaacaagtgtgatgcacgagtcccgggttgcaactggatagagattactaatcaggttcattcatt

SEQ ID NO: 135435 - DNA, 639 bp, Glycine max
  Clone ID: PAT_MRT3847_93307C.1
acgctcaaatgttgttatagctttaatatagttgacaacagcttccaatcccatagtgaaatttatgtatgaaccatctaagagttacttgtccttaactaaaaggaggaccattgagcatgctcctcccaatattgtacttcccttgaaggcatgcatacactatgaagaaaacaccccacccatgatcaattttctagaaatgtccaactccacaattgagaaccccatttgcttccatatgttctacacctggttgagctgaaaggcagacagatttaatatatcatcaacccaagaacaaggacacgttacattctaaacattcacagaacatgggcaacgtgatggtgaaactctgcacatccatttccccttatgagaccatgcacgacgaaatatgcatgccatgttgattgtggcatttcacaggaaatggggagcaaattaggtcatggaatcagcataccccattagagcattgaatcgccatttgcttcgaaccgcgccatgctccgttcggatcctagttgagcgtgaaaacttgactaggaacaacccttcaacttctgtgtccttctacagtgttggaattgtgtttatagaagggccagatgaccgtgaagccttggcatatgc

SEQ ID NO: 135436 - DNA, 303 bp, Glycine max
  unsure (1)..(303): unsure at all n locations
  Clone ID: PAT_MRT3847_93308C.1
cttaatttctctctgtctcgtttanacatctctccaacctttcactttcgtttctcagttttattcgaatccctctctcaatctcctttccaaatggccngcgttgnggttgcacagcaaacaccaacnacagttccanacaatgnaacanccnaagcaccaaaggaagaaaccaccgaggcaccancaganacagtaganaaaacaactacagangtagccccagaggagcctaaagnagttccantgagaccgaggaggtggtggcaaaggngncagaggaagagaagccagcagaagagt

SEQ ID NO: 135437 - DNA, 1132 bp, Glycine max
  Clone ID: PAT_MRT3847_93309C.1
gcacgaggattcttcaataatttagaagggaattgattatggcattggcagggatactatagcaatttctctcggccgtgtccgctcgtggggtatggtcagccgcatagagcaccagatttgcagaaagaagctatatatggattaacagaggttttaagggaggaaataaagaatgcacgtctagttgctaatcctggttgttatccaacttctgttcaacttcctcttgtcccattgataaaggctagtcttattgagcttaaaaatattatcattgatgctaaatctggtgtgagtggagcagggcgcagtgccaaagaaaatttattgttcactgaagtaactgaaggtctcaattcttatggtgttaccctacatcgccatgttcctgaaattgagcagggacttgctgatgcttcaggttcaaaagtaactgttagttttacaccacatctaattccaatgagccgtggtatgcaatcaactatttatgtggaaatggctccaggagtgagaattgaggacctgtaccagcaactgaagctctcatatgagaatgaagaatttgtttttgtgttggaaaatggagtcattcctcgaactcacagcgttaaagggactaattactgtttaatcaatgtttttccagaccgaattcctggaagagcaatcattatatctgttattgataatctagtgaagggagcttcaggtcaagctttacaaaaccttaatttgttaatgggatttccagaaaatttgggacttcattacctgcctctttttccatagagtagttgtcttgtccaactagagctccaattctgcagtcacagttccaccaaaatacttgatggagcagaggaaatattttcaagttatgtattttcgttctctagattgtaatgtgagattcttcaagaatttagaagggaattgattatgacattggcagggatactatagcaatttctgtcttttttgtcctttgttttgatctgtaatgttagaaatcactgaaggtggtggcgtgtagttttccaagtttgggttttggtttatttgtaatgccaatattttagtggactatgaaatcaccatctcaagtttttgagatttttgtttcaac

SEQ ID NO: 135438 - DNA, 225 bp, Glycine max
  unsure (1)..(225): unsure at all n locations
  Clone ID: PAT_MRT3847_9330C.1
ccccctattctgcnaagccgtctagctcattcgcgtagagcgcaaggctcttaaccttgtggtcgtgggttcgagccccacggtgggcgattttgtttttaagattttttttcttctaaaccttccttcacttgtgtatctatcctattaggttgtgtcagatccatgaaacaatcaaagctcctgacttctatcggactgctttagctctttataacatcttgt

SEQ ID NO: 135439 - DNA, 814 bp, Glycine max
  Clone ID: PAT_MRT3847_93310C.1
gaaaatttattgttcactgaagtaactgaaggtctctcgagccgattcggctcgaggcatcgccatgttcctgaaattgaacagggacttgctgatgcttcaggttcaaaagtaactgttagttttacaccacacctaattccaatgagccgtggtatgcaatcaactatttatgtggaaatggctccaggagtgagaattgaggacctgtaccagcaactgaagctctcatatgaggacgaagaatttgttgttgtgttggaaaatggagccattcctcgaactcacagcgttaaagggactaattactgtttaatcaatgtttttccagaccgaattcctggaagagcaatcattatatctgttattgataatttagtgaagggagcttcaggtcaagctttacaaaaccttaatttgttaatgggatttccagaaaatttgggacttcattacctgcctctttttccttagagtagttgtcttgtccaactagagctccaaatctgaagccacagttccaccaaaatacttgatggagcagaggaaatattttcaagttatgtattttcattctctagattgtaatgtgagattcttcaagaatttagaagggaattggttatgacattggcagggatattaaagcaatttctgttttttttttttttttttttatctgtaatgttagaataagtctcgaaggtggtggcatgtggttttccaaggttggatatcataaaatatttaacaataaaaaataatctaatttgaatacttgtggcaaaaaaaaaaaaaaaaaaaaaacccaaaa

SEQ ID NO: 135440 - DNA, 256 bp, Glycine max
  Clone ID: PAT_MRT3847_93311C.1
catccagcggggcaatccgcaaccactaaagagtgcaagcacagcaaatgatgcataagcccttggtgtcatccggcaagcaaaggataaattctagattattaacttataatattttgaaagcctgaagaaactcgttctatgaatggaatggtactgaatccatccatcgcataaaatgtactagatgctatgatctcaatatgatctcagaaattttgtttacattagcaatggacccgaaaaaaaaaaatat

SEQ ID NO: 135441 - DNA, 943 bp, Glycine max
  Clone ID: PAT_MRT3847_93312C.1
cggctcgttcgttcagctggtggagatgggtttagtggcaccttactctgctggaacatgtcttccttcccttcaacgccttccaaccctgcaagcccaaaaatggaacaacttctcagcacctcttagttgccaccgccaagtgaaatgtgctgtccaagtccaaccacaagtagcaccacgaattacacctgatgagagcctgcaggtgaagagaagaactctcataggccttctagcatttgatgctgtccttgcttattcttcattgcaagcagcaccagcagctgaaaatccgtgtgaatttcaagtggcaccttcaggccttgccttctgtgacaaacttgtgggagctggtcctcaagcagtgaagggacagcttattaaggcgcattatgtggggagattggagaatgggaaagttttcgatagcagctacaatcgtggcaagccactaacctttcgcgtcggtgttggagaggtcattaaaggttgggatgaaggcattataggaggtgatggagttccccccatgcttgcaggagggaaacgtacactgaagattcctccagaacttggatatggctcaagaggggctggttgtaggggaggttcatgtatcattcctcctgattcggtattattgtttgacgtggagttcgttagcaaagcatgatttacaaagccgtgagctggcaaattgccttcttttttgtttggagtttggagcttacatttcatatagtagaaattttataatttaatatcaaagtaaaaattacttgataaatgcatgactaagtaataaacatgctatgttgttgattatccagctttgatttcagtatagaaattgtagccgaaagttgaacagttatgagctacggttcagcactgaaaaaccactcctaagttcaaacaaagagaggaaataatactgaag

SEQ ID NO: 135442 - DNA, 251 bp, Glycine max
  Clone ID: PAT_MRT3847_93313C.1
cttatttcattgatttctccctcttcgctctctctcagtgaccagagacagatgatgatggagatggcgaacgaaacgctgtcgatgaggcactcgaggcgttggtgctactcgcagcgagtgtggaggtggatgctcaggagaactcagacgtaaaacagctggtgaagtacaagcacgagaagaaatactgcgacaaaggataggaatgtcaaggctggtccatttactgatgtaacctcgccattacc

SEQ ID NO: 135443 - DNA, 372 bp, Glycine max
  Clone ID: PAT_MRT3847_93314C.1
ttcgtttctcacaggtcgacgcaccttataacgggaagctaaaactatcggtacttgatagaaagaaactcagaatcacttcctactgagatgtgtactaatttgttaagggaaagataaatacttgtctgtgctggcaacagacttgtaggagcatttgctgtaccactcttagtttatctgttgagcactgttctatttgatatacgactttttgtgagagtaaagctttattctgtaactttttcagttctctgtctaatctcaagataaaggctggtgaaagaaaggattagggctcccactcttcatatgtgtgtttagacgtacacgggttgacttccactatggatctcctttctttcactctat

SEQ ID NO: 135444 - DNA, 355 bp, Glycine max
  Clone ID: PAT_MRT3847_93315C.1
aaaccattcaagcaatcacatcaccatggcacccaagatcgctatcgtctactactccacctacggccatgtgaagacactggcagaggccgaggccgagggcatcaaggctgctggcggccaggtcgacatctaccagattccggagactctctccgaggaggtcttgaccaagatgcatgcaccgcccaaggccgaccacccagtcctcaacgacccaaagaccctcgagcagtatgatgctttcctgtttggtatcccaaccagatatggcaacttcccagctcagtggaagactttctgggaccgtaccggcggccaatgggccaaaggaggcttctggggcaagtacgcc

SEQ ID NO: 135445 - DNA, 406 bp, Glycine max
  Clone ID: PAT_MRT3847_93316C.1
tagtaacatttagatagcttttctgacccttatcaggtattgcttttgtgaaatgaaattggacgtcaaaatggacaatatattcagttccggcatcaaagcgatttgctcaacaagaaaaatgcaagtaactttcaaatgacaagtaagaccacatacgcaagaatcactcacaaaagtaactactgaacaggatgctgattttttactctagtttgtgtcttcattttggtggagaagtgattatgactttttgatcgtctcatgggattcaacaaaattgattttttaatgactcttacgagtaacgattgattttcatattcaaacatgcaatccatatcagctaattataaaccgttcacatattacgggccaattataatgtgtctagcacatatcaatg

SEQ ID NO: 135446 - DNA, 430 bp, Glycine max
  Clone ID: PAT_MRT3847_93317C.1
ctataggctggaccctggcagacattcctggtattagccgatccacatgtatgcatcggataaatttagaagatagggctaaaccaataagacaaccacagagaagactcaactcgatgattcttgatgtagtgaagaatgaggtaaccaagcttttgcaagctagaatcatttatcctgtctccgacagccaatgggtgagtcccgtctaggtagtctcgaagaaaaccggcctcaccgtgataaaaaatgagaaggaggagctgatttctactcgggtgccgaacaattgaagagtctgcatcgactataggaagctgaaccaagttaccaaaaaagaccattttccactgccattcattgaccaaatgcttgagcgcctggtaggtaaatctcactactggttccttgatgggttttctggttatat

SEQ ID NO: 135447 - DNA, 639 bp, Glycine max
  Clone ID: PAT_MRT3847_93318C.1
gttgctatcaaaaccttcaatagctcccccacctgccaaaaaacctgttgtcttgaaggacaggggagcagccgagacaacatctgttaaatctaaagaaaagaagtcgcccatcttgattgataagtttgcttccaagaaaccggtagtagatcctctaattgcacaagcagttctagcccctccaaaaccagggaaggcacctcccccgggaaagtttaaagatgatttccggaagaaaggtgctatggctgggggaccaagaagacggattttagaggatgatgcaattcatgacgaggacgcatctgaactcaatgtctctattcctggtgctgcaacagctagaaaaggaaggaaatggagtaaagcaagccgaagggcatcacgactccaggctgccagggatgcagctcccatcaaagtagaaattctagaggttggagacaaaggtatgctggtggaggaattagcctactgtttggcaaccagtgaaagtgaaatcctgggttatctatactccaagggaattaaaccagatggggtacaaacaatagacaaagatatgggaaagatgatttgtaaagagtaccatgtggaagtcataaatgctgatccattcaaaggtgaaggttagtt

SEQ ID NO: 135448 - DNA, 306 bp, Glycine max
  Clone ID: PAT_MRT3847_93319C.1
ggggaaaaaaacccctccaatttatttatatccttaaaaaaatacccccccccccctttggcttattaaaaaataaagcccaatttcgaaaaaaggctttaattgaccgggggttcaattgcaccacccttttttttttgggcccccgttccggggaacttatttttgttggacaggttcctttaaacaacaacaacaaattttttggggggggcacctaacaactcaagggggggttttttttttaaattgcaccattgggggggcccaatttcctaattgggaaaggggtgaaaattacttttt

SEQ ID NO: 135449 - DNA, 1394 bp, Glycine max
  Clone ID: PAT_MRT3847_9331C.1
cgcgtccgtacggctgcgagaagacgacagaaggggagtgcagaggtgtaataaattggtggcaagtggcaaccggaaagccagagtgtgtggttccgtttgctgacctgacctcggaaatccaaagagggaaactcacggtgtttcgttgcgttgtgctctgctctgctcctttgggcctgggctgggctgggctgggctgggctgggcatggctattgcagcagcggccgtggtggtaccattgggcctgctcttcttcgcctccggcctccttgttaatctcattcaggcaatatgctatgtcgtcgtaaggccggtgtcgaaaagtttgtacagaaggatcaaccgggtagtagcagagctcttgtggctggagcttgtatggcttattgattggtgggcaggagttaaggtccaaatattcacagatcatgaaacctttcgtttaatgggtaaagagcatgcacttgtgataagcaatcacagaagtgatattgattggcttgttggatgggtttcagctcagcgttcaggttgtcttggcagcactctagctgtgatgaagaaatcttcaaagtttctgccggtcattggctggtcaatgtggttttctgagtatctttttctggagagaagttgggccaaggatgaaagcacattaaagtcaggcatccagcgactgagtgatttccctcttcccttttggctagctctctttgtagaaggaacgcgttttacacaggccaaactattagctgctcaggaatatgccacttccactggattgcctgttcctagaaatgttttgattccaagaactaagggttttgtttctgcagtaagtcatatgcgctcatttgttcctgccatttatgatgtaacagtagccatccctaagagttcccctgctcctacaatgctaagactcttcaagggacaaccttcagtggtgcatgttcatatcttgggcgtgtctggttgttgcggggtctgtaaagttcctgcaatggtcttcgttactctcttcctggaagggtgttgcattttcagcttttggtttggcagttgttactgcacttatgcaaattctgattcaattctcacagtcagagcgttcaaacccggccaagatcgtgcctgcaaagtcaaaaaacaaggggtcttgatttatttggcgaacttaaagttgcatttatgtgtgatgagtgactcatgtaatactcattattttgctttcaacatcttatcatagtatgcttctattctatatatgtactattatgaatgcttatcgattcattgtttttaatttaattaggatatccttttgtattgacagtctaggggatggcctagaaaaattcaaccacctattttattttactcttggcc

SEQ ID NO: 135450 - DNA, 148 bp, Glycine max
  Clone ID: PAT_MRT3847_93320C.1
caaagctgctgcaaactccaatcttcatcctctaacatacagcttcacataggttgtttccaacttcaaatctcacggctcaaacgtgcgggaccttgcagtcctctcagtaggatacaccacagggtttctaaagtgtagcaacttt

SEQ ID NO: 135451 - DNA, 1421 bp, Glycine max
  Clone ID: PAT_MRT3847_93321C.1
cttttttggtcaatttctgagggcaagagaggttctgtcaccgagacagcatgaagaaccaagcagtgaattgtcttctttgcagaaacagaagatgcaccctgccatgtatgaggatcatgttgctcttggttgccatgctacaagaaaattgagatgcagtgaaaggttgccgtcctttgttaaatctcggtcgtgctcgtgctgcaatccatgttcccccaacggaaatagattgacaggctcacacattatggaggcagaaaaatgtcctctggagaaaacaactgaaacaccagatgtatcaaccacaataacaatagctaagccatctggggatgagtctctcgaaaagcaagtttctgtaggtcctcgttttcaagcagaagtcccagaatggactggtgtattttctgagagtgactctaaatggttgggcacacatgtatggtctttgaaaaatgacactgaacctgctacagcaacagatgttgggagaggaagacaagagatgtgtagctgtgaatttcatggttctgttgaatgtgttagattgcatattgctgaaaataggatgaaattgaagcttgaattgggttctgaattttaccgtttgggatttgatcgtattggtgaggaagtttcacttcaatggacaactgaagaagaacagagatttaaggatatcatgaaatcaaatatttcctccaaaaataaatatttttggaacaatccatccaaatactttccaaagaagacaagaagaaacttggtgaactattacttcaatgtatttcttattcaactaagaacctatcagaatcgggtgactccagagagcgttgatagtgatgatgatgaagtagaatttggatctttcagcgatggttttgggatggacgctgtcaagggtcttggtgatgatttcctggagtgttctctgaacaagcagtgtactgatctcaaatacacaaaattagagtgcaaatttgataattggatctgagccactttgagcttgagaaaatattttcctgaggcaaacttgtataaaactcccttcctccatgatcagtggtgaatgcattactagtaccagaaaacttttgtatgatatgaggttagtgttggaacttggaagcaaatatggacatgtactcgagtcttgtctatagccataatgaagaacttgccgaggctgctattaattttgttggagatggttgtatctgttggttgaaatagcagtttaacatgatgcttcttggaggctgcactattcgtgctgtaaaactagttgtttagtctgagctaatgctttcaattttatgtttctagtcattattttgtaaattaaatttataaattttattcgtgacatgttttgactttcaaatcgaaaaactttttctttgcacaac

SEQ ID NO: 135452 - DNA, 179 bp, Glycine max
  unsure (1)..(179): unsure at all n locations
  Clone ID: PAT_MRT3847_93322C.1
cccacgcgaccgaagagaacgncaggagccggagcccacaatnggaaagcagggggaaaccgggctgnancaagagccagacagcgaacccacggcanacccnacancgagacagcaacgggcaccgcgaacaaaaacnganaaacaacaagcacgacgnacaaagggaaaaaaaccaa

SEQ ID NO: 135453 - DNA, 923 bp, Glycine max
  unsure (1)..(923): unsure at all n locations
  Clone ID: PAT_MRT3847_93323C.1
ttacgaagcgaaaccacccttctccactggtgccattatcgtaatcgttgtgggattcgtttttgacttggcattgttgttgttgctgtgtctccaacggtggtgaagacaacccatgaagttgtcaaaggtggtggtgaaggagcataatgtgttggcggaggcagggacgtcgttgtcgaagggggatatcatcgggggttcggtggaggtggaaaggaacaagcttgtgtccttcgaagggggaatttatctttctatcattttttggtacaagatctctctgtgaatctcattttcccaaaacatggtcatttttactagtcctgatttcccagcattgttgctctactatctctgtttcccaggggcatagggttttgataaaattatgtctagtgaaggaaaagaggtgaagaacatgaatagcattttcagcgagcaaatacttgtagacaagttgtccaagcttaataacacctaacaattcattgaaattggaaggttcttcctgcaacacttaacgatgttatcaagacaactgatgatcatggaaaacatgtggtttgtagattggtaagccctttttattgtatgtgatgcaagtatttcaagtgaatactttaatatgcatgtgatgtgaggaaaatggaaaaaaaatgttgatactgtgtgctctgttggtgaacatacaatagaacagagttacagaagtaacacctgaattatgactgctcttacctgtatggatgctggcttatgttttatttcccacatgttggctgacttgaaggacttcaagaaagtcaatgagatctatgctaaatgtgagttttgtggtagttatttaaatttttaatgtttccttnnnagttacattcttgtagaaggtgaagcttgnnntaanntgtttaggtgtaaaa

SEQ ID NO: 135454 - DNA, 284 bp, Glycine max
  Clone ID: PAT_MRT3847_93324C.1
gcgtccacgcgtccggtttggactatatggaaagaattcctcttgccacatctgagggttttcctcatgtgctttcacgcaaaaatggtgaaaaaggcatagggagatttgtttctggagatggtgaagagatgacattgagtccatgaaccagcgttgaagaggcttacaacaagctactagctgaactagagaaaagagctcctacattgattggcctcgaatggcccgaggatgagatgctacctggacgaagaatgttagacaaacctaatacgcgctgc

SEQ ID NO: 135455 - DNA, 398 bp, Glycine max
  Clone ID: PAT_MRT3847_93325C.1
atcaaatatcaatatggagaagaaaaatggtaatacaatcctattttttctctctttatgtcttggaattctaacatggaacgttagaataaagggtttcttgtcttttttgttttacttcaaggttgtgttcatttatgtctctcaaacatggaaggcatggaccaaaactagagttaataactcaaattgtgaacatgtgaagcagagtttggactacattgagagaagtgcaagagtgagcaaagaagacgtagttctggtgatggaaaagctgggaatcaatgctgaattatgtgatgatggtatagaggagtttggtttaaaaattattggggaattgtttgatgatgaggatgttaacttgtcagaggtagagcaagcctttgatgtgtttg

SEQ ID NO: 135456 - DNA, 242 bp, Glycine max
  Clone ID: PAT_MRT3847_93326C.1
gtcgagccctggtgaggtgaggcatatggcttcctcaatgatctcttccccagctgggaccactgtgaaccctgccggagccggcatggatgctgcatgggctggcctcaacttcatggctgcctgacacagcaaaaagaccaacagtgacattccctccattgctagcagcggcagtagagtgcaccgcatgcaagtgtggccaacaactggcatgaggaagttcgagactctgtactacc

SEQ ID NO: 135457 - DNA, 358 bp, Glycine max
  Clone ID: PAT_MRT3847_93327C.1
cccacgcgtccgatcacgcgtacgccaacgcttacgaaacatcataatctctatcagatacgggtgcgttgccaggatgagcttgtcactactcatccgtgttgctgggtccgtggcagcctatgaacccatggtgaagaccatggctcccaaaaacgagagtgaccaaaccatatgcaatgacatcgacacacataacctctgcaacagcatctgcagtcacgccgatgaccgttgtacaactaacatctgtcactcgcgagacgccgtccttaatgcttacactgcctacactgactgcgccagacgtgccaatcaagatgactccgatccagagccgcatctgctgtcgccattg

SEQ ID NO: 135458 - DNA, 315 bp, Glycine max
  Clone ID: PAT_MRT3847_93328C.1
agaaaaccatgggtagagggtgcttactttaatggatcattggggactaataaaatctgtcaaatctacatgtatttctttcatggtacgagaaggccaccgtttacaaggaaatcacgcctccaccctaaaaggaactgagaaggctattcaagaccccaacaactttatagtagcgctcgactgcaaagctgggggcctagattgacgagggaactttttggcgtctttatatgcatgcagagttccggaatacataaaagtcttggggtacacatatcataagacacctctgttactttggccacatggctt

SEQ ID NO: 135459 - DNA, 207 bp, Glycine max
  Clone ID: PAT_MRT3847_93329C.1
gggacaatcaaacccggcaatcttatatatatccatttctgctctctatgtggagacatagcacattgagccgatgaaaatgcaatgtggaagaggagtaagaacaaacaatttgcacaggctattcacaatcattataatcgaggggggaaatatgcaacaggtcacggctaccaaaagataatgtaacagactgcagctaaaggt

SEQ ID NO: 135460 - DNA, 717 bp, Glycine max
  Clone ID: PAT_MRT3847_9332C.1
caagaggcatttaatgaaggaattgccagaaacagatgaggctgttgctcaatggtgtcgagatatatttgtggccaaggatgttttgttagacaaacatatagctgaggactcttttagtgatcaagatttgcaggatactggtcgaccaataaagtctcttctggtggctcgagcttgggtttgtctggttgttgcggggtctgtaaagttcctacaacggtcttcgctactctcttcctggaagggtgttgcattttcagcttttggtttggcagttgttactgcacttatgcaaattctgattcaattctcacagtcagagcgttcaaaccctgccaagatcgcccgggcaaagtcaaaaaacaaggggggacaactagaggctaggaatgacaaacaacagtagattactcacttgattcccagaccccaaaagttttctatacaaagatagggtcttcatctacgatcatattttggcgaacttaaagttgcatttatgtgtgatgagtgactcatgtaatgctcattattttgctttcaaaatcttatcatggtatgtttctattctatatatgtagtattgtgaatgcttatcgattcattgtttttaaattaattaggatatcttttgtatcgacaatctaggatggcctagaaaaattcaaccgcctcttttattttaaaaaaaaaaaaaaaaaaaagggcggccgc

SEQ ID NO: 135461 - DNA, 2702 bp, Glycine max
  Clone ID: PAT_MRT3847_93330C.1
ggctcgagcagatccctgatttttatttttgtcatttggtgttcatgaaatctttgggctcttacgaaagttaaagcatctaatacaaactatacatcattgaaatgagagggcagatagatgtttaaaggatagctgaacacaacattaaactgatatcttgctttcttgggtagaatagtggctgaataaatttctgaaacagttcaatgatatagaatcctttgcatatgccttattgcatccttcaatgtaattgacttgggtaacgatgcttgcacgtccggtcgcaacattgacagatcttggtttcttatggtttagagaattctatttagagtcttcacgagtcattcagtttccacttgaatgctctcttccctggatgttggtggactgtgtacttgagtcaccaaattctggtcttctcgagagtgttctgatgccatttgacatctataatgattcagctcagcaagccttggtgttgctgaagcaacggtttctatacgatgaaattgaggctgaggtggatcattgttttgatatatttgttacaaaattgtgtgaaaccattttcacatattacaaaagttgggcggcatgtgaattgcttgatccttcattcctctttgcttccgacaatgcagaaaagtatgctgtgcaacccataaggctcaatatgctgcttaaaatgactagagtgaagctgcttggaaggatgattaatttgcgaagtttgatcactgaacggatgaacaaggttttccgtgaaaatattgagtttttatttgatcgttttgagtgtcaggatctgtgtgccatagtggaattagagaagttgttggatgtcttaaaacattcccatgaactactgtctagagatctttctgtagactcttttagtctcatgttgaatgagatgcaagagaacatttcccttgtatcattttctagtcgattggcctcacagatttggtctgagatgcatagtgattttttgccaaatttcattctctgcaatactactcaacgttttatcagatcatcaagaactgttcctgttcaaaagccatctgtacccttttcgaagcctagtttctattgtggtactcaagatttgaattctgcccatcaaagttttgcacgactcctaaacggattctttggaacacctcacatgtttactgttgttcgactacagggatcccggtaattaccttggcttattagagctcttcttgatcacatatcaaacaagattactttgcttgaaccaatgattacaggattacaagattctttgccaaaatcaattgggcttcttccttttgatggaggtgtgacaggttgcgtgagactcgttaaggagcatcttaactgggagacaaaatcagagctgaaagctgaggttcttcatggcataaaagagattggaagtgtattatattggatggggcttctagatattgtgttgagagaaaaggattctatggatttcatgcaaactgctccctggctgggcttgcttcctggagcagatggtcaaatagcaacttctcaagatggtggagacagccctgttgttagtttgtttaaatcaacagctgctgcaatggtttcataccctggctgtccatcacctacctctttccacattatgtcaaaacaagcagaagctgcagatcttttatacaaggctaacttgaacactggaagtgtgctggagtatgcacttgctttcgctagtgctgcgttggataaatattgtaataaatggagtgctgcacccaaaacgggcttcattgacatcacaatttctaaagatttctatcgaatatacagtggtctccaaattggatacttggaagaatctgcccaagtgccatcaaatagtcatgaaaggctgggagattcaattgcttgggggggctgcactataatttatttgcttgggcagcagctgcattttgagctgtttgacttttcatatcagatcctcaatatcgcagaagtggaggctgcatctgttatgcaaacacataagaactcacaatttgccgtgcagggatgggaagccttattggaagcaatgaaaaaagcaaggagattaaataaccatgtattttctatgcttaaagcacgttgcccccttgaagaaaagacagcttgtgctattaagcaaagtggtgctccaatacatcgtataaaatttgataacacagtttcagcatttgaaacactgccgcagaaaggttcttaaacgagtagtctagttgtagactgccagcaaattctgtgccttgttccctatacggtgtacatgtaactaagcggtgttgtattgtatgtaatagatactaagtacggtacgtatatgttcatgagccgagtttctatacagaggtagcaacaattttgtatttgataaaaaaaaaaatgtttgacataggtgttcgatttgaacaaactgttggacaatatttggcatgctcttatggaactaggtccaatctaagttctgaaccctacgaaaaaatacagaccaaaatattgttgtcagattacagctttagtggagctcagtcagttggttacaactgtcactagctattagttgtagttatcattggatttggcttggacaagattgtataaatacctttctcgacctctaatgagttttttaagccctttccccc

SEQ ID NO: 135462 - DNA, 292 bp, Glycine max
  Clone ID: PAT_MRT3847_93331C.1
tacgacaaaagttgggcattacctcttgaatcttataagctacccacgagggtggctacgcatttaaacttatacgaacgcttgctctatgacaagggcttaaactaattcccagggatgcttaaaacaacgatcaacatgggtgtatcataccatcaggcaaaccctaggagagggggaatgtgataaacatccgggattgtccatgagacttaacgtgagagacactcccatgaaggacctactccttcagggagggggaacatttataaaaacccttaacccagtgggg

SEQ ID NO: 135463 - DNA, 160 bp, Glycine max
  Clone ID: PAT_MRT3847_93332C.1
cctttcaatgcccaaacacctggaactgggcccgggaacttaccacctacaaccccagctggaacattaacatattttcggcacgccactgtgcggtgaccactaccaccaacagtgggggcatttccccttccaccacaaggtacaccaaccaactaca

SEQ ID NO: 135464 - DNA, 156 bp, Glycine max
  unsure (1)..(156): unsure at all n locations
  Clone ID: PAT_MRT3847_93333C.1
tttgatactctatatttggtnngaccatttattcaagnatnatctatagacgtataggatatatacgggggcagggggctagaactcccttcatgtgcggccgaataaaaggggcgaaactaaaatggattgttcacagctgagaccggggtgcgg

SEQ ID NO: 135465 - DNA, 211 bp, Glycine max
  Clone ID: PAT_MRT3847_93334C.1
cttcattgaaacaacggacggatagtgatggataacaatgctgaatctgagaatccgcaacggaaacggaaactgattgtaattcacgtagggtagtacctccgctacatcatcttaggcagctcatatcaagtctatctcaagtacactgttcctatacaacccattgctctcttctcatacttcatcattagctgtgcaacgaattctg

SEQ ID NO: 135466 - DNA, 246 bp, Glycine max
  unsure (1)..(246): unsure at all n locations
  Clone ID: PAT_MRT3847_93335C.1
gcgccctttttggagggggccacggaaacattgatcaaaaacattacggggaggtgaggcacttgattaaatatcccaaacaaaaaacattattcccatacggnagcgtgcaccatcacttcttggtaaaaataaacataaatatataacatgcatgaacaattaatttgacgggggggggaganaacacatcttcaaaaaaatgaccaaagcattagggaaggcacacttcggaaaaagaaaacc

SEQ ID NO: 135467 - DNA, 255 bp, Glycine max
  Clone ID: PAT_MRT3847_93336C.1
agggaaaaaaatagcaaacggggggttacaaattaaaaactctattacctacctcgaaatttttgctaccaatcgtactgcgtattgtttgcccacatacagggttatattttaaacggggacctactgaggaggattccagagagatgaaaagtgatctaccgactccccggctcttaatgaccttaagggacctactatttctagacctaagaccctacacctttttgaccatgatatgtatacccttttttt

SEQ ID NO: 135468 - DNA, 253 bp, Glycine max
  Clone ID: PAT_MRT3847_93337C.1
cagaatctgatctagctgatcctgcaaacaataattatgtgcatgacgtaacaaatgttgtgtctgagttgcagtccagagttgtaacaatttcagcacaggttgaggcagagcttactgaactaccagttgaagaacgacaagaatatttgcgatctcttggtcggacgtgaaagtggtcttggcaacctaataagggcaacatatgaccttctgggtctcagaacttactttacttctggtgagaaggaga

SEQ ID NO: 135469 - DNA, 396 bp, Glycine max
  Clone ID: PAT_MRT3847_93338C.1
gcgaacaaaatcttaacaaatgaaaacaagtggcttctcgccacattgatttggcaaatgttacaaaaaaaaaaaaatccgtaatttttgatttgtgaaaaacaggtaactttttttaataaattttttttttgattttgggatttattgtttattaaaggggtgttttaaaacctttttggccccaaacaaaaaattacccttcaacaggaaaaaggtttttcgccacgggggtgtcaaccccaagccataaaaaaaaaaaaaagatggtttccctgcagggagcaggcttgtaaaacaaaaaataacatttttgtttttaattttaggcgccctaatattgggaaaaaaaaagttttttgggatcacaagtgaaagtttttcaagcgatgattt

SEQ ID NO: 135470 - DNA, 469 bp, Glycine max
  Clone ID: PAT_MRT3847_93339C.1
ggctcgaggtttaggcggggcggcgagggtgctagacgtgaacctattccgggcggcgaccgcggaggatggcgacgacggcacgtcgttgtcgtcgtcgccaaacagcgcggtgtcaccgtttcagatggatttctgcaccaggaactgtaatgcagagttcggaggcagaaacaagagagagcagcaagaggctgagggtagagcgagtgatgacgatgaaaatggctccacgaggaagaaactcaggctctctaaggaacaatcagcttttcttgaagaaagtttcaaagaacacaccactctcaatcccaagcaaaaacttgctttggcaaaacagttaaatcttcgtcctcgtcaagtggaggtttgtgtttagaacagaagggccaggaccaagttgaagcaaacagaactgggttgtgagtatttgaagaaatgctgtgagaaccttaacagaagaagatta

SEQ ID NO: 135471 - DNA, 1593 bp, Glycine max
  Clone ID: PAT_MRT3847_9333C.1
tttttaacttctacctccactttttcgcccacgcgtccggtggttccgtttgcggaaaatccaaaagagggaaaagaacgttgttctctctgttaacgacaattcgattccattgggtgctgctgtgtgtgctctcagttcccaaatcaaatctcaatagtagtactactattcataaatcatttcatttgttcactttctctgtgttgcgttctgctcctttgggcctggccatggctattgcagcagcggctgtggtggtgccattgggcctgctcttcttcgcctccggcctccttgttaatctcattcaggcaatatgctatgtcgtggtaaggccggtgtcgaaaagtttgtacagaaggatcaaccgggtagtagcagagctcttgtggctggagcttgtatggcttattgattggtgggcaggagttaaggtccaaatattcacagatcatgaaacctttcgtttaatgggtaaagagcatgcacttgtgataagcaatcacagaagtgatattgattggcttgttggatgggtttcagctcagcgttcaggttgtcttggcagcactctagctgtgatgaagaaatcttcaaagtttctgccggtcattggctggtcaatgtggttttctgagtatctttttctggagagaagttgggccaaggatgaaagcacattaaagtcaggcatccagcgactgagtgatttccctcttcccttttggctagctctctttgtagaaggaacgcgttttacacaggccaaactattagctgctcaggaatatgccacttccactggattgcctgttcctagaaatgttttgattccaagaactaagggttttgtttctgcagtaagtcatatgcgctcatttgttcctgccatttatgatgtaacagtagccatccctaagagttcccctgctcctacaatgctaagactcttcaagggacaaccttcagtggtgcatgttcatatcaagaggcatttgatgaaggaactgccagatacagatgaggctgttgctcaatggtgtcgagatatatttgtggccaaggatgctttgttagacaaacatatggctgagggtacttttagtgatcaagagctgcaggatactggtcgaccaataaagtctcttctggtagttatatcttgggcgtgtctggttgttgcggggtctgtaaagttcctgcaatggtcttcgttactctcttcctggaagggtgttgcattttcagcttttggtttggcagttgttactgcacttatgcaaattctgattcaattctcacagtcagagcgttcaaacccggccaagatcgtgcctgcaaagtcaaaaaacaaggggtcttgatttatttggcgaacttaaagttgcatttatgtgtgatgagtgactcatgtaatactcattattttgctttcaacatcttatcatagtatgcttctattctatatatgtactattatgaatgcttatcgattcattgtttttaatttaattaggatatccttttgtattgacaggataggggatggcctagaaaaattcaaccccctattttattttacttttggcc

SEQ ID NO: 135472 - DNA, 171 bp, Glycine max
  unsure (1)..(171): unsure at all n locations
  Clone ID: PAT_MRT3847_93340C.1
tggaacttcaganggcgccaanatcagancctctcccagcggaagggccaganacggaagcttcgacgaggatcagcaccacgatgaccgccatatcttaccggcgccgcccaccgccgacgagcgcgccgnactcctatccgacgtcgccgaacagttgancatcctcga

SEQ ID NO: 135473 - DNA, 480 bp, Glycine max
  Clone ID: PAT_MRT3847_93341C.1
tctcgagccgaatcggctcgagacggctgcgagaagacgacagaaggggataataacatattggctgactcaagggtacacctaatcatggtctgctgtttcaagccccttgttcttcaggcctactgatgttgattgggcatttgaccccgattttgggatcttcacatatttgttttgcaaattcttttggtctcggtggtctaagaagcaaactttggtgacccaatggagcaaggagggagagcatttgagtttgacacatacagcggaaaaaaatattatgtctgcagtctcttctcacagaacttggggttgaattcattacaactactatcctatgtgacaatctcagtactgtgtcactggctcataatcccattcttcatgctagaacaaagcttgcggaacttgacctattatatttaggtttttacagttaggtacagttactttagaatttagatctgtctatagtta

SEQ ID NO: 135474 - DNA, 570 bp, Glycine max
  Clone ID: PAT_MRT3847_93342C.1
ggctcgagtccagagattcttttattcattcatttatttgtttgtttattttttactctaacatggtggccgcatcttgtttggttggctatttttcttttttgctgtgtatatctgaagggtagaaacttgttgttttgagcccctggagaaacagagaggttctgcaagcacttctctggtggtggaaaaagcactattctggggagtaggtattgttagtggttacaaacagactttaggatttgagaactagcgcataccgagctcgctaaggttagttactgctatcatttctccctgtcacagcatcttcatttgattgatatttgaaggaatttgaaagcatgaaagaatttgagaagagaaaagcttcaaggaatagtcagacaaagggttcaagaagaaccgaaaggagagagaataaattgcatcaagataattcttccaaaacattgaatgaaaaaggaactgaatctaagacaccccaggatagtagaccaactgcaaataattttataagtgattcaaacgcggcctcagagaattcagaaacttatgaaaatgtga

SEQ ID NO: 135475 - DNA, 331 bp, Glycine max
  Clone ID: PAT_MRT3847_93343C.1
gattaacccaccactttcctatcttttttaaatagaacactcttctattatgggggcacatgatatagaggggcattcttccataacgattcctatcatatatcattccaatgtcatatcacatcataattcacctcatctgcatacacttcttcaacacttaaaccgattaccatctaatcatcttttaacacttttaatacgcattataccatgctatcttgatgatcatgccatattttacagtctaacaataatactgattctttattcaaatcctgatttaaattcttcattcaatcatcattgccttaattatcaatgcaaattt

SEQ ID NO: 135476 - DNA, 1525 bp, Glycine max
  Clone ID: PAT_MRT3847_93344C.1
gtggaatttgagtacaatgctatagctaaaaaatgggaaacaattcaacttgaggaactcaagattgatagggacgagtacctcgttgttacctgtttttatcgtggtaaaaaatgtgctggatgaatctgtggttgtggacagtccaaggaataaattcctcagtttgataaggaagatcaacccgaatatattcattcatggcattactaacggggccttcaatgcgcctttttttgttactcgattcagggaggcactgtttcactactcttcactctttgacatgcttgaagccattgtttctcgcgaggaatgggagaggatgctcattgagaaagaaatatttggtagggaagcattgaatgtcatagcatgtgaaggctgtgagagagtagagaggccagagacatataggcagtggcaagcccgaattctaagggctggatttttgcaacaaccttttgagcgtgagatagtaaagagggcaatagagaaagtaacaactagctaccacaaggattttgtaattgatgaagatagccaatggttgttgcaaggttggaaggggcgaatcatttatgccctttcttgttggaaacctgcatgactaaccaagatggtacaagtgcatctcactcgggctttgtgaattagtttgacttctgaggagctcagggttcgagatcaaaaataaggattcaagctgtgagttcagttgaggaaaacatggctacttaatagcctggtatgaaagtagataatctatgttattatcctatagatcatttataaagtctgttgtgtgatagctaacttgagggctgtcaaatgaacatgatccaatctaatgttgcagatgaatttagcatgtaataagatcaaacctttattgctgttactcattttgagctttcaacttcaatgcttctgatagtttacttaactgaaggtaatagcttgtgtatttcatcttttttgtatttcatcctaacaattaatggaagatttactttggagaaatacttgttgcacagcagatggcatgttactattctagctgtaccaaaagcaaaaagtttgactaggtccacgtagcttagatgctgcaattggttcaagtgtggaagtgatgtacaaacagcagatctcttcacatttgcttttgaagacttgttttcaacatttgacccataatgggtggtgggggcctcttgttgatacagattttccttgttgaataatgtatgattgtaatctgacttgccatatggtgtgcatttactacatatttggacctataaccaaatctatagttggtcacaccattcatcatttgactttccctttggtggacagctgatgaaagttgttctttggaacagtggtggcacgatgacttgaacatgcccctaggaagctattggaaatcttcaccactagctcattgcttgtaacttgtagctattgaaagtggatcaaaagtaaattctattttatacattttgttctcacaatttgttgg

SEQ ID NO: 135477 - DNA, 177 bp, Glycine max
  Clone ID: PAT_MRT3847_93345C.1
gacaccaaattttgcaacttggtttccaattgcgtgtacccatgtcctcttttctctccttatcagtctctgctccctcgctcgaggattcgtccttcctccatggaacatagctctttcccttctctcgatcagtggtaccacgccgcttcagctcttcctctgccaggtgctccc

SEQ ID NO: 135478 - DNA, 746 bp, Glycine max
  Clone ID: PAT_MRT3847_93346C.1
ggaaacacacaaacattatttatacctccattagccacccctttattatttcaggtgttgggtgggggtatgtacgtgtatcactgctcttactcaaatcatcaaagccgccactaacctcatacacacaatcgaaaacatggcatcttacgagggaaggccattggtgatggaaatggaaggagaagaaggtttcgaagaagccggtagcagcggttgcggatgcttccggtgtttcagcctgaagaaatggtggcaaggctatgaggaagaaggtaaagggctacttgatcaaaagggtgagggagagtcatgggtgggtgacagattatgatgggcaaaggagaagtcagaagtaattgctgagctcaaatgggagacttcattagaaagataagtgggtatgggaagaaggtgaagtaccaaagaaacaggttccagtatgatgaacatagctatgctctcaactgcacaagcgaagctcagagagaagatgaaggcatgcctcacagcttatgcatcaatgcctgctgcttcctgatctaggtttgctgctcctggtagtcgccacaagcatgttttttacatatagttatctagaaacaggatcgaacctttaaacatgtaaattgttgcctaaatttgtttacatgattgtaattcttatcttgtaattatcattcgttgtgtgaagagtgaagaccaatattgttctttaataaattaaattccaccggtttaaaaaa

SEQ ID NO: 135479 - DNA, 276 bp, Glycine max
  Clone ID: PAT_MRT3847_93347C.1
aatgggggcaacacattcatatccttccattcatttatggcccgaaatataaaacttaaagaaggattctgacaaaaatattttttttaaaacaaaagcaatacaacggcataacttttaaaaagataaaagttgaaaattttcttaaaacgatatcatcatcatctgaaaattatacatagaccaatgcggtgggacgtacctcacacgcatcgaactaaacacgtggagggaggaaattggcatattcctcgaacctggatatgaaaaactttg

SEQ ID NO: 135480 - DNA, 582 bp, Glycine max
  Clone ID: PAT_MRT3847_93348C.1
ccacgcgtccgcgtccggcggaggttgaatagaagtggtttggtgtttgcgcgttcacttgtctcccctcccctcctgcaattacccaagcgatctctctctctctctctttgttacctaatctatcatatcatgaaacgctcaaacgacgacgtcgccgcccccgtctcaaccgccaagccagtgttcttaaccaaagcccaacgcgagcaattggctctccagcgccgccacgaagacgtcgccgaccagaagcgccgccaggaacagctcctctcccgcaaccactcctccgaccgcgacagagacagagaaagggacagagaccaccgagaccgggaccgtgatcgtgaccgagaccgggacagggacagagaacgcgagcgcgagagggcacgcgatcgggaccgcgaagccgaacgccgcaacagagagagggagcgcgaagaggagacccggtcccgtgaacgtgcccggttggagaaactcgtggagcgtgagcgcgagaaggagctggaatccatcaaggagcagtacctgggttccaagaagcccaagaagcgcgtcatcaagcccagcgag

SEQ ID NO: 135481 - DNA, 342 bp, Glycine max
  Clone ID: PAT_MRT3847_93349C.1
tgactgctcggtggccgcccttttttttttttttttttttaaaaagttaaaatttcattaaattatactactacttacaacatgatatgatgacatattggtgaatcccaaaccaggtatccttcgccatgtagtagcgagaaatgggacattatggatcgccttatctcaaaaggcatggtcattacactaaaacaggagctcatcatgtctagtaactagactaatgatgtgtcccttgttttttactcagtggaaagtaaacaaacaacagacgcaaatcgcagctaacgcagaaaagtgacccccatggtgtcatcttgggatccacccaagcttcat

SEQ ID NO: 135482 - DNA, 219 bp, Glycine max
  unsure (1)..(219): unsure at all n locations
  Clone ID: PAT_MRT3847_9334C.1
acgccacgcgtncggaaaggcaaataagtctaagtcaatattggcttggcaaaacaacaagaacttaatgtgggggccttgaaaacatttattaaaatggttttattattccaggccagaaccggccgttattccttttgggaggtattaaccaaaataagggcttgctttttgtggaagcaatcctttgggccgaaaaaagggtgaaaaagtggatgc

SEQ ID NO: 135483 - DNA, 659 bp, Glycine max
  unsure (1)..(659): unsure at all n locations
  Clone ID: PAT_MRT3847_93350C.1
cggacgcgtggngaaaaaaaaaaaaaaaaaaaaaaaaaaaaaaaaaaaaaaaaaaaaaaaaaaaaaaaaaaaaaaaaaaaggagcctacctttcggagggcccctttttggggaccccgagctttcctactgttgtccattcttattttaattgcctctcttattttatttccttgcgccgtttttattcaaacgtacttttttgacaaaaactcttgtgggaaaccaacttgagcccccttgcttaacactccttttttcacaagccggtttagtcaggtggaggcccccaccaaaggcccttcccaattgttgctcccaacggttgctgaatgggaccccccttggggccgcgccttatgcgggggcgttgagggggttacccgctgggttacccctccacttgcccgcttctttgggcccgctctttttgccttgtccctttcgtttgtccccttcgtcgccggctatttcgggggattttttaatggggggttttttttgggggtcccttttagggctccacagaacttctttccgaaaatatttgcttaggagggtggttcacgtggtgggccaacgtcctgggccatgggtttgcgtcctggttcttaggccttcacctttttagtagacgtttttaataccgaactgtagca

SEQ ID NO: 135484 - DNA, 166 bp, Glycine max
  Clone ID: PAT_MRT3847_93351C.1
ctcgagccggctcgagctacttcagcttcaactaacgtattgctttttatagataaatgtctgtgactttgtgtaaagtgttgtgccagtggatatagatttggcttaggctttaggaacacatggatggatcgtgcaaatgcgatgaagtgatttgttttaagaa

SEQ ID NO: 135485 - DNA, 1075 bp, Glycine max
  Clone ID: PAT_MRT3847_93352C.1
atcgtgctggaggcggcccatgcataagccctgcgccgttatcccggtctacaaccatgaggccgccgtgcccgctgttctcgaagcggtgctcgccgccggcctgccctgcgtgctggtggacgatgccagcagcccgacctgcgcggcggtactggaacaactcgccgaacgcgaacacgtttccctggtgaaactacccgtcaaccaagggaagggcggcgcggtcatgagcggaatgcgcgaggccgcccggctgggcttcagccatgtcctgcaggtggacgccgacggccagcacgacctgcaggacatcgcggtctttctcgacgcctcgtgccagcaccccgaagcgctgatctgcggctacccgcaatacgatgacagcgtgcccaagggccggctctatgcccgttacctgacccatgtctgggtctggataaacagcctgtcgttgcagatccgcgactccatgtgcggcttccgggtctacccgctgccaccggtgctggcgctgatcaattcggtgaaggtgggcaaacgcatggacttcgactcggacattctcgtgcgcctgtcctggcgcaaccaacccatgcgctggttgccgaccaaggtccactaccccctggacggcctctcgcactttcggatgttccacgacaacgcgctgatttccagcatgcacacccggctgttcttcggcatgctggtgcgcctgccgagcatcctctggcgacggtggcgggcatgagcgacgcacaaaagcattgggccgaccgccaggaacgcggcagcttctggttgatgaaactcaccgccttcggcgtcaaggtcctcggccgccggatgctcagcccggtgctgcacggtatcgtcctgtactttttcctgttcggccgcagcgcccggcagagtgcctggcactaccagcagcgcctggccgactggagcgctcaaagcgccctgcggccgacccgcatgaatgtcttccggcagttcatggcctttgccgactcgttgctggacaaactcgatgtgtgaacggcaagctgcgccttagcagctcgagatc

SEQ ID NO: 135486 - DNA, 1042 bp, Glycine max
  Clone ID: PAT_MRT3847_93353C.1
ggctcgaggcaaatgcgtgcgtgccacttgatcaaatgcaatgctattccactccaccctctacacacggctcaaaacacaaccctgttactgatgccatgtcataagtgcttcctctcctttccattttcttggttacaataataccattgcagagttccttcgcacttttcagattctcacgattcaaaatcaccactcgctacgcaccgtttcgatcccgtggactcttcttcgggagcttcagagaggaacggagcagagttcgaagtgcacactctagctagcgcttctagaagatgtcactttatattggtaatctgtcagaacattctcgaagagatgatctcgagcgtgttttccgtcgatttgggcattgtaatgttcagctgaaaagaaatggctatggctttgtagtatttgatttccctcccgatgcggaaaaggctctgagagcactgaaaggtagaaatatatgtggtgaaccgttgacactaacatggtccaataaacagcctagtacacatttttctagaattcctagtggtggcagaagaaatgtgtatgagttacaacatgcgaggaatcctgaaagagtcgggtatgtgagaaggagatctggtttcagcgggtggtcgaatcagaagatgggaaggggaaaatctgtggaaatgcccagtgaggagaggggatatcgtcatgatgattttaaagattatgttggggaagaaaaaaaatttgggggagactttccctatgaaggcggtggagttgttcctaacaaggaggatgagccagttcatgacccgttagttgacaatgggaatggaaatgctatagaatttgatcgttatgaaccttaccagggcaatgataggaagcatgacaatgaagattatcatgtcggttactctggtggttctcctgcagcccattccctagagaatgtgagcagagccattggcgaggatacctcaaatcgtccaaatgggtcaaaattccagcaaattttgtttagatgtggtgatcctggtcataaaat

SEQ ID NO: 135487 - DNA, 363 bp, Glycine max
  Clone ID: PAT_MRT3847_93354C.1
atctttttttttagagagcgagaacaccctgcatgatgtgaggaccctgagcatacaagtacatgggggctaaagtacaggccttagtgacgcatagacgtgcctactgactatgttattcagacgtgcaccataatatggggaaccgcttctctctccatgcagatagagatactgggagagaatccctatgaaggctaacccttgatcacttgaactatggaccaaagggtttggcaactgaactgacccacacaggttgatgagactgggatcactgctccttgcgttgatttgacatcaattacacagaagtttgctaccatacctgatgaaagcttgtaatgcatattgataaggcgt

SEQ ID NO: 135488 - DNA, 172 bp, Glycine max
  Clone ID: PAT_MRT3847_93355C.1
ccaaattgatggaaatctacttcccacaataaaatttattgatccattaaaaatcccaaatattccggccccgttggggggttgttttttttttgggaaccaccctgctattttgccttacggggttctttctcactcaaaaagggccaagaaaaagatttatgacaacctg

SEQ ID NO: 135489 - DNA, 371 bp, Glycine max
  Clone ID: PAT_MRT3847_93356C.1
cgggggaagagtatccagcagcaatggtgtacgtcaaggctcagaaatcaaaagcctacttcaagagatatcaagtcaagttcaagagaagaagagagggaaaaaccgattaccgtgccaggattcggttgattaatcaggacatgaacaaatataacactccgaaataccgatttgtggttcgctttagcaacacggacatttgatgcacaaataatatttgctagcattgccggcgatttagtttttgctacagcatattcacatgtgctgccacgatatggttttgaagtttcgacttacaaaattttgcaatagctttattgcacttgttttccgttggcccgaatgtgtcttaaaacactttaaat

SEQ ID NO: 135490 - DNA, 395 bp, Glycine max
  Clone ID: PAT_MRT3847_93357C.1
ttggatcccttaaaacgggccgcccttttttttttttttttttttttataactggtttccttgttgttttttaaaaagaagaaaccaccctttttagcctttttcttccgaccctttatttaaaaaaaacctttttttcaaaagggtttaggaccaaaggttggcaaaggtttgacaaactaaaaggtttttttaggccaaaccccccatggcccaaaatggtccaacccataaaacaagggccactaaaaaccatttttttgaaaaaagaaagcctcattttattaaaattaagatatttcgaacctctgtccctaaaaggcggattaatcccctttaaagttacccttcccctgttagaataagacccgggggtggccccgggatttcggaac

SEQ ID NO: 135491 - DNA, 1139 bp, Glycine max
  Clone ID: PAT_MRT3847_93358C.1
accagagcgacctggaatgatatgatatagaaagagagagaagaagaaaagaagaacaaagatgcaatcctcaaaggagaagatgaaaaacatggcaagtgctgccaaggaacaagtcgacatctataaagccaaaatagacgagaaggcagagaaagcaacggcaagaacagaagaggagagggtgatagcccatgagcacgcaaaggcaaaggaagctggagcaaagatggagctgcatgaagctaaagcaaggcatgcagcagagaagctaagcgccaaccaatcacattatggtctccaccatggccacaacaaccctcccttagtaggaacaactcagactcactaccagcaagggcaccagcaccagccacttggggcagttcctatgcctggaaccacttatccatcttatccactaggaggaaaccctaaccctccaaggaacaaacatatataatagatctatctgtgttttgctgtagtacgtctacttcttgtgttattactcctaggagtttctctttgcagacatgaaataagaagggtttcaatttagtctgaatccttccatgtatatttgagagtggctttgatttcagtgaatgtttccccttttgtattaattcaacaatctttaaacttcctagctggtagcacgggtaccactagccattttcagtggttgttatgcctggagccatttatccatcttatccgctaggagcaaaccctaaccctccaaggaacaaacatatataatagatctatttgtgttttgcagtagtctctgtacataagtctgaataagaggggtctgattttagtctgaatccttccatttacatttgagagtggctttgatttcagtgaatgtttccccctttgtaataattcaacaatgtttaaacttccagattgtagtatgatacatttggggtgtcactaggcatcaatatcatgaaggtagaatcgtgatatatatttatatatgtatgtaacctatgcaacaacgccctgtagtacgggggtgtttcttaaaattttggagttagcccaaaacaaaaaaaaaccggcgttgttaaaattaatattatataattgacgtgtgcaattggaagcaaaaggagaatata

SEQ ID NO: 135492 - DNA, 490 bp, Glycine max
  Clone ID: PAT_MRT3847_93359C.1
aaaattaaattaataaatatattaacttattcttaatttttgaaatacacaaaggttcattggatgaaaaacaaattattgataaataaatacctcaccaaatattgaattgcatctgggacacattaacgagacattttatacttttcttcatatctaatatgaataaaggttatttttcaaaatttacaacagcttaaggagatagtttgaaaaaaaaaaaggattttgaaaaggaaagagatttaaaataaataagtgggtggaaaacagcatcagttgttacaaatagattcattcagttcagggatctttagtttggatgtatttgatcagatcgataactctgctggagtatccgtattcattatcgtaccatgaaataagtttaacaaatttgctgttgagtgggattccagccttggcatcaaagatggatgagtggttgtctccgaccaagtctgaagatacaacatcgtcttcagtgtag

SEQ ID NO: 135493 - DNA, 622 bp, Glycine max
  Clone ID: PAT_MRT3847_9335C.1
ggctcgagtttctcgtttcgttcctctttgcaagcttcagctgttggttcgggtatggcttcaacggacgtcagagacattttgacagctttcaatccttcactcgacttcttcgctattaccgccggagacggtcgcgtcaagatatgggacacactgaggggtcaggtccacaccgagttcgccgatattacctcaactcattcaactgctactactttacatcataaatcatccattaacggccatcttgcgctagattatacttgcatcaagtggttctccttcgacaaaaagaggaaaaggaagcatatatcctccttgttagtgcttggaactggtggcggtgatgttttagcacttgacatcgcttctggtcaattgacttggagacttactgactgtcatcctggaggtgtgagagccattgcatcttcagcaaatgtgtcaaccatttatacggctggtgcagatgggatggtatgtttgatagatttcatgacaggaaacctgttggagaaatttaaagcttctacaaagccagtatcctgcatgtctgtttctccagatgggaagacattagctactgcagcagcacaattgaagatttttaactgttcta

SEQ ID NO: 135494 - DNA, 519 bp, Glycine max
  Clone ID: PAT_MRT3847_93360C.1
ctcgaggacctttgagttttgaagcggtaagaccgaagatgaacgaagcagcaacttacatgaagcgtcgcttttgctgcttgatgtgggcccgtcaatgcatcccgctctttctgaaattgagaaagtctgctccatgcttgtgcagaagaagctgatctatagcaaatatgatgaagcgggaatagtcttatttggaactgaagacactaataatgaactcactacggaagtgggtgggtatcaacatgttgtgattttgaaaaatacttaagttgtggatggagatattgttgaggctttacataactgcctccaggtacaactgatggtgattatcttgatgctgacattcgaggcaacgatatgttagtaaaaatattcggagtaacaaacaagggaaagaaacgtgtgtcttattagaaatcgcaaatgtcgaataaaagaatttgatgaacgaacaaaggaagagcaagttaccaccattgccaaacaaatgactgcccatggtataaaaat

SEQ ID NO: 135495 - DNA, 325 bp, Glycine max
  Clone ID: PAT_MRT3847_93361C.1
agaggcacacaccttactcgactcaaaagatcatcatgattggatcatctcatagggaggacagttaaacatacataatacgttctcgaaacaaccgtatgcatggcaaccaaaccacaaccagtcatcgatgacgtcaaaatcgatctcatccaacacgatcatcactaataatagtttgaaatcaatgaaaattgcgatgacaatgatgaacgcatagaagtgactcagcattaagatgatcattgggatgattatgaaattagccataagtgctcaattcaatagaacaagtatctgcataacaacactaataataattaaa

SEQ ID NO: 135496 - DNA, 134 bp, Glycine max
  unsure (1)..(134): unsure at all n locations
  Clone ID: PAT_MRT3847_93362C.1
ctaatgtggagtgatcctgaagatattgaaacatgggcagtcagtccccgtggcagcaggttcggcttttgtggatcgagggggttacttctagagttcaagtcacagtaaatagatctagggnatcttgtttg

SEQ ID NO: 135497 - DNA, 635 bp, Glycine max
  unsure (1)..(635): unsure at all n locations
  Clone ID: PAT_MRT3847_93363C.1
aaaaaaagttaagtctacagatgaagattgaagagtagttgtgcatgtgttcggtttttcttaatttttttttttttttttttctcaacacttcatgagcatattctaaaacaccaaataggttcacatatacacatgcataacacatctatttgccagttagcaacatacggtactgagattaactgcttccttctggaggaatatttctataacaccaccatgaaggtgcagtaaaccaggtgtatgtccaatggtctatatcaccatggaagcaaaacggctcgccatcctcattgccaagcctgaaaatgccccaattgcttacgtcagtcctattggcgccaaaacgggttaatataccttttaaatgatcagaatcccattcattccaccaaggaacaattggatcattgcagaaaaaaatgctggtttctaattccagctccaagttccattgcagagaaggatgttgaggaacatttccccaaaaaatcattttgatcccccaaatcctcaaccttcttccaagataattgacaaaagtccaatgaatatacctcgaaattttanggtctcaagcaccgcatcttggttgggtactaaaatatctacaaacaagcaaaagctcccca

SEQ ID NO: 135498 - DNA, 207 bp, Glycine max
  unsure (1)..(207): unsure at all n locations
  Clone ID: PAT_MRT3847_93364C.1
tttttaattgtatgcataaattgcagtacacaagagatgcgcntttcaagtttatcactttcccacttaaggacggaacaaatggcgaaaattattttgcgatggacgtgaaacttattcgaacttgccatcttggtgctttccttacaacatccccccagggatcagcaacactgtgaccgaagaatttatgtacataataatcta

SEQ ID NO: 135499 - DNA, 582 bp, Glycine max
  unsure (1)..(582): unsure at all n locations
  Clone ID: PAT_MRT3847_93365C.1
tgcacctccgtaagctcggttttctcttattttcttttttgttctgtattgtaattttttctggcctatgancaaagttaaccaacattcgattccattctttctgtttcctttcttcttccaatatctgtccttgtatcttgttttgcaagtaaaacaagaacagccttatttgtacatattttggaaacttcattatttgacagtatattcacacagttgaatttcaatggggaaaggaggtggttgctttccaagcaagacaaaggcaccaatttctggagcacaaaaggatccagttagcgttgaaagtctaatcccaagagatgatccaagtaacacaagtcaagaggtgccagcaccagcacctgaagcagtgaaaaagctgaaagttttcattgtgttctactcaacttatggccatgtggagtcattggcaaggtccttgaagaaaggggttgattcaattgaaggagttgaaggggtgttgtaccgtgtgctggagacactgccaaaggaggttctggaactcatgaaggcacctgagaaggatgagacagtgccactcatatctgcagacag

SEQ ID NO: 135500 - DNA, 242 bp, Glycine max
  Clone ID: PAT_MRT3847_93366C.1
ctccattcctaagccaacattctccgctacgaaatccgaggtttacggtgccaaccgccccacctaccggccccaaccgtaacaccaccggcgacggcgtagtcgcggttgtgcctccaccccctgctgctggctcctactgatcctcctctgcctactcctactcgtcagtgccggcggcaccgagctatactttctgtaccggtcccaacgacccacaatgttccgttacctgcctaaag

SEQ ID NO: 135501 - DNA, 1371 bp, Glycine max
  Clone ID: PAT_MRT3847_93367C.1
aatcagaaatcagaatgatatatacagaatttgtactgtcaccttgtttactctatttaaaactacacgtatacatactgtctttgactatacacaggaatttaagtattactgcagatcatgcatatattatatagtagcaggatcttgtatggtatagggggtgtcctctctgtgaggattttgatctagtgtcctataagtacaaaagaatgaggcattggaaaatagcaatggactaaacgatgtcatgatggatgagaaattcagtgatacatggatacagttgatctgcagccagacgaccacccactaagtcatagtgggcatagtgtggaccaccaggctccccaaagactttgtatgtaaccaattcttcaggaataagcttcaccgtttcatatacagcttcaggagggcagattaagtctcggtcaccagcaattgctaagacaggaacattacttttgtggagatggtccttgtagaagaatgttccactcctgtcacgtaaaccacctttttggaaaactgatgataactgcaagagaagcttggaaggtacggtatcgaagttgttcaaaacaagcttctcaaatagattttggtccatcatatcttgagctgaaatctgagaatttagccaagaaaaaacatatggaggatagcttgcaaggggatgaacagtagccatcaatggcccaactggaataacaggaatgttcaaagctcgagtaggttctgccaggggtaaaagcaacttgagagatgatcttgaaggggtatagtcaagtgacgatgccaaagtgccaacagatgccaacccagaatcctttccatcaaaacaacaacttgaaagctttgcatacaacaagataccccccattgagtgaccaattgccagcaattttccatctcttggttggcattgagcccttatgtactccatctaatgtacgaatgtatgaaatcaacaattgaaaaactaatttaattaaaacatccaaaaaatttatgccaatatataacaaacaaatattaacattacaccaaagaagtaacaaaatagttaaaagtacagatcttgttaaattaaaagtaatgtatcccaaaggaaagtcatctcacggcagcaggtaagtcctcttccaaataatggtcaaagtcccaatcatacttgaccatcagctcaagctgtttctggaactcttctagagtggcagataaacggtcttgcaattctaaaatctgtgctgggaacagccgctgaccttcaatcatacctcgaagtctccgattgaaatccttgatttgaccggcaattgcagagttctgtccttccaacaaatctccattgagcggacgcgtggg

SEQ ID NO: 135502 - DNA, 283 bp, Glycine max
  Clone ID: PAT_MRT3847_93368C.1
tatggatgaggttgtatattttttgatgaaacatatatacggtgtactgtgccaaataccaacaataaaggacatgcaagaggtttcttctcactttatttcttccttaatgttatttaattctgtatatatacttacaactatttttgaattctgaatgcataataccatacatggttaacatttctatacctttgtatatatacttacatcatcaatttactttagtgccttcattgcaacaaatgctatactaaaaggaatggactactcattaattgtt

SEQ ID NO: 135503 - DNA, 735 bp, Glycine max
  Clone ID: PAT_MRT3847_93369C.1
ccacgccgtccgaacaaaagtccccacccactgccattactacttacctcactctcaaaccctcactcactcacttcacacaacaatgcaaaccttcttcttgtaccttttccttttcttcttgttatgtgcacttcaccaactagcctcatcccaacccttcttcctcaatagaaggattctccatgaaccctttgttcctttaaccactcttccaccttctgaagcaccaaaaccacaaccttctccttcaagccataaacaaaaaccaaaacccaaatatccatcatccaccattcccacaacctctaccactaccacaacaataccaacaccaactacaactacaccacaatcaccatttttcccattatacccttcttccccaccacctccttctccaatcacctttgcctccttccctgccaatatttcctctctcattcttcctcactcccccaaacccaattcttcctccaacaaactcctccccgtcgctctctccgccgtcgccgccgcggtccttgctataatcatctctgccgtcgtctgttaccgccgtcgccggagccctcccctcgctgccgacggcaaacttaatccgatccgacaccgacctccgcctgctcccgcgcaataccgaaaccgccgtggaaactcgcaagctccggcacacgtcttccaccagctccgagtttctttacctcggaactgtagttaactcgcacataattg

SEQ ID NO: 135504 - DNA, 470 bp, Glycine max
  Clone ID: PAT_MRT3847_9336C.1
ccaacgctaagtcacactggtgacaaagctcgaaacaaggggaaagtaagacgatggcacgggagaaaatccctgatgagcggctgcatacaggacacaaaatggcagtcatgggcatgggaacttcagtggagaatcgggcatcagatgagaccctgggatgtatatatgtcgaagccattgacgcgggctaccggcatcatgacactgctgacgcgtatggaacagaggaagccctaggccatgccgtggccgacagccatatgacaataggacctctatttaacgaggttagatgatcgaaagtttttcatcactaataaagaccttggaacacagatgcacaccgggacactgttgtcccagttcttaagaccacatgaaagaaggtggggacggagtatgtggatgctctatctgacacattggccagtgaggttgacacatgagccggaaaatgctactgtttt

SEQ ID NO: 135505 - DNA, 171 bp, Glycine max
  Clone ID: PAT_MRT3847_93370C.1
ggggcagagcaaacttgctcctcggtctttatcaccaatgtgtaagataggtcccatcagctcatcactataaaatagaataggtgagtcgaaatcactaagcacaccggtctaactactgaacggctccacagaagcaattggcatagaaatgtcctctcacatcaacat

SEQ ID NO: 135506 - DNA, 263 bp, Glycine max
  Clone ID: PAT_MRT3847_93371C.1
ctataacctacctgactttgttcgatttcaacaacggcacctaatgcctacttggtcatgtattacttgaagggcaaggaccatgatctgcttatcgacaatgctgcaggcattggctctgctggaaggggtgttgtcgctgctgatgaggtcaacagggacacttgtcaagcgggtgctcagcatgattgtagagaacatcgaattcaacaggccagctcttacggagctgctactaactgctcctggtgctcttcaatatc

SEQ ID NO: 135507 - DNA, 1411 bp, Glycine max
  Clone ID: PAT_MRT3847_93372C.1
gttcatttctgtgcagcttgtgccccccaagcagattcaaatatttgtcgatattcaaatgccatacctgagcctgccgagtggccctcaaaattagacatgacaaaacgaacagatcttcgacatgtgaaatcaacatttgctgctactccatctcatagaagggaagtgtgccgtttgattccatcttcctctagtgaccacagaaggtttcaggatttcatatcatacttgaagcagagggattgtgctggggttattaaaatcccagcttcaaaatccatatgggcaaggttgctgttcattctcccccactcaattgaaacgtgctctttgctttctattgcacatgatccgtcagattgcctcattgctttggttcttcccaaagaaacaaactttgactggatataataggtgtactttatcaaaaataaaatcatagagctaagccggcagtggagctgaaggcacattttgtatgcccggaatatatgtaaatattttatgctgtttgcttccgttacccctcgttctgccgccctgcggacccccactgccggggtctcccccgccccctccccctccgccactgcctgttcaagaagcagtcgatatggaatgttcagggcagtccttgctgtatcaatggcaggggaatctctgtaaaagtggggttaattactgtacaatttatgcatgcaaagcagattcaaatatttgtcgatattcaaatgccatacctgagcctgccgagtggccctcaaaattagacatgacaaaacgaacagatcttcgacatgtgaaatcaacatttgctgctactccatctcatagaagggaagtgtgccgtttgattccatcttcctctagtgaccacaaaaggtttcaggatttcatatcatacttgaagcagagggattgtgctggggttattaaaatcccagcttcaaaatccatatgggcaaggttgctattcattctcccccactcacttgaaacgtgctctttgctttctattgcacatgatccatcagattgcctcattgctttggttcttcccaaagaaacaaactttgagtggatatgaatatgataggtgtcctttatcaaaagtaaaatcatatagctaagccagcggtggagctgaaggcatattttgtatgcccggaatatatgtaaatattttatgtcgtttgcttttgtaaagtttctttctggtgagtagcagacacggaaatttggggtttgcccaggtgcatttctattgttttgttgtagatctaatgatgccgatgtaaaattttttgttgtagatcctagatttttcccccctcccattttggtctacaatctgccaaactctttcttaagctaaataaactcaaattactgaatttagtcttctcaa

SEQ ID NO: 135508 - DNA, 547 bp, Glycine max
  Clone ID: PAT_MRT3847_93373C.1
tacggctgcgagaagacgacagaagggtttagcaaattatccatatgttttttgcttgttgataaatgaatataataatagctaagaaaattttggagctatcccagccattagcaataggttgccaggagacctcaaagcaaaccttctatttataagctctaatattttttgggcaatttttgctttggcgtggctggtttaaggccattaagttgatattgatctggcttagtaatccttattctttaataaacaaaattagaaaaggtttactactactaacagttaatatgatataaagcctaatatgtcatttggaacatatatttttgtaatatttaaaaagtattactaactaatattactttaagttgacacttctagtcatattatggcaaacaacgtctctattcggtatgattatactattaatgatgatcacatttggttataacagattgccatgatttctattttcattgttcatatttaataggaacactatcttagatttgatcacaataaaaaacaaccttaacatccc

SEQ ID NO: 135509 - DNA, 446 bp, Glycine max
  Clone ID: PAT_MRT3847_93374C.1
ttttgactcgaacaagggcggtcatcattgagagagaccccttttattgcggcttgcacctactatgcccattttattggaggcttcatgcggagctatcataatttaagagatgcacgattagtacataactatgtgtgctaggtgaacgtttggctctggcatcttaaaagggacataaagcaaaccatagtttggatggttgtttatggattggcatgggaaagagtttgtttgagatccacctgggttggagcaggctaatggtgaacgccacaagagggaagcatattcacaggattatagggttgtagcggaaaaaacagccccagatgacgctgctaaggacagaaaagactcagaaaccgtgtcatcaacatacgagtcgtctgaaggatcccgccttaaaatggataacacaacatgcggtgattgttgatggatgc

SEQ ID NO: 135510 - DNA, 1247 bp, Glycine max
  unsure (1)..(1247): unsure at all n locations
  Clone ID: PAT_MRT3847_93375C.1
taatgcgcgcgtacagtgcggctcgagtacggctgcgagaagacgacagaaggggagggaagagggaatgctatgaatctctcttatcttactcgcttccccgagcgtctcgttgctcctctttatgccacacttcccactacagctactactagtggaaataggcctgagaattttgcgattgaagggcgtaatttgaaattctcattcacgacgaggcaaacacaggatgtaccggttcttaaggattgttcgattcgcattccttgcgggcagttttggatgcttcttggacccaatgggtgtggaaaatctaccctcttgaagattttggctggtctcttgactccaacttcaggaacagtgtacgtgaatgggcctaaaagttttgttttccaaaatccagatcatcaggtggtaatgcctacggtagattctgatgttgcatttggtcttggtaagatcaatttggctcacgatgaagtcagatctagggtgtcaagagctttgcatgctgtaggcctgtctgactacatgaaggtattaaggatgacaaccttgagcactcaaacaaatgtgtgaattatacaataaatgaactttccttctgttacaatattcagagatctgtccaaactctgagtggtggtcagaagcagagggttgccattgctggtgctcttgctgaagcttgtaaagttctgttgttggatgagctcacaacattcttagatgaagctgaccaggttggggtcatcaaagctgttaggaactcagtggatacctctgcagaagttacagcattatgggtcacccatcgcttggaagaactggagtatgcagatggtgccatctacatggaggatgggaaagtagtcatgcatggagatgccgctagcattaggagtttcattgaagccaggcaatctgcctatataacccagattaattcttaaacaagtctttgtttctgaggatatatactactctttgtttaagagtagtaaacttttgagcaaactatattcatcttgtaaattaattataaaaggttgttttctgaatttggatttgctgtaattgggaacccacattcgatctgcctggctaaaatatcaatctgcagtcggtgaatttagatttaatttaagacacgatactccgtggacgaaaattgaacaggacacgatgagtctcaattgcagcatatctgaattcnngntttttttattcccaaaaaaaaaaaa

SEQ ID NO: 135511 - DNA, 576 bp, Glycine max
  Clone ID: PAT_MRT3847_93376C.1
attaggttccatgtcacccttgagtgatgatttgtacgtacctttatccaacacagagatgaaaggcattcaattcattgggattgtaggcctcttgttcttgctgtgaatcacgcataaaccaataatggttgacagtatgtgcataatgaattaatgatcagaaatttttttaacatagatcatgtgtacagtgactttactattagatggagctttagagatgatttattatagattgccttttaatcttaaaaaaaaatagtgtacgcaatagtgtgaatgatttttatacagtcattcagttataatttttcatcccctattttgggtaacagagctcaataggaacataatagggttacctagttaccgattttcttgattttgtccatgggttgggtttttatgtccccatgtttttggttatgttgttcttgttgtttttttcttaatggaattcctgatttgttgcagtagtctatgataaatttattgatttttaatgattatcttaaaagtatgctaatcataatttttagattggttgataatattatttatttataattggca

SEQ ID NO: 135512 - DNA, 640 bp, Glycine max
  unsure (1)..(640): unsure at all n locations
  Clone ID: PAT_MRT3847_93377C.1
taagaaactactgaacgtcgcatggcaccgcccgtacgtaagncttggnactcctctagaagcggccgcccttgttttttttttttttttttttttttttttatttttttttttttttcttttttttttcttttttaaaggggtaaagcaacactgaaattcttaactatgaaaaatggatccataaaaacaaaaaaaaaaggacccgggggaaattacatatatacccacatgggattacccgcaaattcattgggtttttaaaacaaacaaaacaaaaattctttctctttttctcttcccataaaaaatttccttccaaaaaaaagggtttaaaaaataaataggaaaaagaaaaaaatatccccaacacggaatctgcctctgacagaattaaaatcatattaccataatcttacatcggaacattttttaaaaaaatttttcccctcatagcaataacaaaaaatcaaggggaagagataaaaaaaaggaaaaattaaaaatcatcctcgcccgataatcatcaaagacaaagcgcggggcaggggaaatcatcatccacgaggggagcatcatcataaaacggcagcgcgttgaaatcgaacggcaagggagggcgaaacgacaaggaaacgat

SEQ ID NO: 135513 - DNA, 510 bp, Glycine max
  Clone ID: PAT_MRT3847_93378C.1
ctccatttccatttcctctctctcagtttccaagaatcttaagctatgggaaagtcttacccaaccgtgagcgctgattaccagaaggccgttgagaaggcgaagaagaagctcagaggcttcatcgctgagaagagatgcgctcctctaatgctcctggaagagaggacaaacctgagccaccaccagagggtcgcttgcccgatgccactaagggttctgaccatttgagagatgtgtttggcaaagctatggggcttagtgaccgagatatcgttgctctgtctgggggtcacactattggagctgcgcacaaggagcgttctggattcgagggtccctggacctctaatcctcttattttcgacaactcatacttcaaggagttgttgagtggtgagaaagaaggcctccttcagctaccttctgacaaggcacttttgtctgaccctgtgttccgccctcttgttgagaaatatgcatcggacgaagatgccttcttcgctgatt

SEQ ID NO: 135514 - DNA, 1393 bp, Glycine max
  unsure (1)..(1393): unsure at all n locations
  Clone ID: PAT_MRT3847_93379C.1
ccttctcgtccgacggctgcgagaagactacgggagggggtgctctgctcgtgcctctagggttatcatttctccatttccattttctctctcacttttcaagaatcgtaagctatgggaaagtcttacccaactgtgagtgctgattaccagaaggccgttgagaaggcgaagaagaagctcagaggcttcatcgctgagaagagatgcgctcctctaatgctccgtttggcatggcactctgctggaacctttgacaagggcacgaagaccggtggacccttcggaaccatcaagcaccctgccgaactggctcacagcgctaacaacggtcttgacatcgctgttaggcttttggagccactcaaggcggagttccctattttgagctacgccgatttctaccagttggctggcgttgttgccgttgaggtcacgggtggacctgaagttccattccaccctggaagagaggacaagcctgagccaccaccagagggtcgcttgcccgatgccactaagggttctgaccatttgagagatgtgtttggcaaagctatggggcttactgaccaagatatcgttgctctatctggggtcacactattgtatgttatgattttgaatttgttgttttagccacattgcaaaattatgctgctattatattgagaaaaaatgtcacatctaaacttttgtaccactactggtgtaattttgccaaatgtattttgtagggagctgcacacaaggagcgttctggatttgagggtccctgnacctctaatcctcttattttcgacaactcatacttcacgtgggtattttcacgtatccagcacggccttttgaacactcttcttcttcttctttactatttgaaatttccgttctaattttttatctatgtcctaaatttttttagggagttgttgagtggtgagaaggaaggtctccttcagctaccttctgacaaggctcttttgtctgaccctgtattccgccctctcgttgataaatatgcagcggacgaagatgccttctttgctgattacgctgaggctcaccaaaagctttccgagcttgggtttgctgatgcctaagcaacgtttaggggattgttgaagaggcatggtgcccataatatttctctaaaaaattgtatggtcatggtttttaatgccaatgtgggttccccagattttagatagcttttgaatgtattttgctggacgtgacgatgattgggaagttgggttgttgtttttatttgtggttgatacttttgttaaataacattgttcagcgataatgatagtgatctttcggacctaaaaaaaaaaaaaaaaaaaaaaaaaaaaaaaaaaaaaaactcggactagttctctctctc

SEQ ID NO: 135515 - DNA, 460 bp, Glycine max
  Clone ID: PAT_MRT3847_9337C.1
cggacgcgtgggattgagttcaagtattgtaagaaaaaaaaaaaaaaaagctgacaatgatatcacgttttgtcaatgtttaaactttaaagttcactccatcattttttttcaagttatgcttggcaaagaaaaatactttctctgaaaatatcaaacatcagtttttattgtgtggataacatcatttggaatgtcatcacgaaagattaacatcattttgggtgacggatcttatccaatgcattgattgctcgcttccaattctgttctatacattttgtcatatcctccctattcgtgtgaaatatgcaggcgtaattgtcataaaaatacaatgagcataatcctaagttcagccttttggtcaaaattgcaggtgctttgtgcagctgtctacttcctgaaagtcttcaagtaacaagtgttaaacagctacctgaataccatgaatgctcgg

SEQ ID NO: 135516 - DNA, 356 bp, Glycine max
  unsure (1)..(356): unsure at all n locations
  Clone ID: PAT_MRT3847_93380C.1
tcacatcagcgtttttttctaaaccaanaattcctcataaaggggaccatcaacaaggagttctgaaaacacacatcaccaatctcattgaatatatgctcttgcacaccataacctaccaaatatctcgtactgactactacacattttttacatagaaccaatgcactctgcctgataacatacatccctttaccacaattttctttccaacacctattcttatttatgtgagcacgatatacttgacaactactttcctaagcttcacaatatccatgccaatcatgattgccacaacatcctttcagaaaatcactcatccttaggcaaaatattcaacaacactagcttca

SEQ ID NO: 135517 - DNA, 1659 bp, Glycine max
  Clone ID: PAT_MRT3847_93381C.1
ttttttttttttttttttttttaacgcaacgacttttctcagatatgcaaaaagaaatacgcaatcaacacaagaaaacagcaggggcattgtcgacatggatgattttttttaggatgaagcgcgccaatctaacggtcctaaatttctttcgccacaaacatttgtccagtaataatagacaaattactagttattacgggaaatggtcacatactacaaagggtaataatatcgcaatcgctgaacaatgttatttaacaaaaggatcgaccacaaataaaaacaacccaactccaatcatcatcaccacgtccagcaaaatacattcaaaagctatctaaaaatttgaggaacccacagtggcgcattagaaaccatgaccatagaatttatgagagaaatattatgggcaccgtgcctctccaacaatccccaaaacgttgcttaggcttcagcaaacccaagctcagaaagcttttggtgagcctcagcgtaatcagcgaagaaggcatcttcgtccgatgcatatttctcaacaagagggcggaacacagggtcagacaaaagtgccttgtcagaaggtagctgaaggaggccttctttctcaccactcaacaactccttgaagtatgagttgtcgaaaataagaggattagaggtccagggaccctcgaatccagaacgctccttgtgcgcagctccaatagtgtgacccccagacagagcaacgatatctcggtcattaagccccatagctttgccaaacacatctctcaaatggtcagaacccttagtggcatcgggcaagcgaccctctggtggtggctcaggtttgtcctttgttcctggaaggaagggaacttcaggtccaccggtgacctcaacggcaacaacaccagccaactggtagaaatcggcgtagctcaaaataggaaactccgctttgagtggctccaaaagcctaacagcgatgtcaagaccgttgttagctccgtgagcgagttcggaggggtcctttacggttccgaagggaccaccggtcttcgcctcgtgccgaattcggcacgaggcctcgtgccgcctcgtgccgaatgagaaagaaggcctccttcagctaccttctgacaaggcacttttgtctgaccctgtgttccgccctcttgttgagaaatatgcatcggacgaagatgccttcttcgctgattacgctgaggctcaccaaaagctttctgagcttgggtttgctgaattctaagcaacgttttggggattgttggagaggcacggtgcccataatatttctctcataaattctatggtcatggtttctaatgcgccactgtgggttcctcaaatttttagatagcttttgaatgtattttgctggacgtggtgatgatgattggagttgggttggttttatttgtggtcgatccttttgttaaataacattgttcagcgattgcgatattattaccctttgtagtatgtgaccatttaccgtaataactagtaatttgtctattattactggacaaatgtttgtggcgaaagaaatttaggaccgttagattggcgcgcttcatcctaaaaaaaatcatccatgtcgacaatgcccctgctgttttcttgtgttgattgcgtatttctttttgc

SEQ ID NO: 135518 - DNA, 371 bp, Glycine max
  unsure (1)..(371): unsure at all n locations
  Clone ID: PAT_MRT3847_93382C.1
ttttttttttttttttaggattttttttggtttttttttttggtgggcccaagggggnnnctgaacatttaaagggctgctcacagctttgtgatccatggccagaatcaggtggaaggactaatttcttggaacaaacaaaattttggggggccccactaataaaacacgtattcaaaagggtgcttttttgtagttgggttgcttcctattaacgccttgccctactatggcaaaatttaaagagtactgtggtataggtttatttgttaacctagtaagacctaggggccaaaccaaacttgattggccctttttttttttactattactaccaaaccttttacccttgatcgctttggtcttaattt

SEQ ID NO: 135519 - DNA, 190 bp, Glycine max
  Clone ID: PAT_MRT3847_93383C.1
ttcaaaccttgctctatactacacagtcaattcactataagaattttggcttccatcctccactactttttagccctctctctttcttgctctattctattctacttatccgactcagtcacccctacaaaaccaatataccttgatgttctacccgttcaaaatgatcgttccacacggctcaataacc

SEQ ID NO: 135520 - DNA, 954 bp, Glycine max
  Clone ID: PAT_MRT3847_93384C.1
aatggaaagcaaaatgagtggatgaaatgaaaccttggtccctgcctttgtgagaagaggagagtgatgatgatatcaggaggaggaggtggtggagggaaatcatcgtggagttcatcaacatcgtcatgggtacccacaacctcagtgtcggcatctggaaagaggattcagagggaaatggttgaactcaacaacgaccctcctcctgattgctctgctggccccaagggcgataacctctatcactggattgccaccattattggaaccccagaaacaccctaccaaggtggcatctttttccttgacatcaaatttccaattgattatcccttcaagcctcccgaggtagtattcaaaacacgcatttaccactgcaatgtagaccctgatggccgtgttagtatgggaatattgaaggatgattggagtccagcactaacaattactaaggtgctactagaagttagatcaattatgacaaatcctgatccttataatgctgttgtccctggcatcgctcatttgtattcgggagacagagcaaaacatgatgatattgctgcagagtggactgtccgatttgccaagtgaatgtgatacaagtgccctttggttggcttacatcttatatataatgttccaacaacatttatgtaaatgagaatgatagttaatagtagttcacagtaacaaggttatctcctccttgcacgttccggagagtgccttagttgatccctcgtagttgtaagtggataatgatcattatgccatgcttttgataattttcttagttcttgtttttatttatttaccaaatttaaccaaatttgagggaactagtctcttaaatttacttttaggatttttggattatataaagtaaaggatgttatttcacaaagtttgatgatatctataaaaagcaaaaatgaccatgcacctacc

SEQ ID NO: 135521 - DNA, 434 bp, Glycine max
  Clone ID: PAT_MRT3847_93385C.1
attatctaactggtttgctcattcattagagggggtgctaatccaaacactgtggggatttttttgttgttcctgtttccaatgccccctaaagattgttctcagttttcattgttgggattggcctctaactctttgaaaaactgaggaaaccttgttgccaaactctcttttaaagcaggggaaacaggaatctctccgatcatattctccagaacggcctcccagagtgtgttggtaactactactgcatgctcatgtctccggcttgactcatgcttctagaaactaatccccaatgttccagtgggtgattgttcgtacaaaacaatggagcctggtggcatattttgaaccttgaaagcctttctaaatgcccaaatagatttttctttttctttactttcagtcccaaaggtttccatatgggccac

SEQ ID NO: 135522 - DNA, 305 bp, Glycine max
  Clone ID: PAT_MRT3847_93386C.1
cagggactacgatttgtacaagggtccttcagttgatgtagacaccactgagtggtcagggcgatcattgcatgcgaggagcagtgtaacaactgatccaattgaatctggacttacggtgagtcctgatcatccagtcaaccacaataggcttccttacagtggcatcacctatacatctggcacaatattcttaaatatgcctgatataggggaacatacctttataatagatgactcaaatgggccacattggaagatgactagaactaatggtttgatcaacattagacctgctaataata

SEQ ID NO: 135523 - DNA, 246 bp, Glycine max
  Clone ID: PAT_MRT3847_93387C.1
gcagagcagggtcatggactggctttgttttcagtggagtttcttggcgaagaatagttagccttgtaactttttcgctagcgattaatgacaaggaagtcacttaccaatatgaaaccctgaaggctggaactgttactatgttagtgatcaatccatcaggctttgtgcaacgtttgttatggtccgaacggactgggaattgggagattttatcaactcgtcccatggatcagtgggaatact

SEQ ID NO: 135524 - DNA, 340 bp, Glycine max
  Clone ID: PAT_MRT3847_93388C.1
cccccggacaggcggagcggctcctgctacagcgctccgaccatgacctggcctggcagaccaacctgatgcttttggaacccctggggtgtgggatgctgaaacagtccctcatgaattatgcacggagcgccatccaccttcttatgatggctgtgacaatcatcactgacactgactcctaatgagtcaagctagaccctattctacaagaggatccaggccaggggcctgttcttcataccgttgggcgcttagctcactagggcccaactcatccagtcccactcccacttatgttgacggagctcaccgaagcccttctaccagccttgatgct

SEQ ID NO: 135525 - DNA, 194 bp, Glycine max
  unsure (1)..(194): unsure at all n locations
  Clone ID: PAT_MRT3847_93389C.1
agnnaaccagtgatagaaaatccaatatgtcattggacaaccaacattattattatatcattattgagatgcttatcatcataattctagtatatagtatactttatagtgttgtctagacaatggaattatattttaccatttttgaatataaatttattgaacattacatgttaaacaagttttatgtttat

SEQ ID NO: 135526 - DNA, 666 bp, Glycine max
  unsure (1)..(666): unsure at all n locations
  Clone ID: PAT_MRT3847_9338C.1
atggaaggtcttagttcggaggtgggatctctacctgatagttgcattgccattcatgatgatcccctggcattcgtccattcagccattcaccattcacccattcaactggaattttggttgaatgccggaattgtgtccacaaattgtggatggatagttggttggctggctggatggctggctggatggctggctggatggatgccttggatgtgcccgtgccccaatgaagaggaagagcgcaacatgaaacattacgctgcgttgctaacgggccgcacctcctatttcctcaagggtgaggaaatgaagtccatgtacaccacctacaatccgcagaatgtggtggccaccgcccgtttcctgttccacaagaagaatctatactactccttctacacctcatcgcgaatcggtcgtccgcgtgccattcaattcgttgatgatgcgggtgtaatcctggaggagcatcaactggagaccaccttggcgggcactctcagtgtctatcagaatgccacgggcaagatctgcggtgtctggcgacgagttccacgtgattacaagcgcatcctgcgcgacgatcgtctccatgttgtcctcctctggggcaacaaacagcaggccgagttggctntggccggaaagggggccaaatacacg

SEQ ID NO: 135527 - DNA, 731 bp, Glycine max
  unsure (1)..(731): unsure at all n locations
  Clone ID: PAT_MRT3847_93390C.1
ccacgcgtccgcgtttgtccgataagggagtgaaggctcaggttttaactgttgactccctctccttgacaacaagggtatgcagggaagttggcataagaaccactcatgtaataacaggccctgaactagaacaacgttgaccaaaacactttccatgagacagatcatagagccacatgactcgctcgtctcaccccaattcagaaacaacgagtggagcaatccttgcaaacaattggaaaccatgtcgttgggttcttacgagatggagtgaatgattcactagctttatatgctgccaatgtaagcatttctgtggactcaagtgtagccattgccaaagacatggctgatattatcttacttgagaaagacctcaacgtgcttggtgcaggagtggagcatggtagacttagttatggcaacacaatgaagtatcttaagatgtcagagatagctaacttgggaagtgtcatttcactcctcatagcaacactggcattcaagtatgagcccttaacttctaacagcgttattactcagaatttcatctacagtgtgggacagattgcccttgcttgggacaagatggatgaagagtatgttaagacacctcacaagtcctcanagagaggcttgtccatgttcatgttngtggaatgcaccantgtgcaccctttgtgatgtggcacactttagtttctttggctttattacaggctacactg

SEQ ID NO: 135528 - DNA, 695 bp, Glycine max
  Clone ID: PAT_MRT3847_93391C.1
aagaaacagcatggagattttcaacttaataacattggctatgacaatattcctagcattagtgccaaagatggagagtcatataaggacaccaggtatgcctatgccgaaaacccctcgtccactttgtgcatcacaatttgcactagtgaactatgcctgttcgaggttgccattctccctcggtgttccacccgattccccgtccactcctccgtcccccaatgacgaagagggccacagaaacaaccaccacaatggcagccacagacatggccatagacatggacacaaacataggaaccaccagacagctgatgaagataattgttgccggtgggctaaggaagttgacaaccaatgtgtgtgtgaacttctactccgcctgccacccttccttattagacctctgcatcagtacacacttaacgttggagaatcgtgtgatatcacttactcatgcggtgcaccaatatgattctttctcaaacttgcattttctagctagtcttattattatttatttgttgccatccttagaggatggatactatggctgggttaattgttattagtataaccagatttatttcgtactagaataagatgtactactttgttttaatttagacttctatccagttttaaattgcgactaacatgattaaataaataatctcaagtcatatatcact

SEQ ID NO: 135529 - DNA, 840 bp, Glycine max
  Clone ID: PAT_MRT3847_93392C.1
accacgcgtccgcttttctttattttattctcttctgttctccgctacctatggcgaatttcacctcttcctcctcctcctcttgttctcccttacctctatctctaactatgtcacacatttcacctccgtcatcttctgcggctttcgacgacagttccgaggacgcctgcagcatatgtctagagccattcagcacccatgaccctgccaccattaccagttgcaaacatgaatatcatctgcactgtattcttgaatggttgcagagaagcaaagaatgcccaatatgttggcagttacttatcttgaaagaccctgccagccaagagcttctaaatgcagtggaagctgaaaaacgcttaagttcaagaactgtatattcacatgcattcactgattctcgtagtccccttcatcggcttaacaatgaccaagatgattctgattttgatgaacaacttacgcagcacctagtttctgctgcaagtagagctcgttatatctgcagaggggaaaggcagagatcccctggagcaggtccttcagaggttcttgtttttaactcttctatgcatgcgtcagggatgcaatcaacacttacaacttcaccatcttctggtgtgccttcaacatctgctttttcctctgttggcatggttacaacaaatacttcttctgagagtgacatgccttgcaaacccagagttatttatagccagccatcaccggagaaatgcaggagactaaacacttctgagatattctccttccctgagtccttcaaatccaaactttctgctgcttcagccagatgtaaggaatcaatttcaaaaatac

SEQ ID NO: 135530 - DNA, 684 bp, Glycine max
  unsure (1)..(684): unsure at all n locations
  Clone ID: PAT_MRT3847_93393C.1
gtcgacccacgcgtccgctactacccaaaatttgcagaactctgctaaaaggagctgcacaaaggttcacaagcaaggcagcttagttggaagagctattgatctttcaagactgagtggctacaatgatctgctgagtgaactagagagactgtttagcatggaaggccttctaaaagatcctgataagggatggaagatcctctacactgacagtgagaatgacataatggttgtgggggatgacccatggcatgagttttgcgatgtggtgtccaagatccatatatacacccaagaagaagtggaaaagatgacaattgagatgatcagtgatgatactcatagctgtttggaagaggcaccagtgattatggaggcttcaaagtcttcctcagtgggtcagccagattattctccaacagcagttagggtctaaaggttttcagggttgtctgaaatatttattatgtttggtcctgtctctgtacaagataaatctacatgtttttatgctgtttggttactaccctacccttttgagtttgtaggcccagcaaaaattgcatggtcagcactagaaaagactgacaattgagtgcattaaactaactaaataagggctagccttggcatcatataataaaccattattatgggttttgttacgtactctngaataat

SEQ ID NO: 135531 - DNA, 383 bp, Glycine max
  Clone ID: PAT_MRT3847_93394C.1
gggagaacgaaaaaattgggggtcagttttatgcatatgcatatacaaatttacatacatgcctttatttgcccaaggctaaatagaagtaaggaccaagtggggattgacggggactagttgcatgtaaaaagaattctatcgagcacgtctctggggttataaggaaaccaaggtgccactatgatttcgagcgtgcaacaaaccacggatattgctgtttgaagcttcattctcaaaaccaataagcttttaaaatggacattggacactggacaataataagagcttgagacttttttgaattctgaagggtttgaccaaaaagagaagcggaccacgggcgaagtgatttccttacaatgccttgccttgaaccagtt

SEQ ID NO: 135532 - DNA, 1523 bp, Glycine max
  Clone ID: PAT_MRT3847_93395C.1
tgttcttgttcaaccaccttctgatcttcatcttcatagaattcaaagtatgaagatctatattttgctagtcattacttccttcacatttggtttccttgagaaagttgtttcaaatccaagttctcgtccatataaggcaattttcaacttgggtgactctctaagtgacaccggcaatttccttgcatctggtgccattttattcccagttatcggaaagcctccttatggtcaaaccttctttaagcgtgcaaccggtcgttgctcagatggacgactaatgattgattttatagctgaggcatatgaattgccttatttaccaccctatctggcacttaccaaagacaaagacattcaacgtggagtaaattttgccgttgctggagccacagcacttgatgcaaaattcttcatcgaagcaggacttgcaaaatatctatggacaaataattcattgagcattcaacttggctggtttaagaaactgaaaccctccctttgcaccactaaacaagattgtgatagctacttcaaacgctctctctttctggtgggggagataggcggtaatgactataactatgctgccattgctggaaatattactcaacttcaagctaccgttcctccagtcgttgaagcaataacagcggccattaatgaattgattgctgaaggagcaagggagctgttggtgccggggaattttccaattggatgctctgcgctatacctaactttatttagaagcgagaacaaggaggactatgatgacagtggatgcttgaaaactttcaatggctttgcagagtaccataacaaggagctcaagctagccttggaaacactaaggaaaaagaatcctcatgcaaggatactgtatgctgactattatggtgctgccaaacgtttcttccatgctccaggacaccatgggtttactaatggggcgttgagagcatgctgtggtggaggtggaccctacaatttcaacatttccgcaaggtgtggtcacacaggttcaaaagcatgtgcagatccatccacatatgcaaactgggatggaattcatttgacagaagctagcttataggtacatcgccaaaggcctaatttacggtccattctcatatcctcccctcaagatctctcccaacaagatagcctagtgttggtgttgatggaaaaaaatctataacaatgacctccaaataataaaatgttaggccgtttatattgttataagtattgtctggatttcaatataggggccaaagctttttttacaataaatttgagtcacaatcaaacgcatatgtaggacctgcacttaatagcaattctttgttgacttccaagtgtagcattggcttcggcacatctttatgtttggatgggtacgtgaatgtatagaaaaaaaaaaaatagagatgagagttagaggagaaatgcaccaagttgttgattcaaatgtttggtttcatgttaagaatcatgagaattgatttttatctcta

SEQ ID NO: 135533 - DNA, 288 bp, Glycine max
  Clone ID: PAT_MRT3847_93396C.1
aacaactcctattaaacttacaaatctcacaaattagccagattaatcattatatatacacatatatatctatatacactctcatcgaatcctacctaaaatacatcaatggcaacccctagctgcaaactgccatagaagcatactacttccaatcactacctaagtctcccacagacttaattgtacaaaccgatatccttaacaacactaccctacaacccatagatgattcaacagtgatcctacaacaccaccaataactaccaacgtgcctttaacacgacc

SEQ ID NO: 135534 - DNA, 410 bp, Glycine max
  unsure (1)..(410): unsure at all n locations
  Clone ID: PAT_MRT3847_93397C.1
gggggaattgttggagtaaaccaaaaaaattaggtagagccggatctaaatgttggctaggtaagcgtcctgtagtaagaggagtagttatgaaccccgtagaccatccgcatgggggtggtgaagggagggccccaattggtagaaaaaaacccgcaactccttggggttttcctgcacttgaaataaaaaaaaaaaaaaaaggaccgaacgaanggnccttcaatacaaaagcccaaaacngaatgtacaaaagaatgcaacgcccctggcttttctatggggtcaccctaagttaaattcattgggcgtcgtttaacataattttatttgggaaaaaccctttcgtgggggggggttttttagatttcaatttattcccccgttgccagcgggggaaattttttttt

SEQ ID NO: 135535 - DNA, 333 bp, Glycine max
  Clone ID: PAT_MRT3847_93398C.1
gtctcaagctacttagatatcaatactcagtagtactttgttacaaaggctaagtagtagttagttgttatgatgtttgtggttatattttcaacttggtagagctttgttgggtgtttaatgttttaattttgtaacaaaatatttacttagtttattttgttttaatggattgggcaagcggtactctcgccacttaatttattgtgtaagttctctctaggttttacttcatttgtgatgtttagtcatatatagctaggcagtgctgtttgtgttttacttcatttgtaatactatatgtttctagtgggcaaaaaaaaaaaaaaaaaa

SEQ ID NO: 135536 - DNA, 212 bp, Glycine max
  Clone ID: PAT_MRT3847_93399C.1
gggagttaagtcatccatttattgtgagaaagtaaaaacgaaaattctagtctaggaatgtgagcacatgaaccataaaaattccgggggccatgtacagttgagagaggaggaaggatccatcatattacaatcagacaggctaaagctctgctaggtaagctttaggccttgggaaagccaaatagggggccctttttctgtggagcata

SEQ ID NO: 135537 - DNA, 683 bp, Glycine max
  Clone ID: PAT_MRT3847_9339C.1
atggaaggtcttagttcggaggtgggatctctacctgatagttgcattgccattcatgatgatcccctggcattcgtccattcagccattcaccattcacccattcaactggaattttggttgaatgccggaattgtgtccacaaattgtggatggatagttggttggctggctggatggctggctggatggctggctggatggatgcatcatcttattctctatttggattccctccatctttcagatacggatgtagccttggatgtgcccgtgcccaatgaagaggaagagcgcaacatgaaacattacgctgcgttgctaacgggccgcacctcctatttcctcaagggtgaggaaatgaagtccatgtacaccacctacaatccgcagaatgtggtggccaccgcccgtttcctgttccacaagaagaatctatactactccttctacacctcatcgcgaatcggtcgtccgcgtgccattcaattcgttgatgatgcgggtgtaatcctggaggagcatcaactggagaccaccttggcgggcactctcagtgtctatcagaatgccacgggcaagatctgcggtgtctggcgacgagttccacgtgattacaagcgcataatgcgaaacgatcgtctccatgttgtcctcctctggggcaacaaacagcaggccga

SEQ ID NO: 135538 - DNA, 258 bp, Glycine max
  Clone ID: PAT_MRT3847_933C.1
tattactattactcatcaatctaaatatctaggcgaagttattaacgaacagaagggaccaacttttatttttttattctaaaaaattcaattatacctgctctttcacaagagaaaaaaccttaacccccatcatctgtttaatttcaaatatccaaatttaccgataagaatacgaagacttacttcacatttttaatcacaccgtataaactttttatatcaaagaagtttactgacaatttttcgaaaacgact

SEQ ID NO: 135539 - DNA, 647 bp, Glycine max
  Clone ID: PAT_MRT3847_93400C.1
agaggggcacgggtgaatattatgatcgtgatgaaagtggacacacatcggctaaggttgatttgtattgggaaacttacctagaaatttggttctaataactatcagtatctaccaatggggtacgccgttgatacaaggcttgaacgatgaggttcgggacatgtttacaaaggaggttctgagtcatttatgaatggtggttgcagggataacgattttcactaacatctgcaaattcagaatgagtgtttattacagtggctaagataataagctgtcttatacacaaaatccttgagcaatacataaggctgttctaccatcatcgagagtacctgttggaccttgagtatatgcctaatggaagcctcgaaagtcatctacttggggacaaaaaaactttgccctgcgatgtcaagtacaaggtagcatcttgtttggatcaggcaattggtcatatgcttgaggattcgcagcaaggtgctctacataaggatctcaagtctgatcatgtgatattgcacacagcactttagcacaattcttgaagatgctgctggccaagatcattgtagtgcatgttgaaggatgagatgacagaggtagtgaggacttatgagcaccttgccccagatatatgaact

SEQ ID NO: 135540 - DNA, 137 bp, Glycine max
  Clone ID: PAT_MRT3847_93401C.1
ccctttatactatttcatctccctattattacgtgttaaaacatttgagaaaatgctataatagaagacacccaactgatcttaagttagaattaaataggttttatatgggtccgtcatgtcagccggtccggaat

SEQ ID NO: 135541 - DNA, 167 bp, Glycine max
  Clone ID: PAT_MRT3847_93402C.1
gccgccctttttttttttttttattccaaacaatatgggccatttttttaaatcatcatccccaccatgaaaggctgtgcctaaaggcctggagccgaaaactacatccgcccatagcgatattaccaattcttaggaggacaacgcaatacactaagccccctcca

SEQ ID NO: 135542 - DNA, 668 bp, Glycine max
  Clone ID: PAT_MRT3847_93403C.1
tcgcccatgcgtccgatactatttaccgtttagagaagataatgaatgatgtacaaggatggggaataagataccgtcttaggggaaacctaaaaaataagaacaaataggaaggaatgttaactaaacaaagcttaggaatctcttcatgtccaataaaggggaattagttgccttgatttactataactgaaaaccgcctgctcccttttttgttcaataattttcattaattaaatgattttcagcggtttatgattagtagagttatctttttcttttttttgagtgcagtgttttcaggaagaaaaacatcattcattataaaaaaatactcctgtcctaaattggctacaaaacccatcttgtcagccttttgtatgtgtagattattgtaattactatagaactgcttttcatttaaagatgtatgtgattctttttttttttttaacttggttacataagaatgtttaaccttgtgtgtcttgtgctgatgaattgtgcatttaatgtactacttcttttccaatatttttaatctaataaatttatctcaagagcattgcaactgcttcagatttccattgaaagctgttaaagttatgcacacggtggctcttaggaatgaatccagtgttcaaagtggtgtttcttatccgagtcaa

SEQ ID NO: 135543 - DNA, 485 bp, Glycine max
  Clone ID: PAT_MRT3847_93404C.1
cttctgcgaagataactagaatgaggaaccaggatgatgttgtgaacagtattagggcgatgctggagaaggcagaggcacccgtaactgatgagtgttgcatctacagagtcccctttgatatccgcaagctcaacgaagatgcctacacccccaaggtcgtttccataggcccttttcaccacaaaggcaatcctcgccttcaaaacatggagaaacacaaactcatctattgcaacgcatttcttaaacgttccaacacaggcttggagacctggatccgctacatacaggacgtagagccccgattccgtagctgttactcagacgcccttgagttcaccaaggaggagctgctgaaaatcatccttgtggattctggttttatatttgagcttttttggttgacctattatgaagaaaactcagggaacaatggatcgattcttttaaaaccctggttgactactaatgtaagattggat

SEQ ID NO: 135544 - DNA, 145 bp, Glycine max
  Clone ID: PAT_MRT3847_93405C.1
cacaaaccgtaacagaaccaaacaatgataacccaacggcttaaccatctacttcactccctcttcctcttcgcagccgcattctccatcctcaacacaacatacatctttgcaaacggcggttatgccggtaatggctccagtg

SEQ ID NO: 135545 - DNA, 540 bp, Glycine max
  Clone ID: PAT_MRT3847_93406C.1
cggcggggggagagaaggcccaagaacaagctgagtttaggaaaagcattttatttcttttctatgaaatttttaaggcttcttccaatgaaacataaaccgtacctagcgggccacccatcttaataaaggtgcgataactgggtttagagcgggggtttgcctcggaacgcaatctattgtggataaaaaaagaaacttaccggatgatgcaacctggaaggaggcttagcaaagactgcccaatccaatactgaagtggttaagctgggcctttgcttacttgccagaacctcctttatcaccgggcaggggttcaaagtgacccggccagggatgagccttttttgcgtgcggggctttctgctaataaggattaacatctgagtatcttccttaaggaggaccatttttcacccaattataacgctctaaagcccggggacctacagtggggagaggctcaggcgctttcaagttgtaaacagctctcccagaacccatgaccgagacaccgtcctctttaaaaggggccattgc

SEQ ID NO: 135546 - DNA, 251 bp, Glycine max
  Clone ID: PAT_MRT3847_93407C.1
atttctttgtggaattttgtgtgagtggaactggaagtctcgttgattttgttgaattattgtgtgaggactgaatcctgatgcatatgtacgaatagttgacatttttttgcctcttcattcaatgcccacctttgaagggaatggatagtcgcttcttgaaggaattagggctcaaattggttcaaagttaaccaatctattatctaactaggtaaaaatctcacccagatgtcaaatgttgggaactc

SEQ ID NO: 135547 - DNA, 365 bp, Glycine max
  Clone ID: PAT_MRT3847_93408C.1
gaaaggggaggaaagtggaaaaggattgtttaacttttggggggaagtgttaacttcaaccaacttcccatgaagcaagagtttcgtacaagttttgtattcccacttccaaaaaaaaaaaatgctttcacctttatgtgcaggcctaaaaatcaatttcctatcacatgaatgtcttaaagtgcctccacaaccaaagaaccttaaaaacaaacctttcatttttaattccaatggacccggtgtacaataaaagccaggccccgaggacacttggaaaattcatttgaattggggtttaagcacagggcccctttttttgtgcaagggaccaacctctttaataccaagaaaaaacccttttt

SEQ ID NO: 135548 - DNA, 417 bp, Glycine max
  Clone ID: PAT_MRT3847_93409C.1
ttggattgtctaactgagaatacatgaatacgataggcctagactcacagtaactcttcaagggggacgtgctttaatcatatttacacatctctgctataagactgtgaatgagtgaaccctgagtgcacacaagcagactactatgtcattctaaataaactatatgtactactgcatggaactcgcaatctctgatgcatactacacatcaacgacatatcatgtgtgttacgtggttctaatgacacctcaatgtatgatgcctaaggtacaatggattggattatgagctgacatgagtgatactccaataccacacgagttaggaagccacaatatccacctatgttagacactaagctgggaaaaacttgtttgccccagggcacttcccgaagtgttaagggcgtgcct

SEQ ID NO: 135549 - DNA, 1123 bp, Glycine max
  Clone ID: PAT_MRT3847_9340C.1
gagagaactagtctcgagttttttttttttttttttctattctctcatccaataatacgctgtatcgtacaaatcctgaaggggggcaaaaaaaatttcctcactatcccgtcaatttccccaatgcaaattttaataatctacaagaaaagtttacacttttttacaaattgtacgaaattgggattgttaccatgcagaaaaatctttaaattcactgctggcaactcccacttttcttttctttactacaacgtctgtaccggtgttgtcaacagtagcagatttagcttgagcgctcctagctttcaagtacttgccaacgccaccaccaacccccgtacctccagattcagacgttgcagcgccaggattgctataccacgagcctaccttaccattatcttcatcctctgcattcttctctttggcattatcctgctcttctccctcatctggttctgtgtaaggattgacaaatatcgtgacacttgttatcttgatttcctccagaggccgatcatcatcatcaacaggaaccttttccatcaccgatagggtagtcaagccaccaacaactcctccaaaaactgtatgtttgaagtttagatgatttgcagacttgtacaagatgaagaactgggagccattagtgtgggggccactatttgccatgcttaccacaccccttccagagtgaactaatttggagttaagttcatctttaaaaggctttccccaaatagattcacctcctcgaccagtaccagtaggatcaccgccctgtatcataaaattcctaatgtttctatgaaaagcaactccattataatatccacgttcacaaagagtgatgaagttctcacatgccctgggtgctatatctcaatgcagctcaatgttcaaatcaccatgtgttgtatgcagttgtacatatcccttcttttttggattcatctcaacgttcacatactcaaattcattttttgtaactggatctaatcatgttgaagtgaaagaccggtaaacagcaccagtcgtggatcggctttttaccatctttgcattcactggcaccctgtcaccagcctcagcaggtgataaatctgcagcaagaataaca

SEQ ID NO: 135550 - DNA, 392 bp, Glycine max
  Clone ID: PAT_MRT3847_93410C.1
aggggaggagagctggttagcaaccaacattaacagggcacatctgaattactattatgcactgctcacttgcataggtctaattaactacctctactttcttgcaattagttgtgcctatggtcctcctccagggcaaacacttggagcttcagcaggcaaggaagaagagaaatttgattacagggagttacatacttcctagattattctttagtttacaacatgtactgtgctaaatactgccattgtagtattgtaacttgtttttgtgtaaaactaaaaggttaattgtagatccgcgctaaatatgaaggtatctttcccacgctaaatactgccattgtagtggaaacttttgcatggtaataaacttagttataccattaaaa

SEQ ID NO: 135551 - DNA, 276 bp, Glycine max
  Clone ID: PAT_MRT3847_93411C.1
aattcggctcgagctccattcgaaaaccaaaacaaaaaaacatggcttgctcaatggctctgtcttcccctgtttcactctttcaacttagcatgctactagggtcattctaatttttcaactcattctacacttgctcctcggccaaactcaaccctaccaccgactcacgctcactgtctatgcctgtgacctgcactgactatatccacaggaaaacctggaaatactatcccaaaactcagaaccctgtcatggtggtcttcatataacata

SEQ ID NO: 135552 - DNA, 1331 bp, Glycine max
  unsure (1)..(1331): unsure at all n locations
  Clone ID: PAT_MRT3847_93412C.1
cgaccgccgccagttgacactcgcgggtccagctacggctgttaactttcccctttgaaatcctttctgagttctgcgccaaccgaatcaagcagatcgaactccgccatagtcttaatcgagacagagattggaatctgattcctaaaaggcaacagtctacgcgtcatcgaatttctaaccctagtcgacttcccaagacaagaacattctacaaaaaagaagtaggacaacaccgcactatgaacggctccggacattctcactatacttgattccatgcctaagacgaaccacaaatacgacccctaaagccaaagggactcaaatctctcctccgacgatgcattcgccaaactctacgcctccgtcgacgccgacattgaggccttacttcagaaagcagataccgcttccaaggagaaaagtaaggcatccactgtggcgatcaatgccgagattcgtcgaaccaaggctaggttgttggaggaggttcccaagttgcagagattggctatgaaaaaggtaaaggggctttcatcacaagaatttgctgcccgtaatgatttggctcttgcattgccggataggattcaagctatcccagatgggacccctgcagcatccaaacaaagtggaagttgggcagcttcagcctcacgtcctggaattaaatttgattcagatgggaaattcgatgatgaatacttccaacaaactgaagaatcaagtggattcaggaaagagtacgaaatgcgtaaaatgaaacaggatcaaggtttggatatgatcgcagaaggattggatactttgaaaaacatggcacatgatatgaatgaggaactggatagacaagttccactgatggacgagattgatactaaggtggacagggcatcttctgaccttaaaaataccaatgttagacttagagatacagtgaaccagcttcgatccagtcgaaacttttgtattgatattgttttgttgattataattttgggaattgctgcttatttgtacaacgtgctaaagaaatgatacggcatagaagaccattagatcaatttgtatggcttatcagtatttcttgtattttcttggtaatatcgtggtgtgactcgtgtctgcttctttttaaaacaatatttttggacttgttcctgcaacttgagagatgcacttgtcctttatcaacagatctatatgtcgccgtattatgtcaaacagtgtagatttgtatttatacttgtgtaatatactaattcaatgtttgccttgaggataaaaaagtaatctattttcatttagagcggnaaaanaaanaaaaa

SEQ ID NO: 135553 - DNA, 346 bp, Glycine max
  unsure (1)..(346): unsure at all n locations
  Clone ID: PAT_MRT3847_93413C.1
agcttcctgggtagtttttcttttctttttttgcgagaaaactccctggtntttagtctagatgggcaaaacccnggtcnctttctttgcgagccggggaaaatgggctaaaaaaaganaggttggcagcngttcgttcgggcaganaggagagaagcctcgnccggaaactaaagtttcggtcanagacggaaaggtccttgaaaaacncctcagtgtcgcgggcncgggcttagatgcgtctttntgtngcgaantaccggcagaagcccccngcagnggttccgggaattcttaaggggcggaaggcggaactctcactcggtccctccaccttttctctttt

SEQ ID NO: 135554 - DNA, 378 bp, Glycine max
  Clone ID: PAT_MRT3847_93414C.1
gggaggaaaaaaatcttgttttttccccagcttttgtaatctgtatttttctatgccccctttgggcctttttgttttaccacttgccccatggggggccccatttttttcaaaagaggggcattaccccctgttgaatttcctttcaaattacatgggaacccccgtgttttgggttgccccccccatcttctgaattctgggctttccattttgttcctgggactctgagattaagcccctttttttcccccccaaaaaataatggggccttttctttttgaataatggacccctcatgggtttcccttacctttcggggtctttcacaaactcttggggggggacccccccaaatgagtttccttccattggccc

SEQ ID NO: 135555 - DNA, 393 bp, Glycine max
  Clone ID: PAT_MRT3847_93415C.1
ccttactgctgcccgaagacgacagacggggggggggcggatttaaacgattttccattccaaccccacccctagacacaatgcaaaccccaatgttgaacctttcacaaaccgccaagagctagcccacccagaacaacaccgcgaaagcagctggccacacacattcgaaaacgtcacggctggcctatagcaaaaactcataccaatgccctcaagaacgttgaggagaagaccccatcatggggatgctgaaggcaaaaggcaggagcattcggagacttcgggataagactcgacgagggagcccttgctggcagatgacgattatattgagaataagaagatatgtacctctgaagacctatgggaagaagagaggaagaaggccca

SEQ ID NO: 135556 - DNA, 217 bp, Glycine max
  Clone ID: PAT_MRT3847_93416C.1
gatacttcaacagttcaacacttcaacagactatatataagagtatgatggccgtgctttttagcataaatgaacacaacaaatgtgaaatcattgttgccaagtgccaactttccgagttgtgcagaatctgagcccttttgaaaaaaagttaagcaggttaagttgttatctggtgggccaggagaaggttgtttggaaaccatttctgaaaata

SEQ ID NO: 135557 - DNA, 335 bp, Glycine max
  Clone ID: PAT_MRT3847_93417C.1
ccacacgaccaaaggggggggtacttactagtggtataagaagcaaaaagacttacctgggtccgagaggggaggtttcactcttattttacactctggaaatcctgacaatttgatgaacgagagtcctactgtcatagtcgatcctttttcatcacggcttgatctgggatacatcctcttagatccaccatgggcttttcgtgcaatggctggaaaaggctaccattgaagaagaatacgtattgatggcagagcctgaccacatttttggcactcccctacctaatctagcacatgggggatacccgggtgcattactgtttttgtacatt

SEQ ID NO: 135558 - DNA, 302 bp, Glycine max
  Clone ID: PAT_MRT3847_93418C.1
cgtgagccgggaccctatagagcggccgacccacgcgtcctcctgttgcgagaagacgacagaaggggggggaccttttggcgttagggcgtggacagacacactgggctctcaaatgccgcgaaagagaggtacctggttagcatcccgcttgtgctgtgcggaacggatctctatataaccactgggaggtaatggatctccaggcatgaaataatggcaaaagccccaacaagagaatatatgcttgagacagcggagagctttaaaaaagtgatccggctgagagaataggatgacta

SEQ ID NO: 135559 - DNA, 658 bp, Glycine max
  Clone ID: PAT_MRT3847_93419C.1
accgcacgaatatctagccgtttggagcgatccgagaaaaactctgtaaacatgttcgctttacccggacctccttacaggtgatgaggcttctctctgactccttccgttacaatgcaatagatactggaatgctgggtgaagctgaggtgaagtggtgtgttaaaggaacagacgatcgagacattggagctgaccctactcgctgagggcggaggacaatatgagggagttcttgatgcacctgttaaggttagtagaatttgtggacacattcatacttcaggagcagcccgaatttgataagaagcaatacgataccttcatgagaagggttatcaagaatatgactcccaagctcgatgcagagcaacaagagttgtttaagaagcacatcgcgggagcaacgtaaacacctgctctctaagattaaagattttcaattatttgttggtgagagcatggctgatgatgcttgcttggtccttgcctactacaaggacggcgctgctgatccaacattcctgtactttgcatatgccttaaaggaggtcaagtgctaagtgacttaatgtaccgagctatctactcattctatctattttttgtttacgttctgtcctaagttacttgaaactatgacctggcattttgattt

SEQ ID NO: 135560 - DNA, 762 bp, Glycine max
  Clone ID: PAT_MRT3847_9341C.1
atggaaggtcttagttcggaggtgggatctctacctgatagttgcattgccattcatgatgatcccctggcattcgtccattcagccattcaccattcacccattcaactggaattttggttgaatgccggaattgtgtccacaaattgtggatggatagttggttggctggctggatggctggctggatggctggctggatggatggtgaatggctggcggcggtcgtaccttatcgcccagcatcatcttattctctatttgtattccctccatctttcagatacggatgtagccttggatgtgcccgtgcccaatgaagaggaagagcgcaacatgaaacattacgctgcgttgctaacgggccgcacctcctatttcctcaagggtgaggaaatgaagtccatgtacaccacctacaatccgcagaatgtggtggccaccgcccgtttcctgttccacaagaagaatctatactactccttctacacctcatcgcgaatcggtcgtccgcgtgccattcaattcgttgatgatgcgggtgtaatcctggaggagcatcaactggagaccaccttggcgggcactctcagtgtctatcagaatgccacgggcaagatctgcggtgtctggcgacgagttccacgtgattacaagcgcatcctgcgcgacgatcgtctccatgttgtcctcctctggggcaacaaacagcaggccgagttggctctggccggaaaggtggccaaatacacggccctgcag

SEQ ID NO: 135561 - DNA, 266 bp, Glycine max
  unsure (1)..(266): unsure at all n locations
  Clone ID: PAT_MRT3847_93420C.1
cggcagtggacgccgaaaaggaagtcgtggtcgtgccggagcttccaccgttcgattactccccgccgccatatgtgggccccaccgctgaggagattctggcgaagcgcagagagtatcttagtccttccatcttgcattcatacaagaaccccgtgagtccgcgctgcacacgattattttccgacaaataattatgagagtttaacgttgatccacnnnagtagtgtataagtaactcatcatttaaaagtttttaccatgtg

SEQ ID NO: 135562 - DNA, 1217 bp, Glycine max
  Clone ID: PAT_MRT3847_93421C.1
acgaggctcttataatcacacacacacctaccttaatagctatggaaactggaggctttcacggctaccgcaccacgcgtccgaagacgacagaagggggcctacttcatctctcttataatcacacacacctaccttatagctatggaaactggaggctttcatggctaccgcaagctccccaacacaacctctgggttgaagctgtcagtgtcagacatgaacatgaacatgaggcagcagcaggtagcatcatcagatcagaactgcagcaaccacagtgcagcaggagaggagaacgaatgcacggtgagggagcaagacaggttcatgccaatcgctaacgtgatacggatcatgcgcaagattctccctccacacgcaaaaatctccgatgatgcaaaggagacaatccaagagtgcgtgtcggagtacatcagcttcatcaccggggaggccaacgagcgttgccagagggagcagcgcaagaccataaccgcagaggacgtgctttgggcaatgagtaagcttggattcgacgactacatcgaaccgttaaccatgtaccttcaccgctaccgtgagctggagggtgaccgcacctctatgaggggtgaaccgctcgggaagaggactgtggaatatgccacgcttgctactgcttttgtgccgccaccctttcatcaccacaatggctactttggtgctgccatgcccatggggacttacgttagggaaacgccaccaaatgctgcgtcatctcatcaccatcatggaatctccaatgctcatgaaccaaatgctcgctccatataaaattaatgaagagtactgttcagtaggagaacaagacttcttggacttgattagcttaactctcagtgattggtgttagagtactgttgttgaggatggttaattttataattaagggctgggaattggggagttagtatatattcctaatcctaattatgtgcatctttaatttatggaataactttgttttttgttttaacttctgataatttggattttctgatgtcgaatgtggttttgtctatcccttattaacagtgccaagcttaaggttttacccatgctccaaaatggaaaacttgtactgtaatgttgtcctggtagtgatggtaattaaacctgcaagttatgtttatgtataaaccccctattgctcaaaattagagaaattatccttt

SEQ ID NO: 135563 - DNA, 1137 bp, Glycine max
  Clone ID: PAT_MRT3847_93422C.1
acggctgcgagaagacgacagaagggggcctacttcatctctcttataatcacacacacacctaccttaatagctatggaaactggaggctttcacggctaccgcaagctccccaacaccaccgctgggttgaagctgtcagtgtcagacatgaacatgaggcagcaggtagcatcatcagatcacagtgcagccacaggagaggagaacgaatgcacggtgagggagcaagacaggttcatgccaatcgccaacgtgattaggatcatgcgcaagattctccctccacacgcaaaaatctcggacgatgcaaaagaaacaatccaagagtgcgtgtctgagtacatcagcttcatcacaggtgaggcgaacgagcgttgccagagggagcagcggaagaccataaccgcagaggacgtgctttgggccatgagcaagcttggattcgacgactacatcgaaccgtttgaccatgtactttccccgctaccgtgaacttgagggtgaccgcacctctatgaggggtgaaccactcgggaagaggactgtggaatacgccacgcttggtgttgctactgcttttgtccctccaccctatcatcaccacaatgggtactttggtgctgccatgcccatggggacttacgttagggaagcgccaccaaatacagcctcctccaatcaccaccaccaccaccaccaccaccatgctcgtggaatctccaatgctcatgaaccaaatgctcgctccatataaaattatataattatgactaggattcagaacaagacttgatgatgattagcttaactctcagtaattggtgctagagtactactgttgttgaggatactttattttataattaagggctgggaagggagttagtatattcctaatcctaactatgtgcatctttaatttatgaaatcactttgttttaacctttgatgatttcgattttcttgtgtttaattaaattgctttgatgaatgttatgttgttctagtggggaaaaaaacctgctatttttgtttatgcctaaaggcactattgatcaaaattagagaaattatcatttaataagagttaagttccatgttaatttcagtcccctaaataaaaaatttgcggct

SEQ ID NO: 135564 - DNA, 446 bp, Glycine max
  Clone ID: PAT_MRT3847_93423C.1
gtcgggatctgcctattttgtaatataaaaatcagagcatttactcactggttattgctgatgagattatgagaccattatccagtgccatgatgatgtgtagaatgtgtttagttgttttgtggtacatgttacaggaaaaagttcctctaaagtgagaatatctataaataagcaggggagcattcaccctcgaattttagtgatttaagatttgatgcttcatgattattgaagttctattggaaatgagtggtagtaaaaaggaaattgttttggattttgtccttggtgtagtgaaaactatcctgattatcttttagtgaagaaaaatctaacagcactggctctgtctataacaactaggaactgcttatcaacctctgataaatatcagtgatgtcaactgttatgcttccccctggtaaagctccctttaacttact

SEQ ID NO: 135565 - DNA, 525 bp, Glycine max
  Clone ID: PAT_MRT3847_93424C.1
gcgttttaccaccacctggattttctgcagcaaaactggactcttcagaggcatctggtcggccatattccagtacctttgggaacatgcattctggtttaagcgaggttgagatgctgagaaatgattctatgcataggagttctactacagaagctgaaaataggtttttggagtcactcatgtctggtagcaagagcagttccccactcagtagtctcacattatcagaaggtttacaagggtttcttggtaatgattctggtaatttgggcccatcaggagtagatagcggaatcaacctttacttactggccaagaggatggcacttgaacgtcaaagatccttgcccaatgcttatccatactggccagggagggatgcagcaccccttccaccaaaatcagatatttttccagatgcatcgccacattcaaatatgttgtcttctttgagtgacaattctcgtctgcttcagtcccaaagtcctgaattgatgtcaataatccaaggattatctgata

SEQ ID NO: 135566 - DNA, 354 bp, Glycine max
  Clone ID: PAT_MRT3847_93425C.1
ttccaggaaggtttcccgtcttcactgtatgacgtcctccttctttgggggggggggggggcggataggtagaggtaggcggtacaaaagtaataagagaacgctatgggaggtgaacgatattgttggaggggaaaaaccttaaagaacaaagaaaagcagcaagtatgggtaggcaggtcataaggagggagtcctaataggagatcatgaggccgtagcgagataacgaaatttcaagagcaaaagggaaaaaaaaaagccaaaagaagaaagggagtgttgctattgccgcaccatatggtacttatcatgcggaacccggccttcccatgttacgtgcgtaaggcgacg

SEQ ID NO: 135567 - DNA, 1027 bp, Glycine max
  Clone ID: PAT_MRT3847_93426C.1
ttttttaaacttttttttggaagcactactacaaaatatgcttttaactgatgttaaaaggtttttttatgtaatagtgaagatgtcttctaatgctgtttaaaattatctatttccgtaatggcaggggactgaggctataagaagcataagggctgatttgtcagtatttctgaagctgaagtttagccctcacatatttactaagatgagcaaactacaatttttgagttttacaaacaaacatgatgaagatgatattgagtttcttcctaacgggcttcaatctttcccagatgagctaagatatctccattggaggtattaccctctgaaatccttgccagagaatttttctgctgaaaaacttgttatactggacatgtcaaatagccaattggaaaaactttgggatggagtgcaggtaaccttcctgttacaattttctccaaattgaaagacctacaaaattaacaacttgagctcatatctaacgtcttcatttgtattatttgttgtagaatttggtgaacttaagagaagtaaaagtctgtgattctaaaaacttgaaggagctgccagaccttacacaagctacaaatcttgaagaattggatatcagtgcttgtcctcagttgactagtgtgaatccgtctattttctctctcaacaagctccagagattgaatataggttactgttatattaccaaagttgtaagcaataaccatttaagctcccttagatatctcagccttggaagttgccctaatctagaggaattttcagtgacatcagagaatatgattgagctagatctatcgtatactcgtgtcaatgcattgccatcatcttttggacgtcaaagcaagctcaaactcctaagacttggctccactgacatcaagaaattgccttcaagcttcaagaatcttactgcactgcaatatctgagtgtagaattgtccaggcagcttcacactctaacggagcttcccccatctcttgaaactcttgatgccctcgt

SEQ ID NO: 135568 - DNA, 461 bp, Glycine max
  Clone ID: PAT_MRT3847_93427C.1
gacataattgggtttacattgatcagtgtaacgaactttttcccattcttctcacacactccccggccactaattactcgcatgcactgcaatttcacacacaaataactaaacaaaactcacacattctgtctttcattacatgcacatgccataccaatcaaatatttctctctgtcaccgcaactaccgtgacctcacctaacactcaccaacaattctctctaacctctatcacacacacaatacctgtctctctctactctggccatagcctgcacacttcatcccttctctttttaaaaactcattcatcacgtcataactcaagttgttcaaccgaagtgggcaagatgataagggtacccaatatcacaaagagtttcttcccaccaattgtcaagcccaagtgcaagaaactaagaatatccacattggggaataagttactcgggttatca

SEQ ID NO: 135569 - DNA, 307 bp, Glycine max
  Clone ID: PAT_MRT3847_93428C.1
aggcgttcgaacacgtcttataggactatatatatatatatatctaagactatcttagacaacgtggaatcatacttactacaaaatactgtccagttcaaaatactgagttatatatgtatttgaatgatgatattgaacattaccactctcagtttgacattctgaattgatcaaaattgaaagcatataaatatcatattttttaatttgttatctagagatatctcattagtcattcttgtttctactgtataattttactgctctatttcatacaaattgttaattactttcaagttgaaat

SEQ ID NO: 135570 - DNA, 224 bp, Glycine max
  Clone ID: PAT_MRT3847_93429C.1
aatggtgggacatgaattgtaaattaagtaagtaaatataatctacatttacaagattgtttaaacatcctaagttgcatttttcactttcaaatagaacttcgcccactggttgcgaagagccttcaatctttttggttccaatgggctaggatcagtgaaatactgaatgatataataaaacataagttaataatatattagcaatcataataatatgaaat

SEQ ID NO: 135571 - DNA, 296 bp, Glycine max
  Clone ID: PAT_MRT3847_9342C.1
tggggatctacttataacgttataaaaatacacacgtgttgctggtcacatgatacaaactccactaatactaaaagtatttctattattactccaaaaataccaaaataactcattgtgatatgcatttcatcaaatttaactgaattaaatttcattatacaagtcaccactcataactagacatacctgtcacctgattctcaaaaactccaaagtataaattctataaactccttcataaaattatcctctacatcttaacgaacttaaatatcaatgtgtccatttacact

SEQ ID NO: 135572 - DNA, 277 bp, Glycine max
  Clone ID: PAT_MRT3847_93430C.1
gcttggccattgaacgatttggccaacggtggctccactgtgcgtcctgccggtgtgctgttgatcgcggcagctggtgtgagcagctttatgcgttattagttctcaggtgttgcggcattttcagtcggcgttgattgcacagtagtctagtatatacaaagcgtaattaatagtctctgattcgtgcaaaaatttgtaacaaataacaagctgatcagcctaatgctaatatatagactgtaaatatatacacaacgaagccaggtacatgtca

SEQ ID NO: 135573 - DNA, 273 bp, Glycine max
  Clone ID: PAT_MRT3847_93431C.1
tgtgcaaggatcctcaatgtttgttgtgtgaacagagatacgcgtttgactttggcataaagttaactgttgtcttcttcttcccttcccctctctctctctctatctccctgatgggtatcttcaggtttcagtttgatgatggaataaggaaagatcattgtcgtattaccgatgactggatgacttttttgcagttttgaaaacttgttcgccttgtggcttgtgttgctgcctaagccaactactgccggcagcatggcaattgcagcg

SEQ ID NO: 135574 - DNA, 525 bp, Glycine max
  Clone ID: PAT_MRT3847_93432C.1
tgtaaagccggccgaaatcaaagtagaccttctccaaagtttgatgtggagaggagaaatgtcaatacaagggtggagatctgctgtgcagggaagccaggcttgttgctggctacagtaaacaccttggaaacattaggcgtcgagatccaacaatgtgttattagctgtttcaatgatttcacagtgcaagcttcttgttcagaggacctacgcgtccggacaattctgagttctgaagatataaagcaagcactatttagaagcgcaggatatggtggacgatatttgtgaaaatagaagagaggtgcaaaataacacagaaagtgcaccatagctaggggagagtttttgagtttctgatcatagtgatatccattgatttacaagccaatctagccggatttcgtttttcttagtgtaagacaataattgatttcttcaacatgatgcctattgtaacattttcaaatggaatcgtcaaaaaaatgtcaaaattattggagatgcccaatactcttggtg

SEQ ID NO: 135575 - DNA, 278 bp, Glycine max
  unsure (1)..(278): unsure at all n locations
  Clone ID: PAT_MRT3847_93433C.1
gttcgccggctcaggctccngcatcgcctacaacaagcncaccgacaacggngntgncacccctgccggcctcatctccgcctaccatcgcccatgcattcgccctcttcgtngccgtctccgtcggcgccaacntntccggcggccacgtnaaccccgccgtnaccttcggcgcnttcgtcggcggcaacatcaccttcctccgcggcatcgtctncgtcatcgcccagctcctcggntccatcgtcgcntnccantcctngattcgtcaccgcctc

SEQ ID NO: 135576 - DNA, 392 bp, Glycine max
  Clone ID: PAT_MRT3847_93434C.1
ttcatgaggtttgcttgggtggtgcgaccgcgtaacctacatcttcttgcatgccatgtcaccaatgagactatgcaactatatcaactctcaaggtggttcagagctcaaaggacccttgaacagaacaaaaaggaaacagatgcagagtgaaacgtgatttgtttgaactttgaaattcaaagaaaaaatttgtcctatagctttagaaacaattccttgacagtaaaaaataaaataaaaaacaaaaaaaaaaacaacgcctttatgacttgtcatttacagttgactgttttaatatgctttgcaatttggccacattagaactttttataattatattgtattaaaataattgtttatttcatatatttcttccgtttttaagatct

SEQ ID NO: 135577 - DNA, 474 bp, Glycine max
  Clone ID: PAT_MRT3847_93435C.1
aactgaacatttatctgggtaaccaatacaccgagagaaaactgttgtcataaacaccacaaaaaagcaagaaaaaaaaattcccttgatattgaagatactaaaacttactattaatatcttcaggctgggttttagatcacatcagcaacaatagaatatacatgagtcattactggttttcaccccaaaaaagaaagtgaaaaaaatttacaaaagcaaactatagactaatcaatacaactatgcgatcttacaagtttaccactatgcacaacctatgacacttccaccatgtaacaaaattggtagatatacaacttttttcccttcaccaaagagaaaatgtggaacactttgtttaagtgttccagcaagatttagaagcaacagctcaaaagggacaaattttatgacaacaattattttgccaattttgcggattctcacacatttttatcttaacaaatgagt

SEQ ID NO: 135578 - DNA, 904 bp, Glycine max
  unsure (1)..(904): unsure at all n locations
  Clone ID: PAT_MRT3847_93436C.1
gagatcccgtcgtcgcaggcgcagagtagagcagcacagaagagggaaaacggcaccgccgccgtagaagaaaacaaccatggtgcacgtctccttttacaggaactatgggaagacattcaagaagccgcgtcgtccgtacgagaaggagcgtctcgacgcggagttgaagctggttggtgagtacgggcttcggtgcaagagagagctgtggagggtgcagtacgcgctcagccgcatccgcaacaacgcgcggaacctcctcaccctcgacgagaagaacccgcgccggatcttcgagggagaggcgctgctccgaaggatgttccgttacggtctcctcgatgagacacagaacaagcttgattacgtcctcgccctcaccgtcgagaactttctcgagcgccgcctccagacccttgttttcaagtccggcatggccaagtccatccaccatgctagggttcttatcaagcagagacatatcagggttggtaggcaagtggtgaacatcccatctttcttggtaagggttgactcacagaagcacattgacttttcacttacaagtccccttggtggtggtcgccctggaagagtgaagagaagaaaccaaagggctgctgctaagaaggccgcaggtggagatggagatgaggaagacgaggattaaacttttaatcatgtctttttctagtgctattagaccttatgccaccttttactttgcgtacctagtttattgtttttttattgttatacattttcatccttccgttccttgtttgagataatattgagtgacattatgtttttgtgaacttagatattttaaagtatttaagattttcattaaataattttgatggtcgttgattggtttcctctgtcccannttntgttc

SEQ ID NO: 135579 - DNA, 416 bp, Glycine max
  Clone ID: PAT_MRT3847_93437C.1
caaaccaaaagctttacaagaaataaaccccccttaaataaaccgggggatttaaaagtccaattaaagaactcccttttttaaacttttcacgttttggaaagacacccatttttcggggggggcagggaaattttttttggaagcaaaaaattttttttttaggaaaggaccacaccccctacacagaagtgatcaaaattttcaaaccctacataagtgcaattatgagtcctttctttaatgggtatccttttcctcgccactgcctttctgaatatcattttaataattcacctaaaatacagacttttaaaatttttttttatccccacacagaggaccttccgctttgttttgtgtataggcttccaggtttttatcgtcctccccttttttttttttaaatttggccc

SEQ ID NO: 135580 - DNA, 370 bp, Glycine max
  Clone ID: PAT_MRT3847_93438C.1
gtaaagagctgcttgcaatactgccctcagacgcttatcttatccaccgtagcccttcagtctatggcctcgattcatagcagctggcatgcagaaaaaactacagctggagagtcctgtggtgacaagatgcatcaagagattctgaccactcgctgctatctggtgccaagacatgaatggcgtgcagtggactagacctacactcgttggaatctgtacatgcatgaatttccgcactagtgtacagtgtcactacggctaatccaattgagaccataccttgctagatacacacacactttactgtgctgtgagaagcttacgctcgatacaccgtaatgtgaatggtattcggacagacaaaatt

SEQ ID NO: 135581 - DNA, 215 bp, Glycine max
  Clone ID: PAT_MRT3847_93439C.1
cccactcttccagataagaaaaaaagcttgttcttaggtaccttgacacacagataatggtggtgacgacaaattagcgagtatgatcatttcttgtatggtggagattcctatttggagctaggtcaaagtggatccactaagcctactgaaatacttgatcgagatcgtcgatatgatgattggctctgttttaccagtcaatatcattatgt

SEQ ID NO: 135582 - DNA, 545 bp, Glycine max
  Clone ID: PAT_MRT3847_9343C.1
aatgactacgcgcacgggaaaaaaagacaaagggggatctttaggacgccgcaccttaaaaccggaaacaaaagcaaccggcaccagagaccaagaacccgccaacaacggcccacgacccgggggacgaccgcccaagggaaagaaaaccactccctgcgcaggccacagacggcgcgaaacactttcttttccactcttagtttatttgctgaacactctcctatttgatataggacttcgtgtcagatataaactttctctggttctttctcaggtctctgcttaatttcaagttcaagctggtgaaattatggattagtgctcccactctcctatgtggtataggactttgtgggtagacttttatatatgtgacctttctttcactctcttattctcactgatccgcattggcgttcaaagaggtcttatttgaaaacacttgggcgttgggcaaatgtttgcttcgttaatttttctggggaccacagctcactggaaaacatttttactggagagattggacatctggtgttatatac

SEQ ID NO: 135583 - DNA, 508 bp, Glycine max
  unsure (1)..(508): unsure at all n locations
  Clone ID: PAT_MRT3847_93440C.1
ctcggcctaactcgtgtcgtgcattttctttttccgcgtttgctccattctttcattgttcttctgtctcttaattattttctatctctaagtacttccacaaaggggtaacctttttcctccgttgaacacggtggagaaggtttctccactgccttttcacacctcaacttcccgcgttcttcacttgcttctcgaacttcttcctttttgaagttattaattaatactagtttcttattcggtttctagatgtctnannaacaggagcacagcaaaccacccntnnnnnnnnnnnnncannctannannnnnngnncnngannnntngntatctcaaanggcctttccnnncnnaaaaaannggagnctgattgaacgctgaagtggncagaatgtgttttgaaatcaagtggaccttgagtgcttaccttaatgtacaattttgaattgccttggtgaattgatacaagtgggaggcaatcaatagttgtaacttggatactct

SEQ ID NO: 135584 - DNA, 501 bp, Glycine max
  Clone ID: PAT_MRT3847_93441C.1
cttgggggggggggggggggggggaccattatatagggttggccagggtttatggcgagagcgtaactagatagatacaaaggatagatgatagaaataatagccgtggactacgggttgcagttgagatccacagaaggggattacgattaaagcagaaacggtataatagaaagagggagataaatgttttggacgttacgagtatagtataattataagtacctagagtgggcgagggaagcctgccagccagagagactactgatacggcacattagccaagtgatgttatatatagggtcattgtgctacagtggcgaagagttaggtgtgttttactgtgtcttttagcaaggtggaagcagttacgaaccgggcggtggaaaatcaagcccactagagctattggtattagaattaatgacaacaattttagcagttaaagctggtttatacagcgagccctagcacatcttattaatagagcgtgctagaaaa

SEQ ID NO: 135585 - DNA, 715 bp, Glycine max
  unsure (1)..(715): unsure at all n locations
  Clone ID: PAT_MRT3847_93442C.1
ccggnaattcccggcgtcgacccacgcgtccggtgaatcttcccataaacctaaaacccgtgggctcacacaccatgagctggagaaccctagcttccacttcaagacacactttcaagagactcaatgcaatcctacgatctccttccaccaccttcccttcttcacgtgcctctccctccctcttccaccacgcgccgttctccaccaccaccctgcgtggcccccaacccaccaacgccctcatcgaccctaaactcctctctccgcataacgacgccgacgacgacgaaaccacgaacgagttcctctcccgattcgtatggataatgcgtaagaaggtgaatgaagcgtaccctgactccgacaagcccgctgtcgacggcatgctcttcgccatcgtcgagaggttcgtttccgaaatggaaaagggcggcatcgaaacgatgtcgtcgtttcgttcggctgatttcagcgaggatttgtggagaacggtgtgggaggtgagcaatttggtgctggaggacatggacaaggagataaaaaaagagaaaatgaagggcttcttgcagtgtgaagaagtcaaggagatgtgcagattcgccggagaagtcggnattcgcggcgatttgctcagggaacttaggtttaagtgggcgcgtgagaagntggaggagcatgaattctatgagggtttggagagattgaggaaaga

SEQ ID NO: 135586 - DNA, 512 bp, Glycine max
  Clone ID: PAT_MRT3847_93443C.1
ttttatttttttttttttttgttttattttttttttttttaaaaaggaaaataattttttgaatcttaatgttattaaataaaatttaaagaaataaacctttttttggattaaaattccaaaaaaaaacaaattttaaaaacggtttgaggcactcctatataccaatgaaaatggctaacggaaaaaaaaaaaaaggttaaaagaaaaaattggggggtaacaaaagaaaaaggcagaaacaagctatggagtccgagcaaaaatttcctccttgaatcgatgctttccaaaaaaaggcccgttttcggagccaaaaagccggccctcctcaaccattgaaaaaaacacgggggggcaaggcctcttattaggaaccgtagccaaaggggctttgacaataaaaagcattaaccccatttcttatacaaaggtaagaaccccgaaaacccccacatcgaaaacccccgcgcgccttttttttgaaaaaacaaactggaccctcctgggaa

SEQ ID NO: 135587 - DNA, 393 bp, Glycine max
  Clone ID: PAT_MRT3847_93444C.1
ggcctgccctatatttcttttgttttttatttcagccttgccgattacaggacttgatttatatttctttcaagccaagatagatgtgctttcagagattctggttgaacagtactagcgtagaagtacacggtatactgatattcaatccgcgacaactattaacccactgaactggtttaggataacgagaaggctcttataagtgggacgacaatccccaaaccggcaactatgaatacaaaaccaccacccttgtcctctaagtaagggtaatgctcggggcgtggggagcaaacactggctcaatcttcaccggcggagctattggttaccgcaagggattcacctgggcagcacccgacaggatccagcagggcattggctttggga

SEQ ID NO: 135588 - DNA, 510 bp, Glycine max
  Clone ID: PAT_MRT3847_93445C.1
ggcgcaactaataatcaccaccttagcggcgaagaagtgttgtattatggtacagcggtgaagcagtatttgtggcgtaataaaattgacgacaggtgcatcatgttacatgatgagattttgtatcttatggaggcaccgcggaggatgatgatgaagaaaaaggtgtgggctgctaactcataagacggctggtcggcgaacttgtcgtccttaggactaccatcattaccaccagaccagctgatgtgacgaaccccttgttgtcgggcggcgacctccttatgagggacaccacccttcggggggagcaactgctgctcctccttaggaaggaccatgctgaacagctgcttcatgttgttgttggagcacctgctggtaacaagagtaacgaagcgctgcttcttggtggacttgagaaggaggggaccctccttcatgatggcggcgccgccggcggtcatcttaaagatctgctgttcggggggggagcccctaattacgtca

SEQ ID NO: 135589 - DNA, 1296 bp, Glycine max
  Clone ID: PAT_MRT3847_93446C.1
aaattgtaagggatgtgaaagaaaagctgtcttacattgcccttgactacgagcaagaactggagacagccaggaccagctcatccgtcgagaagagctacgagttgccccagaagagcatccagttctcttaactgaggcccctcttaaccccaaggctaatcgtgagaagatgacccaaatcatgtttgagaccttcaacacccctgctatgtacgtagccatccaagctgttctttcactgtatgcaagtggtcgtacaactggtattgtgttggattctggtgatggtgtcagccacactgtccctatctatgagggttatgcactcccacatgccatccttcgtcttgatctggccggtcgtgacctcactgatttcttgatgaaaattttgactgagcgtggttattccttcaccacctcagccgagcgggaaattgtaagggatgtgaaagaaaagctgtcttacattgcccttgactacgagcaagaactggagacagccaggaccagctcatccgtcgagaagagctacgagttgcctgatgggcaggtcatcactattggcgatgagcgtttcagatgtccagaggttctgttccaaccatccatgatcggaatggaagcttcaggcattcatgagacaacatacaactccataatgaagtgcgatgttgatatcaggaaggacctttatggtaacattgttctttcaggaggaacaaccatgttccctggtattgctgacagaatgagcaaggaaatttctgcattggcacccagcagcatgaagatcaaggttgtagcaccacctgagagaaaatacagtgtctggatcggtggttctatcttggcatctcttagcaccttccagcagatgtggattgcaaaggcagaatatgacgaatctggtccatcaattgtgcacagaaagtgcttctaaactgtttcgatagatagggttattgaagggaaagactactatcatcacgatttgtctggaagcaatgcattgcagattgtaaccctttgattctagcttttgttatcctttcattttattctcttgttggagtgatcatttatttgcagaaggtgaggagagttgttttttaaaatggtccagttcttttcttatactttgataagtttttaactggttcattctgagtatgagttagctggattatatcaaactacgcttgtacccttggtatgcataattataatccttcatccgttgaactacaagttaactcttttcaaatacaacagtagcaagttaattcactg

SEQ ID NO: 135590 - DNA, 1764 bp, Glycine max
  Clone ID: PAT_MRT3847_93447C.1
caggaatgaatgggtgtaagaaaaaagagcaaaaaaagtgaaaaagagagaaaataaaataaatataaatataataataaaaataggagggcaaaaaccaagcaccgtggaaatcgcctgtttggatttaaaaccaaaaaaaatcaacggtccacattgcatctggtggttcttatattgaattccaatttccatttccacttggtccttctctctctctccctctttctcgtcactagctctgtgcattcttctctcgctctctgccttccatcacactcggcatttcctttcccaagatagtagaagatggcagacactgaggatattcaacctcttgtttgtgacaatggaacaggaatggttaaggctggatttgctggagatgatgccccacgtgctgtgtttcccagcattgtaggtcgtcctcgtcacactggtgtgatggttggcatgggccaaaaagatgcatatgttggtgatgaggcacaatctaagaggggtattttgactctcaagtaccccattgaacatggaattgtgagcaattgggatgatatggaaaagatttggcatcataccttctataatgagcttcgtgttgccccagaagagcatccagttctcttaactgaggcccctcttaaccccaaggctaatcgtgagaagatgacccaaatcatgtttgagaccttcaacacccctgctatgtacgtagccatccaagctgttctttcactgtatgcaagtggtcgtacaactggtattgtgttggattctggtgatggtgtcagccacactgtccctatctatgagggttatgcactcccacatgccatccttcgtcttgatctggccggtcgtgacctcactgatttcttgatgaaaattttgactgagcgtggttattccttcaccacctcagccgagcgggaaattgtaagggatgtgaaagaaaagctgtcttacattgcccttgactacgagcaagaactggagacagccaggaccagctcatccgtcgagaagagctacgagttgcctgatgggcaggtcatcactattggcgatgagcgtttcagatgtccagaggttctgttccaaccatccatgatcggaatggaagcttcaggcattcatgagataacatacaactccataatgaagtgcgatgttgatatcaagaaaggacctttatgggtaacattgttctttcaggaggaacaaccatgttcccctggtattgctgacagaatgagcaaggaaatttcggcattggcacccagcagcatgaagatcaaggttgtagcaccaccggagagaaaatacagtgtctggatcggtggttctatcttggcatctcttagcaccttccagcagatgtggattgcaaaggcagaatatgacgagtctggtccatcaattgtgcacagaaagtgcttctaaaactgtttgagagatagggttattgaagcgaaagactactatcatcatgatttgtctggaagcaatgcattgcagattgtaaccctttcattctagcttttgttatccttttcatgttattctcttgttggagtgatcatttatttgcagaaagtgaggagagttggtttttttttttttttttttaaatggtccagttcttttcatatacattgataagtttttgactggttcattctgagtatgagttagctggattatcaaactacgcttgtacccttgttatgcataattataatccttcatccgttgaactac

SEQ ID NO: 135591 - DNA, 729 bp, Glycine max
  unsure (1)..(729): unsure at all n locations
  Clone ID: PAT_MRT3847_93448C.1
gattaaacttgaatgagtaatatatccttcctgaacagaacatgagagaatgaaaagaaatcctccccagatagttcaaaacaaagtgaggaagtattgccccaaattattaaaagactaacataacaagaataaaaaaaagttgctcatcagcttcagttggtgcgacaagtaccaacatacaagaaagtaacatctaccacaacaaaaaagaaggggcctacctacatgagcatgcagactactaatgacccttaaccttatcatctgcaacaacattgagaataggcaagctactaaggaactcatccagcccctcaaaaaacccaatcccttcaatattatcctcagcattcccattcccttcacctgctccatgcacaggctcctccacctcattgctaaactcaacatttaaatccaacttgcccaagttcctctcactcctcctccttgatccacccaacgccacagccttcttgctagactccggtgccaccggcacggcaagggcaccaccatccacagcctcaccattccccacactgtcattaccgtcactattctgaacccgtcttctnnncctctcaattgtaggtacccttctaacatcaccaccagcattgcttctcctcttccttcttttcntcctcctcgtnnnncccttctgannnncgccacgccagtcatcatcatcggaatcatctnnngtcgtgtcggannnnnnnt

SEQ ID NO: 135592 - DNA, 189 bp, Glycine max
  Clone ID: PAT_MRT3847_93449C.1
cccacgcgtccgcggacgcgtgggtggaaactagtagtgaaatttatatctcatgttcgttataccaatccaaaaaaaatggaccataatatcgttacattttttttggattggtataacgaagatgagatataatggaaactagtagtgaaatttattgtatctgcggacacgaagacggacgacgta

SEQ ID NO: 135593 - DNA, 1237 bp, Glycine max
  unsure (1)..(1237): unsure at all n locations
  Clone ID: PAT_MRT3847_9344C.1
atttccaaatcaaatatgttgcttccattgaagtttttgttagagaaatattttgccagcaaccgatgagcataatcatgatcatattttctgaccctctcaatgcactttgcactggcccaggacctgaggtgggcactgacaaggtatagtttcgatgcagttcttcctttcgtcatcgtattcccagtgtcaccgaagcgaatgtaactatgtttttattgtaacttgtgttgtatcaagtaaaacagaagtgcaattatcccaatttgcgtgacatgcccataaaacctgagtttggaagaaagaagacgaaaataaaatggcgaccgtgccttcaccttgtcctcctccacgctcctccccaaacaaccaggtggaagctgctacaaataatggggcttctcacgtcgatgataaaaaacctaacttcaccgatggtcgttcagaaaaatatgatcatgattatgctcatcgtttgctggcaaaatatttctctaacaaaaacttcaatggaggcaacatatttgatttggaaataacagtaaatgatgaaatcataaagtcaagcagcttgacttgttacaggtcatatgcagatcctgtagtaggttttgaagaccaatccagcaatggatcaactccaccagcagattcccaagctaacatccccaatgggaaacatgcggtgaagaagaactgaaataatgtgccttgagaagcatcatcagtgcatgacatcttagaaagcttaacgcaaattcaggaacttgtgactgaaaagatggtcatggtctcaaccatcaaattcctagcgtaaaacagatggttttttggggtcataattacgtgttaagaggcgctatttatacgattcagtatactgattgcaaagtgcatcattgccacccactaacttattctgcatttcacattcattctagttgtttaagtactataaagaaagtccatgatataatactgtctctgtttctttttaattatcagattttttatcatcgacgtgagaaaccccattatttgtaacagcttccaactggttgttggggnaggtgttgccggagcgtggaggaggaggaggaggagaagaagaaggtgaaggcacgctcgccattttatttatatcttctttcttccaaattcaggttttaggcatttgcaaattgggatgatttcgcttcagtttcacttgtgatactatcacacaagttacaac

SEQ ID NO: 135594 - DNA, 316 bp, Glycine max
  Clone ID: PAT_MRT3847_93450C.1
ggctcgagcacaacggatcgtgatggatcatcttcaagaccaatggcggacaagaaaaagggcaggtgggaggaaggctaactctgaagcaaatgatgtaaagccatgtgctatggatgtggacaaggcaatggtatcttatctgacgtctggtacaaagtcaactgaaaaagatgattcagaggagactcccaagacaaaagtgccaaggagactcaattcacgaactgaagctgagtctaatgcgaaggaatatggacgaaaccttgctggcttactgggcaaagcatgatgcgctggtgatcctcagttttac

SEQ ID NO: 135595 - DNA, 107 bp, Glycine max
  Clone ID: PAT_MRT3847_93451C.1
attactgatggtattatgaccagctagattgccgcttgggcaaatatcccacaatatgctcctgaacctgtcatgtaagacaagacccaaaactattgatgctaatt

SEQ ID NO: 135596 - DNA, 271 bp, Glycine max
  Clone ID: PAT_MRT3847_93452C.1
cccacgcgtccgcccacgcgtccgcccacgcgtccggttgtttttctttttttcattggcattgcaaagcaaaacccttgcaaatggcaatggcttccaacaaggttattgccaccatcttggttctttctttccttgcctactcaccatcattaaccattgcttgtggaccatgccacccaaaacctattccttttccccttcttccatcagggaagtgccccaaggacacattgaacctaggggtgtgcgctgatgttctaggacttgt

SEQ ID NO: 135597 - DNA, 511 bp, Glycine max
  Clone ID: PAT_MRT3847_93453C.1
aaaacttttcctcctcttggtaagcataaaaataggaccgggaaggaaaaaagtggtctcacttaaattctcaattttgtctaaattggacaaaaaaaaaacaagaaccacaacttaacttcttgtatggattataaagcaaatgcgaaggaaacaaaaagaatgagaagattgcatctaaaatgacaacatcatccatctcttacacgtttattgtgcaagaatgagaatgagaatgaaacaaaaagaaattcgaagatagaacgtttctaaaaaaacatttccttcccttggttggtacaaaaatatgaccttgaaggaaaaaaaattgttcgaaataaaatttaatctgcccaaattggacaaaaaagaatagaataataatttaattctgttgcgtggattataaaacaaattgataatgaaacataaagaaatgagaagattgcacctaagaagataaattacccctttttattctaatctttaaaaagatagggaaataaaagaa

SEQ ID NO: 135598 - DNA, 664 bp, Glycine max
  Clone ID: PAT_MRT3847_93454C.1
cgcaaccttcctggtttcaatccaaatactcgtcattgtttgtatgggttggatgctgatttgattatgctctccttagctacacatgaggttcacttctcaatattgagggaggtagtcactttccctggtcaacaggagaagtgttttctgtgcggccaacctggccattttgcagctgattgtcgtggtaagccaggtgagaaagctgaggactggaatcctcctgaatgaataccccatttcacaagaagaaatatccagtttcttaacatctgggtgctgcgtgaatatttgcaatttgaattggagatacccaaccctccttttgagattgactttgaacgagtagtggacgattttgtatttctatgcttctttgttggcaatgattttcttccgcatatgccaacatatagagatccgggagggggctttaaatttattgatgcatatttacagaaaggaattcaccgccatgggtggttatcttactgatgcgggcgaggttttcttagagagagtgcaacattttattcagtctgttgctgttcatgaagatcaaatatttcagaaacgagttcggattcaacaggctacagaaattaatgaagagatgaaagctagggcaagaggagacatgcctggagaacacgtgcttagt

SEQ ID NO: 135599 - DNA, 343 bp, Glycine max
  Clone ID: PAT_MRT3847_93455C.1
cttacgtttttggcggacgcgagggctggccaaggtcacgttgagtggccttcacttaactgtcgcagacatcgacaaccaacgcacatcactgaaggaagccatgtcagaaagcaagacgtcagcattgaatacgatgcatgcacaattccaaatgatcgtggctcattggacgttgccaaagtcggaaatcacaaacaaatggatcgttgccatgctgcacgaagcaaaggacgactgggatatgcaacacagatgccatacgccgagccagttgtgcatgctcaaagtcctgaaggttacaaagactacttgcctgcggaaggcgatagtcaagagggag

SEQ ID NO: 135600 - DNA, 270 bp, Glycine max
  Clone ID: PAT_MRT3847_93456C.1
actgccacccagaagactgtggatggcccctccgggaaactgtggcgtgatggccgcggggctctccagaacatcatccctgcctctactgcgcgctgccaaggctgtgggcaaggtcatccctgagctgaacgggaagctcactggcatggccttccgtgtccccactgccaacgtgtcagtggtggacctgacctgccgtctagaaaaacctgccaaatatgatgacatcaagaaggtggtgaagcaggcgtcggagggccccctcaa

SEQ ID NO: 135601 - DNA, 126 bp, Glycine max
  unsure (1)..(126): unsure at all n locations
  Clone ID: PAT_MRT3847_93457C.1
gnagaactnacagaagangggaagccttgntcgaagccattaaanggtncacaggtcntttccacttngccacncccgtngacttaagtccatagacccagaggatnaaatgataaagcctacaat

SEQ ID NO: 135602 - DNA, 815 bp, Glycine max
  Clone ID: PAT_MRT3847_93458C.1
cacttgttgcgccgaacctgggagctggcaagtagcaactaccaaggtctaccaatgcacgcgccacctcttccagtttccactattcccttccaaaccctaattttactccaattctccgtttaacatttgcaatttttgattccaaaacaccccaaaatataatttattaagagcatatacgttttttctttcttttttgctgttgcccttcctgtgttgcataacacaaccaattcttttaccactctgtgatttgattactaagcaaaatacaactactttctcagtttaattgagttcatttacagttctttgcatcaaattttgattttgaattggtgggtgtttttgttctgttatgagtgatgatgacactcgaatcttgggttctcagtcaccaaatgttctcctccagttccagattgttttaccccgcgcatgagaatcggcgaaagagcttgccaatcaaagttttgggtagaaacactagatactcatttccctttgtgcccaattgtgttgctccatcctcttttacaaggcttcatgcttcaagttttgaagcagatgccaagttacaagatagaactcgactgaggtgtttaggtagtagcagtgattgtttgagcgatagaaatgtcgtttccaactccaatttgaactgtatacaggaattgttaaagaggggaatcatccttgctgcaactgtttgtgggttattggtgtttgggatggtcaccgagttttcgccgttgaagggggttgtgaatgcaagatatgggggtcttttggacagagcattcttttgctta

SEQ ID NO: 135603 - DNA, 2795 bp, Glycine max
  Clone ID: PAT_MRT3847_93459C.1
cctttgcgttcggagagtgataggtgagtggggagagaaagacagagagagaaagcgggtcagtttctttttggagtattgggtcagcttcttttggcaatgccaaagttggtcacgctctctgaaaatgcagcagctgcagcagcaggaggcatgaagaacaacaacctcaccactccttcaaatatcatcatttctcactcgttacttcactttcttctttgcttctctctcttcttccctctcctttctcattcttctcctcatggctggtctcatcgatctcaacaacgcaaccgaagacgatgaaatgccgtcgtctggctcctcctccaccgtgtgcctcgagctctggcacgcctgcgcgggtccattgatttccttgcccaagaaagggagtgttgtcgtgtacttccctcagggacacttggagcaacaccttcacgattttccgctccctgcctctgccaacatcccctcccatgtcttctgtcgcgtcctcgatgtcaagcttcatgctgaggaagggagtgatgaagttcattgccaggtggtgctggttcccgaaactgagcaagtacatcagaagctgcgggagggggaatttgatgctgatggtgaagaggaggatgctgaagctgtgatgaagtccacgacgccccacatgttctgcaagactttgactgcttctgataccagcactcatggtggattctccgtgcctcgtcgcgctgcggaagattgcttccctcccctggattacagtcaacagaggccttcacaggagcttgtggcgaaggatctccatggccaggaatggaggtttcgacatatttatagggggcagccgcgaagacacctgcttactaccggttggagtgcctttgtgaacaagaagaaacttgtatctggagatgctgttctgtttctcaggggtgaggatggagaactgagattgggaattcgtagggcggctcaactgaaaagtggcagtaccttttcagctctttctggccagcaagggagtcctaccagtcttatggatgtggttaatgctttgtctgcaagatgtgcctttagcattcactataatccgagggtcagttcatctgagttcatcatacctatccacagattcgtaaagagccttgattattcttattcagctggaatgaggttcaggatgcgcttcgaaaccgaggatgctgcagagcgaagattcacaggattaattgttggaattgctgatgtggatcctgttagatggcctggatctagatggagatgcctaatggtaaggtgggatgacttagaagccacaaggcataatagggtttccccatgggagattgagccatctggttctgcttctactgcaaataacttgatgtcagctggtttgaagaggaccaagattggattgccttcagccaagctagattttccagtttccaatgcgattggaacatcagactttggggaatcactaaggttccagaaggtcttgcaaggtcaagaaatgttgggtgttaatcctacttatgatagttttaatgctcagagtcaccagctatctgatttgaggaggtgctatcctggctcgaactatcctaggattgctgcaacaggaaatagcattggaatcccacaagtgagttccaatgtttccagcaacggcataggctttagtgaatctttcagattccagaaggtcttgcaaggtcaagaaatacttcctagccaaccatatggaagggccctgtctgttgacgaggcttgtggaaatggtcgctgtggactctttgatggtttccaggcgatgagatccagaaatggatggtcttcccacgtgagcaacaattcctcacatttgcatcctcctgttccatctgggcaagtttcatctccgtcatctgtgttcatgttccagcaagctgtcaatccagtttcaaactccgattataacaaccaaattggtcaggtgatgggaggtaaggtccatcagcgagtttcatatgcgtctgaagttaaaggcggaaaatttgtatcaaccccctatgagcctcttctccgtggactatctcaggaaggcacaaattcttttggtctttcaaactttcataatcagctggatagttcacgttcacacgattctgtttcagtactgagagctagtcaagagttggttccctcgtgtaaaagtagatgcagagtctttggattttcattaactgagggtgctcccgttgcaagtaaagaggcgactgactcatctgcagttgcttgtgctggaccttcctttacaagacatgttgaagatgatttccatccagggcattcacttaggagcaaggcagtggcaagttattgcaccaagggtgtgctgcaatattgacttggaaatcttgatgtatgctggtactgatgctggcataaggtagcagaagagaatgtccacagttgttgtacttgtgtgctttgctctagtgacttggaatattgggagactaaaatattgtaactattcgtctaatttagatacttgttaaattggctatgaccacgttctagattctgtattaatcatgtatctacccttcattgacttgtatggggaaaacctctaaacgatgcatgtttatccaccgttttggccatatgaacaaagtaagccaggtggttgtgcataacccttcatttatcttgaattgggcattgattacattagagagcaatagctctcttaatgtttcatgtccttaatgttgtctccatttttactcactgttcaaaaa

SEQ ID NO: 135604 - DNA, 449 bp, Glycine max
  Clone ID: PAT_MRT3847_9345C.1
tttacttgttcggtgagaacaccatggaattgggatcctagcaagcggagctttagtcagttgactattgaccttatcggcggaggaatgatagtggacaaaactggagattggatcacacttatacaaaattgtccaatgagtaacttgttgagagttgctgctcggaagaaaggctgtttaatggttaagattgagatggctgggaatgcaccagtcaaaaggagtgattgggcctcactggtacaagtgttttcaacaaacagcatcagtacagagcattctgatgcatgtaagtggacaaaatcggtaccacattcctgggaatagatcttcccaatagaggtgcgtggacctaacaatggttgcgaaatgtggagttctgagtgggcaaatcaaacttgatggcacttgacgttccatattgacaattccaaacaggatacagt

SEQ ID NO: 135605 - DNA, 239 bp, Glycine max
  unsure (1)..(239): unsure at all n locations
  Clone ID: PAT_MRT3847_93460C.1
ccgacccaggcgtacgggtactcntagacaaacgcgtgggattctttcaaagaagacaacaaaaggggcttcggaggttatatacaataaaaaaacactagccccaacaacaacattgtggtgctcaatgtctatttatagcttcttttactcatgggtgatacatctcctcacattgaactgaactctttcaaaagtgatcagtcatattatatgatgatgatatacttcaaaaccat

SEQ ID NO: 135606 - DNA, 2799 bp, Glycine max
  Clone ID: PAT_MRT3847_93461C.1
gtgataggtcagtggggagagaaagacagagacagagaaagcgggtctctttctttttcggctgcgagaagacgacagaaggggaatgccaaagttggtcacgctctctgaaaatgcagcaacagcaacagcagcagcaggcatgaagagcaacatacacaacaccactccttcaaatatcatcatcatttctcacttctcatccttcactctcttcttctctttcttcccttcactctctctttcgcttcatggctggtctcatcgatctcaacaacgccaccgaggacgatgaaacgccgtcgtctggctcctcctcctcctcctcctcctccaccgtctgccttgaactctggcacgcttgcgcgggtccaatgatttcattgcccaagaaagggagcgttgtcgtgtacttccctcagggacacttggagcaacacctccacgattttccgctccctgcctctgccaacatcccttcccatgtcttctgtcgcgtcctcgatgtcaagcttcatgctgaggaagggagtgatgaagtttattgccaggtggtgctggttcccgaaagtgagcaagtgcagcagaagttgcgggagggggaatttgatgctgatggtgaagaggaagatgctgaagctgtgatgaagtcgacgacgccccacatgttctgcaagactttgactgcttctgataccagcactcatggtggattctctgtgcctcgtcgcgccgcggaagattgcttccctcccctggattacagtcaacagaggccttcacaggagcttgtggcaaaggatctccatggccaggaatggaggtttcgacatatatatagggggcagccgcgaagacacctgcttactactggttggagtgcctttgtgaacaagaagaaacttgtatctggagatgctgttctgtttctcaggggtgaggatggagaactgagattgggaattcgtagggctgctcaactgaaaagtggcagtaccttttcagctctttctggccagcaagggagtcctaccagtcttatggatgtggttaatgctttgtctgcaagatgtgcctttagcattcactataatccgagggtcagttcatctgagttcatcatacctatccacagattcgtaaagagccttgattattcttattcagctggaatgaggttcaggatgcgctttgaaactgaggatgctgcagagcgaagattcacaggattaattgttggaattgctgatgtggatcctgttagatggcctggatctagatggagatgcctaatggtaaggtgggatgacttagaagccacaaggcataatagggtttccccatgggagattgagccatctggttctgcttctactgcaaataacttgatgtcagctggtttgaagaggaccaagattggattgccttcagccaagctagattttccagtttccaatgtgattggaacatcagactttggggaatcactaaggttccagaaggtcttgcaaggtcaagaaatgttgggtgttaatactacttatgatagttttaatgctcaaagtcaccagctatctgatttgaggaggtgctatcctggctcgaactatcctaggattgctgcaacaggaaatagcattggaatctcacaagtgagttccaatgtttccaacaacggcataggctttagtgaatctttcagattccagaaggtcttgcaaggtcaagaaatacttcctagccaaccatatggaagggccctgtctgttgacgaggcttgtggaaatggtcgctttggactttttgatggtttccaggcgatgagatccagaaatggatggtcttcccatgtgagcaacaattcctcacatttgcatcctcctgttccatctgggcaagtttcatctccgtcatctgtgttcatgttccagcaagctgtcaatccagttttaaactcggattataacaaccaaataggtcaggtgatgggagataaagtccatcagcgagtttcatatgcgtctgaagttaaaggcggaaaatttgtatcaaccccctatgagcctcttctccgtggactatctcaggaaggcacaaattcttttggtctttcaaactttcataatcagctggatagttcacgttcacacgattctgtttcagtactgagagctagtcaagagttggttccctcgtgtaaaagtagatgcagagtctttggattttcattaactgagggtgctcccgttgcaagtaaagaggcgactgactcatctgcagttgcttgtgctggaccttcctttacaagacatgttgaagatgatttccatccagggcattcacttaggagcaaggcagtggcaagttattgcaccaaggttttgtattaaatgcttatggggtgtgctgcaatattgacttggaaatcttgatgtatgctggtactgatgctggcataaggtagcagaagagaatgtccacagttgttgtacttgtgtgctttgctctagtgacttggaatattgggagactaaaatattgtaactattcgtctaatttagatacttgttaaattggctatgaccacgttctagattctgtattaatcatgtatctacccttcattgacttgtatggggaaaacctctaaacgatgcatgtttatcccccgttttggtcatatgaacaaagtaagccaggtggttgtgcttaaccataaaaaaataaagaattgagcattgattacattagagagcaaaagctcttttaatgtttcatgtccttaatgttgtccccccc

SEQ ID NO: 135607 - DNA, 298 bp, Glycine max
  unsure (1)..(298): unsure at all n locations
  Clone ID: PAT_MRT3847_93462C.1
gttnancnnttctacgtnactncgnanttcnnctccacgngcattcntctctcgctctctgccttccacacaacatacaanatcnncagntannntanttaaaantnnctantgnagaggttcannacncatngtcaccattgntcatntngnntcngtgaaggcaataccnctnggnntnnnctcctaacagnttggaggtattaacaancnngtgattgannnnttggntnatnncgctgtgagatgaggaagaggtcattcanatattgctnnggnntcngcaagnncaaagcnn

SEQ ID NO: 135608 - DNA, 297 bp, Glycine max
  Clone ID: PAT_MRT3847_93463C.1
cacacgcgtccgcccacgcgttcggtatcaacatctataaattttgatacctcgggcgttcatgcttctcttcatctgtgaatatatttactactgcatgccttaattacgctatccccagatagtaccttatatacatgcataataaccctatgttctccgtcattacgtatcattaatcaaagacgatatgtatcatgtatgctttacaaaagataagtcaattagtctattcttatgattgagtgaattgggtaatcagaatttttcatcactctcacttattaacttccatta

SEQ ID NO: 135609 - DNA, 325 bp, Glycine max
  Clone ID: PAT_MRT3847_93464C.1
ctcgagccgcatcgtgttacgtttactaacccatccttagctccgcaggcctgtatctagaacatcccaatatatgctactagctcgaataatggttattatcacagtagaacctagcggccaaatctagctatatggattttgagagaacttatgtgacatagcctaacagtccacagtcctggacctgcctatggggaccactcaagagagaggggttgctgggaatactctcatgcctgctattattgatacacaggctactgacaggtcacatgaaaatgctcattacttttggtgaacaactatgtgtgtgaggattcat

SEQ ID NO: 135610 - DNA, 1072 bp, Glycine max
  Clone ID: PAT_MRT3847_93465C.1
atgattacggctgcgtgaggactcttctctgttctcttaagtccttcccattccaatggattctgcgttctccatcaacaccaccgcgcaagtggcgctcttcagagcgctccacggtcatctccaccgagctcctcaacgcgccttgctccgccgcaacctaaaatgcctcgttacttcctataacagcagcagcaactgctgccgcattccgtgctctttcggctccgtgccgtcgccgtcctcgcttcgatccttccgcggactgctcccgcgaacgccgcgctgcatttcgagctccgcggcttcctttgcttctcctgccggcggtggaaatggcggcgctggaaccggcgacggtgacggaggtggcggttctggcggtgagtctggagatgctaatctcaaactggtaggagacgcgtctcaggagctttccgcactttcgcctgatgttatcattctcgatgtttcgggaatggtatgtgggggatgtgcggcgactgtgaaaaggatactggaaaatcaaccacaagtgtcatctgctagtgtaaatttaacaacagagacagcaatagtttggcctgtatctgaagcaaaaaatgcaccaaattggcaaaagcaattaggggaggcacttgctgagcatttaactagttgtggctataattctagccttcgagtggcaggtgaagaagctagctactgaaggatttatttcaccatataaatgcaaaaagtggttgtctggagtcaatgtaggtgaatctccgtggcttcttgtgatgggtattggagatccatgtccatgttcaggcgcccctccatggtgaagaatttgctgatgttgaatctgatactagcaatcctctagttatcttgaattttgaggactcctattttttatttgcttctatgatagttggaatttatagttttgtattgtacccaattaatgtttccagctgctgtattttatttttacctgctgtagtataatagacatgtaacacctttattattgttataacttatattgttctcctttcatgatgtgttttttctcctcatc

SEQ ID NO: 135611 - DNA, 274 bp, Glycine max
  Clone ID: PAT_MRT3847_93466C.1
acgcccacgcgtacggcgaagcaaggtccaatatagttttttgtgtacgcgacagccactgcgcaacagttggatgttgagttcggatcccaacatcgttatagagaaaataggagagcttgaggtacacacatcagatggcatcacaggagaagaatcatgggtgccaggagaacgtgtatcttaggcactctcgcttctataatgctaatgggcattggcgcctactttagactctggactattcactacaacctttattccgaagacaccc

SEQ ID NO: 135612 - DNA, 225 bp, Glycine max
  Clone ID: PAT_MRT3847_93467C.1
ctaataaaaaattaaaaaaaaaaaaaatataaaagaataaaagaaaaaaagaactaagttaattaaatataaaaaacaaaaaaaattattatatgagagtttaaaggtatgagagtacaaaactttgggggcgccgcgacttttattcactccttccccgatattttatacctgccaggttgtggaagggatcataaatttcactttttagggtggttttaaagc

SEQ ID NO: 135613 - DNA, 215 bp, Glycine max
  Clone ID: PAT_MRT3847_93468C.1
gctactagtcgggcgccttttttttgtaaaattcgaatcaactgaaaacagctacacttgttatcgcccttcccccgaagtcacctgtacagaaaccaggaaggtcacgttgaagaaccctattactttaggataaataaatatacccttctattaggaaatcattccaagtttttctgcttaagtcaaatcaaaccaaatgacaaaaaggacag

SEQ ID NO: 135614 - DNA, 277 bp, Glycine max
  unsure (1)..(277): unsure at all n locations
  Clone ID: PAT_MRT3847_93469C.1
gtccctgttcagcgcccggccgtgtggagacccgggagccagtccgggcctcncaggcgaagatggtggactacagcgtttgggatcacatcgaggtgtcggacgatgaggacgagacgcaccccaacatagacacggccagcctgttccgctggcggcaccaggcccgggtggaacgcatggaacagtttcagaaggagaaagaagaactggaccggggctgccgggaatgcaagcgcaaggtagccgagtgccagcgcaactgaaggaatggaat

SEQ ID NO: 135615 - DNA, 399 bp, Glycine max
  Clone ID: PAT_MRT3847_9346C.1
gttgtaacttgtgtgatagtatcacaagtgaaactgaagcgaaatcatcccaatttgcaaatgcctaaaacctgaatttggaagaaagaagatataaataaaatggcgagcgtgccttcaccttcttcttctcctcctcctcctcctccacgctccggcaacaccttccccaacaaccagttggaagctgttacaaataatggggtttctcacgtcgatgataaaaaacctaacttcaccgatggtcttgatcacttggatagtccacagtgcattgagaggttcagaaaaatatgatcatgattatgctcatcgttgctggcaaaatatttctctaacaaaacttcaatggaggcaacatatttgatttggaataacaggaaatgatgaaatcataaa

SEQ ID NO: 135616 - DNA, 671 bp, Glycine max
  Clone ID: PAT_MRT3847_93470C.1
acttattggaactatatttattatttatttttttaatttgtattagcttttgaatcttagctgacctctttggccttgagagaaattcaatatttctcctacaaattctcattatcactacaaattttcctttgctctgtttggcaggattctgtttcagatttatctgtgttctgatatttcattatttagaaaacaattttgattattttttagcggttttagagagaaaagaagcttaaagataaccaataaatttgaaaagtacatagattgaagctgcataggagggcaactagttgttgtggtaaatatctacaattttctcgagatgcatttggttgacatcttttgaacttgctttctgtcaaaagcaaagcttcttctgatacatgatttggtggatgattaattgttagtgatggattggttactaaggtaaaaaaaaaaaatatctggccatggtgaacagggaatggtgaattatgatattttaattcttgattggtagcatgttttggctggaagttggataactgcttttgattctcagaggcagaaggaaacaataccttgaaagtaaatagatgtcgtcatcttcgtcttcgatggctgcttccagtgaaaggtggattgaccgtcttcagtactcctcattgttctggcctccc

SEQ ID NO: 135617 - DNA, 386 bp, Glycine max
  Clone ID: PAT_MRT3847_93471C.1
gcagtttttaaagtgggtgaggttcatgatgaagaaaagggaccagctctgaaggcaagtggggatcaatacattctccatggaatggactgggtcagcacaataggttactgcttatgggcaacgactcttctgtggtgagaaaatgctaagtgtgatggtttgattaccaagcaagatataagcaaaatgtgccaggtgcaaaacaggactatgctgtcgacatgaaaaaatgatgcctgaaaagacacacctgctcatggcttggcgttcaaggatcgcaggatgaaagacatacgtttggagagatgaatgacaaatctatgacgcactgccgcactcagctatctgcagtagcatatctagtgagacgctcaatggatata

SEQ ID NO: 135618 - DNA, 130 bp, Glycine max
  Clone ID: PAT_MRT3847_93472C.1
ctcactagtcctcggacttcggctcgagctctctagaagcacctactacagtgggaattactccagacattgcagatgcgagatgagacatcactcacgatcccgctcgatcggcaaacggactgcttgt

SEQ ID NO: 135619 - DNA, 453 bp, Glycine max
  Clone ID: PAT_MRT3847_93473C.1
gtccatttagacgttagtcccactgctcgagactcggtatgaataattatttaaataaaggattttttaacattagatgatactagtagtattaaagaggtatgaatggaaagttttcatcgaaaaatgaaatgtttattagattaaaaacataaaagtcgtttatttcttttgttttccaaaacttccatatctttagcatcagcctgatcttaacaaatacatttaattaaataaacaatggcttatatctgatgaggacgttagtcgttactcgttagtgtgtgtgtgtgattgcttttcttgtagaagtaacataactttcctgtattaggatttccacaaagtgtatcttcttatttaattaccataaaaccaatcaagttgtgcctgatgaggccgcgatactctaaatttaataatcattgaatttttatacaagccaatgtgcag

SEQ ID NO: 135620 - DNA, 456 bp, Glycine max
  Clone ID: PAT_MRT3847_93474C.1
ttacgctcacgccctttcgttctcggacgcgtgggatttaatccacacccgaggtccgatgcatggcgttaggaattgctgaagcgaaccggatcacattgtgatatcatctgtgacactggatggactgccgcccctacgcaggatgttcaggcttcaactgactgattgatttgctctgaggaacgggctcccaggacctatgggggataaaaaccacaaaagccttttatgttaaattggaggatgggaaaactgactttgccccatgggacttcccggaaggttaagagaatgcctttgtctacagggggaggagctggggcaaacaatgctatgactcatgtatatgcaccatgctgctccatcaatgcggagatatttggatggaaatctcgactttgaaggttgcaagatgacttatacctacatttaatgtacagtctctttttttat

SEQ ID NO: 135621 - DNA, 241 bp, Glycine max
  Clone ID: PAT_MRT3847_93475C.1
atgttaacacattttatttttatgcttgccaatgccaccttgccgatctggtaaattgggcattccagctacttaattggacacagaatatataaggaggattggaactgacccacccaaggcatgctggcgcgcaaataaggaacagggacccaattaacccaaagcccgacacactacccccgctaaccagatgaaccgataactcgaaaagcatcatgatgcattacctaaaccgatt

SEQ ID NO: 135622 - DNA, 412 bp, Glycine max
  Clone ID: PAT_MRT3847_93476C.1
aaacatcaatcttgtcctgtgttttttatttatacaatgaccatctagctgtggatacccattgccttgcatcatgtgctcttcgcctatgtgctaacatcccatggacttgtagccttaagctaaatccttgaatcttccatgcaagaccgaatctatggatgaagatggagcttacttgctactgagtcggttattgggtggcagaaaaaataggccatactatgaacctgagtgatagaggtccgatgcttaatggacagcccattacctatcgtggttacccatactatagcatagtggtaaactgctttcccaatgggcccacccaaacgttaggcgcttcaaagaggcctcacgcattgttggcttcaacgcctcgtaattggagaacatgagaagtcctatgtga

SEQ ID NO: 135623 - DNA, 297 bp, Glycine max
  unsure (1)..(297): unsure at all n locations
  Clone ID: PAT_MRT3847_93477C.1
tcgcangcactcgtacgtaagctcggaattcggctcgagnccaggcagaaggggtaaaccccactggggcgtgattgttcgtgatcttgtgcctgtcatttgggtcttgctctgcaagccaaattagtgccaccaggctccagcgcaactatgaacttagagcgggtgtccaatgaggagaagttgaacctgtgccggaagtactatcttggtggatttgcatttctgccttttctttggttggtcaacattttctggttcttcaaagaggccttcttcgctccagcctacacagag

SEQ ID NO: 135624 - DNA, 340 bp, Glycine max
  Clone ID: PAT_MRT3847_93478C.1
caaggtcaaactggtatccacatatttaaatttagtcgtgatagctactatcacccaaagaaaaagcatgttcatcctcacaagtcacaagcatatagggcagcggtcatccattacaaggcgccatctctttctaagatcaattcacatttattctgattgcattgaggccacctctcccgatagctctcaacagacccaatgagttgcttcctccagggccctttttttccaacccaccctttgctttttgtgtgagctgaacctcctgaaatcatccacctctttggctttctaaggggatttgaagctggtatacataccctggagaccctccccc

SEQ ID NO: 135625 - DNA, 596 bp, Glycine max
  Clone ID: PAT_MRT3847_93479C.1
cccgcgtccgtgaaaaactcactcctctctcttatcccttcccaccatactcaccgctacgttcaaacgcagcgttttacctcaaaatcctcgcaaactcgctctcgcaatcgccattgttgctctatgactgcactgctcattttccttggacaagtgctattgtagctggatttgctgacgagttctgctgtgatctttttatgcagagctatctttgtattttagagtattcttgtaattcaaacagttgcagatttgaaaacattatcttgtacacctgtaaacatttaacattttagtgttactatatccaatttgatcaactttggaggtgtctgatgatttgtattgaactgattcttgctttagattcttttgtgtttcctcctctaaatatatacttgagttcaaatgaaatcatgtagatttatattgattataagtggaaaaaggaaacgaactgacttcatctgatttgttggatacactttttacacagggaagaatggagactttaccacaactgggagcaatgggcgaaaggctctaatacctcgcaagactctggtagagagagcacatgtggaaaggac

SEQ ID NO: 135626 - DNA, 527 bp, Glycine max
  Clone ID: PAT_MRT3847_9347C.1
aaaagtttcctctactgggtgcacttttttgaaagtggttatacctttaaatatgatataattggtgctggttcaacattcttcagaatgatatttcctgaaaaagaagatcaatgaaatacccaaattgattgatgccagattgagacaaagaatagatccttaatacaatgaggttcaggctcagatggaaacaaatttcgataaattgtctctagatgatgttgaaactcctaaaggttccatgttggatctgaaaatttctcaatctaaaattgcacttcccaaaaacacatttggaggaaccattctgcgtagtgatctattgggaaattttttgacagagggcatttttagagcaaagtgttgttttgcatcgcactcattcgtattataggaatgtataaaatggtggccacagtgggtattcctgaaaattccagtatattattggtcttggctatgaattagttttttagggggcttgccttttttgttatttacaccatctggttctaagacttgtg

SEQ ID NO: 135627 - DNA, 406 bp, Glycine max
  Clone ID: PAT_MRT3847_93480C.1
tggagagtattggctcgctactaattaccacgatgtggctactcactcttttcacatcacttccaaacaacttcaccatttggtaacagccacatttaatcaaaccaatgacaataccaataaggccaagaccaccacctattttgaaattatttcagcattactttggaagtgtatagcaaacataaggggccaaaaaattggaccaaatgttgtgactatatgtactagtgaatctaatcgtgcagaaaacgaattccccaccaatggcttcttagtgttaagcaaaattgaagcagatttttcgactgggaaatatgaaatttcagaattggtgaagctgattgctgagaacaagatgggtgagaaccatgtaatggagaaattggtggagcagatgaaagga

SEQ ID NO: 135628 - DNA, 237 bp, Glycine max
  Clone ID: PAT_MRT3847_93481C.1
cacccatcgaagctcccggaactgagagtgaagcagatacctatactaccaaccactaacatcccacaccaatctaaaacccaattactcaatcctctctctactctctctctgactctctccacaacaagcgccgctttttgcctagataagtgacagagtaggtacacctgtttttaccgctttaccgggtgtgtgagccatattgttctgcgtgtggtgcgtggggggggttgg

SEQ ID NO: 135629 - DNA, 343 bp, Glycine max
  Clone ID: PAT_MRT3847_93482C.1
ttgaaagagagatttattaagaaaactcattatttagactatcaatttgatgagcctactgatattaagttaggtttcactactcgagaaaatgggttaagtccttatcctaatcatagttttaatatggcgagatatatcagtgacagtgcacatcatattacacatcatcaaaatatcttagcgaatcttattggttatacaagagatgaatgggtttttcctatacaaacacatgataatcgtatcgttgaagttacaagtgaacataaaggaacaaatattggtgaactaactgatgatttacatggcataaatggaatgtatacttttgattctcact

SEQ ID NO: 135630 - DNA, 615 bp, Glycine max
  Clone ID: PAT_MRT3847_93483C.1
gcgtgggtttgcctctctgtttttcttcctttctctttctttttcttctttgccttaaacaagcataactgaagttcaatggaagtttctgatatttgatcttgtccttcatcatagcataccaaagaggatctgcaattggagaaaagcatctgcttgtaagatttgcagtagacagaggaggattagttggaccagatggttccacacactatggtgcatttgatgtcacttttacggcctgcctccctaacatggtggtgatggttgcttctgatgacgcagaaatttttcacacggttgccacagcagctgccattagtgatcaaccgtgttgtttccgataccagaagggaaatggagttggtgttgaaataccaccagggaataaaggcattcctcttgaggtaagttagaattatattggtacccttattatgaagataattacttattatgggaattatttgcaggttaaagaatagtgaattctatttatctaacacctaacacttgtcaggtatggtatttctttttcttatttcaattttttatgataagagaaactgtgaaattaagtatattaaccgtcaaaggagtaggtaatgtatacct

SEQ ID NO: 135631 - DNA, 803 bp, Glycine max
  unsure (1)..(803): unsure at all n locations
  Clone ID: PAT_MRT3847_93484C.1
aattcggctcgagctttgatgaattttaatatttgaggctgtggtacaaatttttgaagtcactgttgcttttgcaatagagatggaagagaattctgctctggaacaccattgttactaccctcttcctgcttctgctgcaaaagctgatcatcccaatcataatgatggtgaaaaagaagaaacttgtgcagaggaaggtagctctcaacatcagcctaacacatcacagaattgtgtttcataccaaagcaataagcctcgcctcaacagatatgcacttggtggtgctatcttggcttccacaaactccatcctcttaggctatgatattggggtcatgagtggtgcttctcttttaataaggcaagatctaaagatcacatcagtccaagtagaaatccttgttgggtgcttaaatgtgtgttccctgataggatctcttgcttcaggcaagacctctgattggattgggagaaggtacaccataatggttgctgcagcaacattcctgattggtgctattctgatgggtttggccccttcattcccattcctaatggcaggtcgtgtagttgcaggcattggtgttggttactccctcatgatctcaccagtgtatgtggctgagctctctcctgctctcaccagaggctttctcacatcactccctgaagtcttcatcagtgttggaattctacttggttatgtctccaactatgccttctcangcctnccaaatggcatcaactggagactcatgcttggccttgcagccttgccatcaattgcagtggcacttg

SEQ ID NO: 135632 - DNA, 291 bp, Glycine max
  Clone ID: PAT_MRT3847_93485C.1
gttctacctcactattattccgtcgttgggagcgaaccggaaaaaactcagaaagcagtggtagtacaccttgaccagcttacacgagatatgctctcctctgactacttcaccgacaagggaatggttaatgggatagcgtcgcaagtggagcagaaatggtctgttaaaggagcgttgaacgaaaacattcttgcaaacaatcctgaatggggtgtctgggaaaatgaggaaggatgatgatgcagcctcttaaggatgtgtgacattcgatgtcacatataaaacttg

SEQ ID NO: 135633 - DNA, 469 bp, Glycine max
  Clone ID: PAT_MRT3847_93486C.1
gccacgcgaccgcagcaccttattgacctgagggaaaatggggaaaactgccgtggcgtgggcatactgggcatcgcgtggcccttaggaggcatgatccttatacttgagtactgcactgcggggatctcaggggggcacattaacaccatcggggacactgggcctgctgtaggactcgatggcggtcttgatcctacccatcctgtacacggtggctcagtgcttatgtgctactctgcggcgttggcttggataacgctatccaaaacccttactttagcaaatgatggtggaggagctaatgccctaggtgctgggtacactacaggtactggattgggtgctgagagtatcgtaacctttggataggtaaacagtgccttgtatgccactgaccccaagacgaatgccatatattcccatgtggcggattgggctccacttcgcattggacctgctgagttca

SEQ ID NO: 135634 - DNA, 271 bp, Glycine max
  Clone ID: PAT_MRT3847_93487C.1
gagtgttgcaggttgtcttgcgcgtgaatcaatgtctgcctgcttcggcgtcttcttcttctcctgtaccctgctcttctccttctgctcctgcctcttcttcagctccatgatgaagccctggtgtaactgcgatgttggcaatagctacttgacggtgagagagcggataaaggtgccccaatctctggtactggtgacactcatctctgtcgtaagtccccaaccggcaccatccacgttcacgtgttgggtgacaccatcacctcgt

SEQ ID NO: 135635 - DNA, 443 bp, Glycine max
  Clone ID: PAT_MRT3847_93488C.1
cttgaaaaaaagggagagggggggttttaataatggagaggcccccaaaaatactgggtcttatttgggaatatatttcccgagcgcatgcaaacaaaaattaatgggcccgtgctccataagtggacaaacaaacattggaatatgaacgacccttttgggctgggtcactccaacccttggtttttttttaaaattacctaccattttttggtggttgcctaaaaagaatctatacagagaaataatgagattcaataaattgggaacgaaacaatttaaaaacggggggttttttactacaccggtgggttgtgttggaacaaattaatcactgtaatttcccaaactgggacaaagtacaaaacccaacactttgttaatttatgtaacgaaacgcgcgccggcatttcccggaaggtttaattaattagcgggggaac

SEQ ID NO: 135636 - DNA, 242 bp, Glycine max
  unsure (1)..(242): unsure at all n locations
  Clone ID: PAT_MRT3847_93489C.1
acagagggggagccccaccgattttacaaggctgccgcacaaaanaanggaggggccaaaaaagaaaaaacggcgcgggcccaaacaagaaccccccaaganggaggcgggggaaagagcacgaggacaagcccagagcttgatatttatttcaacgctagctgtacaaccaactgccttgctccactcgccaagggttatcaaatgacaaggttttggcattggttgagggttttgatgac

SEQ ID NO: 135637 - DNA, 790 bp, Glycine max
  Clone ID: PAT_MRT3847_9348C.1
gtaactatgtttttgttgtaacttgtgtgatatcaagtgaaacagaagcgcaatcatcccaatttgcaaatgccaaaaaacctgagtttggaagaaagaagaggaaaataaaatggcgagcgtgccttcaccttctcctcctccacgctcctccccaaacaaccaggtggaagctgctacaaataatggggcttctcacgtcgatgataaaaaacctaacttcaccgatggtcttgatcacttggacagtccacagtgcattgagaggttcaaaaaatatgatgatgattatgctcatcgtttgctggcaaaatatttctctaacaaaaactttaatggaggcaacatatttgatttggaaataacagtaaatgatgaaatcataaagtcaagctgcttgactaattacaggtcttatgcagatcctgtagtaggttttgaagagcaatccagcaatggatcaactccaccagcagattcccaagctaacatccccaatgggaaacatgtggtgaagaactgaaataatgtgccttgagaagcaccaatgcatgacatcatagaaaacttaacgcaaatatagtcataattattaccaggaattctggaacttcgtgaactgaaaagatggtcatggtctcaaccatcaaattccaagcctaaactagatttcccggtcatggtttttctggggttctagttatgaatttaggaccgcaatttatatgatttagtatactgatcgcaaagtgaataatcgccacccactatttgatttttattctgcatt

SEQ ID NO: 135638 - DNA, 2037 bp, Glycine max
  Clone ID: PAT_MRT3847_93490C.1
taaagtagtaagcagtttcatcattttttctttttttctctcttttggtacattggaaagaaagaaaggaagcttcaatttcttccaataaagcgtgttttagaacgtgcttttaaggtatatatatatatacataactacatataccaaaaaactgatttgcagctgaaattgctttcgttcattagtatttagtttttcacaagctagggaagacatgggagaagtggctgatgaaggtcaatatttcagatcagaaatagctctattgaattactcggatgcaaccttcaaacccccactttcttctctgttgatacacattgatccactcataatacccaatggccacacttgttctgcatcagaatctgatccatcacccacttctcagcaccatcagcaggagcagcatcccaaagatgcctggcttccaatcactgaatcaagaaatggaaatgcctattatgcagcctttcatattcttaattccaacattggattccaggctctcatgcttcccgttgccttcgccactcttggttgggcatggggtacagtatgtttgtcactagcatttgtttggcaactctatgccatatttcttcttgttcagcttcacgaatccgtccccggaattcgtcacagcagatacctcttccttgccatggctgccttcggtaaaaagttagggaaggtggcagcattattcccggtaatgtacctttcaggaggcacatgcgtcatgataatcatcaccggtggtgggaccctgaaacaattattgaagacgctttgcgacaacgatgatcatgttcatgagcaaataacatgtaatgcccacgcgcttagcggggctgagtggttcttggtgtttacctgtgtcgccattctcattgcacagttgcccaacctcaactcaatggccatggtttctctcgtcggcgccgttacctccgttacttattgcaccctcttttgggttctctctgttaagaatggtaggcccaacaacgtatcctatagctcatccctgcagtcccaagaacacacaccagtggctaagatcaatggcgttctcaatgccattggaatcattgtgctagccttcagaggacacaatgttttgcccgaaatacaggggacgctgccttcaaatttcgaacaaacatccaaaagaccaatgcgaagaggagttagcatatcatatgtactcatttccatgtgcatgtttcccctcgcaattgccggattttgggcctatggaaaccagataaatgacgggggattgttaacttcgttcccacaattccacaagaggcaaatcacaaaattctctatgggtgcaatatatgttctagtaataatacattgtttaaccagctttcaaatatatgcgatgcctgtttttgacaacctggagataagatacacgagcataaagaatcagagatgtccacgattggtgagaacatgcataagactattctttggggggttgacattttttatttcggtcacgttcccattccttccacgcctatcagcactactcggaagcatgacccttgtgcccattacatatgcatacccttgtttcatgtggctatccctcaagaagcctcgtccaagaggttttgtttggtgcttcaacgttgcactcggttgtgtagggatgcttctcagtgctcttttggtagctgcagctatacggactctagctctcaatggcctagatgctaacttcttcaaaccataacaattaatattatgccatccaacagcaactagtatattgccaacaatttattttaatctactgttagtgatatacagaaaatcatttttgaacatgatactccagtaatacaaacgttaagttttgaatttttgtatctctcttaattattatcatatattcatattataatactgatcatatttatcatttttctttatcttttatgtacgccaaacatacttatcattcgagtttattacattttcttctcaacacgttaaacatatttgtgttcc

SEQ ID NO: 135639 - DNA, 262 bp, Glycine max
  unsure (1)..(262): unsure at all n locations
  Clone ID: PAT_MRT3847_93491C.1
ttnattcaaggtagttaagtctggtggtggctatttgaagaagaagaagnggagnaagggaaagnaaaaggagaaggagaataaagaggngntgnangaaaaggatgaggangagaagttatttttttttgtagngaaatataaagtgattattnnttntatagtgtttgattgtttgaggattaatggatcacttgaaaggaaggttattagggaattgttggttataggttaaataaggatgtgtgttgtacatgttagt

SEQ ID NO: 135640 - DNA, 260 bp, Glycine max
  Clone ID: PAT_MRT3847_93492C.1
ggggaaaaaaaaaacagcccggtttcttgtggacttttgggtcaggggcaattttaatggcaatatttggggggggggggggggataatacaggctttgatagaacaaaaaattggtttgtaagagtgccaacaaaccaaccctcgcagggttttttggacttttttaagccgggtatttcccgcctttttttggcccccggaaattttaattttggctaaaatttccaaatggttttttattgggcatttcaggggggg

SEQ ID NO: 135641 - DNA, 827 bp, Glycine max
  Clone ID: PAT_MRT3847_93493C.1
gatgaatgatcctataaaagcatcgtctcttttgaactgtgattctgtgttcttaaactctcttgaaaaaagaaagtatattattgcacatataacattcagatacaattagttttcaatatatgaatctccagttgttaaaatgaatcccaacattcacaccttcatagccataaaggctattcaaatccacagaatggatgacaagactctctcgagcatcaaattcctccttgcttgaaattgtacaatagcagacaggtagagatatcgacatgagtaagtttgatgagcagaattctcagagtgattagtgactgaagcctttgtcaaatgagcttgaaggaaacgttgtatcaagaattggaaaggttgcagaacattctatggttgccaattttttggaggaaatccaaggactcaacataaatgctcattaacaagacaagtgggtgtggttgagtgacccaactgggttatacactgtatgcagcgcatacaaactgcttgacagggactcaagagatgagaatatagatggggtatttcatgacaaatggaagttgaaaattccaagtaaagctgcgttttttgcttggagattattacgggatagatttcccactaaatccaatttgtgtagaagaaatgttgacatcattgataaattatgcccattttgttgagataaggaagaggaggcagcccatctgtttttcagctgccataaaattatgccgctttggtgggaatccttatcttggataagcatggtgggagtgtttccgcagaatccaagacaacactttcttcagcactcattctgc

SEQ ID NO: 135642 - DNA, 450 bp, Glycine max
  unsure (1)..(450): unsure at all n locations
  Clone ID: PAT_MRT3847_93494C.1
gcggccagtttacattcctcattcccctccaccgccaccaccgccggtgtattcaccgcctcctccaccaccagtgtattctccgccgccaccacctccagtgtattcacctccacctccgccaccacctcctcctccaccaccaccggtttattctccccctccgccaccaccttctccaccaccaccgtccccgcctcctccttcaccaccaccagtctattctccaccgccaccgccaccgccaccgccaccttctccaccgccaccatcacctcctccgccttcatctccaccaccagtctattcacctcctcctccaccgacttcaccaccgncgccctcgccaacatattgtgtaaggtctccaccgncaccttcaccgnctncaccatcacctncaccttcaccacctccagtattctccccaccacccctgtgcaatactac

SEQ ID NO: 135643 - DNA, 225 bp, Glycine max
  Clone ID: PAT_MRT3847_93495C.1
gaagctcgtaatgcgactcgaggcaccacggactgggatgcagactccatactctacaatctagcacccatctttggatatagatctctgatggatgtctatccttgaacattctgatgatgtgcatgtcacgactcatcgttcatatttatgaacatactgagacatagtggtaactgtatttataggtttagcgattgttagctgaatagaactatgatgaca

SEQ ID NO: 135644 - DNA, 337 bp, Glycine max
  Clone ID: PAT_MRT3847_93496C.1
attcggctcgagtcttctgactgacgatacacctcagacccgcgggtctacgaaccctatacaggactcgcacctcaagatcgtacagcaggctctagaactcacggaaaccgcacccactgatctgcctgctacccaaaactcaattctgaccgcagcacgaaactcaaaagctaaaacccaagataacgacaagaaccataaaaaacacacagacatggacaaaaaccatgacctgcagcataataagcacaatcatagacaacaagactgaagcaaaaacatggaaaacgagacaaagacagacagatacacgcatcgtgactctagagctgat

SEQ ID NO: 135645 - DNA, 430 bp, Glycine max
  Clone ID: PAT_MRT3847_93497C.1
cctaaggaaggtggccctctttttttgtgatttacaaaaatactcaatgttacttatataaaatgaatcgataatggcgtctttacaatgggtgcaggtttatgaaatttatgagatactatgcactgtatatattggtctccagacggaaaagattatttgcaccatacactaccatggggcttattatccaaaggcaaaaatgatgtggtgaactaaaaaactggcatccctgagtctaaggccgcattataagatatcttaagctgtcaacaagaaccagctggggaggcttgatgaggcctttatacttgaaattgaaatgaacctttgccttagccacaaccccctaagtgacaaactctcctgattcaacggggatgtttatggccgtaattttttttacttgatccaccagtactccaggccg

SEQ ID NO: 135646 - DNA, 384 bp, Glycine max
  unsure (1)..(384): unsure at all n locations
  Clone ID: PAT_MRT3847_93498C.1
aaaaaaaaaaaggcagttttttggttcccttggaaaatttttttgggcaaggttacttttacccccaacaatgttttctggggtaactgaaaggagcaaattaccccccccnnncaattgtttttnaantggggggctaaccttgggggggggcgtgggggttcccccanggccctcggtgggtcggtcccccccgcgcggggggncccccctgggtggggggggttccccagggggcctttcccctccccctggttgcaagggtgccgcccggtgggnaattttttttttggtccttttcnntttttggaacatttcctttttttttaaaccccnctttccggggtttttgctggtggtggcaattgggggcctttttttttt

SEQ ID NO: 135647 - DNA, 627 bp, Glycine max
  Clone ID: PAT_MRT3847_93499C.1
ccacgcgtccgattgcgtacccgacaaacatgatgcggagcggatgaaggctaatactctctaacccattcatctctcggcctaaactaggttagttaactgcctactgaacgttacccatttgctaccggggataccggcccacacttcactggtcacccctgataagcatgattctgcaactgaggctcttcatgagaaggcgaccacacagatcattaacgaaggcgatggctccgaaaccttccaaatattgaacttgcttctgtaacttccacacttaatcttagtgtcactctgccatgtgtgccatttagtgcgaactccactgatgccacgatgctctgatgcatgttctctacttgtaaaacgctcttacataatcctacctgctattgcgtgtattaaaaaaatgtccgtacacagttgaacctatccctgttcaactacttgagctttccccataaatgcgaagggtatgtcagacagccaccaatttgagctttgctgccttggaggcgaattcgagacatgctaaagctctatctatttatgtgatgtcagtattagtcttctacttggaaaggctatcattgagtctagtgaagtatagcaccttacgctgta

SEQ ID NO: 135648 - DNA, 587 bp, Glycine max
  Clone ID: PAT_MRT3847_9349C.1
tcttcgcgttcgcggacgcgtgggctttagggggcgtgccagttctgatttttacaccatctgctctcaagactgtgaattatggaatcctgcttgcacaaaagcaatgactatgttatttattccaaacccgtgttttgatgcatgagagtttgtaatttctgaagcgtaccggatttcattgtgatatcatttgtgtcactggatggactgccacttcaatgcaagaagttcaggttacaattgattggattattccctctaaggaatgtgttcccaggacctattgtgttttaaatccacaaaatccttttgagttaaataggtggatggggtaaactgactttcctccaaggcactatccaaagtgttaaaagaaaggcttttttatagggggaggacttgtgcaaataatgctattctcatgatatgccaaaagctgttttttcaaggggagaattttgtggaggactctcttaagttttaaaatactctccttcataaaggacgtcttttttatatatttgaaattggttgttccctcatttggaggtttccacaagtgtcagttggaagatcagaaaggg

SEQ ID NO: 135649 - DNA, 520 bp, Glycine max
  Clone ID: PAT_MRT3847_934C.1
gggtttgggctcgaggttgaaagtcatgtcaacattttcgatcgttttgatcaattttgattgagtcatacaatgatgagtaagaattcgaagcggagatgttaaattttcaagttgagctgacatgtgacagtttggcaggatatatgtttctagaatttatgcccaaatattgccctacagaagccttagttatggataccctccactctcagagatacgaattgttggagatgagcactcttctttttcgatctcacattcatcgatcgcttgtcatcaatcccaccctcaaagctcgtttttctcaacttgaaatgtcacgtgatatagctgttatgagtggtactgtcaacaccactcaatattctctgcgtgacattgacactgaagaaattcgaagagcggttaaacctttgagccatcggataattattctgtggatcggaaaattaattccagagaaaggaccaatgcatctcatcagaatagtcagagagctcaagaaatatcatcgaaa

SEQ ID NO: 135650 - DNA, 369 bp, Glycine max
  Clone ID: PAT_MRT3847_93500C.1
gccgcataatgggtacccgaataaatgtctatatttcgactcgaacaaacggcgactttcgttccaacttgggcagaatgggggatacaaaatggcctgcttgaacaagcttttttagcagacggcgatgcattaatcacacaggaagaactgctggccattgactactacgaataaagggatcacctttccaaaagaaggcccgggaacaatacaagggcagatttggtcgtgcccaatattacaaaaccgagtacaaggaccggtcaataattgaggtaaaaagcctctacaagggaacctgtcttctaaaggggcaaagagcccttcaattgtggaagaaagagactaagccccactagctttaaa

SEQ ID NO: 135651 - DNA, 274 bp, Glycine max
  Clone ID: PAT_MRT3847_93501C.1
aacggccagcatattatcataaatatatccctactaaatcttatacaatggccgcctgttacatgaaaacgggaaccaacatgccggaaccgagtctaaacctcacggcatggaatgcattaactaatacccaacttctactagcgtcttatgcaaagagctggaacacacctgtgaaaatgattgagaaataggggcatgaacatatccaccatgctacataaataaacaactgcattgataataactcatctgacatgagtggaactgcagg

SEQ ID NO: 135652 - DNA, 1526 bp, Glycine max
  Clone ID: PAT_MRT3847_93502C.1
acggctgagagaagacgacagaagggtacgggagctagaagacgacagaagggtaaggtagtgagaagaagacagaatggtagtattgctagaagatcatacaaggttaccgctttgctagtacagcgaaaacgggaaagtttgaggagagagagagagagagagatggaggagaagacggagaaggtgaagtctgaggcagttcagataattgaagcgtttgaggttctgccaaagctcgtggttttcgatctcgattacactctctggcctttctactgtgagtgtcgatcgaagcgcgagattccttctctgtatccccacgccaaaggcatattgttagctctcaaagagaaaggcatcgacattgccatcgcttctcgctcgccaacggcagacatcgcaaccgctttcctcaacaaattgaacctcaccccaatgttcgtctcacaggaaatatattccagttggacacataaaaccgatcattttcagaggattcattcgaggaccggtgtccccttcaactccatgctctttttcgatgatgagaataggaacatccaagcggtgtctaaaatgggagtaactagcattttggttggagatggggtaaaccttgggtcgttaagggaaggccttacacaattctctcgaaactggaatgcctcgcagaagaacaagcagaaatggctttccaagtactccaacaagtcagatacttccaaccccactgcatgaaatttaacatcccattgaattttctctatctggattctattcagaaccacagtattttgtatcagtcgtttcccttaatgaagcaaactgggagaacttgaatagaaacctggtatttccaacagctatatacttgaatattcaattggaattttctatggatttgattcagaaactatttaatgaacttaaatagaagtcacagctttcgtcctgttccctatttgtgagtgttattaatccgaatattttttgcctccctttctcaaggttctgaattgggaatcctttgcggttattgttctggagaaggacattcctaacctgaaaaatatactcctttccatcccagaaaagcagtatcttcggttgcagatgagggtaaaaaaggtgcagcagcatttcctttggcacaagaaccctgtcaagtatgacatatttcatatgatacttcattctgtttggtacaacagggtcttctctgcaccagctaggtgattaacttgaagaaaagggtatgagtagagttttagaatcttctttttcttggttgctaagtttagcaattttggtcaccaaatgaaatattgataaggtcatttgttgtgtacagcttttgaggtttgtttgtaaataaaataaaatgtgtatttttctagtgctgactaacagtttgtcttcctctgaatacttttgtatggctatcttgcattctttgccctgtagctccttttagaagatgtgattgtgaacaccgtttaaacggtggggttgtcatttgatgg

SEQ ID NO: 135653 - DNA, 1153 bp, Glycine max
  Clone ID: PAT_MRT3847_93503C.1
ggctcgagcaatatttgtcaacaaaactacaaactatctcaccattccctccctttcccactccaaaacctcttcactcttagcttgcttgagcatgaaagcttccactctacccgtttactcaacccctcttcccaaaacctctaatttctctcttcatctccttccaatggcttccattcccacactctcttcaaccctacctacactctctgctcactccttatcccattcaaaccccaacaaccactgcactctccctcccacatctctcttcggcaccaggatcaccctcctacgcgccacctcatcgtctcattccctccccaacaccaattgccgtgcaacatcagccaccgtgtcgtttagcctccccaccccgaaacccctttcggatacgcccgagaaaaccccaaagtggtcggagagggcgtataaaatcgtatgcaatgggggaattggaagcgaggaagctcaagtatccagacacgggaaccgaggcgcttctcatggggattgtggttgaaggaacaattgaaagctgcaaaatgcttaagagctaatggaattactcttttgaaagtacgtgaagaaacagtagggctaattgggaaatcgcacgtcaatttcttttggctggagcaggctccattgacggaacacatttacttctaggaatatggtctcaaaaagaatcagcaggtcaacagattttggctactttaggtttcaatgatgaaaaagccaaagaacttgctaaaacaattggtggtgatgtttgatttgagtttcaaaaggcaagcttaagaattttcttgcaataatggttgattgatacctgttgatcattggggttgcaagttcctctagggaaaataaactatcctccctcaagtttatcaactagtacctgcgttaatgttatttcaaatactgagttgtaccccattttggagatgatgtaattcttattcctttttaatttatacaagttttgtggaagtcaatttttaagcaatgtgtgatggtggaattgcagtcacacacacacccactgcatcatttttagtttttaccctgtaacttgttaccctgtaatttatccaagttgtatctgtatcattttgcttaaagcgaatcttttttttttatg

SEQ ID NO: 135654 - DNA, 658 bp, Glycine max
  Clone ID: PAT_MRT3847_93504C.1
ccacgcgtccgtacggctgcgagaagacgacagaagggggaagaagagtcacagtcacaccactttagttttaggctaatattgtgaaagaaagatgagcaagagggcaaggagtccaaggttggaactgaggctgaacttgtccccaccaagggcagcagcaacctcaattatatcttcttcggagctgtcatcgacggagtcttcgacgttgtcgccggtgtcggtgcaatcgctggagagctcctgcgtgtcttccgaggctgaagagacaagggcaatgcttctcgtggggtgtcctcggtgcctcttgtatgttatgttgtcggaggttgaccctaaatgccccaaatgcaagagtgctgtgttgcttgacttcctcaacaacgaggaaaacaataccaagaagagtagcagcgagtgagagatatgttgtgaacaccacatgcattaccgtcgaagattaaccactccacctagtaccaagaaaatgttgttttttgttattgttggatttccctttttagttaattattagagtagaattggcattttcctctctcaagttttttctgtgaaattttgctgttacttactgtacctgtacaagacaattgcaagttaagggaagagattttaaaaaaaaaaaatcgaaaaa

SEQ ID NO: 135655 - DNA, 1136 bp, Glycine max
  Clone ID: PAT_MRT3847_93505C.1
cccacgcgtccgcccacgcgtccgaacaattacaacctctgactcacccttccctctccttgcttgagcatgaaagctcccactctacccttttgcccaacccatcttcccaaaacctctcatttctctcttcatctccttccaatggcttccattcccacactctcttcatccctacctacactctctgctcactcctcatcccattcaaaccccaacaaccactgcactctccctcccacatctctcttcggcaccaggatcaccctcctacgcgccacctcatcgtctcatcccctccccaacaccaattgccgtgtaacctcagccaccgtgtcgtttagcctccccaccccgaaacccctttcggatacgcccgagaaaaccccaaagtggtcggagagggctataaaatcgtatgcaatgggggaattggaagcgaggaagctcaagtatccaaacacgggaaccgaggcgcttctcatggggattttggttgaaggaacaagtaatgctgcaaaattcttaagagctaatggaattactcttttgaaagtacgtgaagaaacagtagggctacttgggaaatccgacgtgattttcttcagccctgagcatcctcctttgactgaaccagcccagaagcccttgatcaattgaaaaattgaagtcaggtggaaataaacgctatttactctaggaatatggtcacagaaagaatcagcaggtcaacagatcttggatactgtaggtttcaatgatgaaaaagccaaagaacttgctaaaacaattgatggggatgttgatttgagtttcaaaaggcaagcttaagaaatttcttgcaataatggttgattgatacctgttgatcattggggttgcaagttcctcagggaaaattaactatactccctcaggattatcaacaagtgcctgcattaatgttatttcaaatactgtgctgtacaccattttggagatgatgtattttttttttttttttaatttacacaacttttgtggaagtcaattttaagcagtgtgtgatggtggaattgcagtcacatacaatgcatcatctctaccctgtaacttactattcccttttaaatgagttgtatctggatcattttgct

SEQ ID NO: 135656 - DNA, 264 bp, Glycine max
  Clone ID: PAT_MRT3847_93506C.1
gtatgaatagacaggcaaatgatttagaccttctaaagtaatgtgacaaagcacaatactagtggaatttagagtctctttttgggagggggtggggaggcaagagagaattgggaattttccctcaatatctcaatgaagttaaaaaatttgtcctatcttcagctttccttttcatgttgatatatttggtcaataatgtcgatgccagtccagtgtgtgtgtgtgtgtgttttttttttttttgggaaaaaaaacaaaagg

SEQ ID NO: 135657 - DNA, 307 bp, Glycine max
  Clone ID: PAT_MRT3847_93507C.1
aacagacagactgatagcgagaagaagaagatggtctatcgcaagtggtgtctcctgaccggcccggtcaccagcctcggcggcgtagtctacgacatcgccgccgtcaacgttatcttcggcaagaatgatgcattcctcaaaccagaggagaggaactatgcaaattagtctgctactaagtaggagaaaagagacaacagaagctagcgtatcgatgtcgtttaaaccctgatctatgagctctagatactcgttcgcaagatccgctcacgctagttaatcagattgagttactgcatgaagt

SEQ ID NO: 135658 - DNA, 222 bp, Glycine max
  Clone ID: PAT_MRT3847_93508C.1
ggtttttatatgctgtgtgccaataaacctcacagagcgtttcctatgtctgggggccatttacaatttcacatttcattcatattccttacttgctgggccttcaacaagcaagctaagggcattctctccatgctccttttccttacgcctgaccccttcttttgcttgtgtcttagagagccgtgggctataccgacaccctggaacagccaaaacaca

SEQ ID NO: 135659 - DNA, 287 bp, Glycine max
  Clone ID: PAT_MRT3847_93509C.1
ggggtgctgaggcgtgtaacactacacacacttatgggacgctatactcattcaatttagctataatctgtgtgatcataacactgcgaacatcagccgcattgctacttcgcacacttcttacgacagtggtgatgtcatgtgcttagatcaattggtttccgcctgaggctctgaataagaaaaacaacagcatcgaattgtacacgatacagccttatacgatgttaatgaaccgcggaggctgaggagatgaagatgaactctctgcgccactatggccagcg

SEQ ID NO: 135660 - DNA, 490 bp, Glycine max
  Clone ID: PAT_MRT3847_9350C.1
atatgacctgtaacaagtcaagctgcttgactttatgatttcatcatttactgttatttccaaatcaaatatgttgcctccattgaagtttttgttagagaaatattttgccagcaaacgatgagcataatcatgatcatattttctgaacctctcaatgcactgtggactatccaagtgatcaagaccatcggtgcatgacatcttagaaagcttaacgcaaattcaggaacttgtgactgaaaagatggtcatggtctcaaccatcaaattcctagcgtaaaacagatggttttttggggtcataattacgtgttaagaggcgctatttatacgattcagtatactgattgcaaagtgcatcattgccacccactaacttattctgcatttcacattcattctagttgtttaagtactataaagaaagtccatgatataatactgtctctgtttctttttaattatcagattttttatttatttatct

SEQ ID NO: 135661 - DNA, 1032 bp, Glycine max
  Clone ID: PAT_MRT3847_93510C.1
gcgacctcctccccggtcgacccacgctcacgctctctctctctctcttctcttacacacacaagcactacaacattttctttggtctctcattttctctatagctagatgggttctggtgctttacaacttcttctgatcttgggtcttctggctagctcatgcttagcacaagccccaggtgctgcacccacacaaccacccactacaaccccatcaccaccaccaccaagatcagcacctgcaccagcacccaccccgccagcaacaccaccaccagcaacaccaccaccagcagcagcaactcctccaccagcaacatcaccaccagcaacaacaccaacgccaacaccaacagctgcacctacacctgcttcttctcctgcaacctcaccagtcccttccgctagttctccaccagcaccaggcacagccggacccgctcccggacccgcaggtggcgccgagccaccaccgccaccctccgccgcattctccgccagcaaggccttcattgctggctccgcactctctggaatcttcgtagccatggtcttggcttaaaaactttcgagagaagcattgtctttgatgattcgtccacgtggaggcttttccgcccttgatccttctttcccgcacacggacggacgagatccatttgatttgtttcatcctctggtcatatgttgagttagcggttttattttcttcgggttttgtgtttacttattttgttctagttttgtactttgttgatgtgtttgtccattcgagatttgggaggggtggtggccgttgatgatgattatttggtgattcatttgttttggtgttcacacgtgtatgtagattaccttgatcatttcattgtacatctaataattgaaagaataaaacagtttgtcattctttttacttaaaagaataaaacagtttgtcattctttttacctacaaaatttgtctcaacgactcactgaagatgatgctaaattattaataccagtttccttctgattttttgttaaaa

SEQ ID NO: 135662 - DNA, 1016 bp, Glycine max
  Clone ID: PAT_MRT3847_93511C.1
agcagaactggcgatgcgggatgaaccggacgttgagttaaggtgccaaactattcgctcatctagatcccgtaaaaggtgttggtactgctcaaactctcttatctctctcttacacaccgaagcactgctactactactactttctctctagatatgggttctggtgctgtgcaactgtttctgatcttggggctcttggctagctcatgcttagcccaagcaccaggtgctgcaccgtcacaaccacccactacaaccccatcaccaccaccacccagatcagcacctgcaccagcacccaccacaccagcaaccccaccaccagcaaccccaccaccagcagcaactccaccaccagcagcaactccaccaccagcagcaacaccaacaccagcaccagcaccaccaacggctgcacctacacctgcttcctctcctgcagcctctcctccttcaccttctcctacagtgacaccaagccccacctctcctaacactccaccaggaccctcacccggaccctccggtagcgccgagcctccaccgccctccgctgcattctccgccagcaaggccttcattgctacctctgcactcgctggaaccttcgtagccatggccttggtggcttaagatctttcatgagaacaattgtctttgattcgtcccacgtggtggcatttccgcccttgatctttcttttccgcacacggacggacgggatctatttgatttatttcatcctctggtcatgttgagtagcggtttcttttttcttcttcttcttcttcgggttttatgtgttttcttttttctcctagtttttgtacgttgttgatgtgtttgttcattcgagatttgggagggttgatgatgattatttggtgattcattgttttggtgttcacacgtgtatgtagatgaccttgatcatttcattgtacatctaataattgaaagaataaaacagtttgtcattctttttacttacaaaaaaaaaaaaaagggcggcc

SEQ ID NO: 135663 - DNA, 130 bp, Glycine max
  Clone ID: PAT_MRT3847_93512C.1
cactgattttaagagtgtagggtttcattgaacagttacgcatgtatagttattaattgttctacaaaagatgtataataattccattgactctactcctgtaattctattttgatctcatatttaaaat

SEQ ID NO: 135664 - DNA, 838 bp, Glycine max
  Clone ID: PAT_MRT3847_93513C.1
ttactctctctctctctctctctcttacacacacaagcactacaacattttctttggtctctcattttctctatagctagatgggttctggtgctttacaacttcttctgatcttgggtcttctggctagctcatgcttagcacaagccccaggtgctgcacccacacaaccacccactacaaccccatcaccaccaccaccaagatcagcacctgcaccagcacccaccccgccagcaacaccaccaccagcagcagcaactcctccaccagcaacaacaccaacgccaacaccaacagctgcacctacacctgcttcttctcctgcaacctctccaacttcagaaccaagcccagcaccaatccccaccgctagttctccaccagcaccaggcacacccgaccctcacccggacccgccggtggcgccgagcctccaccgccctccgctgcattctccgccagcaaggccttcattgctacctctgcactcgctggaaccttcgtagccatggccttggtggcttaagatctttcatgagaacaattgtctttgattcgtccgcccttgatctttcttttacgggatctattggatttatttcatcctctggtcatgttgagtagcggtttcttttttcttcttcttcttcttcttcgggttttatgtgttttcttttttctcctagtttttgtacgttgttgatgtgtttgttcattcgagatttgggaggattgatgatgattatttggtgttcacacgtgtatgtagatgaccttgatcatttcattgtacatctaataattgaaagaataaaacagtttgtcattctttttt

SEQ ID NO: 135665 - DNA, 251 bp, Glycine max
  Clone ID: PAT_MRT3847_93514C.1
ggtgcctcttctagtgtgttgaggatgtggatatctgtgctgcctactcaggtatatacatgaattgagctatttgtgaattatcaaatctcaacttattaaatgcttgttcaagctagtttgtttagttatacaaataagatcaagcttataactaggctcaattatttaaatgagtcaagctcaagttttgtaggtttgacattaatagcttgtaaatacctcgtgtgtgtgtgtgtgtgtgtgtgatg

SEQ ID NO: 135666 - DNA, 340 bp, Glycine max
  Clone ID: PAT_MRT3847_93515C.1
tctctcttacacacccaagcactactactactactttctttctagatatgggttctggtgctgtgcaactgtttctgatcttggggctcttggctagctcatgcttagcccaagccccaggtgctgcaccgtcacaaccacccactacaaccccatcaccaccaccacccagatcagcacctgcaccagcacccaccacaccagcaactccaccaccagcagcaacaccaacaccagcaccagcaccaccaacggctgcacctacacctgcttcctctcctgcagcctctcctccttcaccttctcctacagtgacaccaagccccaccttttctaacac

SEQ ID NO: 135667 - DNA, 471 bp, Glycine max
  Clone ID: PAT_MRT3847_93516C.1
caaggcaaaacggcaacccccaaaaaagggataaaatataggaccaaaaaaaaaaacctggttttcaagaaggcaaaagctttaaggaaaaaaacccctattaaggggggttttaaacaagggaccctacaaactaaaaaaaggctccaaaaaggtaaactaagaacccatatcgggcccagtaaaaaaactggccccccttaaaacccggaaaaaaaaggaaaaaaggcgaaaacagaaatcgttaatagctaaaaaaacaaaaacaacagggttagctttggaagaagggttctaaaaaaaccccaccaaaaaaccaaggaaaaaaggggggatctatgtacccccccaaaaaaaggcaaaatcggggaggccaaaaaaaggaaaccgtttaaaaaaattaaagcagttttttggttgggctaaaaaacaaactggaccagggatccctggaggaaaaaaacctaagga

SEQ ID NO: 135668 - DNA, 445 bp, Glycine max
  Clone ID: PAT_MRT3847_93517C.1
gtattggactgctggtggaacgatgagaaatgttccgataggtgctggtcgacggaagaataagcacctagcctctcaataccgacacattatagtaacctctgatggaattccaacctccaggctagaaaccacggactcgtctggtctccaacagcagcatatcgcaagtcttgaatcctcagttcctttcaggtcttcagcagataacggcaccgtgttgaaatttggtcccgatatccctctttgcgaatcgatggattcaatgcttaatcttagagaccagagaagatgtgttgatgcaagttctatcagctgtgtagagtatagaggggaaccatccttatatggatcttcagtgacaactaatggtgctcaaggaagtgaattatcagaacatagtccatcaaattggctgcaatgttaccctgttcctccatgggta

SEQ ID NO: 135669 - DNA, 251 bp, Glycine max
  Clone ID: PAT_MRT3847_93518C.1
cggacactgataaccagagaatttttaagcgtgaattggaagaccttcctgcccgaccaacctaaggtacggttggaaacttacatgctaaggcaaggatcttgcacaaagtcgcagttcggctcaaaagggcttcaaatggcggaacataatgtgtattgagccatctttttcaccaatggctcataaagtaaggaacgcctataacatttccatgtaacgcatgttacgatttttaggaactgcctccc

SEQ ID NO: 135670 - DNA, 112 bp, Glycine max
  Clone ID: PAT_MRT3847_93519C.1
ggctcgaggttttttacagcatactgtattggccgattcacttgaaataataccattctctgctcgggccgtgattgaatgaggcgacgcggcggatgcatgagtactttct

SEQ ID NO: 135671 - DNA, 397 bp, Glycine max
  Clone ID: PAT_MRT3847_9351C.1
tggttggaaccttgggctgattagtgcttgctggtcgtgagaagagatagagggcatggtcgtgagaagatgatagaagggcatggtcgggagaagatgatagaagggcatggtcgtgaaagatgatagaaggggggatccgaggaggaacccggcaccattgcggaagaagaaagcgtttagagcactattattgcctaagatgtcgtcgacacgactgacaagtcctccgaaattaaggtccaaatcagcaaaaaggataagtacgcttaccccagagccccccgtcacgctgatggaaggggcccccaaactccaactccggcaccataatccgaccggtcaagcaatcggcagcctcccctcggaacggaccggtgacatcaccacaacaggc

SEQ ID NO: 135672 - DNA, 367 bp, Glycine max
  Clone ID: PAT_MRT3847_93520C.1
ggaggctagaagctgacagattcttcactagtaattttaatgaggatgcgtataccaagaaaggactagaatgggtgaacacaactgagagcttgaagaatgtgattgatcgtcactatcctgaaataacacataagtggttaaactcttcgagtgttttttctgtttggaactcacccccaaacactcaaaatcccattcctttataccttcgtgttccccattaatctatttctactaatatttggctttctttttcaaaaaaaaaaatggatttctgtctttattgtagttgagttgaagtatataatctatcttaattgtatcttgaatttgactatttttatgtttgtatttagtcgtctta

SEQ ID NO: 135673 - DNA, 597 bp, Glycine max
  Clone ID: PAT_MRT3847_93521C.1
ggtccggattcccgggtcgacccacgcgtccggtgagatttgcgaatatgatatatggacgattcttctggggtaggagaatattgacacggcaaaattggcggcgcaagacagcgcgttacgaggagatggttgtgttcatggcgaagtagaaatactgtggtggctgaggtgttgacgaaggaggagaggaatctcctctgtgtgtcttacacaaacgggatagataccatgcagggctttgtggatgatcatgtcctccattgtactgcaagatgaaagcattggcaatgttgaccacgtggtcattataaaggaggacaggtgcgtaaatgagggtgatacttattatgaactgtgatgggatcttaaacctccttgaatccaacctcattcctttcattgcatttcccgatagcaaaatacatttccttgaaatgaagggtgactctgaggagactcttgctcagttcaaaaccggtgcagagacgaaagacgctgatgagagtacttttattgctgacagataaagtcatgatattgcttttgttgatctggcacctactcacccgattaggctgggacctgctttgacta

SEQ ID NO: 135674 - DNA, 241 bp, Glycine max
  Clone ID: PAT_MRT3847_93522C.1
aggaaaaacatcagcccagacgtctgggattggcgaaaagataatagaagtagggtatatcatcacacaaactgtgtcacagattaggggaagtacgaacgcaggttacatacactggaagactctcatatacgaccatgtaacgcatgtcaatctcgaatcaaatcaacatgggatgccaaaatctgaataagtacattcgtcgatatgccaagatggcgcaattggacatgtcacagat

SEQ ID NO: 135675 - DNA, 134 bp, Glycine max
  unsure (1)..(134): unsure at all n locations
  Clone ID: PAT_MRT3847_93523C.1
attggcattgggtaacattgttgctcgtcctctctcaaacttganaccttctctaangttatcttctttcgncntnctcttgttgtatcaccaaantcttccccatttcccgcatcaatgtcgtcccacctgcg

SEQ ID NO: 135676 - DNA, 245 bp, Glycine max
  Clone ID: PAT_MRT3847_93524C.1
ctagctccgattcggtgacagaacctccatcatcatcatcaactgaattccacgatctcgttgaaggaaagaaaactctcactttgccaccgaccaaacaatgtccaatggttacgaatttgcgatctttagcccctgaaaccatgtcactgagtatggaagaccaagctctgtcgccagctggcagcgatctgaagtgcgatgggtacggcatcttccttgtcatttcgtcgttttgtttgttt

SEQ ID NO: 135677 - DNA, 203 bp, Glycine max
  Clone ID: PAT_MRT3847_93525C.1
cccacacgttcggttctagatcgcgagcggctggctaacattggaaaatggggatcgaataaacaaccggggtcgggcgttctacatgctccacccttacgtacacatccatcccaacgactttctctcctattacgccacctaaattcaattgactagaccaccgttatacaaccaatgatacacaagaaaatcacaccaat

SEQ ID NO: 135678 - DNA, 2408 bp, Glycine max
  Clone ID: PAT_MRT3847_93526C.1
tttgaaaattttattttggataaaaatttaaaaatgtatcttttttcgaaaaatcaaatcccattccccgggataatttatttgcatagacagtgtacaccgattcaaatcaattaattactagtgctatttactaattaatttattaataatacataaattccctagttttttttaaagaaacattggttatttttatttttatttactcgtgagtgtggaagacgaaaagagagttgagagagagtgagagggagtgagagggagcagagggagcgaagagaagaaacaaagatggagactcctcctccccaacaaggcgtcgtgaagaagaaggagacaaggggccgaaaacccaaaccaaaggacgaacacgggaagggtttgaaggaaggtaggaaaacacaacaacaacaacaacaacaacaacaacatcatcatcagcagcagcaacagcaacaagatcaaccttcggtggacgagaaatacacgcagtggaagtcccttgttcctgtcctctacgactggctcgccaaccacaacctcgtctggccctctctctcttgcaggtggggcccccagcttgaacaagccacttacaagaatcgccagagactctacctttctgagcagactgatggtagtgtgccgaatactctggtgattgcgaattgcgaggttgtgaagcctagggttgctgctgctgagcacatttcgcagtttaatgaagaggcgcggtccccatttgtgaagaagtacaagaccatcatacatcctggtgaggtaaacagaattagggaattgccacaaaattccaagatagtggctacacatacagacagccctgatgtccttgtttgggatgttgaaagtcaacctaatcgccatgctgtccttggagctacaaactctcgtcctgatttgatattgactggacaccaagataatgcggaatttgctcttgcaatgtgcccaactgaaccctatgttctttcaggaggaaaggacaaaacagtggtgttgtggagtattgaagaccatataacatctgctgccacagactccaaatctggtgggtcaattatcaaacaaaactctaaatctggagaaggcaatgataaaactgctgatggccctactgttggaccacgaggcatttattgtgggcatgaggatacagttgaagatgtgactttctgcccatctagtgcacaggagttctgtagtgttggagatgattcttgtctcatcttatgggatgcacgtgttggctctagccctgtggttaaggttgagaaagctcataatgctgatcttcactgtgtggactggaatccccatgatgataatctgattcttactgggtcagcagataattctgttcgcatgtttgatcgccgcaatctcaccactaatggagttgggtcacccatccataaatttgagggtcacaaagctgctgttctttgtgttcagtggtctccagacaaatcatctgtatttggaagttcagctgaagatggtctcttaaacatttgggactatgagaaggttggtaaaaagatagagcgatctggaaaatcaataagttctcctccagggttgttttttcaacatgcaggtcatagggataaagttgttgacttccattggaatgcatatgatccatggacgattgttagtgtgtctgatgactgtgaaagtactggaggagggggaacgttgcagatatggcgcatgagtgatttgatctacagaccagaagatgaggttttggccgagctggagaaattcaaatctcatgttgtggcgtgtgcttcaaagactgaaaaatgacatacgtcgtaggcaaaaatgagttatattattattgctgttgtatttaatttaacatttgcggtggatgtttcatggcattttaaaaccattcatgtatggggctggagtagggaaaacctagattaacgtagatctgacgatgatttgtggttagtgttacttaattgatacaattctattttctgtttgaagatcatgatccttggttcatgtggctcacttctccaatcactgaacggaacatacatgttaattcattatgatctttatgaaactttagacatgctttctacggttggccaaaaaaaaaaaaaaaaattgtttgaggttggcaaatttgtacgtgcacgctgctcaattctagaatcactgaaccgaacctacattgttaattcatgatcctttgcacatgaaactctagacatgctttctaggttggcaaatgagatgtttatgttctctactatgttttgggtgcacagaatttgataacttgattagtgtgtaaatcatagctatgtggttgttgtatgcaagttaggggtgtttggtaggagagaagttttttc

SEQ ID NO: 135679 - DNA, 389 bp, Glycine max
  Clone ID: PAT_MRT3847_93527C.1
taggacaaaacaggaaccacattcctgggaaggggtctttgcaataaaggtgtgtggacccaataatggccatgaaacgaggagctctgggtgagcaaatcaaacttcatggcatccgagtgtccttattgacaatcccaaacagactacagaagttgatattctcttgggaatttctcaagattttgaaattgatggaaatactcacatgccagctttgtctgttccacaggctgctgccatatctactgaaaatgcggaatcctctgcttgatctggaagttgtgtggacttacgcttggacaaaagtataattgactaaacgacaattggcgtgaccctcttgttgacgatacatctagctatttgaaaattttcacacctgtatt

SEQ ID NO: 135680 - DNA, 2241 bp, Glycine max
  unsure (1)..(2241): unsure at all n locations
  Clone ID: PAT_MRT3847_93528C.1
ccaaacccgatattttacaaccgtccactctttcttctctctctagtctctcccctcgcacagataccagtgacagtgtgagtgaacaacaccaagcttcatgttcagtgctcttacacaatgtcgataatttacagacaccttgttttagttgtcctgcttacatttgctttgtctagaaagcatgaaacttttttgttttttacagggacagaaaacgagggaaaaaacgttgttggcctttctcggttgtatgtatttgctgctgcaccgttcgagagctcgccctttcccttagctgctgagagaacacgaagaaaagaccctcttgatggcttcaataagtacatttatggatggaatatcactagcagtgattattgggcttctgtggcatataccgcagctcctttgttcagtattgcagcagtctggttcttgggctttggcttatgcttagtgatcatcggtgtttgttacttctgtcataaaagagagccatatggttattcaccaacatgctatgccctttcccttattctcctgatattattcacatttacagcattgattggatgtgcagttctctacattggccaaggaagttttcatcatagcatgacacatacattgcagtatgtggtacatcaagctgattctactgtggataagcttaggaacgtgtcagattatcttgctcaagctaagcaggttggaatcgatcgagtttttctccccacaaatgttcaaactgatattgatcaagcagaaacagatatcaataactctgctagcacccttgctgataagacaaaggagaactcagacaacatacaagatctcttagattctgcgtaatgattgattataatgttttctgctccagatatttggtttttgctttatcttttactctataacatgaacatgagtacataacgctgatacaggaggctagcacttatcataatagctgctgtcatgctagtcttgacatttcttggatttttattctcgatttttggcatacagctccttgtgtacatcttggtaatcgcaggatgggttcttgttactggcacccttatattatgtggcctgttccttgttctccataatgcgacagcagacagttgtatagctgtgaatgagtggatccagtatccgactgcacatacggctatggacgatattctgccctgtgtggacaatgccactgcacaagaaacattgtcacgaagcaaagaagtaacttctgaactagtcaatttggtcaaccaagttatcaccaatgtctccaacttaaattttgcccccaatttcactccactctactacaatcaatctggtcccctcatgccactcctctgtaatcccttccatcctgacatgacggatagacaatgtgatgctggtgaagtcaccctaagcaatgcaacacaggtgtatggcaattttgtgtgccaggtttcaccatctgagatatgcatgacacaggggcgtttgacccctaccttctacaaccaaatatctgctggaataaacgtgggcaacgccttgtataattatgctccgtccctcattgagctacaagattgcaccttcgttcgagaaactctaagcgacatatccagggaccattgtcctggtttacagcgttatagtagatggatctatattggattggtaatggtctcttttgctgtcatgttctcattgatcttctggatcgtgtatgggagagagaggagacatcgtctgtatagaaaagagtcaaaggacttcactcctacacatgcaccagcaccagcaccaggacaagcattagcattggtccagatccctgaaggataattaagcaaaaactaattgataatgatgttgctagttggtggatgaacatgtgtgaactaagtttagctttttccggtgttgggtgtataatgttgtagcttcttttgtatgacacactagtgttttttttataatgaaatatcattattttacgtgacccgatgaaaaaggaggaatcagacagaagacaaggcacaaacagaaggatagggagcttcttgtctgttcttctgtggggggaaaatcattagaccagcctggcaggtcttagatgttggacagtgtttggagtttggaggtaagtgtaacctacatgttcctgaaaatgtgtgaaaagcctgatcagaatgtanggaataggaacccatcttgactgcattttgtgca

SEQ ID NO: 135681 - DNA, 510 bp, Glycine max
  Clone ID: PAT_MRT3847_93529C.1
tcggacgcgtgggcggacgcgtattttccaaccgttaactctttcctctctctctctccccccacctcacacagacagagattgcatttgccagtgacagtgtgagtgaacatcacagaacactggaacacatcaagcttcattcatgttcgttgctctcacataatgttaagttacagaccacttcctttttgtttcctgctcacaattttcttgtccacttcctgtctgttgtcacaccaagcttcagggacagaaaatgagggaaaggatgtagtaggcctttctcggttgtatgtatttgctgctgcaccgtttgagagctcgccccttcccttagctgctgagagaacacgaagaaaagacccccttgatggcttcaataagtacatttatggatggaatatcactagcagtgattattgggcctctgtgacatataccgcagttcctttgttcagtattgcagcagtctggttcttgggctttggcttgtgcttattgatcatt

SEQ ID NO: 135682 - DNA, 731 bp, Glycine max
  Clone ID: PAT_MRT3847_9352C.1
tacggctgcgagaagacgacagaaggggcaaaatcagatagcatacaattgggtggagaagaacgtccattggttgccccaaaatgctcaccagagatggctgtaaatggatcttaagctttcagaatcatatgcaggaagacagattatttgttttatttgacgtatagatttgctggtgggttagtggttctgactacataaatagagctttgagacgaaggaaatttacctacaagggggtaaattctgcttatgcgttgcatcgaggacgtgggaatactgtacagtgccactaagaggcgggaagatattattaatacagcaattcggctggatctggctcctattcttcagtttgctattttgggcttgagcttagtatttgtttttgtatgacattcctgaaaaataattctgtgttttcccctgctccaaaaatttacctcttccagctcatttatttacaaagtttccgccagaatgtccaagtgcgggtgaggggttatcattcatgttatataatattatttacccttctcagtatttgaacttcgtgatagagggcgccaatatcttgccctacacaggttttccgtgtgttttttccccctttcttttttcggtggtgggatgtgttggtaggaaaacatgcagtgagtatctaaggcccatttttcactaatgtatggaatcatcagccgttgtaaatctgtttaaactgttgagta

SEQ ID NO: 135683 - DNA, 476 bp, Glycine max
  unsure (1)..(476): unsure at all n locations
  Clone ID: PAT_MRT3847_93530C.1
aattcggctcgagatttgagccacacacaaaacatagggagaatgataaaggctcactttccgcactctcagtttattgtggtttccttgaaggaaggcatgttcaataatgcaaatgttcttttccggacaaaatttgtggatggtgtttcaactgttcagcgaactgttgcatctaaacaaagcaaatgatgtgtttgcttcaccgatctgttacaagtcttgcacttgtgttcatcttcagggaacctagaaatgtaggtaatgcctgtaatttaaaagcttttatgtaatttgaacatcagtgtaaaggtccatatgtgatagtgttgtttctataaagtaatttagaagttacaataacgaggatgggggtaacatggttgtgtttgaatatgaatgctctggttttgtataagaaaagtatataagaatgaggaatgagagtaaaatagaggaacatgccnnnnaaaaaa

SEQ ID NO: 135684 - DNA, 238 bp, Glycine max
  Clone ID: PAT_MRT3847_93531C.1
accaagttaatgttgcaatcgcattataataaccggccaaaggtgattgatagaaatttgcaagtttgaaaagaaacattgcatctcatccaccaaacaaggccgagcctgattaaaaggcaaggccaggagaaactggtgatccgggtgggacttgtggcgagaaccttgaaggttaacaacattttggtgaaagaaagaaccagggaaggaaaaccagggaagaaccaattgggac

SEQ ID NO: 135685 - DNA, 392 bp, Glycine max
  Clone ID: PAT_MRT3847_93532C.1
aaagttttattcctcctaaactctatcgcctatatccacaattcttaaattctttgctaagctttattataaaaatgaacattctctctccacaacatattcctcaaaatcttcacactcatccttcatcctaagctcaactctatatacgtcccaatcttctcaaacattttctccctctaactcccaacttaatcctcattctcacattacacattcctctctacaattacaattttaacaccaactattcacctctctttacatatacttccccaatcattcccaatcttcctatttatcatatcactacaacttaaacaactctcaattcaaacctattccctatttattatcatctactaaatcacttcattacttaacctctatta

SEQ ID NO: 135686 - DNA, 1253 bp, Glycine max
  unsure (1)..(1253): unsure at all n locations
  Clone ID: PAT_MRT3847_93533C.1
cttcctgtccgaacaaaccaaacaaacaaacaaaacccctctttctttctttcttttgagtgcatggcaatttggggcttttctttggaattagggcacacgcacatgattttggttgattgatcctcgcaatcataaacagtggggaagatgtaatcccaccgagattattggttgattgattgataagtggtaagtggtaagtggaagtgcaagtgcaagtgtgtgtgtgtgtgtgtgcgtgtgtgtgtgtgtgtgtgtgtgtgtttgtgtaagggtttgtggtatgaagggtgcgttggatcggacgaaggtggtgctgcgccacttgccgccttctatttctgaggccgcccttttgtcccaaattgatgcggccttcgctggccgctacaactggctctctttccgtcccggcaagatcagccagaagcatatgtcattttctagagcctacattgacttcaagaggccagaggacgttatattgtttggcgagttcttttgcggggcgcggtttgtgaatgtaaagggatctctccgatctaccgtcattgatgtatatgcctgtcctcccatgttccttgtctgtgggtgttgatgagttgctgttgaccccctcctgttagcatcaattgattttgtgaaattttcacctttaaattaagcttgagctgcattttgattaattcacttctttgatcaatgtgtgaattgtctggtgatgttatacttaaattgtcctgttagtgaccaaagagatcaaaggttaatttgatattgactatcagtttgacattacaaacctcagaataaatgtgaaggccaatgtgctttagaaaactactaggaaggaagtgaatgttaattatgcaattgctataataggtatagtgatactacttgccaaagtggctgactcccaggatttttttttttctgtaatatgctgtcttattgttgcatgtatgtggaatatgatgagtcaataatacagtatcattttgaatatggattgtatttagttcattgccagtatcattggttgattcatctgtaggatcatgttataactaccgttctgctaagagtctattttcttttggntgnttttattgngcaggtatctgatttagatagcatgtcacagcatcacaatgtaacatcttcagctaaaacagtttgttggtttcaacagtttttgaaacagagtcagcggcatgaaggtagtggaaggattatcanaagcatac

SEQ ID NO: 135687 - DNA, 386 bp, Glycine max
  Clone ID: PAT_MRT3847_93534C.1
ggtaggagacaaaatgaaaaaggaagatattttgtttgattagtttaaaataagaaaaaagtacatttataaaataatatcaacatccttaaataaatatggatatatggtagtataatgaaaggttttttttttgtcctttcaatttaaagtgtctgactcctctttccaactttattttgtttaggtaagaaaagaaaaagaaaatgagtaaaaactatataaaaaaaaagtgagatgaatcatagattgtttggtacaagaaaaattgaaagaaagaaaaatattttctctcttgtttgattgtagatatgaataataaattcctatttatgggtatcgcttgcacatcttttttttttttttttctaactttgacgataaat

SEQ ID NO: 135688 - DNA, 1984 bp, Glycine max
  Clone ID: PAT_MRT3847_93535C.1
ccacgcgtccgtgacaacataacacaacacgacacaagtcgtaacttcctttgaaacagagaaacaaactaaccaaaccccttttctttctttcttttgagtgcatggcaatttggggcttttctttggaattagggcacacgcacatgcttttggttgattgatcctcacaatcacagacagtggggaagatgtaatcccaccgagattattggttgattgattagttgattgattgataagtggtaagtgcaagggaaagtggaagtgcaagtgtttgtgtgtttgtgtaagggttttttggcatgaagggtgcgttggatcggacgaaggtggtgctccgccacttgccgccttctatttctgaggccgcccttttggcccaaattgatgcggccttcgctggccgctacaactggctctctttccgtcctggcaaaatcagccagaagcatatctcatattctagagcctacattgacttcaagaggctagaggacgttatattgtttgccgagttctttaacggacacgtctttgtgaatggaaagggatctcagtttacagtgtggatagtatatgctccttcacaacgtgttccaagacagtggtctaaaaaggatcttcgtgatggaaccatatataaagattctgagtatctggagtttcttgaactacttgccaagcctgttgagaatcttcccagtgccgagatacaattggagaagagggaagcagaacgatctggtgctgcaaaagatattcctataattacaccactgatggactttgtgcgccagaaaagagctgccaagggacctaggaggccactgtcaaatggaaaagtgagtagaagagctggcacttcatcaaatgggggccctagttccgccacatcaagacgtggttctggaaagaagagggtttctgctacaatgtatgttgcaagggacccagggaaaagttctactatcaaagacaaatcatcttatactttggttcctaagcaagatgatcagcatcttccaaataaagcttcaaacatggcttcttcagatggaaatcaaactcttgatgagaatggagtttctggaaatcatgatgctgggaagaaaaaagtactacttcttaaagggaaggaaagagaaataattactgtatctgatttagatagcatgtcacagcatcacaatgtaacatcttcagctaaaacagttgttggttcaacagttttgaaacagagtcagcggcatgaaggtagtggaaggattatcagaagcatactctcaaaaaaggagttgcatcaaagccagtcttccagggccctctctgagcagaaaatcctgacatccaatctagagaaagaaaaacagccccctcgccccttacatgtccaactaattttgaagggctctaatgggacaccagagaataagattggtgtgcatgattcacatgtttctagtgagaggcaagagagacatgttagacataaagatagacctgatcgtggtgtctggacaagtcgtttcaatggagctgacgtgtctttctcatctcctgcttcctcacaagtagatcctttggaaggaagtcaagcagatttgaaacatgacatgccaaatgccagaagtgggggaggtaaaatctcttggaagtgtccgtactagtcactcatcagaaaatggtttcaataagcattttggtcgtcgtggaccatcacatggggtaaaggatgttgatggctattcagtttcaagtgaagggaagcatcctagaagatctagtacatctgcttatggttccaacgagaaacaagtttgggttcaaaaagcaagttctggtacctagagtattttgattgtgataagcttgctgacttacagttttggagcatccatttgctagctgctggattctgtctctttttggttgacagattcttacaagtaaatgagtgtgtggttaaaaaaaattcttttac

SEQ ID NO: 135689 - DNA, 499 bp, Glycine max
  Clone ID: PAT_MRT3847_93536C.1
ctagcacgcaacctgtttgttcgtaaattcggccactccaaagtatatgcaccacaaacaacaacaccatcttaatcttctccacccaaagcgcaacttgcaaaaattacataaattcctagcccaaaaacttgatcagtaaacaaacatgggaagttccgtgcgtgtaaaagaagcatctgtggttacaccttctgagcccactccatcgagtgtgttggctctatcagctcttgattcgcaactcttccttcgtttcaccatagagtatctcttggtctacaacccttgccctggcctggaccaggctgccaccacggcccgtttaaaagcagcattagcccaagcactggttccctactaccccttcgcgggccgggtcaggaccagacccgatggaccgggcctggaggtggtttgcggagcccaaggcgcggtgttcatagaagcctccgctgaccgttacaatgttaacgacttcgagaaagcgcctaaagca

SEQ ID NO: 135690 - DNA, 358 bp, Glycine max
  Clone ID: PAT_MRT3847_93537C.1
actcaggagacgggctcccgggtctgctcaggtaacccgcggcactcctttggtgcatttttccccgtcctgattaaaagtgggggcaggtgacccccgtgcgactcccactggcggcagccaagaaacgggagccggagaacagcagagggaggcgtgggaccctgtgtaatgagattcgcagacgccgttcctcaccctccgtgtcaaggagacattttcaaaaaggtttgacacagcatcctcgaagatccctttgccaaaacacaaggtggaggcccctggagtactttaagccggcttctgttaacagagcagtccgtatgcatattataatcacgccgctccaatgccccgt

SEQ ID NO: 135691 - DNA, 480 bp, Glycine max
  Clone ID: PAT_MRT3847_93538C.1
caatggcaatatttgaggatatcatattcacttcacgttaaaagtttatcattaacgttggttaacatatagtcttcacttttcatcactaacaataagctattcagagtctcctcaatctttgcaaacgcaggatgaaaggcactggtagcatggaaaacataaatgcagtgacccacctgaatccagctacttcctggttttttctccaaccctttatcttttatcatgcttctcacctttgacatgtcttcccatcttttcccagaggcatataaatttgacaaaagaacatagtggcctgaatcatcagctttcaattgtaaaatacgctctgcaagaagctcagtcagttccactttgttgggaagtcgacaagcacctagtaagctcccaaagacattggcatctggtgtcataggcatccttgtgatgaacttgtatgcaccatcaagatctcctgctctaccaatgagatcc

SEQ ID NO: 135692 - DNA, 1244 bp, Glycine max
  Clone ID: PAT_MRT3847_93539C.1
taggcaccgtgtccacaagattcttagagctcggcaaccttattgggacctcaacttctacattaatctttccaccagacatcagcttccatgattttctgcactctattctgaggtgaccaattctgttcttcttttctcgcataataaagtaatcaataagcacataaaccttcgaggacatggcatcagccttgtccacgaccagtgtgctttgctggaggaatcctcagcacatgcatattatcttaccctcttcacagacacttcaaaatggaactctaagaactgtagctgcttcagcctcaaaagatatcagcatagaaagtgacaagtgttcctctagaacagttttggcttcatggggtttccttgttgggtttcccgggtgagagtttggctgtgagggtttggctgctgcgaaacagggccttctatcaccgagacttcccagactgtcagagccagatgaacaagggtggaggacctatcgcaagccggatgagaagtcaggaggacatggtgttggatggagtcctattattattaatacatacagcttcagtgagcccaaagaatgggaaccagtatcaatagcagatcttggtggcacagagatagatttgagatttgccagctctaacgctaaggacgtttgtttgtcattgttgctcctgttcttagattctccgatgatcttggtgacaatgctacaatagaaaaaattggacctccagagaaagtgatcaatgcatttggtccagaaatgattggggaaaatgtagaagggaaggttctgagcgttagtgcagcagaacatgaaggaagaacttactaccagtttgagctagagcctccccatattttcattactgccactgcagctggcaaccgcttatatttgtttggagtaacaggcagcggtcttcagtggaagagacactacaatgatttgaagaagatagctgaatctttccgggttgtataactaaaatcttctgtgaacccagagctaattgaaatgcagctttctatatttgtagtgtagtacaacaaagaggttgtttcccactactttgtctgactgggatttatgtgaatcaagagatcatataggcaaaatctttgtaccttcaatataccaaaccagtcgtgttatatttcaaagttgctgttctacgttctaagtacacatcaaatgctatgaaattttatagtgataattaagaagcttggttacaaaa

SEQ ID NO: 135693 - DNA, 304 bp, Glycine max
  Clone ID: PAT_MRT3847_9353C.1
tagagcgctacagtgcaacggacttgttgatatgctctagatacagagcgagatgctataaagctagcctgggtgcatacgtgggcacccacgcggctctaacttatagtatgatgcccattaaccccaagctgccatccaatgctgcacactctatgtcaacccaatgcgctttaaagagacttggggtgacagagttgatcgagcttagatccactgccggtgtgacgtttgctaacgatgcgagagaatcttactttcatgatattgcagcgttgcaactgactacgctcaacaatgggtc

SEQ ID NO: 135694 - DNA, 276 bp, Glycine max
  Clone ID: PAT_MRT3847_93540C.1
aagaaaatgacggatagctcctgtggtcacacttagccgtgaccatcctcagctaccggaccagggccactacgggtccaccgagttcccaactgtgtaatgcactgtcctaggggcgcgctatactggggaacaatctataggcacgcgtccgtgcaactttcagagcacagcatgatgctgcttaactccaaaaaactggccgcttattaacaacggactaacaggctaaacccgggtgataccacacttaatctcatatggcataaccccctt

SEQ ID NO: 135695 - DNA, 150 bp, Glycine max
  Clone ID: PAT_MRT3847_93541C.1
tgggccaagtcctattgcactcagctgcatcacctacaagctttcagcataataaatcatggcaaaagctgcaaggcatctctagccaccccacagcgtttgtagaacttaaactacattcccatatgtaagtgctctatgagatttcat

SEQ ID NO: 135696 - DNA, 318 bp, Glycine max
  Clone ID: PAT_MRT3847_93542C.1
ggaaaaaaaaaaaaatccctttcaaaattggggctttaaacaacaattttcacgttccaaaaattgggaagcaaaaccccccaagaacgtttgcccccctggggcacctttgaaaccctacttactcaaaaggctgttcccccacccggacaaaaacccttgggggggacctttcaacgtccctccccaaatgtggggccccctcatcacaaattcccagcttcaaaaattgcaatgcccctgcgaactttgggaaatccccaatcagggggcaatcccccatggaaagcttctgacagcctcccaagttacccattt

SEQ ID NO: 135697 - DNA, 186 bp, Glycine max
  Clone ID: PAT_MRT3847_93543C.1
aataaaactccaacaattttattagggaaaattctaaccaaccccaccacatatacactgccttgaagataacttcgcacgctaaccctatctttcgccacaaacattggagtggtgctcaacatagtgcagcccaccattgacaccagactgagacgcattttttccgcaagataggactttacg

SEQ ID NO: 135698 - DNA, 214 bp, Glycine max
  Clone ID: PAT_MRT3847_93544C.1
gcctgacaaacgttattgtgtttacgactcgcatccaactggcatgcttgaaggtgtaaccaacgtgagggccgcaataaccctcctcagagatactgccatgaaacaccctagactgatcagagagcattcccctggaagtagtgctttccactcgctggacaatccgcggtcttccaatggagagatccttgaccagactcaggatgcatat

SEQ ID NO: 135699 - DNA, 295 bp, Glycine max
  Clone ID: PAT_MRT3847_93545C.1
ggcatgcatatcttcgttaagaccctgaccggcaagactataaccctataagtcgagagctccgacaccatcgacaacgttaaggctaagatccaggacaaggagggtatccccccagaccagcagaggctgatcttggccggcaagcagttcgaggacggacgtacccttgctgactacaacatccagaaggagtcaactctccacttggtgtcgcgtcttcggggtgagatgcagatcttctgtcagacccttacgggtaagactattaccctcgaggtgggaagctccgaca

SEQ ID NO: 135700 - DNA, 120 bp, Glycine max
  Clone ID: PAT_MRT3847_93546C.1
tctctctcctgggctctaacaaaactttaaggaagcgtttctacgctgttcagacgcctctgatgactacccaggtatctgtggccgagtcatcataggatccagattgaatctaaacat

SEQ ID NO: 135701 - DNA, 418 bp, Glycine max
  Clone ID: PAT_MRT3847_93547C.1
gagggggggtgtgaataacaaaggagaacaacgaatttgggaaactgtgaaagacaagcgctgccgagggccaacccattttgaatacaattgggggccctttttttgtggaaaaaacttgaacctcccagcacaactcgaaaaggagaagaacctacccccaccacaaacgtgaaacgttaggctcccaatcccccttttcacaggcgttaaattcaatattctcccgagataacccggattggtaagcttctccaaattctgaaacccccccatggacctgcccttgacaaacacccttggcagggccgcccttttcccttccacaagttcttttaacttccttaaaaactccccccgctaagacacgttttgtttgtaaaacaccaccctgtgccccttcaaaacgtttgggctg

SEQ ID NO: 135702 - DNA, 399 bp, Glycine max
  Clone ID: PAT_MRT3847_93548C.1
ctccttcccaattgtggaccactacaaacccaggcgacggggctgggcttatgagaaacgtccgcccccatagctgaaagtagatgccttcaacaacaaaggtccacataaactgtctgatctctttgcctacacctcttgcttgaggtactacactccccagacttttagtgtagcaaggtcgtgatctagcttcagaagatgaaaaatgactgctataggcgaaagggaatgggctcaaatacaaaggaagaccgtcagcacaatctgatttgctcttgctcccatgatcaagtgcaaggcagagtgcttaaggagatcacacccatagccttgcgggagaccgggttttgacatcactccacattttgctcggagatggggtagtatcaactcaaa

SEQ ID NO: 135703 - DNA, 829 bp, Glycine max
  unsure (1)..(829): unsure at all n locations
  Clone ID: PAT_MRT3847_93549C.1
cccacgcgtccgcccacgcgtccgcaacttgactcagcttgctggtttgaaccttgcaaacaacaccctttctggagaaattcctgacctcaacctgtcaagactgcaggtgctgaatttgtccaacaacaacttgcagggcagtgttcctaaatccctgctaaggttttctgagtctgcattctctgggaataacatttcctttggaagttttcccacggtttctccggcgcctcaaccagcttatgagccgtctttcaagtccaggaagcatggaaggctcagcgaagcggcgctgctgggagttattgttgctgctggtgttttagtcctcgtgtgttttgtttctttgatgtttgtgtgctgctcaagaagaggtgatgaggatgaggaaacattcagtggaaagttgcacaagggagaaatgtctcctgagaaagcagtttcaaggaaccaggatgcaaataataaactggttttctttgagggatgtaattatgcctttgatttggaggatttattgagggcttctgctgaggttctgggaaagggaacgtttggaactgcctacaaggcaatacttgaggatgcaaccacggttgttgtgaagaggctgaaggaggtagccgttggaaagaaggattttgaacagcacatggagattgtaggaagtcttaagcatgagaatgtggttgagctcaaggcatattattattccaaagatgaaaaactcatggtatatgattaccacagtcaggggagcatctcttncatgttgcatggcaaaagaggagaggatagggtgcctttagattgggatacctcgctg

SEQ ID NO: 135704 - DNA, 405 bp, Glycine max
  unsure (1)..(405): unsure at all n locations
  Clone ID: PAT_MRT3847_9354C.1
tgagtaanctctcaacaagttactaattggaagaaaggctgtttaatggttaagattgtgatgtctgggaatgcagcagtcaaaaggagtgattgggcctcattggtacaagtgtttttaacatacagcaacagtacagagcattctgatgcatgtaagtggacaaaatcggaaccacattcctgggaattgatcttcccaataagaggtatgtggacctaataatgggaatgaaatgtggagttctgtgtgggcatatcaaacttcatggcatttgggctttcttatcgactatcccaaacagtctacagtttgtgatattgtctggggaattcatcaagattctgcaatggctgggaatactcttatgccagctttttctgttgcacaggctactgcacgatc

SEQ ID NO: 135705 - DNA, 563 bp, Glycine max
  Clone ID: PAT_MRT3847_93550C.1
caaaactttctttttactccctccgtcccattatattttaatcttcaaaaaagaaaaaagtatcatatattttgatattgcatgcaagaattacatcatatattcaatatatgtaatattacaaattaaaacatctcaaaagatcataaacaatatctaagacaagaaatagttaacttcaagaatcacaaaagatgggaatgaaagagtacaattaataggaagtgctagaagcagtgaggagatcttaataataacactaataatctgatattttacgcattaaaagtcattgttaccatcccatatgattatataaaaattttaaagaaaaaaaatactacattcacctagttttataaatttaaatacaccaatcaataaaaagtgtatattttagaaaatactacatacgactgatttcttgtttttcattgctgaccactgaattcacctttgaacttttaatttcctgagagattgtatttccttacagtatcttattaattgcatgcagtgaagccgccgttccaattataacccttataatgggagcaaacctc

SEQ ID NO: 135706 - DNA, 285 bp, Glycine max
  Clone ID: PAT_MRT3847_93551C.1
ggaacattaccctttgcccataaacttctgcaggtggttaagtttaaaatcatggtatcaaaacaacaatgcaatcatgattgtctttttcccaaatggtagctagataatggctatttagtacatgcttctttgcacataagccacctgcccataagaattgaaagttataaagcaatgccttttttacttgttaagcttcaaagctgtttgggtgactctctgtttctgctattgggagctgaatcactatagtttgaaatttgaattgatagtctgtcaagg

SEQ ID NO: 135707 - DNA, 375 bp, Glycine max
  Clone ID: PAT_MRT3847_93552C.1
agaactggttatggcacgcgctatcatgggtccacggcaagagctatcgttaatgaagtggtgcccacatcggcatcaaaggacagcatgactctccatgacgagggagaaaacttgctgaaatcgcttaaaacgatgccacgtgctttcatgaatgactcagcttccttgatcaatacatggatgacaagcacagagtgctaatagcgtgtgcccttaacagacgtgggggcatctactcagcttaatgaggaagagtgggggatcacactgcatcctatgctgggcttaatgctgagtgtggatgcaccagcagatgtgacgtgaacatgcaaggactaatggagaacatgctgcacgtgacatctgtcatca

SEQ ID NO: 135708 - DNA, 316 bp, Glycine max
  Clone ID: PAT_MRT3847_93553C.1
gttggaaaccacaatttggacaataggaataaaccactgacctctttggtcattgaaaggaaacattctctccttgatatatatccacaaccaaacttaagacactgcactcatgatataatacactggccattggcatcacaatgccttgggaagaaggacacccctggcacctgtcattactaagtggcatgtaccaactttgaatgataaaacagatgacatatttagcgcagatcatgccttaaagtctgttttgtaccccggagtttttaagcaacggatggatgggagtccaaggctctgatgagcctca

SEQ ID NO: 135709 - DNA, 466 bp, Glycine max
  Clone ID: PAT_MRT3847_93554C.1
ctcgagccgggctcttttctagttgattgtgactgagacgctgtgattgcttttagcttccttgcttacaaggatcttccacgtccaaacggaatgttttccagaaattataacgactataatgagtagagtgctcaagagggacaaaaaaaaaaaaaaaaggaagtgcacttaaggttggggtatttataaaatgttcaatctaaataccagaaagtgttatgcgattgattattgagtacgaacatttttttataaataaaaactcaattaataaaattaagttgactttatttgaattaaaaattatcttctatttagttcttgtattttatatttatacataatattacctaaagatatattttacatcattacttgttgatcagtattaaatatttatgagttaatttaaaattactacagatatcaaatttaagtagttcgtacaacttatgaattaatc

SEQ ID NO: 135710 - DNA, 377 bp, Glycine max
  Clone ID: PAT_MRT3847_93555C.1
tggggagatttgaagatacgtgccactgaaactctgcttggctgaaaatagataccgagcttatcgaatgcagcgtgagggccttatatttaagacattgaccttatcggtggctgtaacactcgtttatgggaaaatgtgtcgactggggagagtgcttacgaaatgcttaatatctacttgctgatgtggatcacgatggtttatactgttttgttcgcacaaatggcattgatgtgaggactctctcattgggtgagcctcgaataataaactttactgtggcgcctgccttgcgcaccccagatgtcacatctgccaaggatatgttcttctggaggcaaggactgaatccaccactggtgattgccccagtg

SEQ ID NO: 135711 - DNA, 381 bp, Glycine max
  Clone ID: PAT_MRT3847_93556C.1
cgacccacgacgtacgaaaaaaagtcaaaaaaaaaaaaggaagaaaaacaaaaagaaaaaaaaaatgaggataggggtggtagaggatgtaggactcactgtctacgttctcgtgaagtcaaagttcttcgacagtgtcagtgaaatttaattccagggcagtggctgtcgtttttcaacattgggacagggaagacgttgcccattttaatcgcagtcgacttgatgaacatgtcgctagctgtagtagtagtaaacaggaccgcgccgatagcgattcccaagacttgcactgtctcaacggaaaaggcgacgcggattgtcccggtacatgcagcgtaaccgctgtggttgttatggtcagcgtgaccgtgacatttg

SEQ ID NO: 135712 - DNA, 530 bp, Glycine max
  unsure (1)..(530): unsure at all n locations
  Clone ID: PAT_MRT3847_93557C.1
ttgcgaccattagtagcggcaacgnngngngcatcngttatgcaagctggttgcncagtctcttatgctcagcttactcctacgttctacagagaaacatgtccaaatctgttccctattgtgtttggagtaatcttcgatgcttctttcaccgatccccgaatcggggccagtctcatgaggcttcattttcatgattgctttgttcaaggttgtgatggatcagttttgctgaacaacactgatacaatagaaagcgagcaagatgcacttccaaatatcaactcaataagaggattggacgttgtcaatgacatcaagacagcggtggaaaatagttgtccagacacagtttcttcaacctcactcaacttaaagcttcctttgcttgtcaaggtctcaacacccttgatttagttacactctcaggtggtcatacgtttggaagagctcggtgcagtacattcataaaccgattatacaacttcaacaacactggaaaccctgatccaactcttgacacaacatac

SEQ ID NO: 135713 - DNA, 1347 bp, Glycine max
  Clone ID: PAT_MRT3847_93558C.1
gtcgatctcttcccgccgatgggttccatgcgtctattagtagtggcattgttgtgtgcatttgctatgcatgcaggtttttcagtctcttatgctcagcttactcctacgttctacagagaaacatgtccaaatctgttccctattgtgtttggagtaatcttcgatgcttctttcaccgatccccgaatcggggccagtctcatgaggcttcattttcatgattgctttgttcaaggttgtgatggatcagttttgctgaacaacactgatacaatagaaagcgagcaagatgcacttccaaatatcaactcaataagaggattggacgttgtcaatgacatcaagacagcggtggaaaatagttgtccagacacagtttcttgtgctgatattcttgctattgcagctgaaatagcttctgttctgggaggaggtccaggatggccagttccattaggaagaagggacagcttaacagcaaaccgaacccttgcaaatcaaaaccttccagcacctttcttcaacctcactcaacttaaagcttcctttgctgttcaaggtctcaacacccttgatttagttacactctcaggtggtcatacgtttggaagagctcggtgcagtacattcataaaccgattatacaacttcagcaacactggaaaccctgatccaactctgaacacaacatacttagaagtattgcgtgcaagatgcccccagaatgcaactggggataacctcaccaatttggacctgagcacacctgatcaatttgacaacagatactactccaatcttctgcagctcaatggcttacttcagagtgaccaagaacttttctccactcctggtgctgataccattcccattgtcaatagcttcagcagtaaccagaatactttcttttccaactttagagtttcaatgataaaaatgggtaatattggagtgctgactggggatgaaggagaaattcgcttgcaatgtaattttgtgaatggagactcgtttggattagctagtgtggcgtccaaagatgctaaacaaaagcttgttgctcaatctaaataaaccaataattaatggggatgtgcatgctagctagcatgtaaaggcaaattaggttgtaaacctctttgctagctatattgaaataaaccaaaggagtagtgtgcatgtcaattcgattttgccatgtacctcttggaatattatgtaataattatttgaatctctttaaggtacttaattaatcatatagtccatatttgttggatggctagaaaacaaatgaaattttcttcacaacccgttcaattaagtagttaattaaattcagat

SEQ ID NO: 135714 - DNA, 318 bp, Glycine max
  Clone ID: PAT_MRT3847_93559C.1
ctcgagccgattcggcacgagagatcatacatagtagtgttggtgggttccacagatacctgggggtctcacagagatgcgccaacagaagcgatggcaagaattatgactgcttccaagggggtgcgcaggacatttgtgtatactattcaactccaaattgtgctgcagaactatgatcgctagcacgacaacccttttattggctctgtaaagttccctcacattccactccccaagatgaggatctgtatgcttgtagatcccaaacactttgaagaggccgatacgataggattggcctacatggctgtaccg

SEQ ID NO: 135715 - DNA, 573 bp, Glycine max
  Clone ID: PAT_MRT3847_9355C.1
atattattctcacgactagtgctatatctaaggcgatatcttccaagggcgaaacccacgcatgcgcttttctcttatcatggcttctcacaacatcaaaatccacgaccacttaagggtttcccctccctcagcaacagaaatatccctctctctcactttcttcgacctgttctggctcaggttccaccccgtggaacgcatcttcttctacaccctccctacaccccattcaaatccatccattttctattccaaacttgttccaaagctcaaaacatctctctctcgcactctccaacacttcccccctctcgccggcaacgtcgtttggcctgataacaccccaaaccccaccgtccaatacaccccaggggactccgtttcacttgtggttgctgaatccgaagctgatttcaaccacgtgttagataactcacctcacgaagcatcagagttacgttgtttagtaccccacttggattcatcggattctcatgcttctgttgtctcctttccaatcactctgatacctaacagaggctatagcataggaatcagcacccaccatgc

SEQ ID NO: 135716 - DNA, 1096 bp, Glycine max
  Clone ID: PAT_MRT3847_93560C.1
acgagaacagttccatctatggttcgaccccaccaaggacttccacacatactccgtccaatggaatcctgcaagcatcatgtatatattccatattcctataatatttctttcccaaaaataaccataactaatgagtttaatggcaaaatcctttttcaataaaaaaattttatattatcaactaatcataaattattaatattaataattattatgaaagtcaataaatttatcatatataataatttgttatgagataataatataaaattatttctcgtataagttatatactgacaatataatataattttacattaacatatataccgacaacaatttataattaaatgataatataagattattttatattttgaatgcattaccattttacttaatatatgtaccaatttattaacatctttagtcatgattaaccatttttcaatattgtcatttcatgtaaaagattctctgttgacgggaccccaataagggagttcaagaatttggagacaaaaggggttccattcccaaagagccaacccatgagaatatactctagtctttggaacgctgaggattgggccacaaggggtgggcttgtgaaaacggattggagcaaggccccattcacagcctcatacagaaacttcaattcccaaacttcttcctccactggccaatcactggacgccacggggcaggcaaagatccgttgggtgcaaaagaattacatgatttacaattattgcactgatatcagacgtttccctcaaggccttcctccagaatgctccattgcatgagaatatttaattcaatgttgcatatcattataaaatgatcctcatgaacgtgacacacatgtgttgcctattacgttaatttactttcttgtgtaaattaatgcaactaaaactgttattattgttggtttgtgctttgttgagcactactccattgtttgtggcgaaagataattatagcgtgcaaaattatattcatggcagtgtatatgtgctgaaattgtaaagtattttcattaataaaattgttggagttttattattcaaaaaaaaaaaaaaaa

SEQ ID NO: 135717 - DNA, 1192 bp, Glycine max
  Clone ID: PAT_MRT3847_93561C.1
atttataactatttccctctcttaacacaattaacaaagatatatcatatcatatcaactccaaatgatgaaaaatattgggttgtttcttcttgtggtggtggctacttttgtggtggcagccacagctggtagcttttaccaagactttgaaataacatggggtggtgagcgtgccaaaatctatgaaaatggaaatcttctcaccctctccctagacagagcctctggctctggctttcgttccaaaaaagaatacttgttcggaaaaattgacatgcagctcaagctcgtgcctggtaactctgctggaacagtcactgcctattatttatcttctctggggcctactcatgacgaaatagacttcgagtttttgggtaacttgagtggtgatccttatactctccacacgaacgtattcagccaagggaaagggaacagagaacaacagttccatctatggttcgaccccaccaaggacttccacacatactccgtccaatggaatcctgcaagcatcatattctctgtggatgggacaccaataagggagttcaagaatttggagacaaaaggggttcctttcccaaagaaccaacccatgagaatatactctagcctttggaacgctgaggattgggccacaaggggtgggcttgtgaaaacggattggagcaaggccccattcacagcctcatacagaaacttcaatgccctaacctcttcctccactggccaatcactggacgccacggggctggccaagatccattgggtgcaaaagaattacatgatttacaactattgcactgatattagacgtttcccacaaggcctccctccagaatgttccattgcttgagaatgttcattattcaattcaatgttgcatattattatatatataaaaaaaatggtccccatatacgtgacacgtgtatgcctattacgttgatttactttcttgtataaactaatgtaactaaaactatgattattgttggttggtttgtgctttaatttgttgagcactactccattgtttgtgatcacaaaagatgattatagcctgcaaaattatattcatgcccgtgtatatgtgctgaaattgtaaagtatcttcattaataaaattgttggagttaaaaagtttatggagtttcacaaaaaaaaaaaaaaaaaaaaaaaa

SEQ ID NO: 135718 - DNA, 837 bp, Glycine max
  unsure (1)..(837): unsure at all n locations
  Clone ID: PAT_MRT3847_93562C.1
gttattttttctggggcctactcatgacgaaatagactttgagtttttgggtaacttgagtggtgatccttatactctccacacgaacgtatttagtctagggaaagggaacagagaacaacagttccatctatggttcgaccccaccaaggacttccacacatactccgtccaatggaatcctgcaagcatcatgtacatattctatatatattcgtataatatttcattcccaaaattaaattaaccataactaatgagttttaataccctttacatgcacttttagtgtaaaatcttttatattatcaatgaattagaaattattgttataatttttaaaataattattgtaaaagttaatagaataatcatacatgatattttattattggatgacaatataaaactattttagacgatcacctaatcacatattatcacatgtatattacatttgttaacttttatataattgtcttaaaaatcatatcaagaataatttgaaattaaatgacattacaaaacaattttaaactgcattatcattaaattcaaaacatataccaattcattaacatctttattcacaattaatcatttttgaattgtaacagattctctgtggacgggacaccaataagggagttcaagaatttggagacaaaaggggttcctttcccaaagaaccaacccatgagaatatactctagcctttggaacgctgaggattgngccacaaggggtgggcttgtgaaaacggattggagcaaggccccattcacagcctcatacagaaacttcaatgccctaacctcttcctccactggccaatca

SEQ ID NO: 135719 - DNA, 1624 bp, Glycine max
  Clone ID: PAT_MRT3847_93563C.1
tacggctgcgagaagacgacagaaggggacttccaccacattcaaatccaaatggccctttacattacactaataattggcctcctagtaaacaccctagtactctataaatagcatttgcatgcaccttagtcttcaccaaaatactcctcttggcatcttgtgttgtgtccctcttttaagctatttccttctcttaacacaattggttgtgccaattgctcatagtcaccaaccaattaacacaggtatatatatcatcatatcatcaccaaatgaaaaatattggggtgttttttcttggggcggtggctacttttgcggcaggcagccacagctgctacgcgttttaccaagactttgaaataacgcgggggcgctgagcgcgccaacaatctatgagaatgcaaaccttctcacactctaccttgacagagcctctgactctggctttcgttccaaaaaagagtacttgatcagaaaaattgacatgcagctcaagcttgcgcctgaaaactctgctggaacagtaactgcctattatttatcttctctggggcctactcatgacgaaatagactttgagtttttgggtaacttgagtggtgatccttacactctccacacgaacgtattcagccaagggaaagggaacagagaacaacagttccatctatggttcgaccccaccaaggacttccacacatactccgtccaatggaatcctgcaagcatcatattctctgttgacgggaccccaataagggagttcaagaatttggagacaaaaggggttccattcccaaagagccaacccatgagaatatactctagtctttggaacgctgaggattgggccacaaggggtgggcttgtgaaaacggattggagcaaggccccattcacagcctcttacagaaacttcaattcccaaacctcttcctccactggccaatcactggacgccacggggcaggcaaagatccgttgggtgcaaaagaattacatgatttacaattattgcactgatatcagacgtttccctcaaggccttcctccagaatgctccattgcatgagaatatttaattcaatgttgcatatcattataaaatgatcctcatgaacgtgacacacatgtgttgcctattacgttaatttactttcttgtgtaaattaatgcaactaaaactgttattattgttggtttgtgctttgttgagcactactccattgtttgtggcgaaagataattatagcgtgcaaaattatattcatggcagtgtatatgtgctgaaattgtaaagtattttcattaataaaattgttggagttttattaaaaaaaaaaaaaaaaaaaaaaactcgagatagtgtagaaaggctgacgaagttttgtgccatttgttttatcatatggaatggatattaacatctggctttcatttctaccaaatgtttcgagggaaaccggtcttggttgagttgtgttgaagttgcgctatgcaatctttctgaaaccaaggttcagatttattgaattcaaatcaataacgtaggttcattgaagccaaaagaatatgattattgaactataatataataaaacatgtaagtttgataaaa

SEQ ID NO: 135720 - DNA, 1179 bp, Glycine max
  Clone ID: PAT_MRT3847_93564C.1
ggctcgagccacattcaaatccaaatggccctttacattacactaataattggcctcctagtaaacaccctagtactctataaatagcatttgcatgcaccttagtcttcaccaaaatactcctcttggcatcttgtgttgtgtccctcttttaagctatttccttctcttaacacaattggttgtgccaattgccatagtcaccaaccaattaacaaaggtatatatatcatcatatcatcaccaaatgaaaaatattgggttgttttttcttgtggtggtggctacttttgtggtggcagccacagctggtagcttttaccaagactttgaaataacgtggggtggtgagcgtgccaaaatctatgagaatggaaaccttctcacactctcccttgacagagcctctggctctggctttcgttccaaaaaagagtacttgttcggaaaaattgacatgcagctcaagcttgtgcctggtaactctgctggaacagtaactgcctattatttatcttctctggggcctactcatgacgaaatagactttgagtttttgggtaacttgagtggtgatccttacactctccacacgaacgtattcagccaagggaaagggaacagagaacaacagttccattcccaaagagccaacccatgagaatatactctagtctttggaacgctgaggattgggccacaaggggtgggcttgtgaaaacggattggagcaaggccccattcacagcctcttacagaaacttcaattcccaaacctcttcctccactggccaatcactggacgccacggggcaggcaaagatccgttgggtgcaaaagaattacatgatttacaattattgcactgatatcagacgtttccctcaaggccttcctccagaatgctccattgcatgagaatatttaattcaatgttgcatatcattataaaatgatcctcatgaacgtgacacacatgtgttgcctattacgttaatttactttcttgtgtaaattaatgcaactaaaactgttattattgttggtttgtgctttgttgagcactactccattgtttgtggcgaaagataattatagcgtgcaaaattatattcatggcagtgtatatgtgctgaaattgtaaagtattttcattaataaaattgttggagttttatt

SEQ ID NO: 135721 - DNA, 907 bp, Glycine max
  Clone ID: PAT_MRT3847_93565C.1
gctccgtggtcacttatcaccaagaaacgatttgcatgcacataaagtcaaaggaaaacaaaattgattctcaagttaggtatttttatctctattaatggttgcaggtttttggagccactgacaacaggaaactatccccaaagcatgcgttccttagttggtaaacgattaccaaagttctctaaacaacaaaccaagtcaatactcggttcatttgattttattggattaaactactacacctctaactatgctatccatgaaccccaactaaggaatgctaaacccaattacctcaccgattttcaagcgaaactcacgactcaacgcaatggaattcccataggttcaaatgcagcatcaagttggttatatgtttatcctaaaggaattcaagaattattgctctacgtcaagaaaaagtataacaatcctttgatttacatcaccgaaaatggaattgacgagttcaatgatccaacgttatcaattgaggaagtccttatagatacatatagaattgactattattatcgtcatcttttttatcttaaatctgcaatcaaggatggtgcaaatgtaaaaggatattttgtctggtcgttgttggacaattttgaatgggctaatggttatacagtacgctttggaatgaactttgtggactacaaaaatggcttaaagagataccagaaactatcagcaaaatggttcaagaattttctcaagaaatattagaatttaggtaacttatgattccatgaataatgtaatggaatgtatttgccatgtttaactttaaataactggaccattttgaaaaaaaagtcatgtttcttttgttgtgttttttgggcccaaaaaaaaaaaaaaaaaaaaaaaaaaaaaaaaaaaaaagaaaacc

SEQ ID NO: 135722 - DNA, 875 bp, Glycine max
  Clone ID: PAT_MRT3847_93566C.1
gcagttcagcgcaatggaatttccataggttccaaaagaggcaccaagttgggtatatgtttatcctaaagggattcaagaattattgctttacgtcaagaaaaagtataaccatcctttgatttacatccccgaaaatggaattgacgagttcaatgatccaacgttatcaattgaggaagtccttatagatacatatagaattgactattattatcgtcatcttttttatcttaaatccgcaatcaagtaagtgaattatttttttatatgttttcaaacttttttttaatcctaattaattaatactataattttgttgactttacaagggatggtgcaaatgtaaaaggatattttgtctggtcgttgttggacaattttgaatgggctaatggttatacagtacgctttggaatgaactttgtggactacaaaaatggcttaaagagataccagaaactatcagcaaaatggttcaagaattttctcaagaaatattagaatttaggtaacttatgattccatgaataatgtaatggaatgtatttgccatgtttaactttaaataactggaccattttgaaaaaaaagtcatgtttcttttgttgtgttttctggaccatcttgaatgagggtatatttatttgttaaaaatattaattaattttttaataaaataaaattatattaacattataatataatgatttttattattttatatgtcaaaattttatcttattaaattttgttgctgttttaggtgtagggtgcctctttttcttaaatgtactcctaaattttactatttcttcttttattttctctatcttattttacttatttttataagttttaacctttattatatt

SEQ ID NO: 135723 - DNA, 322 bp, Glycine max
  Clone ID: PAT_MRT3847_93567C.1
ttttccgtttttgttagctgcgacatgactggagtacaatgaaatcgcaatgggataagaaatcaggaaagatggttagcgaagctgagatcaggcaggcacaaaggggagaaagcccagcatccggcctagccaaatggaacatgaaacccaacaaaccgggttgaacaaagcacctattctgactactacttcagaatcaccaacagttgaccacatgaccagagtttaaagagaaatttcagcgcatgtgagacaagtttatgaccaagactagaaatattgtacctaaactaagagaatcttaaaaagaattcaaaca

SEQ ID NO: 135724 - DNA, 226 bp, Glycine max
  Clone ID: PAT_MRT3847_93568C.1
ggcaaaacggcaattatattatttaaaaataaaaggctttaattttacatctacatactcaaagtaaataaaaaggtgtaagaaaccccgaagttaaatcgggctaacagagaaccctgatataaactcacggaaccaatcaatatctggtgaatttggtgacggccttttgtgccgtcagaaacggcatgcttgggcaactccccagtgaggatgtaaacgcacc

SEQ ID NO: 135725 - DNA, 219 bp, Glycine max
  Clone ID: PAT_MRT3847_93569C.1
cagaggttgagtggacctgtctcaactaccttttaccttgggtattcactactcatggccagttcaattataatttcaaccggcaccattgacttccttatgtcattctactttttgcactacttgttctcatcaataaaaaatgatttaagttcttgttgtcatttcctattaactattaaaaaagtttatttatataacttgatcacatttcatatt

SEQ ID NO: 135726 - DNA, 483 bp, Glycine max
  Clone ID: PAT_MRT3847_9356C.1
cctctcttttacggtcttacgttgctcataacgttaatcagccccaagagaaagatttgttggagggaaatttttcctttgatattaaatctcgctctagattggaaaaagtttcctctactaaagcacaatttgttagtggaaaaaccttcaaatatgatataattggtgctggctcacattctccagaagattctcctgaaaaagaagatcaagaaaaacccaaaaagattgatgccagattgagacaaagaatatatcctcaattcaccgcggttcaagctcatatggaaacaaattctgataaattgcctcttgatgatgtcgaaactacctaaggtttcatgttggatcttaaaatctctcaatctaaaattgcacttccccaaaacacagctggtggaaccaatctgcgtagtgatctattggcaatcctctgacagacggcaatcttagagcaatgtgtgatttgcagcgcactca

SEQ ID NO: 135727 - DNA, 730 bp, Glycine max
  unsure (1)..(730): unsure at all n locations
  Clone ID: PAT_MRT3847_93570C.1
ctttcaattgcttaccagaacaagcatggaagctacgggggaaaaagcatggcattctctgcatgtggttcggaatatggaagcaaattctatgctatttatggcataacaaccaccttgggtcttcattaatccctatgcaaatccaatctagaagattaaccatgtccctatgtaagtaccctgaggctgaaacagtacccctttatatacccttcaaatctattgacatgttcacccttggaggaaagcatttttgttcttattttgctccatctctgtatatcatcacaacttccaaaggcttacttactctaatatatctctgattcaagtggttctgtgagttttcttgttttagtctgaggctttgagttttgtttaatagatatgccaagggcaaattgcagtttctgatttgttgaaactgcaaagattgaatttagaactgatagaagagttaccatgtgtatcaaactagcattagaattggtcatgggtgtttgtttttcaagttcttatacactactagaaactagaaagaagtgattggaatttcaactaccattgttggtttagagggcagaggctccattgagttaaaagtaagaaagcaattaaaggcctttgaagtgaattcggataaatgggttcttctgtatataccctntatgngtgttcttcattccacaatagctcttacttgtggagctttgatgatattctactc

SEQ ID NO: 135728 - DNA, 391 bp, Glycine max
  Clone ID: PAT_MRT3847_93571C.1
caataataaattaaataacacctacaccaacagtcttaccaccttccctaatagcaaacctcattccctattcacaaaccacagacacaataagctccaccaccatcttcacacgatcaccgagcatcaccatctacgactcttcatccctatcagttataatagccataaccttcccagtcacatcgataatcctcatataaaactagaacctatgccctacaaagagaaatgaatatctgccaccttcttccttcttcagaacatacacaatcgctgagaacttagtatacgagttgatcgtgccaagcttcagcaacaccatccctctgtagatatgcgtctgttgaaccgctctcagcaacagccccacgttgtccccgacgagact

SEQ ID NO: 135729 - DNA, 730 bp, Glycine max
  Clone ID: PAT_MRT3847_93572C.1
tgatcactatatacacactactcttcagccttttcatatttcataacacccctttgctaccaaaccaattcagtctctttgctttgctctttcctgagtttgaaaaccttagaaccatttcagtacacaacactttctgttccttaatggcatccagttcaatctcagcctctggctcatggagtgttaaggacaacaaggcctttgaaaaggctttagctgtttatgacaaggacactcctgaccgttggtacaatgttgctcatgctgttggtggcaaaactccagaggaagtgaaaaggcactacgaactccttgttcaggatgttaagcatattgagtctggacgtgtgccattcccaaattacaagaaaactacttcagggtcaactgatcaggaggaaaaaaggctgaggaatttgaatttgaacctccagtgacccccctcaagaacaacaaattgattttctaattttcatatcaaccaacatcattaatttccagcatccctggtagtactacgtggtgttatgtcacacataattgctagtgcaatagcatcttaggctatattagtcatcataagaatcatatgtcccgtgattccatctggtactttcttgtcgttgaagcttcctcttgaaagggtcaacgaccgtttcagttcctcatcgtcctaaataaatttataattttataataaaaataattaataaaaaaaagaatatag

SEQ ID NO: 135730 - DNA, 503 bp, Glycine max
  Clone ID: PAT_MRT3847_93573C.1
ggctcgagattgattttgggttgtctgactatgtaaagccagatgagaggttgaatgatattgtgggaagtgcttattatgtagctccagaagttttgcatagatcttatgggacagaggcagatatgtggagcattggtgtaattgcttatattcttttatgcggaagccgtcccttttgggcccggacagaatctggtatatttcgggctgtactgaaggcagatccaagttttgatgaggctccttggccttctttatcggttgatgccaaagattttgtaaagaggttgttgaataaggattatcgtaaaagattgactgcggctcaggcactaagtcatccatggctggtgaatcatcatgatgatatgaggatacctttggatatgataatccacaagcttggtaaagcttacatttgctcgtcttcgttgcgcaaatctgctttacgggctcttgcaaagacattaacagtagctcagctagcttatctcagagat

SEQ ID NO: 135731 - DNA, 423 bp, Glycine max
  Clone ID: PAT_MRT3847_93574C.1
ccttcctcttcctctttttttatttctcacataactcctcttttcctcacctcaatctcactttttttttgtggttttctcttttgggtcttcagcttttcaagtgaagtcccaaagatcaaaatttcagctgaaagtctgaaaatttttcaacaaaaaaaggaacttgaatgagaatacataagcacttgggggttcgtgattcagtgatcactggattttgtttttaatatttaagattttcattttcttcagagtatctgaagatcacacgatcttatgtactgtggtacaaggaatccatgtccttttcccctgttctatgaatctatgatgttgtattatattcttttgcaatcttggaaatactttttttaatacgtagtagaataaaaagtatttaaggcttgttttcattaaaaa

SEQ ID NO: 135732 - DNA, 590 bp, Glycine max
  Clone ID: PAT_MRT3847_93575C.1
cccacgcgtccgacggctgcgagaagacgacagaagggggagaagaaaaatgggaggaagaatgcacacgaaatcagactcggaggttacgagcaacagcatggagcagtcgtcaccgtcgcgttcccctccgcggcggccactctactacgtgcagagcccttcgaaccacgacgtggagaaaatgtcgtacggttcaagccccatgggttccccacaccaccatttccactactacctctcttcccccatccaccactcccgcgaatcctccacctctcgcttctccgcttccctcaaaaaccctcgcagcaacttctcctcctcctcctcctggaagaagctccacccacaccccaaccccgacgccggcctcgacgacgacgacgacgacgacgacggcgacgacgacctcaaccacttcccccgcaacctccgcctctacttctgcttcttcctcctctttcttctctttttcaccctcttctctttgatcctatggggcaccagcaagagctacaagcctcgaatcattggcaagagtttagtgttcgagaacttgaatgttcagtcaggaaacgatggaactg

SEQ ID NO: 135733 - DNA, 218 bp, Glycine max
  Clone ID: PAT_MRT3847_93576C.1
cttcctacaaacattctaattatccgacaaacccatccacttatttgccaccatttcagcatactaacacatttccacctaaaaaccattctaatattcctatatgcgaaattttttcttccttcctattctccccctatttttactttacctaccatttttttttctctctcactcaccatatatggtctttttcacatcttctttacttgtccaat

SEQ ID NO: 135734 - DNA, 259 bp, Glycine max
  Clone ID: PAT_MRT3847_93577C.1
gtaattatcttcctttttttacacctaaacatgtttttttctgttttggcaaacccctaaatttacagtaaactccccatttaagggataacgggttattataaatccccttaaaagaaacaaaaattggaacaatcctatgttttccaaaacagaaaatttctctatggggaaagatccatttccaagctaaattcccccgccactttggctaaccgagaatctttttccactggaaaacgatgatctcttcattgaa

SEQ ID NO: 135735 - DNA, 154 bp, Glycine max
  Clone ID: PAT_MRT3847_93578C.1
caataggagacaggagaagagagttgatgttggtaggaaagaggagaggagagtggtggatcataggaaggtttcctggcttacaagtcacattcgtgttagggtgataacccgggattgaaaggggggccggtgtaattggaaaaaggggaag

SEQ ID NO: 135736 - DNA, 363 bp, Glycine max
  Clone ID: PAT_MRT3847_93579C.1
ggaaggaaaaatgggaattaaataaacctgggaaaaagggctaacaaaaggggtcctaaaccatatatatatataaaaaaaaccattaccagaaaaaccctcatgaaccaagcaagggcaaaaagaaaagggaaaaccccccccataaaaacccaacccccggaggaaggaaaagggccgtttaaggccccttggacccaaaaaaccccaatcggttcccaagcaactaaaaaaaaaaattgggggggggaacaaacaaagagccccccggacagcccccccaaaaaaaaagcagccaagggtggacaatggggggggggttccaaaagggaggcaaaggggctaaaaaaaggccaggggttt

SEQ ID NO: 135737 - DNA, 120 bp, Glycine max
  Clone ID: PAT_MRT3847_9357C.1
gggtattgtagagtggagatttttctaaacctcaacagtatgacccaaccacgtgcgggtgcacacttgctgacctagggtggcccccgtgggactccccatggccaaacccgtgaatca

SEQ ID NO: 135738 - DNA, 338 bp, Glycine max
  Clone ID: PAT_MRT3847_93580C.1
aataataaaatctaagtttttttatttatttttttttttttaacatttttccgggccgcgggggaccacccggaaaatccgggcggggaccaccgggggacccaactttcccaagggggggggaaaaaaaaaccgggccaaatcagggacaaacgggttcccgggaagaaaggggtaaccgttcccttaccccaaaaaaaaaaaggcgggcaataaaaagggaaaagccccgggccccaaagaagggaccccccccacacaaatttggggggcccaaccggggggttccaaagagggaaacccgcggccgcatccagaaaaaaaaaccaggccccccc

SEQ ID NO: 135739 - DNA, 697 bp, Glycine max
  Clone ID: PAT_MRT3847_93581C.1
ttggggttcaagcagcaagcaatggagggaagagagagaaaatcttctctcacttcacaaacggaacctctcgactaccctcattcccgtttcttcactccaatgcaacaacaacattctcatgaaatggtggctttgaagaaggcatatgcggatgtgattctgaatactgtgaaggaggctgcaggtagggtaatggtggcggaaaggagagctcttatgttccagcaggagcttgcttcatccaaagaagaggctcttcatatgttaatgcgtttgaagcagatgatggatgctaagacagctgaagcagaaaaggcatcattggagcagcaaagaaaaattgatgagcttgaagctcaattgaatgaagctgaggatatcgtaacagatctaagggcagagttgaagcttgtatatctggagttagagacggcaaggaataaccaggtccagcctttgaatggacagaatgaaaagcaagttgtaacttttcaggagagtgcagaacctgagatttcaatatcctctcctcataaagaactagaatgtgtaacgagctgagatgtggcaaacaaatcactgactatgaacgttttagataataggtgctgtaattcaacacaacaaactgagcaattgtgcatctataattagcaggattcttgtggtcataactctgactctgctttcatca

SEQ ID NO: 135740 - DNA, 141 bp, Glycine max
  unsure (1)..(141): unsure at all n locations
  Clone ID: PAT_MRT3847_93582C.1
ttcggctcgagcggctcgaggtgtgtccctcggcctcgccacggtccccgcaagcagcatcactatggtancattcctaatccctgacaccccaagtagcctaggggagctgaaccaaataccccaagcgagagacgctct

SEQ ID NO: 135741 - DNA, 338 bp, Glycine max
  unsure (1)..(338): unsure at all n locations
  Clone ID: PAT_MRT3847_93583C.1
ttgangtaggngtacgtaagctaggaattcngnncgagaannaacgtngagnaattntnnaggntnannaaactagcatctngtttngagagcngctatggnancagtcatcctagcctgcgaaaacnaaacnancgtagangtgtagactaggnnntcnggancgtagatgcgcnagtcaaagtggcganaangnctgtatnantangtagtnaggtcaggagcnggtgatgaatcctnngctagtnttgtanctggacgaangntatngngcaaggnagagatnngtagtntacagnttacgantgngaacgnntacnatgnantgngtcgttanc

SEQ ID NO: 135742 - DNA, 430 bp, Glycine max
  Clone ID: PAT_MRT3847_93584C.1
ttttctgctgtcgcccttttcttttctgtcataaaggttcctctactagggcttgcagttccccttgtgagagaagcaccaaagagccaatatctgaattacaagaatgaacatccgtctttatgacagcaggggttacctcaagatgaccttatccccagaaaatccattgtcctcacctaaacgccaggaattctcttcacgaagctattaatactatatgcctcggaatctggctgatattacaacacccttcttgaacggaaacgaaagcaacctgcccatctgtttataccagccacgctctgttaaagagaggggaagggttggacctgcacccactttggaatgggcgatcgacttattatgcttgagaaagccaggcttaccagctcactagtggtcattagctgggagcttgatctcccca

SEQ ID NO: 135743 - DNA, 499 bp, Glycine max
  unsure (1)..(499): unsure at all n locations
  Clone ID: PAT_MRT3847_93585C.1
gacccacgcgnccgcggcgtcgggggannnnnggaccccaaacgcagcggagaaaccaanngcgcgagaaaaccagagaagaaagaaggaaaacagagagggcgcgannccgcaccaacaacggaggagcnanncgnggcagnncaaacgaagccccccgcagcagcgnngagcccacccaacccanggaaacgccgccaggaggcgaaacctccccctcctaccgcgacgaagcnccncaggcnccgcggagagaaacggnggcccgcgccacgccgacgcgncgcangcgncnccgaccaaccgcgncnggagcnagnaccncggcagaaacaccagcgacgcaagaagaanccgcnggngagagngacgacgaagcngccggnggagggnanaaagaggcnaaagcaccaaagaaaaaggaaacnaaaaagcaagagagggaagcacggcgncaggccgaggaagccgcacgagagncaaggcaggcaaaacaaga

SEQ ID NO: 135744 - DNA, 480 bp, Glycine max
  unsure (1)..(480): unsure at all n locations
  Clone ID: PAT_MRT3847_93586C.1
aacccatcatcccttgagacnncnnnnntnnntncannnacnncntatnnnnntntanntctnggnntcnnnnncnncaannncttttttttttttcnncnccncaccaccatattaggttggacttatcttattaaacataccctcaatcatcccaatctctttccttccattcacataacccttaacatcttaaaacactttccatctcaacaaaaaatgctaacaaccaccttaactaaaccccccgaaaacacataaataagatacattacaaaaaaaatacactaaccacccaaacctaatattaatttaaaatctgacactaattcaataaccaccccttccgtacacaattgcacatataatcactacgcaaacctaatcattaagcaaactattacataaaacatttgaagttacctttcttgattgacaacactcgtgttctctagctttaagataaactacttaccaaca

SEQ ID NO: 135745 - DNA, 277 bp, Glycine max
  Clone ID: PAT_MRT3847_93587C.1
cttctttgaaacaaaagtatttcagagtcagcatgggggctcaaaccatttaagggagaaagataatgttaatgctacatttaaagacagaactgcaatacttagaaaaatactttgcgagtaactaactttctaaatgcacggcatgaggcacgcaacatcaacttgactaccctatttcccattatatgtccattaaaatacattgttcaaggactcttcttggaccatcaaggatcaccatgaaatttaacatttttcaaagaaatgaaaggcc

SEQ ID NO: 135746 - DNA, 351 bp, Glycine max
  Clone ID: PAT_MRT3847_93588C.1
agggaccgtttatttcatgaggtagagaatcttgctgctaattcaaatggactagcacacaaaactcaagatgttcgtggccaaaaattgaaagcattggaagcacagattttagacctcaagaagaaacaagaaagccatgtgcaactattaaagcaaaaggagaagagtgaagaagctgcaaaaagactgcagactgagatacaatatatcaagtctcagaaggttcagttgcagcataaaatgaagcaagaagcagaacaatttcgacaatgggaggcttctcgtgagaaagagctactccagttgaaaaaggagggaagaaaaaatgagtatgaaaggcataatctt

SEQ ID NO: 135747 - DNA, 398 bp, Glycine max
  Clone ID: PAT_MRT3847_93589C.1
ggctcgaggcacaacaagaggaggaccactctatatcagacgactgataagggaacacacgggactatgatgaggtgctaactgggtttcaggtgtcccatactctggcactggttactacactccggagagcatgaaagacattgatgttgctgagctgagagccacgggaacgggcaaataatccaaccactaagctctactgaattgaatacctacctttttggcctcacgagaatatgttataggatgtacaacattcacagaaccctcgaggattattcaccatggagttgccttattcgttgattgttttgaaacatgggactcacatatgaccaaattcatggtgactagtgtgaccggagctgccgttaaagactcagacctatactttt

SEQ ID NO: 135748 - DNA, 469 bp, Glycine max
  Clone ID: PAT_MRT3847_9358C.1
ggaatatctgaagcgtaccggatttcattgtgatatcatttgtgtcactggatggactgccaccccaatgcaggatgtacaggtaacaattgatcggattatttcctctcaagaatgtgtacccaggacctattgtgttttaaatccacaaaatccttttgtgttaaataggtggatgggaaaactgactttgccccagggtactttccgaactgttaagataatgccattttctatagggggaggaacagatgcaatgaatgctatttacatgaatatgccaaatgctgttctttcaatgtggagatattttgttggagatctcctcgttcaagatactacgatgactcctacctacatgaaatgaacattcgcattctacctagcagaaggatggatggctgacgacaccatcaatcctgacgctctgacccgaaagctattgcatgttgtagagattacgaatcga

SEQ ID NO: 135749 - DNA, 807 bp, Glycine max
  Clone ID: PAT_MRT3847_93590C.1
gatccaaacacagtataaacggccgctcgacgtcggcgggccgggaggcaaacgcaacatccgaacgaaacaatcatggcagcgaacccacccgcgccttcagaatccgacccgaaccaaaacccgggttcggagtcctttccgtacttcgaagacatgaacgaactcgagacagtcttcaaccgcttcgacgccaacggcgacggcaagatctccgccgacgaactcgacagcgtgctccggtcgctcggatccggcgtctctcccgaggacctccgccgcttcatggaagacctcgacaccgaccgtgacggcttcatcagcctcacagagttcgccgccttctgccgctccgacgcctccgccgacggcggatccggcgagttccgcgacgccttcgatctctacgaccgcgacaaaaacggcctcatctccgccgcggagctccacctcgcgctcaaccgcctcggcctcaagtgctccgtcgacgaatgccgcgacatgatcaagtccgtcgacgccgacggcgatggctgcgtcaacttcgaggagttcaagacgatgatgacgacctccaagaatcgtggcggcgccaccaatggctccgtccattagcttcgccgccgatcgaatttctgacgcgtctccggtgactgcttccgtcgtagtacgatctctctcttgcttcttcttcttctctttgtatgattattaatcgttttggtgaatcgctccgctgaaacattttagacattagatcgaattccgaattaagatgatggaaatgaaagttttcttatgcttcgt

SEQ ID NO: 135750 - DNA, 136 bp, Glycine max
  Clone ID: PAT_MRT3847_93591C.1
aacccttcccgatccttaatgtgagtgaataatccatggtttacaatggtggagaaagccaaaggtaggaaagaagaattttttacccatacctacaccattaaccttcacaagcgccttcatggctgcacattta

SEQ ID NO: 135751 - DNA, 443 bp, Glycine max
  Clone ID: PAT_MRT3847_93592C.1
ttccaggaaggtttcccgtcatcactgtatgacgtcctccttctttgggggggggggtgggggaccagtgtaaaccaaactcgcgggaggtacgatgaaatacacggtaaaataggccttataaactatacagttaaaatgtaaaaatactaagggttcaagtactggcaaacctactaggagagtacggttgaatgatcaagggtaaggtggtggatacgcctactagggagcacggttatcaatgttcctggtaccacctattattaattaaaaagttagtaatagtccctggctccttaaggtgggctacgggttgttagggatacaattgttagacagaaggtggatacacttagtaatggccgtatgtataggcgtagcaaatttagggttgtaaagtactagccattgtggcacttgcactaccacgactaattggg

SEQ ID NO: 135752 - DNA, 319 bp, Glycine max
  Clone ID: PAT_MRT3847_93593C.1
attgaatgaaccggggtgttgtaagacagagaaggtgcatggaaacacattcaagcaggagctaataaggtgctgatcactgctcctggtaaaggagatatccccacctacgtggcaggtgttaatgagtctgactacagacctgatgagctcatcatcggctaatgcctcttgcaccactaactgacacgcacgctgtgacaaggtccttgatcagaaattcggagtcattaggggtacacatgaccaccacttactcctacaccggagaccaatggcttcatgatgcgagccagcgtgacctgacgagagcaagggc

SEQ ID NO: 135753 - DNA, 1402 bp, Glycine max
  Clone ID: PAT_MRT3847_93594C.1
gttcattgagaatttgagttaattgataaattcgtagatataattcttcaaatatattagcggtgtggtgtgaccaatatgctattattagttttatagcatcaatgcaaaatgtgagggccatcaaggcgatgctgaggagtttggagatggtttcaggttgaaaaataaattttgcaaaaagtcaatactgcctcataccttaactgctgtttgttgacctacttgggtatccccattgaggcaaacccaaaaagtagtgtgccttgggatcttattgttaaaaaatgtgagcatagattggcaaagtggaaacaaaagcaactatcctttgtggaaagggtgactttgataaagtcagtcctgaacacaattcctatctattttctttcatttttcaagatcctaaaaaaggtggtacacaagcttgtgaaactacaacgatggttcttgtggggagtagatacagaacacaagaagatcgcttgggtaagcaatggatcagcatgtctgtcgaaagaaaaaggtggtctgggaattttagagatttgaccaagtttaatcaggctcttcttggaaaatggaagtggaatttgttttattatcaaggagaattatgggctagagtgctggattcaaaatatggagggtaaaggaacttggatgagaatagaagggtcttagcagcatttgcatggtggtctgatctcaattatatctgccacaactccggggaggaaagctggttcaaatctagaataaaatggagtgtgggctctggctccaaggctaggtttttaggaagatgggtggatggatgatgggatccccctaatggtaaaatatcctagaccttacctgatctcaaaccaaaaaaaccagcacattcagcagatggtatgtagttcagctgcaacctgagagtggtgcttgcaatggaggaggttacttttttgaggttgagatacctatgggggactgctttttggaggaaatttaacatctcaacccaaatgagcagcaacaagataggtgggtgtggctaagcgactcaactggggtatatactataagcagtgcatatcaactgcttgacagggaatcaagagatgagaatatagatgaggtatttcaagacgtatggaaactaaaaataccaagtaaagctgcgttttttgcttggagattaatctatgatagactgtcccctaaatctaatttgtctagaaggaatgtgggcgtccctgacaaaaaaagtccattcttctctcaagtttaggattaatggtgtgattggacccacaaaatttttgccatataagacagacatgagcatatatatatatatatatatatatatatatatatatatcaatcgacaataaaaccacattttagcttc

SEQ ID NO: 135754 - DNA, 452 bp, Glycine max
  unsure (1)..(452): unsure at all n locations
  Clone ID: PAT_MRT3847_93595C.1
caaaaatagtctaattaacgagggaagttattgggtggaaaaggcgtgaaaaaaaggacaaaagattttatttcaaacatgccttgctttctataagaagataaaatggaccatttcatgttagttgtaaaacacaacaccatatactagttatgttaatcaaacaagttgtccacaggggattaagaaataaatatatggacaaacagattaaggtacgataatcatttttcaattttcacttgcttaactctactaatttgtttacatgacccttgacaggtacgtgtatatacaccaaagagggtgtttcaagagctagaagttgcaaaggacgaatacattcgagctaacttaagcgtacgcaaggaccaaaaaatactcttaccaaagcttngtgagtcattcaacaaggactcaagtttgtgccccattggtgtcaatgatatgat

SEQ ID NO: 135755 - DNA, 129 bp, Glycine max
  Clone ID: PAT_MRT3847_93596C.1
ggcattatatttgagttcaaacaagtcaaagccatggtcacctccaacttctcgattgttctgaccgtctccctagccttctttttggtgcgacttaccaggggagactccaccgataccgtctctttc

SEQ ID NO: 135756 - DNA, 217 bp, Glycine max
  Clone ID: PAT_MRT3847_93597C.1
tgaatatgtctccttgtattacccaacaaatgcgtgcttccaacaggatactgaactacaagcatggtggaaggaagctgtggagaagggtcatggtgacttaaaagaaaagccttggaggggttagtgccgacacgtcacacagctcactcaacgatgcgactataccgctaagacagtctacgctttccatgctgctatcaattttggacaattt

SEQ ID NO: 135757 - DNA, 720 bp, Glycine max
  Clone ID: PAT_MRT3847_93598C.1
atgtggcattttaggggacaaggctggagcgacatacctgaagttggcaagttgtcatttgaagagtctgtatcttgcttagaccgagctgtaaatcttttctgtgacattggaagactctctatggctgctagatatttaaaggaaattgctgaattgtacgagggtgaacagaatattgagcaggctcttgtttactatgaaaaatcagctgatttttttcaaaatgaagaagtgacaacttctgcgaaccaatgcaaacaaaaagttgcccagtttgctgctcagctagaacaatatcagaagtcgattgacatttatgaagagatagctcgccaatccctcaacaataatttgctgaagtatggagttaaaggacaccttcttaatgctggcatctgccaactctgtaaagaggaggttgttgctataaccaatgcattagaacgatatcaggaactggatccaacattttcaggaacacgtgaatatagattgttggcggacattgctgctgcaattgatgaagaagatgttgcaaagtttactgatgttgtcaaggaatttgatagtatgacccctctggattcttggaagaccacacttctcttaagggtgaaggaaaagctgaaagccaaagaacttgaggagtatgagttgttcgtcttacacatccacttacagagtgtacctgctttggttttaattgaattggtctga

SEQ ID NO: 135758 - DNA, 1365 bp, Glycine max
  Clone ID: PAT_MRT3847_93599C.1
cgcataaaccaggtgtaaaacaagtatagatagtaattcaattcataataatgtagataagatcagactccagcaaattcattaaaaactcattttttgaattcagtcagaccaattcaattaaaaccaaagcaggtacactctgtaagtggatgtgtaagacgaacaactggacagacacacatagtagtacaatgtaaatcatcaaacaataggtccaaccaccaggaatattaaaggtacaattcaagtaatagcctcatgctgctcaagttctttggctttcagcttttccttcacccttaagagaagtgtggtcttccaagaatccagaggggtcatactatcaaattccttgacaacatcagtaaactttgcaacatcttcttcatcaattgcagcagcaatgtccgccaacaatctatattcacgtgttcctgaaaatgttggatccagttcctgatatcgttctaatgcattggttatagcaacaacctaccctttacagagttggcagatgccatgccagcattaagcaggtgtaatttaactccatacttcagcatatttttgtgaagggatagccgagctatctcaaagtaaatctcaatcgacttctgatattgttctagctgagcagcaaactgggcaactttttgtttgcattggtttgcagaagttgtcacttcttcattttgaaaaaaatcagctgatttttcatagtaaacaagagcctgctcaatattctgttcaccctcatacaattcagcaatttcctttaaatatctagcagccatagatagtcttccaatgtcacagaaaagatttacggcttggtctaagcaagatacagactcgtttatattagtttttttatagctatgtgcagcatcaacatgggcctgtgcagcttcatgcttgctttccaacttcaaatgacaacttgccaacttcaggtatgtcgctccagctttgtcccatgatttggcgagcttgaagcaattggcggctttatcaaagagatcggcggcatcttcgtacttggagccaaacaagccccaaccgctgagcttcttctcagctttcttctcgaattcctctcctttggataactgatcggccatttccctccgatcgaaaccaagcaagtgaagatggatggattgatcgaatgcagtgcgttgcaggaacaacaagaagaggattcgtaaacgaagcgaaggaccaaaagctgtgttgacgaccaaagtccaaatccaaatccaaatccaaatcaaaaccgcaaatgaagaaaaaagaaagcagcgtaagccgtaaggggttttcagaaatgcgcggacgcgtgggtcgaggcgtttattccgg

SEQ ID NO: 135759 - DNA, 835 bp, Glycine max
  Clone ID: PAT_MRT3847_9359C.1
tacggctgcgagaagacgacagaaggggctcatcgagtctcatatttttcatacaacacattctttctagacacgcaacacctagaagatttccttattctttttggtgctaaaccgttgggatatagcaacaacatgttaggaatgaagagacatagagataatgaagggtcagagagcttagatttggcaaaatgtcttgtgctgttctcttgtccaatagaaagcaacaaggcacaacagaaaggttttggggctgtggaatttgagtgcaagacgtgcagccgcaagttctcttcttttcaagcactgggagggcacagggcaagccacaagaggcagaagctagagggggaagaactcaaagaacaagccaaaactcttagcttgtggaacaaaccaaaaatgcacgagtgctccatttgtggacttgaattctctctgggccaggctctgggtggccacatgagaaaacacagagctgctctcaacgaagggtttcctataattccttctatcgaccaagttattgcgaaaatcccggttctgaaaaggtcgaatagcaccagagttatgtgcttggacttggagttacacctgtagagaatgaatgactgaactaccaagtcacccaagctcctttttctttgttcttattaacttttctacattttttacctgtttctggacacatgtattctttcattttttgtgtgaaaattttattgacttttcccttatagatgattgattctttattctggacacatgtattattttgttaatacgattatcaaaagttcttagtgttttaataaaaaaaaattttcaccca

SEQ ID NO: 135760 - DNA, 250 bp, Glycine max
  Clone ID: PAT_MRT3847_935C.1
cgtggagatacagatgtgctagtgaggttgacgctggctcagttacagcagcagcaacaacaacagtcaagtaccaatgcacagcagcagcaggttcaacagcagagcctttcaaaccagcaatctcagacttctgatcatagcatgcgccagcaagataaagtaggtggaggtggtggtggcagtgtcactgtggatggtagcatgtcagactcgattagaggcaatgaccaggtttcaaagaaccaga

SEQ ID NO: 135761 - DNA, 461 bp, Glycine max
  Clone ID: PAT_MRT3847_93600C.1
aaagggccaggggaaaaaaagggaaaagggcctttttttttaaaaaaaatattctttaaacaattttttggcctaaaaaaaaaggttaaacagcaatttgtactaacaacttttttatagcataactataggaaaaagcgtttaaaaacaggaaaccaagccattttttactacagggactatttatttgggggccggagaaagccatttgaaaccatctccgaaacccatttttttcacaaaactggacaagaaaacccccctaggacggccattaaaatctgacaaatttacatttcccttgcccggagggaaattggccacccccaaagggaaacccaactttttttttggggcggcatatggaaaatctatcttgtttcccaggataaggaaagggacagttttcaaagactcctcagagagcaaagcatctaacttttttttaaacccggaaaaac

SEQ ID NO: 135762 - DNA, 1282 bp, Glycine max
  Clone ID: PAT_MRT3847_93601C.1
acagtaaacctcttcagatagtaattcaattcataataatgtagataagatcagactccagcaacctcattaaaaactcattttttgaattcagtcagaccaattcaattaaaaccaaagcaggtacactctgtaagtggatgtgtaagacgaacaactggacagacacacatagtagtacaatgtaaatcatcaaacaataggtccaaccaccaggaatattaaaggtacaattcaagtaatagcctcatgctgctcaagttctttggctttcagcttttccttcacccttaagagaagtgtggtcttccaagaatccagaggggtcatactatcaaattccttgacaacatcagtaaactttgcaacatcttcttcatcaattgcagcagcaatgtccgccaacaatctatattcacgtgttcctgaaaatgttggatccagttcctgatatcgttctaatgcattggttatagcaacaacgtcctctttacagagtttgcagatgccagcattaagaaggtgtcctttaactccatacttcagcaaattattgttgagggattggcgagctatctcttcataaatgtcaatcgacttctgatattgttctagctgagcagcaaactgggcaactttttgtttgcattggttcgcagaagttgtcacttcttcattttgaaaaaaatcagctgatttttcatagtaaacaagagcctgctcaatattctgttcaccctcgtacaattcagcaatttcctttaaatatctagcagccatagagagtcttccaatgtcacagaaaagatttacagctcggtctaagcaagatacagactcgtttatattagtctttttgtagcaatgtgcagcatcgacatgggcctgtgcagcttcatgcttgctttccaacttcaaatgacaacttgccaacttcaggtatgtcgctccagccttgtcccatgatttggcgagcttgaagcaattggcggctttatcgaagagatcggcggcatcttcatacttggagccaaacaagccccaaccgctgagcttcttctcagcctttttctcgaattcctctcccttcgataactgatcggccattttcctccgatcgaaacaaagcaattgaagatggattgattgatcgaattcagtgcgttgcaggaacaagaagaagaagaagaagattcataagcgaaggagcaaaaagatattaattagactgtgttgacgccaagtccaaatccaaaacccgccaatttcagccttgcgtccg

SEQ ID NO: 135763 - DNA, 461 bp, Glycine max
  Clone ID: PAT_MRT3847_93602C.1
tggaaatgtcatcaatgctcaaccttggggttctggaggtgacaaccgagaactgtggaatggtagaaaaaccggagaaatcaagcctgatgtaaaaggagctgagcctgagaaaggttcagaaaggttctggaaactgctgagtaagcctttggaaggctaccaaggaggtaacaatgaagtgattgagcgtagaaacccattagccttagctcattttgccaatcaccctccaaaaggggtgcaaccaaatgtcatgatttgcccttatgactttccattgaccgaaagcaacatgagagtctacattccaaatgtgttgtttggaaacgcagaagtaaatatgaggagatttggcagcttttggttcaagtctggtggagggtcaagaaatagtggatcaaatgttccaacactaaaaactcttgttttgattgctactaggcctctccaagatgagg

SEQ ID NO: 135764 - DNA, 184 bp, Glycine max
  Clone ID: PAT_MRT3847_93603C.1
cggctcgagcaacccaacacggccgaatggcctgacccctaagagagctgtgttttttgcaaaagacacacctgcttgggtaatgaacaaacggaaggccgccagacgtctaagacacaggcgctctataacctggaacactgacaactaacgcacctataacagatatgccgacactacctaa

SEQ ID NO: 135765 - DNA, 359 bp, Glycine max
  Clone ID: PAT_MRT3847_93604C.1
atatccacccttcaaaccatctattacacataagagttactctgttaacattcatacaccattttcatgaatctatacggacatataatgactacactacggccatggaacagctagaagcttgaccacttatcaatatccaaatatttttagcatatgggttatactcggggacatgaccgctaaacgtaacgtactctatgtgtacaaggagctatgttaatattaaaatgccatgactactgcgcttagagctcgagacacctaaactcatcatctatggcgacctaatgtagaattggaataccatattctaattgatcattgactgaaacatggggtgcatgattccttaagcc

SEQ ID NO: 135766 - DNA, 112 bp, Glycine max
  Clone ID: PAT_MRT3847_93605C.1
tcattgagctgaagaatactgaattcctatcgaacatctcaacaataacccattcattgacttctcttttcgtaccatcactccctcgagttcgctaaagagaatttgacta

SEQ ID NO: 135767 - DNA, 177 bp, Glycine max
  Clone ID: PAT_MRT3847_93606C.1
tatatgttacatccttatcatacacttattctttgaagaccaccaacttcaaaatgcaggtgctgatactataatggcactcgttcttccctacataccatggattaaaaatcataaaactaacatatataaattcaaggaaccataccttctcttaaatattcaaattctaacatc

SEQ ID NO: 135768 - DNA, 418 bp, Glycine max
  unsure (1)..(418): unsure at all n locations
  Clone ID: PAT_MRT3847_93607C.1
tttttgtccttgtccttgcccttgtccttcttatcctcctcttcattcaacgccaccttcttcttcttctcctcctnncccacgcacccttctttgtttcctcctcatactcagcaccagcatccaaagcctcctcctttttatcatcatcaccattacccacagactcaactttagtctcagtcacaagcattttctcagtctgataatcccgaacatctgccatctcatcagcttctttcttcttctctccatcctttacctcacaacatccatcctcctcgttagggttcccttcctcctccacagcaccatcagtgtcaccatcattagggtggcattcattcttctgaacttgcttctcatcaagtctccatagcaacagagggcaggccttcagtcacaggaagaaccgttt

SEQ ID NO: 135769 - DNA, 1775 bp, Glycine max
  Clone ID: PAT_MRT3847_93608C.1
tcccacgcgtccgacggctgcgagaagacgacagaagggggcacactacggtactatagtatagtgtttacttacttaattactcagcactctcaaaaaaataaaaacttcttttataaattggaaaagggactcttcactcttctctttctctctctgcaatgtaggtcgtcggagaatggcaaagtgtcatcagaacaacgtcggatccatcgctcttgaccaccgccactccgccaaaaatgccaccgccgccggccacttccgcgtgctccgccgcttgatcttcgacgccgtcagctgcggcggcacctctcgctaccggtatcgccagcgcggtggcgatgtcagcgacggcggtgacttcagctcagcggcgtgccacacagagaaggaggagaggtcggagaagctatcggatcttctgaacgccgcggagaataaaatggcggcggcggaggaggagaagaagaaggaagaggcactggcggaactgaagcaagtggtgaaggagctgcgcgaagaagactttaggaagcagcgaatcgccgctgcgagagtgaggtcactagcgaaggaagattcggaagccagagcgaatctcgcagtgctcggagcaattcctcctctcgtcggaatgctcgatgattcagaagacgctcattctcaaatcgcatcgctctacgctttgctcaatctcggaatcggcaacgatgcaaataaagcggctatagtgaaaattggcgcggtacacaagatgctgaagctaattgaatcgagcggttcagattcgtcggtgtctgaagcgatcgttgcaaatttccttggcttaagcgctttggattcgaacaaaccgataattggatcctccggtgcaataccgttcctagttagaaccctaaagaatttaaacgaaagtaaaatcgagtccaaatcacaaatgaagcaagatgctatgcgagctttgtacaatctctcgatctgtcagagcaacgtttcagtagttttggaaaccgatttggttttgtttttagtgtccacaataggagacatggaagtgagtgagaggagtctcgcgattctaagcaatttagtgtcgactccggagggtagaaaagcgattagcagcgttagcgacgcgattccgattcttgtggacgcgttgagttggacggactcgccggagtgccaggagaaggcgtcgtacgttttgatgatcatggcgcacaaagcgtacggtgacaggcgggtgatgatagaggcaggggtagtgtcgtcgctgcttgagttaacgctggtgggaaccacgctggctcaaaagagagcctccagaatattggagtgtttgaggatagacaaagggaaacaggtttctggaagttacggtggaaactttaacttgggtgtctctgctcctatttgtggatcttcttcttcttcgtcgaaagggtgcttggtggaggaagatgggatcatgagtgaggaaaagaaagcggtgaagcagttagtgcagcagagtttgcagagcaatatgatcaagattgtcaagagggctaacttgcgtcacgattttgttacatctacccattttgcttcactcacttccaaagagtctcccattttgaagaataataatgaaatgaaaccatttctcattgtagtttcgttgagtttttttttatcttctgtagctacttagcaatgataataataataataataataacgatatggcagattatatattattatataatactagtttttctagttcc

SEQ ID NO: 135770 - DNA, 883 bp, Glycine max
  Clone ID: PAT_MRT3847_93609C.1
cggctcgaggacgaggttccagtcggagtcacaaccacagagcgtaattctactcacgaaaatcaaaggttacgaaaccattcgagggaaagaggacgaggttccagtcggagtcacagccacagagcgtaattctactcacgaaaatcaaagaattcactcgagctttgctcgcagacctcaccaacggacgctcaccgctcattctcatcgatcgcttcagaagctactgcaccctttccaactccaactgcttttgtgcctccgatttgccgtgcggaaaggaacttctcacgcttcgcaggaaatcccacgcccacagactagctgtcatgttgagagtgatgctgatagttcagaaacttttgcaagagaacaagcatagttccaagagagacatttattacacctatccttctgtatttttggatcagtcggtggttgaccaagcaattaatgatatatgtattcttatgcaatgcagtcgccataaccttaatgtggtttctgcagggaacgggtacaaaatgagatcacagtcaatcttggaaaattcacttttttgtcagaattttcttaataataatagtagcagtagttttatttttacatataatactatttcatgaatgtgtgtacatttttgtataaaataaaatctcgccactggcgtgcctaaaaattggtatgaagttcaaaggacacgtatttttaatctactacttttttagagttatgagatcccctgtttttattgacatcataattgtaattgatgatagtgagaaaatatgattccatcaaacgtatattaataaggctagcatatgttgaattctgtcatcagaattctcctttactactgcagtagtaattattaatt

SEQ ID NO: 135771 - DNA, 388 bp, Glycine max
  Clone ID: PAT_MRT3847_9360C.1
ttctctcgtccgttttttttttttttaaaataacacacacttcacacatcattacgacaattaaaagaggtgtggaaattttcaaataggcagagcatactcaacaagagggtcatgcctaatttcctttattgaataaaacaaacgaacaagcgaaagaaacacatattcagatcatgcagagggttccgcattttcagaagatctggcagtagcctgggggacaaaaaaaggtggcattagaatggtaccaggaatttccgaaatcctgggaaattccaaggggattttaaaaactggagactggttggggatggcaaatagggaacctaaatgccatggagtttgatttggccacttaggacctccaaatttaaaaacctttttt

SEQ ID NO: 135772 - DNA, 524 bp, Glycine max
  Clone ID: PAT_MRT3847_93610C.1
ctatggagagcagccctatacacaaatcactaatgagatcaaaaggccaggtccaggtggatcaaagaaggtgattgcaattcccggtacttccatctgatgattaactcaaatcataaatctaatgcagtaactggagtgtcaatggctcgtgggtggaggaaccaaaccgagtgaaagaagaagtccaccggttttttcagcaaagatttcaagaaccattgcaaaccagaccaactttgaatggtatcagctttaatagcattgggcaccaaccaaatcaattgctggtgggcaccttcagtgaggaagaaacaaagtcagcagtttgggaatacggtagtgaaaagagcccaggcccagatgggcttaattttaagttcatcaagcagttttggcagaccttgaaacctgtaatcttgcgctttcttggtgaattccatgctcatggcactttcccaaggggaggcaatgcctcatttattgctttgatacctaaggtgaccgatcccacatgcctaaac

SEQ ID NO: 135773 - DNA, 104 bp, Glycine max
  Clone ID: PAT_MRT3847_93611C.1
acgcgtcggtacagctgcacgaagaggagaaggcggtgcggatgctatcctcagatttctgggcagcgaggcactctctctctatcacgctacggctctcagtt

SEQ ID NO: 135774 - DNA, 251 bp, Glycine max
  Clone ID: PAT_MRT3847_93612C.1
atcctctgatttgccaacattcaaaccaaacctaagggcgtggtatgaatgaacctttacacagtaccgattcacgttaacatggtcaccacctccccccatgacatctcctccgagaaaggcgacatggacgtcgagctggtgcacgcatactcgcactcgtctgtgacactcacccacgactgacctcatgaatatcgccgcctacaaggccgttgcgatcgcaacgttcgggatgggactggggctga

SEQ ID NO: 135775 - DNA, 254 bp, Glycine max
  unsure (1)..(254): unsure at all n locations
  Clone ID: PAT_MRT3847_93613C.1
ggcaggtggttctattcagcaatcaaactctcttcttcgaccacaatctacttctgatgtaggaatacaatccggaatgggatatatgactgctcaagtttcaaggccatccaacatgtcatctctaaagagagctgcttcccaaccactgtcatccnttgtcccagaatcaacncaggaagactctaccaaatcggtccanactccatccattnccaantgggannaanntgggccccanagcncccaaaccc

SEQ ID NO: 135776 - DNA, 275 bp, Glycine max
  Clone ID: PAT_MRT3847_93614C.1
cttatgtaacaaagtacagacgagttgtttctgctcaaactcaccgtgaagaaatcatccaagatctttataatacacatgaagatcctgtgaggggaaagacacattcgggaattatcaggtactggggacacgggattgatgtggtatttctgctcagactcaccgtgaagaaatcatccaattgcttttcttgcctctgttttttcagggaattacttcgtgctttccgtttatcaactaagactaagccagagaggattatattctacagg

SEQ ID NO: 135777 - DNA, 798 bp, Glycine max
  Clone ID: PAT_MRT3847_93615C.1
taatggggggggggaggagcttactaggggggggccgcccttttattttttttctaactaattctttttactgaaatgattataattaatgaataaatcaatgaaccataggatacaaaatacgtgtaagatgattagtggtaacttacatataaccttaacatttaaaattgctcaaacctcagaatcaacagttacaactcaaaaacatagatgacttactcacagcacactggctggtgttctttctgtaatttctcccaaaggcatagcaccatcctcggactttgataatgggcaattacataatttgattcacatccagcgttgtaaaacctctcatcattttcataatgtacttctttaccatcattcttgaactgttcaatccatatgcccatggcaacatcttctaatttaaagagcttgagttttctttcttggtgggcatggacaataaattttgctatgtctcgtgagataacatagccaggaccatgtgcccatggtgggtatgtatcatggggccattcctcctcactgatgtaccacttgctgccttcgtccctctgaggagatgatttagaagatatgagaccgtacaagaggccttccgatggctttcctttaaggctggaaagcacttcatcaatcctaacaaaggcatcatcatctgttttcatgatgtatttagaagggatgatttttgtccccataatgcaaattgcaattgtcttcaaagaaatcaaactataataatctacaaaaggcattaactgaatatctccatatgcttga

SEQ ID NO: 135778 - DNA, 343 bp, Glycine max
  Clone ID: PAT_MRT3847_93616C.1
tcggattctgttatatctggacacatatcactgtcttctgtgtagcagatagtagagaaaagaagtcggcggttctattacttgacatgtcattattttatgacttccccatgggcatggaattgttccatagacccatccaaaaaattgctcccgcgccccaattgatatcaataccctcttactcctatacactttctaaaacacagatgactgcctatatcttactgtggagtgaacagaatcattaaacacattttgatgacacatcgaagaaaaagcttcattattcatgctttcataaacaagtctttagaattccggtggtcctacatgctcacaa

SEQ ID NO: 135779 - DNA, 404 bp, Glycine max
  unsure (1)..(404): unsure at all n locations
  Clone ID: PAT_MRT3847_93617C.1
ctggattcggctcgagcgctcccatgattgtacatggagcgcgcctgcactttggtgacacgttggagaaattcggcaagaggccgggagagatgagtaaactttcgggaccagattacgcagttccagcacctcgagatgcggaagagcaagtcgaagcgcaaatagctctctgaacagatcttaggcttatgtctaattgaaggctgcaagaaaaccggagtggagaagaaaccaaaattagttaagcttcaacgatggaattgatatggacatgccaagcattaatgatgtggaacaaatacagtgcatctctaagaagctctgaggatgtcgcatggaaaagagctgcagtgttgacgggaggaccttcacacagttcgtacccgnaaaacgtctaagga

SEQ ID NO: 135780 - DNA, 222 bp, Glycine max
  Clone ID: PAT_MRT3847_93618C.1
aatattgaatatcaacaaggattgcggcaaagccgcatagatacaacatcccttacgttaaacaagaatttttaaaaaataatgccaatggggttttcccaattaataaatttggatacaaagcatgccttacacatcttaattttcaaaaccggctattgaaaccccccaaactttaaaagtttttctttgcgctttttaaaaaccgaacccaccaaattg

SEQ ID NO: 135781 - DNA, 482 bp, Glycine max
  unsure (1)..(482): unsure at all n locations
  Clone ID: PAT_MRT3847_93619C.1
cccacgcgtccgacggctgcgagaagacgacagaagggtacatcctttgtggtacaagtagagggtacatctacttgggtatgactgagaacaagagagggtacatctcttgtggatcaattctagtggagggtacatccactaggttcaaagagaacaagggaggatacatcccttgtggatctttgcttgtaaatggatttttacaaggttgaaagaaatctcaaggaccgcaggtcgcttggggactggatgtaggcacgggttgttgccgaaccaatataaaaactcctgtgtgtttgtttccttcttccctactcttttactttccgctgtgcatttaatttccgcttttactttctgttaagtttctcttctactcttcattctcttaacaatttagtaaaagccttanaagagtaattnttaattagtaaaggtttaggaataattaattcaacccaccttcttaattattctga

SEQ ID NO: 135782 - DNA, 204 bp, Glycine max
  Clone ID: PAT_MRT3847_9361C.1
attttatctcttagtagccattctaagatactaattctctgaacgctacactcttactatgtaaacttacaatgcattaaaacaatgaatattcatctacatttaacgatttacactaatactaatcactagctaaaacagaaaacacttaatggaatacttttacatatttgttcatcatcctttattttttgtggttgttat

SEQ ID NO: 135783 - DNA, 472 bp, Glycine max
  Clone ID: PAT_MRT3847_93620C.1
ctcgagccgctttctcaggttctggtttttgattttcaaccaaaagatcctgaagatatatatgtggcactagcggctctatatggtagagcagtgccaggtgagattaattaccgagattactagtctcacgtttacagaaagttaacttcttctgaatgctattgaatattaattaccgagattgtgcatgcatgatcaagtgtaaacagctattatttgcaaaatcttgaagatcatgatactgaagatttgtttaccacaggcagtataatactaatgctattgacctctttcacatgccacaaatgcatacaaccttatacccttaaaacatacacacatggacacacaacctctcaagagacatttattcttttatcgtttgttgctcttcagaataggtgacacatacttgttccaacttacatctgatgcgtgataaatgttatacttatatgtcttctctttt

SEQ ID NO: 135784 - DNA, 529 bp, Glycine max
  Clone ID: PAT_MRT3847_93621C.1
ctgatattttctgggatgctctcggtggaaaggcagagtatccaaagggcaaagaaattcaaggattcatagatgatccacatttgtttgcattaaaaatagcgagagggaaaccatgtctaattgatgattctgtttctcacgctcatttgttggagttttaactcaggagacttcaaggtgaaagagatatacaattatacacaggatgacttaataactgaagacatcttattgcttgattgccaaagagagatttatgtttgggttggcttacattcggctatcaaatcaaaacaagaagttcttcatcttggcctgaaatttctggaaatggatgtccttgttgaaggcctatcaatgaacatccctatttatattgtaacggaaggtcatgagccaccatttttcactcgtttcttttcatgggatcactcaaatgaaaatattgttggtaactcatttgagagaaagcttgcaattctgaaaggaaaaccaaaaactttagagggacataatagaaccccgt

SEQ ID NO: 135785 - DNA, 2510 bp, Glycine max
  Clone ID: PAT_MRT3847_93622C.1
ttcttttggaggttgttcagtatatcaaggagaataagcatggaggaaaatgcgaagtggcaacaatagaggatggaaaatttgttggtgattctgatgtgggtgaattttggagtttatttggtggttacgctcccattcctcgagattcgccttgtgttcaggaatctgagactcctcctgtaaagctattttggataaatttacagggaaaactttgtgagactggaagcaatgcattcagcaaagaaatgcttgagacagaaaagtgttatatgttggactgtgatggtgagatttttgtctggatgggaaggcagacttttttgacagaaagaagaacagcaatcatagctgttgaagaatttgtcagaaatctcgagccgaatcggctcgaggaaggcagatcaaacaagactcatttgacatttttatcagaaggattggaaagtaccatctttcggtcttactttactaattggcctaaaacagtggagcctaggctttatgaggaaggcaaagaaaaagtggcagccatattcaagcaccagggttatgaggtgaaagagcttcctgaagaagacaatgagccatctatagattgcagtggcacaataaaagtttggcgggtggatggtgatgaattgtcccttctttcagttgcagaactgacaaagctttacagtggagattgctatatagtacagtatacatttctgggaaatggaagggatgagacactattttatgcttggcttggctccaaatgtgtaatggaggataaagcagctgccatttcccacatgagtactatggccgattcaatcagaactaatcctgttatggctcaaatccatgagggtaaggaaccagctcagtttttctcaatacttcagagattaatcatattgaaggggggaaacagttcaggatataggaagtttatagaagaaaaaggtatagtggatgaaacatacaatgaaaacctggttgctttgtttcgggtacaaggtacaagtccagataatatgcaggccatccaagttgatcaagtttcaacctccctgaattcatcctattgctacattctgcaaagtaaagcatctatctatacttggattgggagcctatcttcagctagagacctctgtgagggaaagggatgagcctgatattttctgggatgctctcagtggaaaagcagagtatccaaagggcaaagaaattcaaggattcatagatgacccacatttgtttgcattaaaaataacgagaggtaagaaaggcacccttttaagaaaagtactctaggactcaatagctgtagacctctcatggctggaatgccagagagagcttgacttattgattgtcctgcttctcgcgctcaattgttggaatgacaattcacgagtcgtcaaggtctatgaggtattcaactatacacaggatgacctatcaattgaaattgttttattgcttgaatcccaaagagatgtttatctattggtcactctgctttttgctgtcgaatcatcacatgaagctcttattcttgacctgaaatttctggaaatggatgtccttgttgaaggcctatccctgaacatccctatttatattgtaacgggaaggtcatgagccaccttttttcactcgtttcttttcatgggatcactcaaaagaaaatatttttggtaactcattcgagagaatgcttgcaattctgaaaggaaaaccaaaatctctagagggacataatagaaccccattgaaagcaaactccaggccttctactcctgatggtcacggaagcattgtctgttttctccaatggacgtggaagaagtagttcacctatacctagtagtgcaggctcagatcttaggcaatcaggtgataggagtctttctagctctactccagttgtcaagaagctcttcgaaggatctccttcccagagtagtgctggaaaaacaatgccacagtctggttctccagcaacagaactgagctcatctgatgagaccgcgagtttccctcagaaggatagaaatgtggatggtgagaatacggcaatatacccctatgagcgcctgagagtggtttctgctaatccagtaactggcatcgatttgaccaaaagagaggtatatttatctaatgaagagttccgcgagaagtttggaatgccaaaatctgctttctataagcttcctagatggaaacaaaacaaactaaagatgtctctggatctattttagagcaagaccaactaatggctgtgttttgttttgtggcactatattacaacattttaggatgatacaaattttacctcatttgtgcattaagcgtttgagcttgagttgctccccttcttgatatacgagtcgttgtatttttaccaacttactacatatttatctcttcattttatctcataatgtaatattataaatatgatgcttttggctcatgcaagtggaactatgttctattttatgctt

SEQ ID NO: 135786 - DNA, 253 bp, Glycine max
  Clone ID: PAT_MRT3847_93623C.1
tttttatgcgaattatgtatgtcctattttggggggaaggggctaaactggatcacattaagcttttcataacaaaatcctaccactacctttttccaatccatctaaggaaacaaatacttttaccattgccacagggaggcgataaattttagataaacacccttatcccattgaaaaaaggagcttctacgctagaagtaaaagaagtacacaccattggtaaactcgacaccaccagaaatctcaaata

SEQ ID NO: 135787 - DNA, 527 bp, Glycine max
  Clone ID: PAT_MRT3847_93624C.1
tctagctatctcgatcgaactgtccaagggtcctgtcacccccaaaaccaagccgagatggtgaggcgaggttgggccgacggcgtgggcgtgcgaggggtatcgggtaccaagcggagtgcgagaacgaaccatgggggaggatcgggccatagaaaccaccatacgggaaaacgggggacccccaccccatggcgggaatgtagtttgcgtttcgcccagggccgccaagtgccgatgtaacgataaagcgacggcacccaggtgcgggccttaacaggcaacaagtacacgggtgtttagggaatgcgcaatggtaaaccatacaagcgtggcacagtttgaacgcacagcgttaggttatggcgtgcacaccttagtgccccgcatggaatgccgcaaagagcttaggccctcagccggattatggaaagcgtacatgagagcacaaaggatggggaacgcgagggcataggtgacagcaaccaaactgcatacaccaacgccaacaaaggtggcaatggggc

SEQ ID NO: 135788 - DNA, 279 bp, Glycine max
  Clone ID: PAT_MRT3847_93625C.1
aggcgacgcgttcgcgaatcgcatgcggttcggatgggagagagtgaaacagaaaacagtgctatcaacaagcgtgggtgcgtcacgtggacgtaacagagagggctttgattaaaattttacgcttacacctgttatacacagcgcaggacaagcttcctggcttgtttactatgatggtttaggattggcacgaggcttccaccaataacagcaccaccggggacctgtactgtttcatctaccacgcgctatgactgattacagtgtaggactacc

SEQ ID NO: 135789 - DNA, 293 bp, Glycine max
  unsure (1)..(293): unsure at all n locations
  Clone ID: PAT_MRT3847_93626C.1
ttaatgangcgtanganannncggaattcngntcganagnggaagggcnnnnngngncggaatgnntngananananggnncaanaaagtgagaatnagagaaggagaaagnntaaannaaanaaaangngacanaaagatnnagnaataantanncagagaganaaagaanagagcagnnaaaagcanagaannangaagaacagancanncgaagantnaaanncnagangnnagagaaggaagaaaaggaaanangggagaaancaataagaaagatgccaagaagnaaa

SEQ ID NO: 135790 - DNA, 138 bp, Glycine max
  Clone ID: PAT_MRT3847_93627C.1
caggcaatggcttcagttgggcaagcagtagtacgtagctatagtctcctagctagtggaagcacattgatatcctgcctgctaatggtggaagcctttccaggttaatacactttattctgacctagtagaaactag

SEQ ID NO: 135791 - DNA, 502 bp, Glycine max
  Clone ID: PAT_MRT3847_93628C.1
tgtaccagagtctgtcaacttgtttgcagcggttgcatggttgttaaaaatattggtgttggtggagaagttgctgaagcggtttatgttgtttaaactattggtattgagggatatgttattaaagcggttgatgttgttaaaaatattagtgttgctggagacgttggtaaagctgttggttttgtagaattaattgtttgagctattgatattgttaaaaatattggtgctggtggagaagttgttgaagcgttttatgttgtttaaaatattggtattgagggatatgttattaaagcggttgatgttgctaaaaatattagtgttgctggagacgttgttaaagctgttggttttgtagaattaattgtttgagcgggtaatattattaagcatattggtgttaaggaagacgttgttaaagcggtttatgatgatgttaagaatattggtcttggctaattaattggagcggttaatgtttgtaaatatgttggtg

SEQ ID NO: 135792 - DNA, 318 bp, Glycine max
  Clone ID: PAT_MRT3847_93629C.1
tttcggttggtggtatgatcaaacactttttggaaagcaagtgtgacgataaggcatgcagagggaacaaaccaaatgtttaaactatcttaagctatgtattctaactgatgcattatttgtacatatggactaaatgggggcatgtcaggtctttagtttaaacacaccattctttacgtggtggctatacccaatgtgaactataatattcttccctttgggacaaaaggtaatgtggaggattcggctatatgaagggcgagcatggtgaagacctttgtggatgtgaatgatgaagaaccatagatgaaaagg

SEQ ID NO: 135793 - DNA, 1833 bp, Glycine max
  Clone ID: PAT_MRT3847_9362C.1
gaagaggcccaatccactgggtctataaagcaaaggcccgaggtagctagatcggaattcggctcgagtgagcacctcgacgtgccaagtccaacttggcggtggccggtgtgtcccaagccagctccacaaccagctgcaccagaacaccatatggatttggtttccacgccaaaaaaccttggcttttgagccaggaacactcaccctagcccaacctatgaatctccgccacatgcagccgaaacaccaactgttgccgaggcaccctcaattccgaagacacctctctgagatggggttggaaccgatggtgccgacacttctcccaaattgaacatgccaacccttgtagcatctgtcatctacgagcttctggctgccggatgttgctaagacgtttttgagttctgacaaaggctcatcagaggtctacaagagcatgcgtcatatggtcagggttgctatgagtcaagcacagaaaagaacaagattatctggggatactaattttagccggcttatctgtgcaagagcggatgaagatcatttggatggactctatgttggtgcatttggtccttatggcatggtaattgtggagttggggcgcaaaaatgaagatactcctgtcaaggatgaatttatacgtcttccagctgaaataaaaaatatggaaaaagattcttttgactttcatttggattgtggaaatgtagattatggtatcaaagaagataaaattcccaacatcaaagtagcagccctagcagcacaaggaatctccgagcttatgcctcctgatgttgctaatgcattttggagttctgacaaagtctcttctaggatctccaaaagcatgcgtgatattgtcagagttgctatgagtcaagcacagaaaagaactaaattatctggggatacaaattttagccggattatctgttcaagaggggattctgatccttttgatggactctatgttggtgcatttggcccttatggcatggaaatagtgcatttgaggcgaaaatttggacattggaatgaagtggacaatgaaaacaaaacttcagatgtgggattctttgaatatgtagaggctgtgaagttaactggggatcttaatgttcctgctggcctggtgacattccgtgctaaaattggcagaggcaatcgcatcaccaaccaagggatgtatcctgatgatttaggagtggttgctagttataaaggccaggggagaatagctgactatggttatcgaaatccaaaatgggtcgagggagaactgctccaacttaacggcaagggcatgggaccatacatgaaaggtgcagatcttggtttcctttatgtcgttcctgagcaaagttttcttgtgttgttccaccggttgaaactacccgagtgagccatggttgatggtaccctaatcctgtctaatttactttctgatgcggggaagaacacgaagcattcttacaccagcgatgagattgctgtgttacctttttttctgagtggtagttttacccgacaggcaggcacttgttatttttctagccccttctacgagtttattttttgttgttccttttaccaatctctttgctatctatcatcttgtgtatataaattttgctgaccagtaaaatagtatgataggaactctgaaagtaccattagggatcttttatgtgcatgttatgcctccttgtttggacttctcgtttgtgtaagtcccacttagtctgcatgtatgaaagggagttattaataattaaatttaatagtaaagaacttcagatcggtggtaaaaaaaaaaaaaaa

SEQ ID NO: 135794 - DNA, 511 bp, Glycine max
  Clone ID: PAT_MRT3847_93630C.1
tttcgtgttcgttttatatttttttatttggcaactaaataaggggcaattcatttgtacaacggcctatacacgcaaaccaattgaactaactccagaatgatatgaatgcctttcggccaaatatagagccgtttaaaatttaatatcaattacatacatatttgcaaaagaatgttccaccatgaacattaacaggccctagcgtgtatctttcctacctagggtcaaaccgactaaacgaggtctttttgcgggagtaaagttataagtgtaaagggagcacgccagctccatgtgacatgtccataggcttatataaaccaaaccacattgtcaaaatttttataaatgtacaaatgagtacgtggaaaattttaatgtatcaacacaatgatgcgacccaaaaaaagaaaaaatttaactattactagagccaaggtttttatttttttaatggcatggtctaggcagcatttgaattggctaaactaatttaagaatctaacaa

SEQ ID NO: 135795 - DNA, 242 bp, Glycine max
  Clone ID: PAT_MRT3847_93631C.1
atcgcgagccgccgtccttttttttttttttttttttttttggggcgtgtttaaaagtttaccccattttttccatgtgacttctttggggttttttgtaaattttgttgttttggaaattaagccccccctggggttaccgtttggggattgtttccactgtccaatggggggggatttttggcaaatgtccaatttagggggggacctttaatgtcctatgccccgtaattttgggactt

SEQ ID NO: 135796 - DNA, 418 bp, Glycine max
  Clone ID: PAT_MRT3847_93632C.1
gggggggcccaccataaacaaatcaaataaaaaccctcccaacataattttggctgcaaagtgcaaaccattgcaatggtatacatagaacttatgtttttcgcactttggggtcataatcataatttggttttacccacaacttattaatgcttgcttttggaaacctataacacccttgaaggaaactggaaccagccccacgggttatcaaaaatatatggggtgactcggttcacactcaaggaattattaaggccccatttttcttagtcacgaccaaaaccactgggtttaatgcctccccagggggcttgaggaaaatatggtctataacaattaactcaaccaatctaaggcttaaaagccttagtaatgcgctcacacttttctagagcatttgggattacgggacaac

SEQ ID NO: 135797 - DNA, 597 bp, Glycine max
  Clone ID: PAT_MRT3847_93633C.1
gatcccagtcattggaactatggaacatggctgagaataaataaatgtaaattctccagctcccgagtgtgtgatatctgctctagcacagtcaccacttacaggaatggttgcttcggccagtcatgacaaatctgtaaagatttggaaatagaattgattttgtggttcaaacaaccgtatcatatatgctacctgttacattgtcaggtataacaacaggtaaagcaggattgaagaaagtacaaagatgatgtgagaagaatctcccacgagtgatgtatccaccatcctctccctatttctccttcgtcatctactatgataaggggcttagttcattttctttgttcctgttagtttgactaatccttttgtttatttttctactaaaaaatttaaattattgcttggttgtttgccagatgttgtgcaaatgagggttgtcattgttattattagccccttttcttttaatatccaaaatgtatgttgtacaagttttcattgtcttttttactaattaacagatgacaccaattaattagtaatgaatatataaattgatgatattaactggttggagaagtcctagag

SEQ ID NO: 135798 - DNA, 339 bp, Glycine max
  Clone ID: PAT_MRT3847_93634C.1
cccgggtcgacccacgcgtccggacagcttggacgccgtgggctccgaccctacccactccgtgccctcaggctccctcttcgttgtcgacacgggcgtcttaaaaaaggaaatcgtcatcgtgcgactagaagatagcgccaggccgagacgcttgtgcctggtaacgagctcgaagcactgattacctgcggtatgggagctcatgctgactagattaggttgtctgtacgcgatgccgaatactcacgtgctcaagggcattcgaatgacggccaccagtggaccactggcggaagcgagagattttatttgtacactaagccggacactctggac

SEQ ID NO: 135799 - DNA, 248 bp, Glycine max
  Clone ID: PAT_MRT3847_93635C.1
ttctgctcgatgttcaaagatgaagatgatccacgttcttttcctctttgctcttgtctcgatcacttaccatgcttcagaccgtgatttctgtgtagcacacctgaagaggtccagatacgcattcatgctatcagttgaaaccacctaacacagtcacagtggatgacttgtgcactctggctttgtagctggaaacaccacaaacactttcagtgctgcattacgctccgcaattgttactgatt

SEQ ID NO: 135800 - DNA, 896 bp, Glycine max
  Clone ID: PAT_MRT3847_93636C.1
aattctctttgtgaaagcaacaatgaagagtcgtgtaagaataccaggtttaagagactggctctgatggactatactgcagggcagaagaaaaagaagatgaaagcattgattccttagattatacaagctatttacttcggagtcctttccatactccagaggttcattggattgctatagcttggtttcatttgtgacatcgttgcttttcttgattcagccaatccaagtatatattgttatcaaggttcagcttttgaggaactgtctttggttatcatcaatctgaaaataaagaatcacacaggatgtagggaaagcttacaatgaatgcaggcagggagaaccagctgctgaacgcttgcttgccatgagcaggttcaaaaataagggtggttgaaaaaccagatgctgctgatttgatttggaccgtgttacaggggacctgaaattcaatcgatgacatgccacttgttttaaatggaatggattaaatcttcacattagacctggagagacagttgctattgtgggtccttctggtggaggtgcttgtgatttcctatcgcttggaaacagttatgatggctaaacgagtattccttttggacgatgggaagctaaaagagctgcctcaatcaactatgttggatggtcaaaaggattcattgctatcatctgggcttgttatttgaatatttcctgcaattgcatgggcgataagtatatatagtttcacttccacataaatggattctataagtattaacatatttctggcaatggtgatatattcttttatttcacaacaatgcgtcctcctctttcttttccctgtacattcttttgtaatcacattaatttttattggagggtcattatcacagtatttt

SEQ ID NO: 135801 - DNA, 360 bp, Glycine max
  Clone ID: PAT_MRT3847_93637C.1
atgacgcgtgggttttagcatagttgcctaagttgtagattgtttgtatacttacaagtaaatacatggatgggagagaagctatggcattctctgatggctcagctccatattacatgcatagagtaggggttggagggtctggctgtggtttccaaccagccactgtgttcagaccttggtcaaacactggcatgcaagctgagtcaaacgcaaggggtggtcagggtcagggtggaggacctgaagggcctaatttccctctttcagagacgccacctcaaggtcatgccaactgtaaccatggcatcacaattggggcacctgcaagcgggcctgctaagaaaaaatgagggaggc

SEQ ID NO: 135802 - DNA, 298 bp, Glycine max
  unsure (1)..(298): unsure at all n locations
  Clone ID: PAT_MRT3847_93638C.1
cacgtnctgagacanacccagtatgctatctaccatnggggatcaganagtttnnattttntcattgattntgctataantncagaaacaaggtactgaagcaatgcgtagancnatccccgttctcgttcacccacgattcctccttctcttccttgttctctcaattttcctcattttcacattttctggttctaccaccaccantagttttactaatcccaaacangttgttgagatcattgtagnagaanccagaanacgagccagagantacacacngantanttttngatat

SEQ ID NO: 135803 - DNA, 387 bp, Glycine max
  unsure (1)..(387): unsure at all n locations
  Clone ID: PAT_MRT3847_93639C.1
caanaaaancaacannccatgcnnnanacnnnncanaccncagnnnnngnnccnntngannaagngnnanncnnanncgnaaancgcgannnnanntcacnagncngaancacancacancnggntgngcngcnacngnnacncngatgccnatcnntncntcgcgcacngctaannccnngncatgacngtgccttnacaccntgccnctcgtnnaccggcatagtncgnggacgcntgnnnncgatcttanatcacntnnanncnttncngnnctncgnnnattatgagacgaantgacananaatgannangtgagctgaccacntcgnngaccnagtanaggatgacannanacatncgctcagtgncgnncgggacnganct

SEQ ID NO: 135804 - DNA, 425 bp, Glycine max
  unsure (1)..(425): unsure at all n locations
  Clone ID: PAT_MRT3847_9363C.1
tntnnttcgtgtccaaataatatatgtagcttataaagctcagcaaatcagcctcactgaatcttacaaaagcctaacaggggatgtagagactaaaaatatatacaaacaaatgaatgaaatccaaccatccccaattaaatcaaataaataaataatcatcactgcatcatgactctaaattcatcaaagctaagcaggccatctccattcaaatcaaagtggccaatcatagctgtgcattgctccatggattttgattctcctaacctacctagcatcttttgcaagcttttgggtgttataaacccaaacatttcagagtcatggtacatctcaaaagcctctgccaaatccttcaacttctcttcttcctctaaatgataaggttcagtggacttctcacaacgtcgcgggcagcgaac

SEQ ID NO: 135805 - DNA, 319 bp, Glycine max
  unsure (1)..(319): unsure at all n locations
  Clone ID: PAT_MRT3847_93640C.1
accataccttttacgcgctgctnaactattctccctatggagttaaatcttgggggtcgccagaagttttaaaatcttgtgagcgggattatgaagaaaagggacaagcttagttgtcaagttggaatcaacccatacttcatggaaaggactggtttggccaatatattactgaggaaggtcaacaatattctgagttgcgattatgctaggtttggtgggttgactaccaagcaagttattaacatattctctcaagggatgcacaagatgaattccgcttggattccaaacccaccataaatggacacacctgctt

SEQ ID NO: 135806 - DNA, 1553 bp, Glycine max
  Clone ID: PAT_MRT3847_93641C.1
ctcgatctcttcgattggaacaaccattactcgttcaattagtcaagttctagagaaaacaatatcatcagctattacagaatcattccagaagggagtgggagacaaggcattgaatcacctagaaatgccagttagctcaaaacttgaagctacagtggctaggcagatacaggcacaatttcaaacctctggcaagcaagctcttcaggaagccctcaagtctagtattgaagcttcgctaatgaaaactgctaggatttgcaactaagtccaaagtagctgcagatccctttgtagcgcaaatcaacaatggcttgcatcagatgattgaggatcctaccaaagaactatcaaggttgataagcgagggcaaatttgaggaagcatttacgggagcccttcatagaagtgacgtttcgatagtttcttggttatgttctcaggttgatttagcccgtattttggcaatggtgccactgccattaagccaaggagtacttctgtctcttctgcaacagttgtcctgtgacatcaatacagagacacccaaaaaattgacatggatgacagatgtggctgctgctataaacccggcagatccaaggattgcagcacatgtgcggcaaatattagatcaagtgtcccgaacactgggccatcttcgcatttttgccactgccattaagccaaggagtggttctgtctcttctacaacagttgtcctgtgacatcaatacagagacacccaaaaaattggcatggatgacagacgtggctgctgctataaacccacagatccaaggattgcagcacatgtgcagcgaatatatcggactttaccaactacctccccttctgaagcgagcacaatccgccttctcatgcatgtcataaactcggtcttgttgagctgtaaatgacattgttgtatttttatcatgtgcagaaagtgttgagtatcaactttggtttgtatagatatttagatagtttggagggggatgaagtgaactactgtatgtagttgttttggtacaattgatttgtgtgaaatagtttcactttttttttgtaaaaaaaaaaaaaaaaattatgcttaattgtttacattttgccctggccccctcctccttaggttgtctttacactttatagagatattattattgccttcaccctgatggacaaggaaaagtgtgacatcctcatgcaaagaagtcagcattgcaatgacagttatttccaagctgcctttggagtgtaaacaaaactccagggtaggcagcagttgaggctgggagtggctgtagcaagtattgactggtcattgtatcctgctacagcaggcttggccttgtaaaagattttgtgattcttaatagttgagaacatgggaatgactaaaaggctgtattgttttgctaggatattttatgtgggttgattcgggtggcagtttcctatagaggtagttaagaatgtccgcaacatttcagattatgtaaactttatactaaatatagccccagtagcaaattgagtttgacttg

SEQ ID NO: 135807 - DNA, 796 bp, Glycine max
  Clone ID: PAT_MRT3847_93642C.1
ctcaacatcagcaacattcttgcgtgttgttggtagtgacctgatccaaaagtacttgggagatggcccaaaacttgtaagagaacttttcagagttgctgatgatctttctccttctattgtattcattgatgaaattgatgcagttggtacaaaaaggtatgatgctcactcaggaggagaacgtgaaattcaaaggaccatgctagagttgctgaaccagttagatggttttgattcaagaggagatgtgaaagtgattctggcaaccaacagaattgaaagtcttgatccagctttgctacgacctggtcgaattgacaggaagatagaatttcctcttcctgatatcaaaacaaggagacgcatcttccagatacacacgtcaaggatgacattagctgatgatgtcaacttggaagaatttgttatgactaaagacgaattctccggagctgatataaaggcaatatgtactgaagctggtttacttgctctacgagaacgtcgaatgaaggtgactcatgccgactttaagaaggccaaggataaagtgatgtttaagaagaaagaaggggtgcctgaagggctgtatatgtgaaaaactatcctctattatctctggccctcttgtctttcttttaacgttctagttatgcgaacaaatgccaattcatttgtattctgcgaacaaatgtcagttgtattttaggggctttgaatctcaacaacgattttaattcaatatagttttctttcaatttccttgattttagaaaaaaaaaaaaaaaaaaag

SEQ ID NO: 135808 - DNA, 408 bp, Glycine max
  Clone ID: PAT_MRT3847_93643C.1
gggggggggaaaaaaaattttcaaaactggggggctcccaaaataaaaaaatcgttcaaaacccctagggggaaggatctttttgaccgctaaaaaaacttacttgggtggccccccaaaaaattgaaaaccccccctggggaacaataccccccccaaaaccccttcccttaaagggccctttcgggattcccaaaacccttttacaaaggggccttcccccttttaaccccccccactccaacatttgggggggtcaaattccccttttttaaggcaaaatttttttaaccagcttcaattggggggtaaacttttggctgaaccccccaaaacccccttttggttatcatgggggtttcccaaataaattcggttcccgggaacccccccagggaatggaggggg

SEQ ID NO: 135809 - DNA, 433 bp, Glycine max
  Clone ID: PAT_MRT3847_93644C.1
gtcccctctaatccccccttttctctccgaggcatatgaggaaatcaacctcgtcgttttggcatgtctccaagttaagctagcatggcttcctcttctttccatctttttctgttaatctctttgccattcttgtaggttctgcttcccttccgagggggtccttcaacgtcatttgagggaccctcgtcctttaatttagctattcttattcttattaattaatttagccaaagagattatatatatatgtatgtataaaaccgagagggattttgccattgtttctgggtgaaaatgttgtttagaacaaagaattcataaatatcatttccaaatttcttccgccacaagttcttggaggttgtttatttgatatacacatacatcgtgaaaggttagaagcatgaattgcttcccttgttgtggccct

SEQ ID NO: 135810 - DNA, 2101 bp, Glycine max
  unsure (1)..(2101): unsure at all n locations
  Clone ID: PAT_MRT3847_93645C.1
ggaaccgggaacctcccaaatgccgagtaccttcttttctctgtttttttgttgttattctcattccagccctaaagactcaaaagaacagattctgatatcaagaattacatgatactacccaaaaatggtttggacgaaaaaaaaggggagagagaaaaaggagaaccttcttttctctctgttttgttgttattcttatttcagacctaaaaaccaaaagcaccgattctgctttctagaattacatcatcgtatcaagaaaaccttggaactacacgaaaatggtgtcggcgaacaaggagatggtcgtgtactgcttcgacaccctcctcgctcactacaacagcacggaagctccttcccctgccttcgatcaggctcaacatccattgtttgttacatggaagaaagtggtgaatggtggagatcctcgtcttcggggttgcatcggaactctggaagcacgcagcttgatcaatgggctcaaagattatgcactgaccagtgccctcagggaccggagatttccacccatacaagttaatgagcttccgcttttggagtgtacagtgtcccttcttactgactatgaaactgctaaccattaccttgattgggagatagaaaagcatggtataattattgaattttctgatcctgtctataacacaaggtgtagtgctacatacctgcctgaagtggccgccaatgaaggttggacaaaaaccgaagccgttgattctttgatacgtaaagcagggtacaatggtccaataaccgatgaacttaggatgcaaatacagctaaccagataccaaagcaccttatttaccatgcactatagtgagtacgtctcctatgtgaaggagagaagaggtgaagctcctattcttgcggctaaatcacccaactattgaatatgttgcctacctttcttgaggctgcataatttctttactaaaagaagaattctgtttccaaatgaattaaaaaataaaaacgaaaacccactttgcctagggttggaatcaatttatttgtctaacccgaactactgaagtgattggtgcaactttctatgctcttcaaatttgtgtgattttgaagagactaagaacattgaactcagttcctgggaatgtccactaccgctgcagtttatgaaactgatgcactgttgaacattttttatgtcaatctgattgggagatagaaaagcatggtataattattgaattttctgatcctgtctataacacaaggtgtagtgctacatacctgcctgaagtggccgccaatgaaggttggacaaaaaccgaagccgttgattctttgatacgtaaagcagggtacaatggtccaataaccgatgaacttaggatgcaaatacagctaaccagataccaaagcaccttatttaccatgcactatagtgagtacgtctcctatgtgaaggagagaagaggtgaagctcctattcttgcggctaaatcacccaactattgaatatgttgcctacctttcttgaggctgcataatttctttactaaaaaaaagaattctgttttcaaatgaattacaaaataaaaaaagaaaacccacttgcctagggtcggaatcaatttgtttgtctaacccaaactaccgaagtgattggtgcaactttctatgctctccaaatttgtgtgcttttgaagagactaagaacattggacttagttcctaggaatgtcctctaccactgcagtttatgaaactgctgcactgttgaactgttttatgtcaatcttattgataacaggaatttcaatttctccaatgttgacaaatatatcaatttgttttccttactgcattgtaatattttctttttaggcaaatgctaactagtgccattagagcattggtttaactaaaggagaaacttttttattaggatgcgcaaaattacactgccaatgacattntttacactctcctatgatcttcaaaataaatattttcttctttttagttccttattcaatgtcctaagggtactgattagcaagatccttctttatatttgtcagctatcaagtctagttagtaacagttt

SEQ ID NO: 135811 - DNA, 175 bp, Glycine max
  unsure (1)..(175): unsure at all n locations
  Clone ID: PAT_MRT3847_93646C.1
cctcacantttcattacattatatctttttttccaacttttcccttatattactcatcaccaatattacatttcttacatcatacccaataaacacttttaaaacaacatatatcataacctctctctaatctctcaattacaatatctcctttnattcattcacacacatcctc

SEQ ID NO: 135812 - DNA, 468 bp, Glycine max
  Clone ID: PAT_MRT3847_93647C.1
gttcccatattcttgtcatatgaattgtctgtagtcttccaattgctgaagatttctgcgtcggtgtggaatggggaaagtttcctaatagatgtgatgcctaggcaggtaattctcaagtagaaaaagaaatcagagatgcaacctgttcaaaataaaaaagatcagtgatagatggtgatggaaagtggtaggtagttcaactattcttgaggcatcttgatttcatgatatgagttaattatccatttagtcatactatcctagtcttactgggtataccaagggagtgtagctcagttgattggttgaacaggttgaacaggatgggtgagttgttgtaaactccttggtacttgtgtttgattcctatggatcacacaaagtcttattgtgtattataagatgaccccacatgttaccaatctatggtcctctaaatgcaaatgaagtggaatacaccaatgc

SEQ ID NO: 135813 - DNA, 686 bp, Glycine max
  Clone ID: PAT_MRT3847_93648C.1
gtcgactccacgcgtccggggttttcatgcaacaatttcctcctcctcctcctctctctctctctctctacactagattggggattttccttggatttagggtttccgccgattttgattttaatttaatacatttgtctgagatgcaacggattaatccaatcgatcgatcgtttttaggtgagacaaattgaagggtgagtgtgggttttgtatggaaactcggagtcggaagcgggcggaggcttcctcagctgccccttcatcctcgtgcaccaccccttctcgttcagccaagcgctctcgtctttcttcttcttcttcttccatcctacctgttaatacacgttctcgttccgccaggaataacaacaacaacaacaactccggttccatttctttcatggaccccaccaatgaatcctccgggtcccgacgtgatcgccgtggcaagaatttcgatagggaaaattcggacaaagggaaggagaaggaacaggatgttaggattagggatgcggagcgggagcgagagcgagccttggcgttaaacatggagagtgaagatgttggggatgacgatgataatgatagtgacggcggcgggggaattctgctccaggatttgacgtgtgccgggggtgcgcttcgaaggcttgttggggaacttggggctggggggggtg

SEQ ID NO: 135814 - DNA, 467 bp, Glycine max
  Clone ID: PAT_MRT3847_93649C.1
ttatatttttttttttgtttatttttctgatattatatggtgttttttttgcaaatattttttatgtttcagaaccccggggccgaccctagggggaacccctgggaccacccagaaaaaccacaccgggacccgcagggaaacaagttcccttaaaacaaagggaataaaaggaggggggaccaggggcaaaccagttcccagaaaaaaagagttatgaaatcccgggtccacacaaaaaaaaaccggaaaccaaagaaaaaaaaattcggggtgccaaaagcgggaacaaacacacggtaatggctaggggctcacggccgggtccccaaaggggaaaccctcccccccaaatgagttaagaaacccccccccccccggagagaggaaaatggggcccgggcgccctaggtgaattttctcaaccccagagaaaaggggaaccgggatttgccccccccgggcgg

SEQ ID NO: 135815 - DNA, 480 bp, Glycine max
  unsure (1)..(480): unsure at all n locations
  Clone ID: PAT_MRT3847_9364C.1
tacagacgacagaaggggggggacacaatcaaattttcacaactaaaaataataataaacactaaaactttctttttttagtgactataaagagtcccataatacttaacaacatatcatctccgcaagacaaaatgaaactcgaattcactatctatttctccacaacaacaaaatgaattcttctacacttttccttttgtcattcaccctttccttgatcctcatttctcctttgccaaccttaggcacaagcttgtatgaatctctatgcgataatgctggtgtggacaaggctaggtgccttgaagttctcaaagccgaaccctcaaattgttggggctaaagatagtgttgaactttgcaagttggtccttgaattangactaaaaaagggattagaggcccaaacattcctaaaagaagcgatgaagacaaatccttcaccagccattatgcaatgtgcaactaccttttatg

SEQ ID NO: 135816 - DNA, 403 bp, Glycine max
  Clone ID: PAT_MRT3847_93650C.1
aattcggctcgagcttctaacttggtgcattgactcaccatctttgctttgaatcgccatggaagataaactagcaacaacaagtgaaggacaacccataagatgtaaagctgcgatttgtcgcaagccaggttctccattgagtattgaggagatcattgtggcaccaccaatgcctcgtgaagctcggattcgtgttatatgcacttctctttgtcacagcgatgttactttttggaaaatggaggttattaccatcattttctttctctttgaatgatttaaaacatttttcttagtcaatgtcttccctttaccattttttatttactttcatactctttcttttcttaaaagtcttagtggaacttcttattgaattttttaagatcttttttttttt

SEQ ID NO: 135817 - DNA, 269 bp, Glycine max
  unsure (1)..(269): unsure at all n locations
  Clone ID: PAT_MRT3847_93651C.1
aaagaagccccccccaagggggaggagctggngcaaagaagctancccaagaaatgccaaangctgtctttcaatgggagatatttcgttnagatctcgctttgaagtttctaaagacttctcctacattaaatgacagtctctttcttcatagcattgaaatttggctgatgacaccataatttgggctttccccacaagctgggcagttggagagatcaggaaaagttgattgaaattttacaagaggaatttctttacagcttggt

SEQ ID NO: 135818 - DNA, 1493 bp, Glycine max
  Clone ID: PAT_MRT3847_93652C.1
ccggttctttttttttgcacgtagtcacgaacattactattgactgatatatttaagtatctgtcaaattagtactagccaagaaaagtgcctatacaatgataaattttacagaaatcaacaaatatacttgcttagaataaacgtagataaaactaatcatcagtaatctataacttaatcagctagctattcttcccaagcaattggtaatcaggaacgtaagtataaaagtgtttctattgcaaaagtgatgatattttctctggccctttatctggaaaaagtgaatagacaggggattgctatgtatatcaaacaaatacaactttgctgtgtctatttggtgagagagctttgtttgctttcatacaacagggcggcagaaatacttttgtaacagtactcaagctgaaatgcttgtgagaactcctcaatcaaggacttatgtgtagtatgaataagactggcatcatccagttgatgcaaatcagttgttccatgatcaataatacattgcttgccttctctcaccaaccccttaatgcttcctacttgacgatcatgtattccgcatgggacaatccatttaaatggagacaaatctgttgtgacattaagtgctaagccatgataggttatccagtgagacactctgataccaacagctgccagtttctcatttccaacccaaacaccagttaaaccttccagcctagaagcctgaattgaaaatgctgaagaaagaacacgaataacaacctcttcaagagttctaaggtaccaatgaagatccatcttgtgtcttcgaaggttgatgatggggtacataactagctgaccatggccatggtatgtaacttctccaccacgctcagtgcgataaatattaaagggagcatctttcatgtcaaacttgaggttcccctcagtactagctgtacctaatgtataaacagaagggtgttgtagaataataagggtgtcagtgcaatctccttccttttcaatgtgtgccttcttttccctgacaatctccttttgccaaaaccatgccacttcataaggtacttgctcttgatgcaaatcaaagagatcacagatccttctgtggccatttattacaagagagttgaatttggatggtttggaatataggagtggcttgtgctgtttaaagtatggccctagaggtagagatgggtatgctgatgctgttgatgggagtgtgctgaaacaagatgtacccaacaaaatcatgtctaattttctataattaactctctctgaaatggtaccaagtgtagaacgtgaaaactgtggagcaatcatagaaaaatggagaggatgaggagatcaatgagctcaacccaaaaatgtacaagagcgaacataggcacctgagtttgtattagcaaaaaatatgagccagcaaacagaacagggggacaatctttttcaatgcctttcagtccccacagtaacatctcagg

SEQ ID NO: 135819 - DNA, 248 bp, Glycine max
  unsure (1)..(248): unsure at all n locations
  Clone ID: PAT_MRT3847_93653C.1
ggagagagagaactagtctcgagtttttttttttttttttttcttaaaccgagtaaattgaatgttactattaggaattattaaactgtgatcataagaagaagaaactccaaaaccaatcagnaaatcccaaangagaagaaagaagaaaaaagaatgattaatttactttgntggaagcgtcggaggaagaagatctaacccaggctcaagggagagaccgttgttcctttggcaatttcgcaaag

SEQ ID NO: 135820 - DNA, 488 bp, Glycine max
  Clone ID: PAT_MRT3847_93654C.1
aaaaaaaacattatttcatttatcaagtattattgaatcagcataggatcggctataaatttcaatacaaattctgttacaaatttatggcatagaaaatacattatatcaccttgggagctacccacgtcattggaaactaggaaccctatattaccacccaatcacatacattctcacactcatatatatatatatatatatacatatctttttatttatatgtatccatatccctctaacaatggctagatatatgtagatgatggtgctcccaacttgattaatcatgaaccgcctgatgagaatcactcgcacttgaacggaatggtcctgattacgacctcgtggcagagtgctgtaagagctgttccgatgaatggacccacccagaagatccagcgctcataccaaccaaggtgcttgttttagaggatatcagcaacaagagtacaatcacggaagataccagatcctgtgatggggat

SEQ ID NO: 135821 - DNA, 1743 bp, Glycine max
  Clone ID: PAT_MRT3847_93655C.1
gactaaacaaataaatgtaacggcggccacggggaggcttgaacttagaacctttgctgaccctcgtggagtgatccggtggacgcaataactgcaggcagctctgacttcagtgcaagcaagcatcaaaacattgctttaaaagcatcaattcagcgtttctgcaagttccaattttccaactatccacagaaacggtcgtttgaaaaaaagctgttattaattcgggagcgatatggaggtcgaactcaaagagttgcacgccgatcttcaatctctgagccaatcgcttcccgatccatctcaccatgatttgctccgcaagattcaattgcgtgttggggaccttgcgaagcttgcagaggctgcacctgttcgacgctctaaagttgaggatatgagtgctgaggttgtagatagcaatccttatagtcggcttatggcacttcagagaatgggtattgtggacaactatgaaagaatacgcgatttctccgttgccatagttggagtaggtggtgtaggaagtgtttcggctgagatgctaactagatgtggtataggtagacttttgttgtatgattatgacaaagtggagctagcaaacatgaataggttgttctttcgtccagatcaggttggcatgacaaagactgatgcagctgtacagactctgtcagacataaaccctgatgttgtacttgagagctatacactgaatatcaccaccgtcactggttttgaaacctttatgtcaagtttgaaaaataagtcacttcgcccaaataaacaagggagtggcgtggatctggttttaagttgtgtggataattatgaagcaagaatggctgttaaccaggcttgtaatgaattgagccaaacatggatggaatcaggtgtttctgaggatgctgtttctggccatattcaattacttattcctggagaaactgcctgttttgcgtgtgcacctcctctggttgttgcatctggggtagatgaacgtacgctcaagcgtgaaggggtttgtgctgcatctttacccaccactatgggggttgttgctggtcttctagtccaaaacacactaaatattattgctaggctttggacaagtttctccgtatttgggatataattctcttaaggattttttcccaactatgcaaatgaagccaaaccctcaatgttcaaatgtagcttgtttggaaagacaggaagagtacctgtttgcaaaaccagcaagggatgctgcagccaaagcaaaaatggaagctgaagcaccatcaactgaggaagtgccacttcacgaagaaaatgaatggaatataagtgttgttgatgatattgagctggatggtccggataccagaagttcagatgttctgccggaaggtctcacacatgaacttcctactgctgacgagtttcataaggcaactcttgacgctcccgtagttgacaatgacgacctggaagatcttcgtaggcaacttgaagccattaattctccatagtgtcagccaagtttttttcttcttattttcagaaaagaaaaacttttgaatttcaaagttcaaactgacatcattgttcaagtaagccagtttaacttagcatcagtttgttttaaaattgaggaaaactaatttcaaattattgaccataattacagtctcaaaattaatttcaattataaatttatattaacgaaacgttttttattaaaaatatatagaaaaa

SEQ ID NO: 135822 - DNA, 489 bp, Glycine max
  Clone ID: PAT_MRT3847_93656C.1
gctcggaattcggctcgtgaaaataaaactagcaaatttttattttaacaaccaaaaaaaaaaaaaaaaaaaaaggtaaattaaaaaaaaaaaaaaattaaaaaaaaaaaaaaaaaaaaaagggggggccgccccttattgggctgttcctccccgcatataattccgccccgccccttctggggggcccaccttttcttataagggggggtataatagccggccgaataaatggccttacctgtttcttgcgggaaaaggtttttttcttaacattccccccaacatactacccgctggaataaaaagcacaccctgcggggcctcatgggggggccacctcccataaattgtgtgtgcctcccccccccttttttaaccggaaaacctttcggcccccctgtttttttaattcacccccccccccggggggggggggttttctttttatccccccccaggtttttttttttcccccgggacgccccc

SEQ ID NO: 135823 - DNA, 350 bp, Glycine max
  Clone ID: PAT_MRT3847_93657C.1
gtaaactgaaaacaatagacattacttattccgagactagcaatagcgagtatacacattgtaccaggatacatcaaacacgtgtcgtagtagtgttacaatggattagcactagcattcacaaaaactccatcttatatttatgttcaccaatcaatgcatcatcaacatgtgattgtcagggtgagccatgatccgatgattgagtggcatgccgtatttacaagcatgaatgaggccgcgatagttgcacaactgagcagaagactagtgtgactaagctatcatcaagcaaatgttggcggagagtcgaggatgaaataacacttatcattggagggagagagtgc

SEQ ID NO: 135824 - DNA, 526 bp, Glycine max
  Clone ID: PAT_MRT3847_93658C.1
gtggctggtttttctctctcaaatcccacacaacgctcattatctctcaagacgaacgggggtgcatggctccgtttttcacatttcatgtgaggttcaagctccctacgtaatcctgagctcctacgcctgccttatgtctgggctaaactagctcttgatcgacctattgagggggttctacatctctccacctcagatggacaaacttgggcatcacatgatgtaaaactcagtgaccctgccccccctcaaggctcctttgatggtggagctttggggaggcacgcggacacggatatccctccaatgcctgcttgtctatgtctagatgggaatcgatcctctcatcctccatgctggcgagttggactgtctgaggaccaggctgcccaccaatctggacatgctgacatatccactagctgttgacaggagctgaaaggtactgatgttcgctcttctcactcgcgatctaggagcaggagctggccggcttgaggcgaacgacctcttcgctgtgcat

SEQ ID NO: 135825 - DNA, 392 bp, Glycine max
  Clone ID: PAT_MRT3847_93659C.1
ggaaaacggctcgagcttcctctcatccttccctcccttagttagcactgcatgagttcatgtgactttcactcctccacaagaatctcccaagagaaatgatgcagagctttctagtggctttggtttaattaactgacatggaatagaagggtagcatatcagtcacctcactcagagtgacaatttttagtggggtacagtgatcataattgctaagttttgttgaaatgggagtggtcactgttggagaattgaagactagcatctcagggaagaggacctttcgtccaagttcaagcataaggcatgccactgagtggccaatatctgatgtctctagtgatctcaccatcgaagtaggagcttcaagctttgcacttcacaagttt

SEQ ID NO: 135826 - DNA, 318 bp, Glycine max
  Clone ID: PAT_MRT3847_9365C.1
acgtgttgtttttatacactaagtaaggcttaaccacagttagttaacaacccaattattatggctaacctctaatgcatttcacaaactaacaaaattggataattacatttgaattacactacttttaatacaccaccttaattcaaatttgtcaatttgtgcatcccaattttgttcttcatttcttctagtctcttaggcttcaaagctttggttaacatatctgcacactgctcctcagttttgctatactcaagcgctagtttattcttgttaacttggtcacaaagaaaatgatattttacttctatatgc

SEQ ID NO: 135827 - DNA, 581 bp, Glycine max
  Clone ID: PAT_MRT3847_93660C.1
gaaatgaacttggttgtctcacatcatgtgtcggaactcggtggttccgagctcctgagctactctatggatctacagactatggtttagaggttgatctttggtcattgggatgtgtctttgctgaactattaacatcgaagccattgtttcctggaacaagtgatgtagatcagctcagcagaattgtaagtgtattggggaacattaatgaggaaacttggcctggttgttccaagcttcctgattatggatcaatctcattgggtaatgtggaaaatccaagtggtcttgaagcatgcatgcccaattgctcccctaatgaagtttccctagtgcaaagattggtttgttatgatccagcaaagagaaccacagctatggagttgcttcaggacaagtactttagtgaagaacctcttcctgttccaatctctgaattgcgggttcctttgactagaaatggacaagaccaggattcccctggtgggcacaatgaaatgggttctgattctgatttggaggagttaggcaccctggaatataccacaactggtttctatttgtctatacagatccct

SEQ ID NO: 135828 - DNA, 412 bp, Glycine max
  Clone ID: PAT_MRT3847_93661C.1
gtcgcatcccgaccgcggacgcgaggggggagagcgcgtctttgaagaaactaagatgactcctccctacattaaatgtacaggctctctgttcatagcacttggaaattcggctgatgacaccatcaattttgaggctcttccccacaagttggagcagcttggagagattcaggaaaaaggtgtatatgaaattttcacaagaggaatttcttacagctcggacaactcaggtgcgtcctgcaacaactctgtcggctgatgggagcccatatttgtatgctatggtacatgatagatcagagtctacagtaccaggtgattgtgccattggtgtgaagttgacaaccatacacaatatgtgtgcatatgggctcaatcctggcatttgaggttctcgtcttttgggcac

SEQ ID NO: 135829 - DNA, 452 bp, Glycine max
  Clone ID: PAT_MRT3847_93662C.1
gtttttatttttgatagtttcgcaaggcctgactggaacatagttggtgcaatgctcttggttgatacttatcataccaatactgaaaatgctgttcgtattatttgtggtgcgcctttcaaaggcggaaggcccattcgggtggcaacatttgcgaataccatggggcaaattgaaccagacgtgaattcatgggttcagcttaagaggaccactaccaacggtgattgtgctcaaggtaaagatctcgcaatggctaaagttaatgatgacagcgctgctgttggcttgacatcaagtaacactccaactccagtggaggaatctgagttgcaaaaagacagatggttaattgaggagtattttggaaggaggtcttactgtggtcataccgtaaaaagccccaagagaaagatttgtcgtaggtaaatgtttcctttgatataaatctc

SEQ ID NO: 135830 - DNA, 349 bp, Glycine max
  Clone ID: PAT_MRT3847_93663C.1
ccctcgcgtccggttctttcaaaaggaaacatttctctaatgtcaccaacgcataccaataccaattccgatacgcaattgaggatacaagaacgagctctttccgcagccggtgccgccttcgtgtctgctatcattgttaatcccctcgatgtcgccaagacaagacttcaagcacaagctgcaggtgttccctaccaaggtgtttgtcaaatggctccttttcaaacgaacacgacgccacacgatattagatggtctgcagtttctagctctgagccaccgctgccttgtccttccgtgtgtaaccgctataaaggaacattagatgttctttacaaagttacac

SEQ ID NO: 135831 - DNA, 442 bp, Glycine max
  Clone ID: PAT_MRT3847_93664C.1
gggtcacgagctactagctggctgtcgcccttcgtcctctttttttttttttgattttccaaaaggacccattgcaccgggatgagggctgtgcgcttacttgtcacccacatttgaaaatctgtgtaagagaatgatatcaaacctcaacgtgacaaaaaggctttttcaactatgctacttggggaacatttttacattgatagctgtttatcaaacaacccccttggagcccctgaacatccccgttttgttcttacctgaatatcctaactgtcttaagaacaactaccttatttgtaatcacgccgacgcgcctcccctcgattctacacaaccaacttgtcctatttgggaattttcatacgccccttacaagtaacagtgactccccactatttgctttccggctgaacaatgcaactcccaccttttatacttt

SEQ ID NO: 135832 - DNA, 262 bp, Glycine max
  Clone ID: PAT_MRT3847_93665C.1
caatagcttttgcttctttctgtatatggaaggcacttaaactttctttctatctctctctctgcttcactttctcacttatgcatgttcttgtgaaatcctaattcctcagaaccaaaatcggattcctactgactctgatccctcaaagcttcaaattcaccttgtttggtttgtctgtgtgtttggagtatgatgtcgccgccggcggtggtacacgtgagagaaggggcggagaaacgtgtcgtcgcacgtggcgtcc

SEQ ID NO: 135833 - DNA, 191 bp, Glycine max
  Clone ID: PAT_MRT3847_93666C.1
gcttggagcaattaatcgttttaatgaacgatgtggtcaactgcacaatttcttgcaagatattagaatattttagtttttttttttttttgcaacaacaatttgtagtgcttggagaaaaaacattttctatgtaatgtttgtgtttaaatactctttcatgagttataataaatttgaattctttgtat

SEQ ID NO: 135834 - DNA, 486 bp, Glycine max
  Clone ID: PAT_MRT3847_93667C.1
cagaaaacagagatctatcattaacttcttggtgaattgtacagcagggacaatgttctataaatcaattgatccatccaattttgtgaaatctggtgaaaagacatttgagttgttggactctattgtggaagagattggggaggaaaaggttgtccaagttataacaggcaatggaagcaactatgttttggcaggtaaatttcttgaacgaaaaaggtcacatttatattggattccttgtgcagcccattgcatagatttgatgttggaagacattggtaagttgccattgataaagaagacaattctaagagcaatatcccttgttggcttcatctatagccattcaagtactttgagcttgttgaggttcttcaccaacaaaagagaattggtgaggcatgcattactaggtttgctacatccttcctcacattagaaaggctccataaggagaaaggcaatcttagaaagatgtttgta

SEQ ID NO: 135835 - DNA, 488 bp, Glycine max
  Clone ID: PAT_MRT3847_93668C.1
aacagcagcagtactctctcttctggaatggatctcaccaaagccataaccatcttcatcatcatcaccatataacactgacactacacacatctgacgcaacacaacacttttcactgcatctttcattccaaatacactccaaccccaacatgacaaacaaaccacctttgtcacttcatcattgagttttgtctcaaacaccaacaaccatcctttcctttcccttatggaaattacacaacaaagcgcagccaaagccaaagcttctccttcactttccaagcttgtcttcttgtcttcaaaacttttcttcttactcgtttctattcactctttgtcatggaaatggaagcctttgccccacataggattagtgacggttttccagtttgttgtggtgtaattggaagtgggtatggttcatcttcgtctctagtgttggataaggagaaaggagagcttgtagaggcccctgtcaaattgga

SEQ ID NO: 135836 - DNA, 261 bp, Glycine max
  Clone ID: PAT_MRT3847_93669C.1
gcatgcacgcgtacgctagctgatcctatcgctggaggccaacacgacattatgaagacaccacgaggcgtaaatgatcatagatgaagggcaaggatgaccgatcatataaggcctatacagaagccaacggatatgaaatcgtgcttccttggggaacttcaatagcacatttccaagagctaacgaggccctactgtccatatatgacttgccattatgatgacacctaatacgcctaatctagatccatacgcaatg

SEQ ID NO: 135837 - DNA, 389 bp, Glycine max
  Clone ID: PAT_MRT3847_9366C.1
ggctcgaggcaaaataatggcgggagctactccgtcctgtgttttctgtgcgattgccgccaaatccacctctagcgatactctgctttactccgacgataagggtgttgcttttcaggacattaatccatccgctttcaggcattacttggttgttcctgtggcgcacattcctactgttaaatatcttcagaggaaaactgacgactattctttggtgagtcacatgttagaggtggggaagacgttattaaatagagatgcacctcattcccagcagtacagatttggctttcatcagcctacgctgaactctgttaaccacctacacctccattgtttgtcgctaccatatacacccagatggcgatctataaaatacttgtctc

SEQ ID NO: 135838 - DNA, 202 bp, Glycine max
  Clone ID: PAT_MRT3847_93670C.1
gttgggtgttataaggcacaagagtatttgccgtgccttgtccgcgataagacacttgtcttctgcgtctaaagagatgactgtgagggacgctgtgagctccgcgctcgatgaggaaatgtcagctgatcctaaaggtgtgttgatgggtgaagaagttggggaagtatcaggtgcatacaggatgatgaaggggctgctt

SEQ ID NO: 135839 - DNA, 104 bp, Glycine max
  Clone ID: PAT_MRT3847_93671C.1
atcctgtatagcgagcggccggtccttctcattaacaagccttatgtaagccaaaaccattgttaatcatatacaataggatccccaacaaacactttcgggtt

SEQ ID NO: 135840 - DNA, 848 bp, Glycine max
  unsure (1)..(848): unsure at all n locations
  Clone ID: PAT_MRT3847_93672C.1
atctacaaagtactgatccatcttctctacatctttctctacatttactagacgatggaaagatatctcagtcactataactttataatcaaattttagttatgtagttcagtttattttttccatcttgtttagataaagggcattaggctccatggtgatcacaaagtaatactcttacttaaataaatagtcatttatccacatataattcttcaacgatgcaaggctcttagatcagttagatgtgtctccccaaggtagtggaagggataagaagattcaaatttggcaccaccatgataatttgtatagcatgccttaaatagctcgttgtacctactcatgtcaaagttgtgtgtcttcatgagacgctcttgcttggccttaaaccggtgatggaagaagccctgaaaggtgggttctgtggaggtcttgaggaagaaaagatatgcaagagcgaagccgaatgaggtaacaaagaagcatatgggctccatcacatcccaacttagttcccagaaagtgagcctcatgaacccgagggtctggaccgtcaagaagcccagcccaaaataaagctcagctcggacctgggccttggccttttcatcaatcatccacttttgcttctccatctgctctagctccctccttctagggtcatttggattggctattgattgatagattaagctctctattgattttgccacctcctccggccggagaaaaacggccttccccaaaacgatgacgtctccggagtcatccaagatcttcgcgaactcagccccttgctcaggattctcacacgnctcaacgcnnnttnncaaaaactctgaata

SEQ ID NO: 135841 - DNA, 393 bp, Glycine max
  Clone ID: PAT_MRT3847_93673C.1
ggactgacatgttctcgaaaaacgtgcactatgggaactgggtgtaacgatggttgcctaacatgaatacttccccatgctatgaatgtgttgtttagcaaacttgggaccctaaagcaccagattgattatcagttgcctgtttcctttattgagattcttaatgaagaagtatgagactggctgcatcccttctccatgagtaaaccagaaactgctaacggacatgcaggaaaaatgacctctactgagaagccaccaatacaaatttgtgagacctcaaatggtgtcatcaccctcgcatgatctactgaaattagtgtatctacactaatagaaatggctgcttgcttgtaacatgtatcattgagcagaccaactgggatcacagat

SEQ ID NO: 135842 - DNA, 240 bp, Glycine max
  Clone ID: PAT_MRT3847_93674C.1
tcactgcaccacttctttatataacacatttttttttttaaatttttatcatccatgtttagggtttaaacgttgaatactcattcatggctttgtcttcaacgtctcatgtaacggttttgccgtgccttctaatgggaagtgctggaggaactgactatggtgcatacacttatgagctatctgaggagcctgactggctatccagaaagttaagtattccatcacaggtccgggggg

SEQ ID NO: 135843 - DNA, 101 bp, Glycine max
  Clone ID: PAT_MRT3847_93675C.1
ctggtaaattgcagttaccgccgatagtacagttactgtgtttgaggcaccacgccaatcaagatttactgattgcgttgatcaagaagctgcactctcaa

SEQ ID NO: 135844 - DNA, 1116 bp, Glycine max
  Clone ID: PAT_MRT3847_93676C.1
gtccggattcccgggtcgacccaccacggcacgcggccggttggtgttttgcatgttttgttggatctgcctgtaatggcctctagaggaactggaacgctgattttggtttgtctcttatggcttttcttcctatgcgccaccatagctttcttgcagctcaacttcgtagacaaaggaaccaccaacaacaacccttcctctcgcagtagtaacttcatcgcaactcaacagcatagcgctgatacccctttggaacaggatttggagggtgtcacccacaaggtgtattttgatattcagatccatggcaaattagcgggtcgcatagtcatgggcctttatgggaacacagtaccgaaaactgcagaaaactttcgagcgctttgtacaggagagaaaggagtgggaagaagtgggaagtctcttcattataaagggagcacattccataggattataccgagctttatggtccaagggggtgatttcacccgtggtgatggaagaggtggagaatcaatctatggtgataagtttgctgatgaaaactttaagctgaagcataccggaccgggatacttatccatggcaaattctggggaagacaccaatggctcccagttcttcattacaacagttaaaaccagctggctggatggacgccatgtcgtatttggcaaggtactttccggtatggatgttttgtacaagattgaagcagaaggaagtgaaagcggctcgccaaagaacaaggttgtcatattagacagtggagaattaacttcatgacatggtttatacaagttgagattgattccacagccatgattcacaaattcggtgtgcatacttcatcatttagtgaatgaataagtttgcagatgttcgtgtaatttaaggctatattgatgctattttgcttgtctacactagtcttgctcctagggaaggagttttattagggattgccagagtgggtactcattaacaatatacatcaggctgaagtgcgttttctgaactattttttttttttttaaatgtagtaggtacgaggataaattatttattcaagtgcatcatataccatgtcttttgctaaaaaaaagaatg

SEQ ID NO: 135845 - DNA, 226 bp, Glycine max
  unsure (1)..(226): unsure at all n locations
  Clone ID: PAT_MRT3847_93677C.1
gttgtaaagctgtatagattttattctaaactgtaaactggcatgttgcaatgcgatatgtcagtttacagtttagaatataatctgtagagctttaccagacataagtcttgtaagaactgctcgtgttccggctcagagtattcgtgcacacaaagtaaattatcttgctttcaccaagcccannaatagttgtagagctgtatagattttattctaaactgtg

SEQ ID NO: 135846 - DNA, 936 bp, Glycine max
  unsure (1)..(936): unsure at all n locations
  Clone ID: PAT_MRT3847_93678C.1
tttggattcaagggagctctaaacttcgtagacaaaggaaccaccaacaacaacccttcctctcgcagtagtaacttcatcgcaactcaacagcatagcgctgatacccctttggaacaggatttggagggtgtcacccacaaggtgtattttgatattcagatccatggcaaattagcgggtcgcatagtcatgggcctttatgggaacacagtaccgaaaactgcaaaaaactttcgagcgctttgtacagtgatcagttggaatcaatcttgatatgtataattcccttggtagtaagaactacaaatttgaacagcatctcatttcaggagagaaaggagtgggaagaagtgggaagtctcttcattataaagggagcacattccataggattataccgagctttatggtccaagggggtgatttcacccgtggtgatggaagaggtggagaatcaatctatggtgataagtttgctgatgaaaactttaagctgaagcataccggaccgggatacttatccatggcaaattctggggaagacaccaatggctcccagttcttcattacaacagttaaaaccagctggctggatggacgccatgtcgtatttggcaaggtactttccggtatggatgttttgtacaagattgaagcagaaggaagtgaaagcggctcgccaaagaacaaggttgtcatattagacagtggagaattaacttcatgacatggtttatacaagttgagattgattccacagccatgattacaaattcggtgtgcatacttaatatttagtgaatgaataagtttgcagaatgttcgtgtaatttaaagctatattgatgctattttgcttgtctacactagtcttgctcctagggaaagagttttattaaggattgncagaatgggtactcattaacaatatac

SEQ ID NO: 135847 - DNA, 277 bp, Glycine max
  Clone ID: PAT_MRT3847_93679C.1
gttcggaatgtgaagcaagtttgtgttcacatgtagagagctctctctctataaaagcgataaggtccttcaccaggaccaacatcaggtctccctggatcgcacagcttgtgaaatccaacccagagaccaggtatcggttcatggatacctacactgttatacaaatacaagcatttattcttgattggtacaacatttgggcttaaggtgaaaacgaggcggattgagtgattgcttcttactgcatagctttggctactttttggtgcaaatt

SEQ ID NO: 135848 - DNA, 573 bp, Glycine max
  unsure (1)..(573): unsure at all n locations
  Clone ID: PAT_MRT3847_9367C.1
cttggtttttttttttttttttttttttttttttttttggtttttttttttttttttttttttttttttttttttttttttttttttttttttttttttttttttttttggggcttggggggggggggggctccccgttgggcccgtgcntctctttccggggggggggtggttttgccccnttttttttttttttgccggggaggggaaaaaacaactccccgggttggttccggcccactttgggggggggggggtggtttttttgaagggctaaaaggggggttgggggggcctttggtttttttccccaacctttcgagcgttttttaaggccttttctgggggcggttttttgattcctttttaacctcgccaaggcccccggtgggggaaaagttctccgtggggtgatcattttgggggccgggggcccttttctttaaggtttttggagggggtgaaccctctggaaaggaatttgtgggggggggcctttgcggtgccaatggggggccggaaaaaggggggggtgtccgaaaaggggggccgccggcgggggtgtggggggtg

SEQ ID NO: 135849 - DNA, 387 bp, Glycine max
  Clone ID: PAT_MRT3847_93680C.1
ggctcgagctctaaatctcttcactaaaatgagttacacacaccaacctttcatgtacgtggaaacgactatgtggctattcaacggcatcttataccaacaatctctccgcgaaacaaagtcgaccggcattcgctatgcacagagagcgaggaggcgtaagcacctaatacgaggctacttccgttgattctcaccgactacgtggcctcctctattaacagctccaacgatcatgagcagccacataccaaaccgccgcgcccatggacgaggaggaccgctcctcctcttccctattagccgccgttcatgactaacgctccgcttccgtcaccgcccctatttccaagaatttcaacgcttccgactaggaatctgcaacag

SEQ ID NO: 135850 - DNA, 616 bp, Glycine max
  unsure (1)..(616): unsure at all n locations
  Clone ID: PAT_MRT3847_93681C.1
atacttcatatcactaattctaacaaactaaaatatattatcaaaatcaacttacccagcaaaatttcaaaaaagaataatacaagaagcctaaaaaaaagtgaagaaaaaaactgattatgctatacaacccgaggaagcaaagaccaacgaagtagataaacgctgcctatacaagatcattcggtgtcgaggggtacaacgaagggtggcagttataaccaagctccccaaccaggaaacatttgacacaatcgctcagaatcaattgcatcttggatgagttgttgtacctgcccatggatgcttcgcatttcgccatcttcataaccatcaagcttttgcttgacacggagaagtgcacgtgcagcatccttatttccttggcaatcatgttgtggttcctccaaacttgtatccaaatcatcatccatttccttttgacgctgcaaagctttcagaggagataaagcccacttataagagggatcgtggataaaaacttccacaattgtcagcaatgctttcttttgtttgtccgcatacaggagaagtgtttcctcgcaacatcttncgaaaaccccctctacaccagttacccccattccatcaatta

SEQ ID NO: 135851 - DNA, 262 bp, Glycine max
  Clone ID: PAT_MRT3847_93682C.1
cgagatctaggcgagggccacttcggcaaggtcagcttgtactactacgatccgaccaacgacggcactggcgtgatggtggcggtgaaagcccacaaggcatcgtgcggcccccagcaccgctcgggctggaacacgagatcgccattctgcacacgctctagcacgagcacatgcatcaagtacaagggctgctgcgaggaccaaggcgagaagtcgctgcagctggtcatggagtacgtgcccctgggcagcctccgag

SEQ ID NO: 135852 - DNA, 491 bp, Glycine max
  Clone ID: PAT_MRT3847_93683C.1
cggccggagtacggttgcgagaagagacagaagggggtaagacaaaatcaacccttacttatggtgttgagcacaaagaacaaggaaatctttggggactcatatgaagacatgggacacttagaagttaatggtgctttaaaagaaaaaaacttaaaaaagagaagctgctgaaggtattatcggaactaccacaataattaaaaaagggttttaaacttacatttgactaatataaaaaattgaaaggcagaaacaattgtttattaggcgaaaaaagcaataaaaccttgaacaggaaaccatcccaagttcatagctttgaaaaggccaaaaacaccaaatggaccactagtacaaatagtatggcaaaatgttaccttggtaatgtgctcaaaaccatgaactgatggaaaattgtttacccccttctgacgaattataaaaaacgaactcgcggccgaattactagcgaactcacccacccatga

SEQ ID NO: 135853 - DNA, 582 bp, Glycine max
  Clone ID: PAT_MRT3847_93684C.1
tattctgttgtttagaatactatttttgttaccaaaagcaagtattatgatatttcgttcaaaatgaaagaacaaatacatgatgaaaaaacttggctacaagtattaaatcttgatgcctaacaatcttaatgtgtgagcaacaaaatttatttggtgcctaacaaaaactcacccttacagtttgaaagatttgaaaaaagaggtatacatttaaaaagaatcacatgtaaatcaataacccaactggaattagaagcaaagttgccaactaccatcttgcagtcactctcaaaaatcacgttttgataaccaagtttccctatccatttgagagctcgataaaaaggccaaccttcaacctcggcaggtttggaatgccaccaaaagtttacattttgcattggatgaatttgccatgctcccctcggatacagatgcctactccaaaagattgggagtagttgaaaatggctgcatcgaggttacatttgataatgccagccgcaggaggagtccaaagagggttctggttggacgagcttgatgttgctgaaaaatcaaaccggcatggttggagaa

SEQ ID NO: 135854 - DNA, 1098 bp, Glycine max
  unsure (1)..(1098): unsure at all n locations
  Clone ID: PAT_MRT3847_93685C.1
gcccgtgcgaacccggggtggggccgccgccgctaccttccccctgtcgccgagtccgtccgccgcgccctccactggccctgctcgccctgtggacctgttccccgcgcttctcgatctcgcacttcctgtcgccatgaaggaggcgggctcgggggatcctgcgctgttttctctgcttattgatgccttgaaatgtggcactattcaaacaaggagtaatgctgcggctgctattttcacgttgtcggctattgattccaacaagcacatcattggagaatctggagccattaaacacttgcttgagcttttggatgagggacaaccattggccatgaaagatgctgcttcagccatatttaacctgtgtcttgtgcacgagaataaggggaggaccgttcgagatggggcggttcgggttattctcaacaagatgatggaccacatactagttgatgagttgttggctatattagcacttctctccagccatcccaaggctgttgaagaaatgggtgattttgatgccgttcctttgttattgggggttattagggagagcacatcagagagaagcaaggaaaattgtgttgcaattctgtatacaatctgttttagtgatagaacaaagttgaaggaaattagagaagaagaaaaagccaatggtacactgacaaagcttggaaaatgtggaacttcaagggcaaaaaggaaggctaatggtattcttgagaggcttaatagatccccctccttaactcacactgcttagcgaaattaaggttccaggattagaaaatcacctctttttgttaatagtagttttcttgtgttcttctgtacaaaccatctcgggtagctgtaaaaatgagacagagaagttcacatattatgtacagtgtctcacttacagtccagggtgaatgagcaaagagtttttttttatttgttcctttatttcatttctgtttgattctttaatatccattatgaaaaagcacttttcttgctaaaaannannnnnnnnnnnnnnnnnnnnnnnnnnnnnnnnnnnnnnnnnnnnnnnnnnnnnnnnnnnnnnnnnnnnnnggaaaa

SEQ ID NO: 135855 - DNA, 140 bp, Glycine max
  Clone ID: PAT_MRT3847_93686C.1
cttcgagccgggtttggtcgagattgaccctccccgcggaggaatcttagtggacattactggagaatgggtcacacttatacaaaatgctccaattaataacttggtgagagttgctgcttggaagaaaggctgtttaa

SEQ ID NO: 135856 - DNA, 381 bp, Glycine max
  Clone ID: PAT_MRT3847_93687C.1
aaattatatagattatagactctgtttataggacaatataaactataatgctgaaattatcagcagtgtagagactgtgtatacataaaactcatatatataaggtactgatcgctaatctgggtgcccatcaattgaaaactgggctgagattttcggtgctctagtaagactaacgtctgcggcaattgcaatggctgcgcaatgtatatatgaggatatactcaagatcttttagatccagaagcctgcttatagtcctgcggtttcagatgccccagttgtcatactaaatacagaaacaggagagttacgagtgtaaactttgagtgacacggtgtactgatatatactatggcggatgctcgaggaacaagcatt

SEQ ID NO: 135857 - DNA, 255 bp, Glycine max
  unsure (1)..(255): unsure at all n locations
  Clone ID: PAT_MRT3847_93688C.1
cctgtgggttggggttttttttttttttttntttaaccctaaagccaagttaacatagaatcaaacaaaactcccgtttcaacattgtttttcctccttttcctaaataaaaacaatgttttaggggctaacagaggattcataaaattttccgtttaaaggaagtaacccttcctggggggggaaaaaaaaaccaaaatgaaaccccgcctctctttgggggcgtagaaggttctattggtgggggaacttttt

SEQ ID NO: 135858 - DNA, 259 bp, Glycine max
  Clone ID: PAT_MRT3847_93689C.1
ctttgcgataatgctggatttgatgccactgacgttctcaataagctgaggcagaaacatgcatctggtgaaggtgctaattatggtgtagacataaacactggcggaattgctgattcctttgcaaactttgttgggaacctgctgttgtaaagatcaatgctataaatgctgcaaccgaagcttcctgccttattcttagtgtcgatgagacagtgaaaaaacccaaagtcggagagcgcacaaggtgaggctgctg

SEQ ID NO: 135859 - DNA, 1421 bp, Glycine max
  Clone ID: PAT_MRT3847_9368C.1
aaagctgtggatcatagcgtagaccttttgttctaaaaccacacctcattccattggcatcttctgccacctgtttctaactccccaacccaagaaatttccttttacccctttcccctctcctcttttcttattcatcaaaattcctctttggtgtcctctccctcggtcaactccgtttactataaatatgaccactcttttcttcctcttcttcaacttcaatactcacctttgaatggattctaattcttcttctccaagtcccaacaaccacgcttccacaaccaaaatcaacggtttctttcatcccaagctgggttcccaacctgccaccagctcgcgatctcgtcttgccatggcttctcctgtgaactccgatcctaaggtcgtcaccggcacagccggttacatcctcgaagacgttccgcatttcaccgattacattcccaatctcccaacataccctaatcctttgcaagacaaccctgcttattcagttgttaagcaatattttgtgcatgttgatgacagcgttcctcaaaaggtcgttgttcacaaagatgctcatggaagggtacattgtatatgctgagaatccatgtcaatcataactcattgattctgatgccactcaaagaatgacatgaaaatatgttaactaacttcacggctaattaagcacaacaacacaccgcccccgagagtgatttagaaaatattcctagcaattggcagttcacaaacaattggtctggacggtgcttgaggggagacattaggaacaaaggaaggatgattcccttgctggttatgagtgtgagcacatgcagaggtgttttggctttgggatattcccttgccggctaatgacattatctcctccaatttttcagcaggaaaatcatcaaacacaacaacttgcccagcataaaagattgtcaactgagcagctttaggctccttctctatagacttaaatgcacttgatttgaccatggttggaacctctgagtggtgaggataagcactctggggagataggaaatccacagtagttgggttccgttgcttgatgatggtgggaaacaactccatggttgttgcagagtgacacgatgtctcaggggaaccgtaagtatcgggggtgcgagtcatcccgagggtaaggtctccgaaggcacctttttccttgatgtattggctcaatagactacaagtctgagagaaagtggacttctcggccggcgacttggccgggtgggggccggaaaatgccgaatattccgatgagctggacattcttctagccggtaaaaatgaaaatgaatccagagaaacagaaaaccgaaaggaatcgttgttgacggcaagctctgaggatggaagaagctaatcccacgcgtccgcccacgcgtccg

SEQ ID NO: 135860 - DNA, 245 bp, Glycine max
  Clone ID: PAT_MRT3847_93690C.1
aacgcttataacttgtttggaaatgcttttgacacacatttgcaatgaaaagtcatgtctttgcccaagcaatcaagtacttaattttgaagtttatattgttgaatgtgataagttgcatcccggaattatttcgagacatatcctatatcaactttaataacaaagacaactagaccacctgttcagcgtaaaaaaaaaaaaaaaaataaaaaaaaaaaaaaaaaaaaaaaaaaaaaaaaaaa

SEQ ID NO: 135861 - DNA, 153 bp, Glycine max
  Clone ID: PAT_MRT3847_93691C.1
aaaggcggtcactagaagccctgcaagtccgacgccattgatccttcttctgagactgacgccgccgacaacgttagcgcttcagcggcgcccttcggcaatgatgatctttgaataacggcttcttgaacccccttaaacttttcttagggg

SEQ ID NO: 135862 - DNA, 318 bp, Glycine max
  unsure (1)..(318): unsure at all n locations
  Clone ID: PAT_MRT3847_93692C.1
tnananncgacgtacgtaagctcngaattcgnncnngancggntgcgnnancaagacagaaggggcnccactgncaagggngnanttccttggtantnaccnnntngtatantggngcngtagatagataggcgnngagtanaccaagnnnnataatttcttnntaattaannnnggatagtangagtatcnnnggtatnntatcnnatagggnancatgannttcgattagnggttggnattagcgtgntaggatgggntttgntgtagactttctttnatggtagctatatgtgctgnagcccggtcgncccctcn

SEQ ID NO: 135863 - DNA, 286 bp, Glycine max
  Clone ID: PAT_MRT3847_93693C.1
tttctctcttccaatctcatttctcaagatcgctttcgctgcttcctcatgaattatgtcttttgtgccgaattatcaagcagacgatcgtggtttaaatagtaggaaccggtccagcttcgctggaaggaactatcgtaccatcactaggaaaggattgcggaatacttaggagtccacgaattgtcagattcacaatcacaaccggattgcattcggcgacaattttaatttttacaatgccgatgatgacgaagtatgccatataggatgccgtccgactacc

SEQ ID NO: 135864 - DNA, 201 bp, Glycine max
  Clone ID: PAT_MRT3847_93694C.1
ggctcgaggctgaccggggtggagcgcaagttcttttcaagcttcgacactaactcacaaggtgctagtcgaatgtccagtgacatggtttactaacctgagcagatggatgcatgccctgagatgatggaccacgcactcgaaacctggaacgacggttacggaaccaatgactaactgttcatcatgtgcatagaaacc

SEQ ID NO: 135865 - DNA, 548 bp, Glycine max
  Clone ID: PAT_MRT3847_93695C.1
ccacgcgtccgatttttttatcttaaaaaggaatttagggataaaatagtgattttggatattggagggaagaaaatcaaagaatttttttagggaccaaaatcattttttttttcatttcataaggattaaaaaaaataatttaaaagtttaagcctataaaaattaaaattacctaaaagtttagttagttactgagagtgtattgttcatcgaggactaaaatatattttccatgttcgaacatgatatacatgttaaatttctatgccaaaatgtatttcacaagttgatggaccaatacatcaaggggcagctattcacaccacatattgctcttcctgctctctagttttctttattttctattaaaacttgtatgatactcatgcctccgcaagtgatttggttgttttcgtatgttttataggaaaataaatataacatattcattgattaagatcattgctgctaaagaaatgaatggttaaagaatgattatttatcacaggagcataggtgagccgatcaaccacagcgcgcgacta

SEQ ID NO: 135866 - DNA, 322 bp, Glycine max
  unsure (1)..(322): unsure at all n locations
  Clone ID: PAT_MRT3847_93696C.1
aagtactaattatgagctaaccacnaaaaccaagctgtcgatattttacccaatacagaccaccccatcgactcatcaacattaacttatacaacaatttttattttttaataaaaaaggccttaaaaatcacaaataataatttagtccattttaatataacaaaatctatctcaccatcatttgcttgaattaaaatatctgcacaaccctcatcacaaattgtatcgatcaaacaaattgggtgacaaaaccaaactgctgctattcaaataagagtgcatatttagtcatttaacaaggcataccaacaaattgttaa

SEQ ID NO: 135867 - DNA, 309 bp, Glycine max
  unsure (1)..(309): unsure at all n locations
  Clone ID: PAT_MRT3847_93697C.1
aacagactatatncctaattactatctttttatatcctctcaccaaactctattgctcctggggctaaataaaactgggtcgccctccacaccagttcttctctctcccatttgattgcgaacgcctcaccttaaagtctcattcatgtcttaccacactactatccatgttatagcatcccagcttcttgcaaagtatctacctttaaacctaaaaaatcccacccccttatcccacttactgagctaactacatctccagacatatcagaaagctattaaaatcccatcttgcggacctgcacctta

SEQ ID NO: 135868 - DNA, 202 bp, Glycine max
  Clone ID: PAT_MRT3847_93698C.1
gtgctatgaccaaatggggccgcggagcagtcaccactgcaagaaatggtaaaattcgtaccgattgctcgggtctataacctaatgctttagtcgaacgtagcaagacctacacagtgcatgttttggaggtgaacacacaccacacacacacattgaaatgcaattgcaggaaacttgccctgggtagacgacatagaca

SEQ ID NO: 135869 - DNA, 702 bp, Glycine max
  Clone ID: PAT_MRT3847_93699C.1
cggctcgaggatctttgtttcaacaaatctaaattttttgctgtaattttggtttcccatttctcccttatctctctctctatccatagtctctttcctcctttcctcatccctcgctctctgtaataaataataattattaccaactcttccgccattggatctgcccttccttccccttctggcaaaaagggtcagtctgctcctgggattacatttttttttataattttggaggagtgctggtgcttggggaaaatagagcttaggaaagaaaataaaaaaaattggtggctaataattactttattattgtctggatctgtgtaatgtgcaatcatatagaagatatcttagttggggttgagttgtattgcaagttgtcttgatgattcatgatcaattaaacccttagtacataacatctgttgaggaggtcattttgtataatgggttgagtacaaaggtcaggtttctggggggagtcgggaggaaattctacagaataataacaaccaagaagttggattacgattttgtgagtttgggatggatcatagaagtgcaatggatagggctactgaatttgatcttgaaagtggattgccactaattggagatgattcaaagaaagtctctgctcctagcacggctagcagtgcaaaacaaggaaaggcattatttgctaaggtttctggtggg

SEQ ID NO: 135870 - DNA, 1145 bp, Glycine max
  Clone ID: PAT_MRT3847_9369C.1
aaatcagatatatgttttctacttcattacaggcacaccataagcctggggacatcaaagcttacagaaagaaacattattgctgcagtatacatttataattttcgtgtaatctatatgacaacaatctcaagcaggagcacctaatggttgtaagagattaatcagttgcctcctatggtttctttatacaaaaggtgaatgcttgaagattggcgggaccgcacttgtaatacctaaacttcgagttctatgccttgaaacaggacatacagctaagtagagctgcattctatcgacacttactagataaaacttacatacttacatccaagatgagattatatattcagtttcatatagctctggcatttgattagtattcttgtacgaaattgtgcttcttgtggccttcaaagagttgtcatcgatataataacacaatagttcttcacaacaaaattactagcttattttacaaaaagccccacatatggcacaacatacatattaaacacattgttgatttgatattaatacaaacaaaattatatggcgaatcacatatttatccatggatggttttatatgaccatagcattacaattggaaactttccacatatggtgttacagttcttcatgatagttgtgttacagttcgtcatgatagagtatttcctccaacaattttttcttcttacaaccccaattgcatttggtgttgcacaaggaattaaacagtgcaagcctagtggattgaagttgtataatgcttgaggtagaaggagattttgagagaacaattgcatacccatcatccatgttatcggttccatcaggaaaaaattgccacaaaaggcttccagccccactccctcctttctttgtggagtttaggatggtactgtacacagtgcttataaccgtgtctctatatgatgaattatagccagggtctttggaagatacaccaaactccgcaaaaacaactggcattccaagatacctttcagcatcctctatatgggcttccatccatgattttacaaatgggatatgtgtatcagcaatttgttgtgaaatccaagagtcaggatacatgtgaacagaaacgaagtccacaccaagaaccaggtgggttcc

SEQ ID NO: 135871 - DNA, 400 bp, Glycine max
  Clone ID: PAT_MRT3847_936C.1
cccacgcgtccgaactttttagtcccttttagttaaaaaaaaaaaaaaatacatctttgagtccttccctcaatatggcattaatgggatgtgcgactgacagatgttttgcaatttgtggtggtgtttagccaccagaaattgattttagcatttttgaacatcaaacacaatttctagaatcttgtaaagaaaaaaaactgcaatgcattccaaaatcccaatttccagatttacacaaatctgttttctagattcacaacaatttgaaactcccttgtgaaaccataaaacccccatcagattccacaaattcaacacttccaaatgtttccacagtatgctctttgcaatcaacccctcatcactcatgactacgatctggagccccttcctttta

SEQ ID NO: 135872 - DNA, 202 bp, Glycine max
  Clone ID: PAT_MRT3847_93700C.1
atgctcccgggcgtcatggccgcatgattagcgtggtcgcggtctagtattaaccgtctagcacagattaggcctggtgcccgttcatatgacggaagtggcgactagcaacgttgtgcacgaagacttatggcgactagcttaacatgttgatcagcctcttattgactatataatcaatgtcctcgccgatgaatcattt

SEQ ID NO: 135873 - DNA, 283 bp, Glycine max
  Clone ID: PAT_MRT3847_93701C.1
tttctcctttttttgcacacacacaaactcaccaaaaacaataggtgcctatttacagagacttagtctttattccctacaaagatacatgacgatccaacatacatatattcaccgctggtctcctccaacaaccaaagtgcacttacccccggtcatttttgttttaagccacaacctcaactctttaaaggcaaagtgtaaggcccacacttgtaaccaacagggccattatccaggttacaacacttggggatggggaccgcccccttaagggccgccc

SEQ ID NO: 135874 - DNA, 227 bp, Glycine max
  Clone ID: PAT_MRT3847_93702C.1
gtactgtaaaatgtccaaatatctatacgggggggggatttgtataggacataacatctcaaaattcataccactatcccacaaaagaaatcaccagaccaggtgtcaatatttatcaaacaccctgggggaagatactcatccaaatattctactgataaagccgccctgggctttgctatcactattcatcctgttgtcaataggtgggaattcactcatgttat

SEQ ID NO: 135875 - DNA, 243 bp, Glycine max
  Clone ID: PAT_MRT3847_93703C.1
gccatgtgttcaatgggttgatgacaaccttaagcaaagcaaagaagattgttttgctcattcaatggaatacgatattgagactaatcaagttcgagcactcacggtaaagacagatccatggtgctcatgtggaggacttacacctgatggtaccctagttgttgctggtggttttgcagacggagggaaaacctccagatactatggcggtcaacctgattgccaagactgtgactggag

SEQ ID NO: 135876 - DNA, 541 bp, Glycine max
  Clone ID: PAT_MRT3847_93704C.1
gggggcggggggcccaaaaggaaaaaataagttttaaaggggccccaatgggcagcagtagttagcaatggccatatgggggggaaatttagctccctaacttttatcacatcctaccaaattttatacaaaaattggggggaaaaattccaacaaggccccgattagctttgggggagcagttcaaacaaagggggaaaaaaaatcccagggtggataagggggggcacccacgggcttaaaaacgcttcctttataacccggctgggaccctaaaatccataatcgggaagcttcaaaaaaccaaaatagggggggataaaaacactttttactctaaaaatctgagatctgacaaagcatagtcagggcccttgggaccctggataaaatccagatgcgggggaactggcactatcaaaatcacttgaagaaaaaccaaaatcactggtggagctacgggaactggttgacctactcccattatccggttggtttctcccttgccaggcaaggggggggggaaacccctttcatcggg

SEQ ID NO: 135877 - DNA, 304 bp, Glycine max
  Clone ID: PAT_MRT3847_93705C.1
gagtggtggatatgatttatgtttccactaccacccgacttgtgatgttcaaatgggatgatgtttgcggattgatgatagagagactgatctcgcttatgctataaaatgagataatgaaggatcactggagaaatcgggggagggtgagtgctatctgactgaaccagatatggggtgataagccattgaataggaactgccggccatcagagaacagctatgtggacagatgcagtggatacagctttagtgacctatacaccacgagcaatcaacactatggtgatctccattgacaatt

SEQ ID NO: 135878 - DNA, 340 bp, Glycine max
  Clone ID: PAT_MRT3847_93706C.1
cggctcggaaaaaaaaagattcctcaacttgaaagtgggttctgcttcactgaaaaacgggccattgtttacatgctcctacagggcttatatgtggccttacatcttttggacaaggcgttgcctctggggtgcatcagttttggaaagatcccttgagtgacatgtcttttctttgtaacccagtgtgtgacgtctcttaacttaggcttgacacgatggtcataatctagcttactgtctcattaacttctctgtgagcctgtggcctttaagacctcccgacctgcctcggacctaggctatttgttattgaccttttttgcattcagttcacacg

SEQ ID NO: 135879 - DNA, 406 bp, Glycine max
  Clone ID: PAT_MRT3847_93707C.1
ccccaaaattttcccaccaaagggatttgggttggggggaaaaacccccttgggaggggccggggggggaaaaaggaaaacaggggcccccccccccgggggcccaaaaaaaagggcccaagcccccaccaaaaaaggggttaccgggaccaggggaaaaaccccccaaaaggggtttttcggccccccaaaaaggggtcttcccttcccaaaaaaacggggggaattaaaaaaaccccccggggggggggggcccccccctaaaggccctttgaaacaaccctcccgctcgggaaaaacggggaccaccgggggaaaggaccgggccaaatttaacaaggaggaaagggttccggggcccttgaaacaccccaggggggaccccaagcccgggcccaaaaacccc

SEQ ID NO: 135880 - DNA, 226 bp, Glycine max
  Clone ID: PAT_MRT3847_93708C.1
ctgttcgagtctcacagccgtgtgtgtcttaacaaaccaattcaacttccgcctccggtcgtttccgccgctgagagcgatgtcctccgtcgaaacggagattgagccaatcacgtcgggggcgagcaacgcataattccgcttcttaaagccccagagcctcctcacttcgtctacaccttttcctttcttcccctgtttatatcctcgcggcgacgcttcacgc

SEQ ID NO: 135881 - DNA, 438 bp, Glycine max
  Clone ID: PAT_MRT3847_93709C.1
ccacgcgtccggaagacagggagtcagaaattgatgagtttctgattggagaaagtgttgaagaagaggttgtagaagaaccaaactgggtgttaagtactgaggagttgaacaaaaaatttgatgacttcattagaaagatgaaggaagatttgaggatcgaggctcaaagacaattactcatggtttgaatttgattagaaacaattatgatatttttcttatgccttttaattttaattttaattttaggatttgtaggcctagttgttagccccctccccctctacttttgtagtattacagttgtattccataaaatttttggatttagatcctctaagatgaggagtgcactttagagtaacatatagaattgtaattattaatgagaaaacagtgtaagattttattaatagaatacatacagtgaagcat

SEQ ID NO: 135882 - DNA, 515 bp, Glycine max
  Clone ID: PAT_MRT3847_9370C.1
aaaataacacacacttgacacattattgcgacaattaaaagaggtgtggaaattttcaaatgggcatatcatactccacaggagggtgatgcctaattgcctttattgaattaaacaaacgaacaagcgaaaaaaaacacaaatcccagatcatgcagaggattccgccttttcaaaagatctggcagtagcctggggaacagaaaaagctggcataagattattaccagcaatttcaaaatcttgagagattcccaagagaacatcaaaaactgttgactgtttgggattggcattaaggaaactcaaatgccatgaagtttgatttggccactcagaactccacatttgaaaaccattattaggaccacatacctctattgggaagatcaattcccaagaatgtggttctgattttggccacttacatgcatcaaaatgctctgcacgggagctggttgttaaaaacacttgtaccaatgaggcccaatcactccttttgactgctggattcc

SEQ ID NO: 135883 - DNA, 307 bp, Glycine max
  Clone ID: PAT_MRT3847_93710C.1
gggccttaagggaaaaaaggttttataaatcccaatttaaaccattcccaaccccttaaaggccccttaaaaaaaaagggaaaaagggccccctcgtggttggggcccggggctaaacccctgggaaaaaaagaacccacaatggcttttttatccccccaaggaaaccttgttttttgggcaaaaccccaaccaaacccttggggacccccccccccaaatttaaaacccaatttcccacaaaggtctctaaatggagcaaacccccattttttcccggggaaaaccttttcccccccccccaggg

SEQ ID NO: 135884 - DNA, 260 bp, Glycine max
  Clone ID: PAT_MRT3847_93711C.1
actccggctttgttttttggggaaacaaaagggtagatggactcttattttttggagtaacgaactcaagtatcttatctgatggtttatagaatactggatactgacaataaccccttaaattatgaaacttatttaattgagcccctaaccttttttttttaacaaaaattcctgcttattgggaatcccaggactcaagttcttgaacaaaaaccctaaaaaaccccttcttttggtttttgggccacggccaccca

SEQ ID NO: 135885 - DNA, 628 bp, Glycine max
  Clone ID: PAT_MRT3847_93712C.1
gattggaactttacttactggaagccatatcatttgctttactcatcaacaaaatacaccattactagagtctttggattctatcttgcctcgaaaattgtaagggatatctcattttgtgataatggattacaagttttagatgaagatactaattcaggagtacagtttcctgtgtaaaatccaggagcctttggcagaggcaataatttctcaccattcagcataggaatgacagaagacatatccggcctatcttgtggtttttgttgaacacacaacaaacccacatgtatgcatcttaagacttcaaaaggaatgcatctttcacttaagtttatatctatcagctccaatggcctgtcttcagaccatagtctccatgcatgtccaagaagattaacagagtgttccgggtcagaaaatcccctgttcttgtttccactaactatgtctagtactatcacaccaaaaccaaagacatctgatttcacagagtaataaccatgcacagcatactctggaggcatgtaaccatatgttccgaccacttttctggggttggcttgactttgatcccagccaaaaggtcgagccatgccaaaggctgagattttaggattcatat

SEQ ID NO: 135886 - DNA, 249 bp, Glycine max
  Clone ID: PAT_MRT3847_93713C.1
gttctacatcgcgagcggccccccttctgattgttcccaggcctttacctattgaagttatggactctcttgaacgcctggctaagaatacaactgaggccacgattcactacagatgcgataatcttacgactgatttggccaactatcttactgagttatcataggcagtctaagaaagaccgaggagtctttgccattgccttatctgggggttctctcattcgctgaatagaaaaactctgtgaa

SEQ ID NO: 135887 - DNA, 213 bp, Glycine max
  Clone ID: PAT_MRT3847_93714C.1
ttgaaatttagggagcgttactcaagaagcaaaatcatagtttttggctttggattaatgcctgagaaccactggttttcaagcaacaatgtattgttagaaatgatgcagcagggtttgtgtaacttttttaaaaaaaaaaaaaaaaaaaatataaaaaataaaaaaaaggtcgaacggcggatggggcgcttctagatccgggatttaatt

SEQ ID NO: 135888 - DNA, 255 bp, Glycine max
  Clone ID: PAT_MRT3847_93715C.1
ccacgcgttcgtttattcttttttttttttttttattctatagtatttattttgtttttggacgcttacaatttattaattctatgaacatctaccaaaaggtgctgaattggaaatcattttagaataaacggtcttgtataccaagaggtatacagagctatcttgtctcacgtgacagcacccgtccgctaggtgatgaaagaaacaagaggcccgaaccaagtgcacaaacaatcaaaaggaatggcagca

SEQ ID NO: 135889 - DNA, 2283 bp, Glycine max
  Clone ID: PAT_MRT3847_93716C.1
acttctcaatcaagctgcacttaataacctaagattaagtcatagttaatcacacttgcttttggaggtcaaggtttccttaattcacagggcttgccttaatagatattcatgattctgtgatcttgctgttttttcctctctttcctcgtcttgtggcttgcttctgtctggtttggcaatatatacttggtaaatacattaatttattcattttattggatctgtagtaggaattattgctgctacacaagcctactacttctctctgtttctctagtttatcctatcagaattatgttgggtgcaacttatgatgtctgtattggattcccgaattcggctcgagcttttatcccatttattgttgctttcttttgttccttccctaggaaattttctattgatgtattaagatgcagaagaggtaaccgtgtttgttcattcactttcctaatcctagaaccaacgaacgaacgaagacactgcaatctagaaaaaagttttgaactttgatgcacggaaagccttcatgcccgaccatgacatgtaccattttgatcacatggacgaagacgatttttttgacgaaattgatgaccaaaaccatggtaggggtgttggggatgctgctcttgatgaatatgagatgcttactaaggtgactgatacaacagctgctcaagcaagaaagggaaaggacattcagggaattccatgggaaagtttgaacatatcaagggagaggtacagattgacaaggcttgagcaatataggaattttgagaacattcttacatctggggatgctgtggacaaggagtgtaagcaaatggagaagggtgggaattactatgaattcttctataatacaagaatggttaagcctaccatccttcattttcagctgagaaacttagtatgggcaacttcaaaacatgatgtctatcttatctccaactactcagttaatcactggtcatcattaagtggtaatttgtctgagataatcaattttgctgggcatgtggccccgacccctactaagagatatgcaggaaatttgttggaaggattttctcagacccagattagcacattagccgtcaaggataatcttcttgttgctggtggcttccaaggagagcttacttgtaagcgtttgaataagaaaggagtaagcttttgtacacggaccacacatgatgataatgctataacaaatgcaattgaaatatatggcagcttgagtggtgcaactcatattattgcttccaataatgattgtggtgtgagagaatatgacacaaacagctttcagcctttgaataaatatcacacatcaatcagtagaccggaagcttatgactgtgttgtctatcctcaaaatgggaagactgttgccaattttgttggtcatcgagattactcttttgcttctgcatggcatcccgatggatgtacctttgcaacggggaatcaggataagacttgcagagtatgggatgttagacacttatcatctcctactgccattctcaagaataacctaggggcaacccggtctattcggttttcttctgatggtcaatatatggtggttgctgagcctgcagattttgtgcatgtttatagcacaaaggcagactacagaaaacgtcaagaaattgatttctttggggaaatttctggggtttctctgagccctgatgatgagtgtatatatattggaatctgggaccggacttatgcaagcttgcttcagtataataggaagcaccaatataaatatcttgatgcatactgatgatcttgattcctgcttgttgatttaggaatatcatgctgatttatagagcagtttaagattctagatccttcccccatttgtttttcacagtactttatgtaggccagtctgattaatcaagagcgcagcatcataagatatctgcacaatgaaatcatgcctcaccttccttgtatttttgagcttttattgcaaatcccaaattgcatggtattaatgttattataacccggtctattcggttttcttctgatggtcaatatatggtggttgctgagcctgcagattttgtgcatgtttatagcacaaaggcagactacagaaaacgtcaagaaattgatttctttggggaaatttctggggtttctctgagccctgatgatgagtgtatatatattggaatctgggacccgacttatgcaagcttgcttcagtataataggaagcaccaatataaatatcttgatgcatac

SEQ ID NO: 135890 - DNA, 348 bp, Glycine max
  unsure (1)..(348): unsure at all n locations
  Clone ID: PAT_MRT3847_93717C.1
cggttccagtttacccctaaagggtccggttgccaaaaggcggccgggggggacagccaaaacgcttaatataaataagattgagaagcaccacatggtggctctaaaggtgtgtgtggcgcttctttcccttgtggggttcacatctgcacacatggaactgctcttcttcaaaagtgatcagtcatcaagttatgatgatgatgagtattaaaaactatgctgtgatctctgcatgtgcacactctaaacgcctcctcagtgcagctgagaagatatgaggctgaattcacgccactcagattgtaacagctgtatgtgcacactctcacagncagaacagtgtcg

SEQ ID NO: 135891 - DNA, 224 bp, Glycine max
  Clone ID: PAT_MRT3847_93718C.1
cggccgagatattgagaaagatgaatttggcaaagttacaagcatgaagacgcataatcttgatcatgagcttgcacgatctgttacataagatgtaaaatgtgtggcacagtgcattgatggatctacttgcactgaactattacaccatctatgagatcataggctgaggcccgatacaatccagatgcatcaagtgaaatctttgaagacctatgtattgc

SEQ ID NO: 135892 - DNA, 436 bp, Glycine max
  Clone ID: PAT_MRT3847_93719C.1
aaaaaaaaaagaacctggcccagcttcataattggctgaataaaagggaaaaaaaaaagaaaaaatgggacaccaccgcccaagtacttttcttcccccactttttgaaaacttaaagagtctcaaaaatttgggtggtgagggacctgaggcgcttgttccctaccaaaaaaaatacacccccccgaattgcagcgcgggattatgttggatgaaaaaaaacctttttaacaataacccttttctcaccaatccccggggcggtgagaaaatatttgtggaaccaaagggggaactcctcccctaacccagctggaaagcgaggccaaatataaagttttctcatattaaaggaaaggccaatggacctccctggggggcgtgagaaaacaagagagctggccaaaaccctactgattccccctgaattcccttg

SEQ ID NO: 135893 - DNA, 579 bp, Glycine max
  Clone ID: PAT_MRT3847_9371C.1
ggtaattctgccttctagagcaagtgatttcagaactgctatggtgagtaaaaatagcaagcctcaagctactgcaatgcatgtgggagctatagaaattatcattgatagtttcgcaagtcctgactgcaacatatatggtgcaatgcttttggttgatacttatcataccaatcctgaaaatgcagtttgtagcatttttgttgcgcctttcagaggcggaaggcccattcgggtggttacatttcccaataccattgtgcagattgaaccagacatgaattcaaggtttcagctttttgagtaccactaccaatggtgattttgttaaacgaaagatactccaatggttaaaggtaatgaagcatgtgctgctgttggcttgacatcaaagtacacttcaacctcattgttggaatctgtttgaaaaagacagaggtttaattgtggaatatttttgagggatgttcccgttgctcataacgtaatcagcccaaaaaaatatttgttggagggaaatctcctttgttttaaatctcctcttaatggtaaagtctctctttaaacacaattgtattg

SEQ ID NO: 135894 - DNA, 234 bp, Glycine max
  Clone ID: PAT_MRT3847_93720C.1
gggcgaaagacggggtttgggtttcacaaacagacacacagtcagctcttacttctcaaatattatcgagatccccattttctcctaagcaaagccatggctaacggtcctggtctctactatgacattggctagatagctagggatctgctgttcaaggactaccacagcgaccagaagttcaccatgaccacctactgaccgactggagtggctattacagcatcatgaacc

SEQ ID NO: 135895 - DNA, 465 bp, Glycine max
  Clone ID: PAT_MRT3847_93721C.1
gggactccaaaacgttgatgtttgtcaacatttcccctgatcaatcttcagcgggcgaatcactatgctctctacgctttgcagccaaagtcaatgcctgtgaaattgggattccccggggtcagactcagacatcaacacgctcctcagagtcccggttgagctatggttaaaagggaacagagctttgcctggccatacgctcatccatgaccaacattaattgttttatttgtcctgctttagcggcagagtgaaaatattctttttgctgctgtgacaattgtatgagtgtaaaattttagagaatcaagcttgtgtaaattggtttttagaggcttggctttagcctccaagggtactgccaataatttgtaccatttagatgtgacattcaatgtaatgctagcagcttgttgattctaaatgaaatgaaacttcaccatttggtggattctttgctcc

SEQ ID NO: 135896 - DNA, 1501 bp, Glycine max
  unsure (1)..(1501): unsure at all n locations
  Clone ID: PAT_MRT3847_93722C.1
cggcatctaattgcgtgttcgcggtccgcgcattttgacttttaaacgtggttagctttacagttcagcattttgtctcttcttctattaaacctaccaagcgtagctgattgaaaactcaacctcgacgaattgtgcattcctgtgctgtgcttgtgatgggtatggtttggatttcaaatgtctttcttctcgggtaatgagatgcatcaagttttgaagtacagtgagcagggatggaccttgctgtgacatttaagcgtcacctaaccttcttcgtttgctttttaaataattctgcattttctcgcttctttgatcactgcttcgcaaattgatcttcgtcgacgaattgtgcattcctgtgctgtgctggtgatgggtatggtttggatttcaaatgtctttcttctcgggtaatgagatgcatcaagttttgaagcacagtgagcagggatggatattgctgctcttttaacttctgctggaattaatattgctgtgtgtgtggttctcttttcattttattctgtattaagaaaacaacccagtaatgttaatgtgtactttgggaggagactagcctctcagcattcaagacgcattgatctctgcttggaaagatttgttccctcccctagctggatattgaaagcatgggaaacatctgaggatgagatattggctattggtggcttggatgctgtggtttttgtgaggatacttgttttcagtattcgagtgttttccattgctgctgtcatatgcactattctggtgcttcctgtaaattaccatggaatggacagaatgtataagaatatacctttggagtcgctggaagtatttaccacttgagaatgtcaaagaaggatcaaagtggctttgggctcattgtcttgcactactacatcataacattatcggcttgtgctcttctttactttgaatataagagtattactaatttgaggctactacatattattggatcacctccaaatccaagccattttacaattcttgtccgatcaattccctggtcttcagaagaatcttactgtgaaactgtgaaaaaattcttctcatattaccatgcatcaacatatttgtcgcaccaaatggtttataagtccggtaaagttcaaaaactgaaggatgatgctgaacatatgtgtaaggtaattagagatgcttcaatggaaaggacttgtaagcctagttttatgcaatgttgctgttctggagcaccaacaatttcttttaagaagatttctactgaaatgggtagtacgcatgggagaacttgcaacactgacttgcatttagatacaggaaaaaaggaatgttcctctgcttttggggtctttaaaaggtcggtatgcttgctcttacggctgcacaggtactgcagacatcaaatcctatngtatgggtgacagatgtagctcctgaacccatgatgntnnattgntccaatatttgcataccatataggcac

SEQ ID NO: 135897 - DNA, 233 bp, Glycine max
  Clone ID: PAT_MRT3847_93723C.1
ttgtttgatttgtttattttttttttttctttacacggcaagaatggactacatcgactttttgctgtttatcacgtcacaaaggaaaaaacttggagatcctgatttggacacggtttctgatctataaacacgtccacaagtatctatggggtgtctgaatccctcactatgacaagaaagtgaaccattgagccataggagtatatataaaacgaccttgctccctgcat

SEQ ID NO: 135898 - DNA, 424 bp, Glycine max
  Clone ID: PAT_MRT3847_93724C.1
cggcggccgccctttttttttttttttttcagtttttatggagctattaagcattaataatgcgaactgggaagcacaataatcaattatctgaaatatttaagatctgctgcgtataaaactagcttcaatttaagtatgtacctgaccaaaagtgctccattataagaaacaatcacagttcaatgtatgtaacctacaccattccagctctgaccactataatttggacagacttctcttcttatttaatattcagcatggcactagatcaccactgatttaatagcgaccaaccttgcaaatcgacagaagagaacttgccaacattgcttgttactgaccagaggtccccaatagccgctcaactgcggtatgaacatcacctgaagacgcaataaggggtctaatgttctcttgtgaa

SEQ ID NO: 135899 - DNA, 1084 bp, Glycine max
  Clone ID: PAT_MRT3847_93725C.1
cgcacgcgtacgctcgaggacgacagaaggggggtgtttgatggagcaaacgatatggggtcatttgccggtgctggtaagggcaaattcaaaagaatctattgaatacattcttcaggccctttggagaactcgaaaaactggtcttggcactaccgaccgatgcatcatccaagaaatgctccagctccaaaatgaatctgatctcgacccacttctggtttgcctccgaatgttaatcaggaggtgtgtttatgagaacactagcaaggaggatattccgaagctgttccccagtgaggttctgcctgaattgcaaaaactgttgacacttttgttgcacaagtttcagcgagagtggcaggaagatgtgatgaaagatcagaatattgtgcctcgattaaaggcgatgacatggaatatggcaaatctcgataaagaatcagcagaccctgcagctgttatcaatttgaagcttcaaaatgatggtcaatttcactcgggagagcaagatgtgaagttcaagttggctacagattctatagatatgatgctgaaagccatgcactgtattagagaccagttttctactgtggatgaggcactgaatgggcattagtaccagtaaaccaatggagtttcttacaagatacaactaatggaggacataaatgaaagacctaggcagggggaatcaaaacttgatcgatctttggcggggagttgtgttatcattcgggctaaagcctcaactgaccagatcatttactattctttatttaaaaaagaaaaactgttaatagtgttatgctttttggatcagaaaattccagtgcaaataagaaactcttttggtcatggatatgacaacctcatatgtaacttaatgcaagtcagtttttcacttgattttccttttgttttctcaagtgaactggtgcaaacacaagcaagatgcttgcacatccattgtggattactttgcagctgtaaaacataatgtgcattggattactggtttaaagttaatagttatgcttttaaaacttggaacataagttgcaaatgttcaaaacaaaaaaaa

SEQ ID NO: 135900 - DNA, 341 bp, Glycine max
  Clone ID: PAT_MRT3847_93726C.1
acggctgcgagaagacgacagaaggggggatatgattgattgcaccaaaatggggatgggcgggaaggcaattccaccgaatattgatcgagttggggatatgcagagtgatgctttgttcattctgttggtggagaaggatgctgcttatatgaggttggctgaggataggttctataaccgctttccatgcataattgtgactgcaaaggggcagcccgatgtttccactaggctgttcttgaggaagatgaagatagagttaaagctgccggtgctggctctagttgacagtgatccttatgggttgaagattctgtcggtttatggctgtgggtcaa

SEQ ID NO: 135901 - DNA, 101 bp, Glycine max
  Clone ID: PAT_MRT3847_93727C.1
gtattaaaaggcttaccatataatgctatgtagggatctgacaacattagagctcctatggaaggagcacaacgaacacatacgcgaatctgcatgcacag

SEQ ID NO: 135902 - DNA, 485 bp, Glycine max
  Clone ID: PAT_MRT3847_93728C.1
gcatgcacgcgccgcgcggctcggaattcggctcgaggagcgctaatgtgactttgctttttctccatgcttcatgatggatgcagctggagtcatgatgttttatgacgcgtgctgtgttggtgcatcagaattaagggggacacacatcacgttcaccacccccaggctgtcatgagaatcgtgcacatcattaaatccgataagatccaatgcttttacacatccgacgctgatacaggaggtgcatgggcgaccacttgcgttccatgacatgttaccaggatgattgtctctcccctgactgagttgtttgaccaaagcttgaaacaattctcttaagaacagatgtcacagactcataggcagcacaggtgcagcatcagctcgtattgttgcctaagaatacggaacggaggatgaaaaggtcatgcacgagcttatcagaccttggatttgaggagctcaaagggtgcatggatttg

SEQ ID NO: 135903 - DNA, 298 bp, Glycine max
  Clone ID: PAT_MRT3847_93729C.1
gaggagggggaatttcaggacccgattctgatgagactgaactagcagtcatagcgggggagatttacgactcgagcgagtaagttccatcgagagccacgcgcagacaacgacgccaaacgaagagcgcgtgaagaaagacgacaaccacgcgttggacgcgaccaacgagatcgtcaaccctaggattcacaccaacagcaacggcatcgacaggaccgcttacgtgcctccttccagagactaagaaaaagaagatgtggactggtacaacgggggaagggactgggagataatt

SEQ ID NO: 135904 - DNA, 287 bp, Glycine max
  Clone ID: PAT_MRT3847_9372C.1
aattaacaaaaataaccaacggcggacagaaagtcaggcgaacaatctgattttgcgtcctgattacgaaaaacaaacttctctactctatctattgaaaccacacatccataagagggcctgctcaagaaatcgtggaccagccctggcatcacactcttttatgacttcctgtatggacacattgctaagagtcagggtcgagacctgctttagaggcctaacaaggaccctatttatatggcttccagggttttccacctttatcggaaatgccgctctaaggt

SEQ ID NO: 135905 - DNA, 250 bp, Glycine max
  unsure (1)..(250): unsure at all n locations
  Clone ID: PAT_MRT3847_93730C.1
ggcggaagtttttacgaagttttttttccacaaaagntgaaatttgctggggggggttatgcactgaaaccacaacacctctgcagagaaactgagaggctcacaagcgccaaatggacactttacaaccctcggaaacaacaaataacgtgttaagctgggccgagagccaactgtaacaacaacatttatccttatgaaaggtttcccgaaataaaaagcgaattccacaaacattttaataacagac

SEQ ID NO: 135906 - DNA, 380 bp, Glycine max
  Clone ID: PAT_MRT3847_93731C.1
agggagccacgataaccattattggactgatacagacactttacacacaaccacaatagtaaataaggcaggtttcttaaaaccctgcctaaaaatgcctacttgggctataagatgctaaacagacactgacctagacttaaagggacaacaaccacagcaaaggcctttacctacaaggaggagggtacattgaagacacagcctcaaaaacaactgagactgcccataagggggaatttatgccactatacaagtggaacctccatggatcacaagattgggcccaatgggatacaagaaactcaccagctggcctggaagatcgtgaacagcctgaccagttgaaacactatgaggcaccttttaagtttgcagat

SEQ ID NO: 135907 - DNA, 469 bp, Glycine max
  Clone ID: PAT_MRT3847_93732C.1
tttttttttttttttagggaacttggattcatctatattgcatcatcggattgtttaaatttcttcatttaaattcaatattaattaacaagtctattcagaacacattttctgaaccactcattagtcacttgcacttaagctccgagtaattagtcacagggacttattaaagagtaaatcatatcagcacaataaggaccaactaattcaaacttctcaaatattcattacaaggagaaaatttatgcccactggcttttaactttggaatttcaaattggttaaggtcccaattcccatccactctccaaagagtaaaaaggaaaatcttttattatttcaaataataatatgatcaggagccaattcaggaataacgataataaacaattcagattccagagagaagtaaacccaatcctaaaatttaattgcctgtaaataagtgacgctttccatattaacc

SEQ ID NO: 135908 - DNA, 309 bp, Glycine max
  Clone ID: PAT_MRT3847_93733C.1
ataaacatacataaaattgattgctgaaacaacaatacgcaattttcatttcgatgcgcggacacttttggacgggcgcgaaccataaaaatacaaggaacctaaccatacactttaaccaaaaacattttaactagggggagccgtattacattacatattaggcttggcaaccttaacatttttaaaaagaaaatccctctaaccaatggaaaaaaccttaaggcgcctttttttatcctaacccaacttggccaccgggatccttaacaccccattttaaagcctcaccaaaaccttttccaaatc

SEQ ID NO: 135909 - DNA, 304 bp, Glycine max
  Clone ID: PAT_MRT3847_93734C.1
agagatgaccaaacttccgagggcaaatttttacaaaaaatcatgcctccgggttttgcgtccttcccaggtagaaactctgagtatacaaaccctcgctttggttttggcctatttgtgggggacggtttcatgaaaccagcttaattctcctaaactaacattttccccttgccctttttacccaaagaataactttgccttttaagaaacccctggtaaccccaataaataattaaaaagggggttcaatttgggcgcggggggggaccccgtttttttcgaccgggacccgggggggccc

SEQ ID NO: 135910 - DNA, 461 bp, Glycine max
  Clone ID: PAT_MRT3847_93735C.1
gcggagcgtggaggagcggattcacgacgaggctcagtgtctgatagaggaacttcggacatccaagggagccctcgtggaccccaccttgctcttgcattgcattaccggcaacatcatctgctccatcatgtttggaaaacgcttccactaccaagatcaagagttcctgaagacgctgaacttgttctgccagagtttcttactcatcagctctatatccagccagctgcttgagctctactgtggcttcttgaaatactttcctggggcacacatgctagtttacaaaaacctacaggaaatcaatgcttacattggccacagtgtggagatgcaccgtgaaaccctggaccgcagcgcccccaaggacctcattgtcacctacctgctccacatggaaaaagagaaatccgacccacacagtgaatgtagccaccataacctcatcatcaacacgc

SEQ ID NO: 135911 - DNA, 669 bp, Glycine max
  Clone ID: PAT_MRT3847_93736C.1
gattgtggtgcactagggctggaccctcttagtctatatatttcaagatgcttgtcgttggcacagcacgagggcgaattatagtactgatgtgtgagcacgcgtggtatatcactggagaacatacatgaggtgatcttacggatcgatggcctcaccacgggaccctgaacataggtcatatatgttcagttttcatgctacgtttggtggcattgattttgcactaagaagggcttctatggcaagggctctttttgacaggagtggaatttccaagcatgatgaagaatccccactgcctttctgtttccattctcttcattatttgccttaagagaggcttttttcacccttggacccagattctggtagaccatcagagtaggacctctgacagtatgtattatgacggggaccgggacctttcatctagcgttaatgacaggcctgatgaccgtcttcaccgcaatggctggtgatgatgaccaatcatattggaatgtgctgaaaagtcattcctgacattcatacatgtagaagattgaccctcacctatattaaggactggggctatgctaagatttagcgagagtaggagatgtaaccattattctgggataacgctatgcgcactctgcgttatgtaaggggggtttatagactact

SEQ ID NO: 135912 - DNA, 960 bp, Glycine max
  Clone ID: PAT_MRT3847_93737C.1
ggttctaaaatagatcactttgccactcattgaaaataaaggggttttggacttcaacaaaagctatcttcgaataaaaagaaaaataatagtcaaaaaagaaaattacaacaaaggaaaaaggaattctattagtttactcatctagatattatactgaatacacactgaccaaaacaaaacgtgctaatttgagagagggaagggggcattttctccactactagtaaatcacaggcgtttaagatcaaacagcaaccaccaaatgggcaaaagcactgaagaagccaacataaatatgaaattcagcagcaacgttaaatcctggtttgaaccgccagaaaagtgtcatatataaccgacgctaaatcctggtttttttttatttttttttgcggtgaacacttcatgatagctatatgcctttgtgcattgcatttgcatgaaataaaaagactaacagctttcaagaaccatctacctttcttctcgttaggtgaaagggtagaagtttgaaaacagcagactgccaagaaaaatgtatgccatagagtatgcccatatcacgtatccccatctaaagtattttgcaggattcgccattatatatgaagcaaaccaataaagattcgccattatatatgaagcaaaccaataaagaggagggctggcagacaagaaacgagttgacaccatgaatcccaagtgtagcacgaatgggagaacagaagcagacaagtatcccggccaaattgctgctggctcagattccatgggaacattagcaatgtctcccttgctcacattctttctcctcctaagattggagtgttcttctaatcaaacagaggatttttccacacttccagcttctttggaccttgagagttcatctgataaaaacacacctccacggctctcttcttccataggagttaaaaaacccagagagaaaaagtt

SEQ ID NO: 135913 - DNA, 197 bp, Glycine max
  Clone ID: PAT_MRT3847_93739C.1
ctctacttcatctgtggtttactgggtgcgtttgtgttttattcgacttttgtgctcttgctttgcgtctgcttggttccctttgcctttcggcgtggggcgcttcttcctgttcgcctggtggggtcgggtttccgtgcctgctttttccttcttctgcttctctttcccctctgcgctttcgtccgcctttgttt

SEQ ID NO: 135914 - DNA, 416 bp, Glycine max
  Clone ID: PAT_MRT3847_9373C.1
cctattcgtccgggaggtcgtaggatttttgtttgcgcctttcagaggtggaaggcccattcgggtggttacatttccgaataccattgggcagattgaaccagacatgaattcaaggtttcagcttttgagtaccactaccaatggggattttgttcaaggaaaagatctcacaatggttaaagctaatgtagcatgtgctgctgttggcttgacatcaagttacactccaactccattgatggaatctggtttgcaaaaagacagaaggttaattgtggagtactttggaaggatgtcttacgatgatcataacgcctaacatccccaagagaaagatgtgatggagggaaatttgtcctatgagattaaatctcgctgtagactggaaaaagtttcctgtacaaaagcacaat

SEQ ID NO: 135915 - DNA, 328 bp, Glycine max
  Clone ID: PAT_MRT3847_93740C.1
gttcttcaaaattttggaaaagttttctggtggcgatggaacggggatggtcagattcgcctcggggacgtgatttaccgtaacattccttttgaagtcaccattgaaggtcgtgtccctaaaaaagcctcttggggttggtggcatactcttcttctggccgaatcccacactttatgccatggtgctcctcacccaattatgctagttagcgggtatatttgatggcaatctatatgtgtacatacaatactgggatacaaatacatacttcgaaggattgaatcatggcgtgagaatgaccatgacttgctatagcatttaacac

SEQ ID NO: 135916 - DNA, 662 bp, Glycine max
  Clone ID: PAT_MRT3847_93741C.1
cagagagagagagagagagaagctcaaatcgtttgcaacgttgtcgttctgcgaattcaaagctcgttgaatcattctacgctctctcttcagaaaccgaggctccgctatcacttgtatatcttaaaaccttgttctttgctacaaatcgaagccactgttacggtcagaggcaaaaaggttaggttactctctctctctctgttctgcgcgaagcgtttctgaaaaatgcatcggagcgagcggttctcgtcgtgtgctcctatcgaggaatcgccggcggtttgatggaaacggcgacgtttgcgcttccgtgttcgccattccatggagttcatggttcggtgttgtagttcgtgcgcgctatccagatttcgttttagccttcgattcgccgtcgttgttttcgagattgtattgatattggcatggttggaagtcaacaatgcaaagctccaagaacaccaatttcaatggggaggtttggaagggaggattgagaacattgcctcacactcttgcatacatgaccagatacttcaacagagaaagcgacctggtcacaaggtttattcaattaccccacaggtatatgagcctggtctctcgaaaccactccagcatataggtgggacattacttggtggatcaacatcattgga

SEQ ID NO: 135917 - DNA, 573 bp, Glycine max
  Clone ID: PAT_MRT3847_93742C.1
atgaacgaaagataagaattcactttagtataagtgcgttctgtaatatgaaactatgaattacgatataacagattatgatcttaattaactggtagacgacgacaatctatgatcagtttgtttgcatgtccgtcgaaaatgtagagtgagcgaaaagatctcctaatgttatgcgcctaccatactatcggttatataattaggaaaatgctgttttccactgtgtgtagaatgggatggcactgcattggatgcataatacataactagcatcagagcatctaccatgatacctacaatgatggaggctgtagaccaaagcattatgatatcttgtgccggaacattcacatattgctgcataacgggtgatgctatggtaaaatgagatagcgcaacttcgctcaagccgagtacagaccttacctacgtctgcatgcgaaatattgattggtctagagcacctaaatccaatgcacttgacgtccctgtacaacagtctgattcggaaaagcttggctgaatgcaggttcttgggcgtggagcacacctatatgtagccagttgctg

SEQ ID NO: 135918 - DNA, 449 bp, Glycine max
  Clone ID: PAT_MRT3847_93743C.1
cccacgcgtccgcgtttatcaaactctatgtgtgagtagcatgttccaacaactcagctttctcgagccggccattactaccactgttcgctatgaaagatgacaaacaggctccagttcctgcttctacaaccgaaggacaacctatacgatgtaaagcggcggtttctagaagagctggtgagccgttggttattgaggacatcattgtggcgccgccaaagcctcgtgaggctcggattcgtattatttgttcctctctctgccacagcgacatcacacttcggaaccttcaggaccctcctgccattttcccaaggattctaggtcatgaggcaactggggttgtggaaagtgttgggaaggatgtaactgaagttacaaaaggtgatgtggtaattccagttatcctaccagaatgtggggagtgcatagattgcaaatcaacc

SEQ ID NO: 135919 - DNA, 901 bp, Glycine max
  unsure (1)..(901): unsure at all n locations
  Clone ID: PAT_MRT3847_93744C.1
ggacagatttccaagttctgaaagaattaatgaaagttttcaaatctcgactgtttccgttggtctttctagtgttcttcctcaatgttttcctcgtttttttcactccctcatatgattatcatatgattcatctccattcggattctgctttcacactttctagtagaatcaaagccaatcatgttcttccctcgacctctgcaaatgacagctacagcaatgaagttgatgaagtgattaagtttggccatgtcatgaagaatgtgactagtttgaagaggattgaagaaggtttagcacgagcacgatcatttatccaggaagcaattcgatccaagatcaacacaaccgccacgaaagacagttttgtcccaaaagactccatttactggaatccacacgcttttcaccgagcaggagccatgtggagatgatgaagaggttaaaggtttgggcatacaaggaaggggagcagccattggtgcatgatgggcctgtaaacaataaatactccattgaaggccaattcatcgacgaaatggacatggctagcatgagcccattcaaggctacccatcctgaacaggcccatctcttcctacttccctacagcgtatccaaggtcattcgctatgtttacaagcccagaaggtccagatccgattatgatcctgatcgcttacaacgcttggtggcggattatatcaacattcttgcaaatagatatccttattggaacagaagcaaaggtgctgatcattttcttgtttcatgccatgattggggtccaagaatttcagatgcaaatcccgaactcttcaagtacttcatcanggcactttgcaatgccaacacttcagaaggattccagcccaacagagatgtgtccatttcagaa

SEQ ID NO: 135920 - DNA, 268 bp, Glycine max
  Clone ID: PAT_MRT3847_93745C.1
gtgaagggatggatttacttctcattttcagatgcaactgttgcaagtagagaaatcttaaaaaataaagagctctcactctcactctgtctgttctctattgacttgggagaagataatataactcaaaagaagaaacatgcatgaagctaataacatgtatatgacccatcatccatcaggcagttctacgagcataatcaacaccattgatgatcaggaactccactttgtctgacagaagtgaggagctgcaagccctgatcat

SEQ ID NO: 135921 - DNA, 404 bp, Glycine max
  Clone ID: PAT_MRT3847_93746C.1
tttctaattttttttttagacttttttttgggtctttgattcaccttctcagactaaggaatataagagacttaggttccaaacgttacttggggtcgacgcagcttaattctaatgatgccaacagtgcccctgtttgaatataatggggggaaacaagcctaagcaaccttccctgtctgcatcaaacatacgtggcctactcaaaagtctaggacactgggatcccatatgtgggatcatgtgatacatattcaagcaagaaaagccctagtttgagccctgcacttgcctatggactcttgtatgaggtacgtgcttaaaggttagggtaacaattcatcgttctgaatcaacaccatcttgctggctgcgactttggggtttgtcccgggctcttgggg

SEQ ID NO: 135922 - DNA, 1138 bp, Glycine max
  Clone ID: PAT_MRT3847_93747C.1
gaagctcggaattcgtcttagagaactggtactacaagatattgctacttatgactggccagttggagaatgccactatcgctgtcgatgccttgtctgtatgtatgaccatcaacgggtgggaaatgatgattcccctggctttcttcgcgggtactggggtaagggtggcgaacgagttaggcgcaggaaatggcaaagcagcaaaatttgcaacgcaagtatcagtggcacaatcaacaatcattgggcttatattttgcgttctgataatgatattccatgagcatatagcatacatattcaccaccagcacttccgtcctacaagccgttgacaacatgtcattactcttagctatcaccattcttctcaacagtgtacaacccgttttgtcaggagtggctgttggatccggatggcaagcatacgttgcatatataaatataggatgctactaccttatcgggttcccactcggaattataatgggatgggtcttcaaaagtggtgtaattggcatttgggggggcatgatttttggtggcacagcaattcaaacgctgatactgatcatagtaacgatacgatgtgattgggaaaaggaggaggagaaagcttgctttcgtgtaagtaagtggtcaaaatctaactccaatggcaatctggaagcctccaattaacatttgatttagccaatggatcgtgtttgttattcaccaatctggattctatgagttttgccgttgtattggatgctgcatatatatatatttctttcaatattcaccaagttgttgttgtattcaaaattaaaggcccggttattctttaggatagctatgttatattaccatgagttgaatttggagatccccacgcaccgacaatacagttgtaattccaacctatggtgttactacatattctttagatagactaattaattagatgttttaatcagtgatgaagctcgtgatttaccctgtcatcattaatttctttgattccttgttttcttatcttttattgctggctaacaactagctggacaaggtttctttgttattaaagtgagtggatcattggttttgttgagagaaaagtgatgaagctcgtgatttaccctgtcatcatt

SEQ ID NO: 135923 - DNA, 476 bp, Glycine max
  Clone ID: PAT_MRT3847_93748C.1
atccgagcttgcctcgtgaagacatcaattcaaccatcaaacgaactcttctgaagagcttggaaagccctgattggaacgttcgtatggagtctgttgatgctgtaaacaaaatattggaagaggctaataagcgcattcaagcaactggaactggtgagttgtttggggctcttaggggacgacttgttgatagcaacaaaagcattgtcatggcttccttgacaacaattggcaatgttgcatctgcaatggggcaagctgtagagaaggcaagcaagggtattctgtctgatgtattgaaatgtcttggtgacaacaagaagcacatgagagaatgtgtgctgaatacattagacgcttggctggctgctgttcatctggataaaatggtttcatatattgcaattgctttgatggactctaaacttggtgcggaagggcgtaaagatctttttgattggttatcgaggcaa

SEQ ID NO: 135924 - DNA, 340 bp, Glycine max
  Clone ID: PAT_MRT3847_93749C.1
cccgcggcgtctggttgcagggaaaaagaaaaataaaaggtttcgatataccaacttggattcttgagggagacggttggcatctcgacatgattcttacattaatggccaatgaaaagccacttgttctatacacttctgttaagcctattacaatcatagcatagctaagtgactgaagcgactttcaagatatgaggagggattgcaagcttgcaagaagcaccaagtcatgtatgactattccgcacctaaagaggtgagattgtagacagattgttgaagcattgagggccaagttggatcctttgggtagactggtgtctcttgagaatggaaa

SEQ ID NO: 135925 - DNA, 628 bp, Glycine max
  Clone ID: PAT_MRT3847_9374C.1
aaaatgaaaaattattttacatgattagtgtatcatcattaaactctaaaatatgtgtctccaggtatttctagcactccttttatctttattactcccattttcccattagctaaatgcacaaccagtgactttaaagggaaagcacttaggaatctaaaccatgtgactgttaaaactgtaaaaccctgacacatatcaggtcattgtggcaagaaataagactgcattagcttttaacaattgttaacacttataattgatcatgatatttcccgactaccttggctacgtcctgctgatatagatagccagtggccagtgatgcatgaagtgcagccccatagggaagtccatcttcattgattacaagatagggcgagtgtaatggcgcaaccggttcagatgaagcaatctccattccaagagtgaagtagtagccaggtatgaactcttgatagaatgcgaagtcttcagcggccatgtcttgttccatgttagtgtcaactttattgataccaagcaaattcccagctacatcaacaaaaaacttgtgcaggtcaccgttatttacagttgggggatataaaggattctcttcatcaaggaagttgacagttgcattgca

SEQ ID NO: 135926 - DNA, 409 bp, Glycine max
  Clone ID: PAT_MRT3847_93750C.1
ggtttctctgtttctctcttctcttgatctcatactttcactctcactcactattcttcatggatcataatatgtgctcacatatgaggacaaagatggcgataggatgcttgcgggtgatgttccctgggacatgttgattgaaacatgcaagaagctgaggatcatgctgagctctgaggccattggtctagctgcgacggctgtacgcaaaaaggcagagcatgaccttggcagctcctgtgttgctgtctatgcatctaactgtctgcgggactaaaagcttctgggctatcacggactacctaatcagaacgtggttgacttggaagctacaaatgacagcattcagggctgcatagaatctcatactatgctgccttaatgccttcatgcctgattatgactg

SEQ ID NO: 135927 - DNA, 532 bp, Glycine max
  unsure (1)..(532): unsure at all n locations
  Clone ID: PAT_MRT3847_93751C.1
gggtggccttttgtaaatatttaaaaaaaaaaaaaacatccgggaaatattttttttatcacttttagtccttgttattagaagttgatgagaataacaattgttaactttagcaattactatgccaacaaatgatgacattagcaagtattatgtcaactaaaatgttatgtaaagccacgttagcaaaacaaccatattccattaaaaaggtaaaagcaaaaaataataatttataaatactaaaaacaaaaagaatataatatttacaggaactaaaaaaaaaaaaacacatatacgggtgaacgtaaaagatattttatttttaaattaaacattactacgtacggtaaatggcctgaaaaatcccaacgagtaactaacaatcctcttatacannaaaaannnnaaaaaaaaaaaaaaaaaaaaaggtttttatcatgcccaaaaaaaaaattcaggttttgttaggcctaagcgatccagggttcgaaattacaaagcttaaatcataaggttgaaaggaatggcc

SEQ ID NO: 135928 - DNA, 2546 bp, Glycine max
  Clone ID: PAT_MRT3847_93752C.1
ccacgcgtccgcacaaacctgagcatcgctcgttggttgagattggtgtggcttccaatggagagctatgcactccactctctctcaacctctttctctcgcttttctcaactccatcaccctcctccccctgtcatctccagatcccaattcaaccaatctcaatctctctctctccgatcacccatcacaatctcccaacgtttctccttcccctcctccaccttcaaattcaaccctttctcaaaaccccattaccctattcaagcttctccttcatcaccaccaccaccaccaccaccaacacctatacagggtgcaaagcccattccttttatcatctccatatccatcggcctcattgttcgctttttggttcccaaacccgtccaagtcacccccgaggcctggcagctcctctccatattcctctccaccatcgcgggccttgtgctgagcccgttgccggtcggggcgtgggcctttctgggcctcacggcctccgttgtgaccaaaactctcacctttacagaggccttcggcgccttcacgaacgaggtgatttggctgattgtgatttcgttcttctttgctcgcggattcgtgaagaccgggctcggggatagaatcgctactttcttcgtgaagtggatgggaaagagcactctgggtctgtcttatgggctcacgttcagtgaagtgctgattgcgccggcaatgcctatcaccaccgcaagtgctggtgctgcaatgattggtttatcaatactcctcctattaggagtccttgactggaatgactgtttgaatgaaaaatcagcatgggataccttagcttacatagccatacaggtaggcatggcacgccagttgacaaaccttggaattgtgagctggatgtctgattgtgtggccgacaaccttcggtcattctctttgagctggccggcctcattggctgttcttcaggcagcttatttcttcatccactacctttttgcaagtcagactggacacgtgggggctttatactctgcatttcttgccatgcatagggcagctggtgttcctggtattctggcagcccttgctttaggttataatacaaatctttttggtgcaataacacactatagtagcggccaggctgctgtatactatggagctggttatgtagaccttccggatatcttcaaaatgggcttcatcatggcttttattaatgctatcatctggggaggtgttggttctgtctggtggaaatttttgggattgtattgacatctcatttccttgtaagtaaatagcacatttcccagtttcagtaggcctttctttttcccggccgaaagaaaaaggtccttcaattgaggacagttgagctcagtcatcattttgagatgaaaattttctttctgcttctggctttgtagttttagacttttagcaatattgttgccctttttatttctctctttagtttacatacactcattaataatatatatttataaaggtttctgaggaaaccttttttatttgatacatgcatgatcatcttcagtgaaggtttagtttagcatggttgattccattatatttatgacctctcaatttcggatctaaaaaagtcccacttctaagaaactcggggcttacctcattcagaaccaatttcagtctgctggtaactctagtgctcttttcctaactgctgcagctcaaaatctgctgtgtctcaaattagcagaggagcttggggtgatagttccaaacccatgggttacttggtttaaagcagctagtttacctgccattgtttgtcttcttcttacgccattgattttgtacaagctctatccccctgtaatcaaagacacaccagaggctcctgccctggctgccaagaaactggaaagtatgggccctgtcactaaaaatgaatggattatggtcggcacaatgcttcttgcagtgtctttgtggatctttggagacactattggcatagcaagtgctgtagctgcaatgattggtttatcaatactactcctattaggagtccttgactggaatgactgtttgaatgaaaaatcagcatgggataccttagcttggtttgccattctggtaggcatggcaagccagttgacaaaccttggttatgtgagctggatgtctgattgtgtggccaacaaccttcggtcattctctttgagctggccggcttcagtagctgttcttcaggcagcttatttcttcatccactacctttttgcaagtcagactggacacgtgggggctttatactccgcagttcttgccatgcataaggcaggtggtgttcctggtattttggcagcccttgctttaggttataatacaaatctttttggtgcaataacactatagtagccacccctattgaattggcaaacgtcagagaactccttatgaactatgatgtttttagtttcctttattttccttgttacaacttacaagctttattttattttaattttaattatatttttttctcttta

SEQ ID NO: 135929 - DNA, 321 bp, Glycine max
  Clone ID: PAT_MRT3847_93753C.1
gtggcaagaggacaccaaagggggacatcagcaccttgatagatgagggaggcacacgttgcaggcatcctgaccgatccatcttgcgaaaccatagctccttagctaacaaaaattcacacatagctacaagccaagcgacagcaccaggttccttaataactgcaaaagctatggctccttgcattcacaccaccaataacaaaggcacatcaactataggaattgtttttttaatatgaacacctgagcaataatcgagtccctactcacagggtacactgcgcaaagccatatcaacgcctaaagacaggcttcaag

SEQ ID NO: 135930 - DNA, 841 bp, Glycine max
  unsure (1)..(841): unsure at all n locations
  Clone ID: PAT_MRT3847_93754C.1
ttcacatgctgcacttgttggattcatggcaggcgcagccatcatgattggtcttcagcagctcaaggggttgctggggattactcactttaccaacaaaactgatgtaatatctggctcgagatctgtttataagtcgctccaccaacaaatcacatctggagaaaaatggtaccctctgaattttgtcatcgggtgttcattcttgattttccttttaattgcccgatttgttggcagaagaaacaaaaaacttttctggttgcctgctattgctcctcttctatcagttatattatcaactttaattgtgtatttatcaaaagctgataagaatggggttaacataataaagcatgtcaaaggaggcttgaatccaagttcagttcaacagttacaattccatggtccacaagttggtcaagcagcaaaaattggattgatctctgccgttattgctcttactgaagcaatagcagttggtcgatcttttgcttctattaaaggataccatcttgatggcaacaaggaaatgctagcaatgggatgtatgaacattgctggatcgctctcttcatgctatgtggcaactggttctttctcaaggactgcagtaaatttcagtgctggatgtcaaacatcagtgtcaaatattgtgatggcagttactgtgtttttgtgtcttgaattgtttacaaggcttctatactacactccagtggccatacttgcttctatcatcctctctgcacttcctggattaattgacataagtgaagcttgctatatttggaaggttgacaaatttgactttctagcctgcattggtgctttctttggn

SEQ ID NO: 135931 - DNA, 715 bp, Glycine max
  unsure (1)..(715): unsure at all n locations
  Clone ID: PAT_MRT3847_93755C.1
gccnnnnnngaacagtagaggagccatacctcagagctacaaagattataaatacagccacccttaactagagggaggaaggacagaacacttgttgtggaattgaggggatgattacaaatgggtagaaggggtcatatataggctctaagattaggtaagtatccatttccttcttaggacttctcccaaaaaaataaataaaaggagccatttaaacattgtaaactttacatgtgcataaaaaaaaaaaagttcttccatgattcccccctccccctgatataatttccagataacatgaaaagaccaatttcttagcttgtggaggcagcaaacacgtacaagatcagaccaattttttactgttacagtttaaaacactatcttggtgacattgtggaattgctacatgtggcttgagatgtaagatggctggtaagagtgaatgagctggactgattatactctcttttcatagctttgtatacatggtctaagccttcttcaattaattctacaactgtttggggcattggtggcatattaatgtcgatcgaatcttccagcagtcttaccacttctcccattgttggtcgcatggaaacctcatcttggatgcaccaaaatgcaactttcagagctctcgttagctcttcttcatcaactgccccatttaatcttctatctgccaccttaattattgacccatttg

SEQ ID NO: 135932 - DNA, 747 bp, Glycine max
  Clone ID: PAT_MRT3847_93756C.1
gcacattgaatgattttcgacctataattgcaacttaataatgttgtaaattaaagaaaataatcccattcacctttttcttttctgtataactattttcaaataaacacaatgttccacctaaacaaaagttgtcctacccaattaacagccaagagctcaagaaatagtatatactgagattcaaagacaatattcatgcatcatcttctttggatgcagcataaagctctttcatttgctcgatgtcatcgtagctgccaaggaatactggtgatcgttcatgtattttttttggaatcaaatcaagagcccgttgttttcctgtgaaagcctgacctcctgcttgctccatcaagtatgacattggaaagacttcatagagaagccgtagctttccgtttggactctttgcatcagctgggtacatgaagataccaccataaagcaaagttcgatggatatcagcaaccatacttcctatgtacctaagagactttggtggtgaaccatcctgaggaaacttgcacatttgtacatatttagtggttggttcatcccagtttctggcatttccttcattcaccgaataaatctttcctttacttggtatcttgatgtttgggtgagtcaatatgaactccccaaggctaggatcaagtgtaaaaccattcactccattttctgtgctaagcacgaacgtgcaagtcctcccctcgtgcaatcagcatcagatatttgtgacta

SEQ ID NO: 135933 - DNA, 647 bp, Glycine max
  unsure (1)..(647): unsure at all n locations
  Clone ID: PAT_MRT3847_93757C.1
cgacctataattgcaacttaataatgttgtaaattaaagaaaataatcccattcacctttttcttttctgtataactattttcaaataagcacaatgttccacctaaacaaaagttgtcctacccaattaacagccaagagctcaagaaatagtatatactgagattcaaagacaatattcatgcatcatcttctttggatgcagcataaagctctttcatttgctcgatgtcatcgtagctgccaaggaatactggtgatcgttcatgtattttttttggaatcaaatcaagagcccgttgttttcctgtgaaagcctgacctcctgcttgctccatcaagtatgacattggaaagacttcatagagaagcctgatttcacagtgaaattccatacataagtcatataactcagaaaacaattctagacttggaaagtagcatgtgcaaccgngctttttctttatcttgttaatttttgttagcatgtgcaaccatgtgagtcagagttggctttcctataagcaaagtcaaagtacatcgtaccgtagctttccgtttggactctttgcatcagctgggtacatgaagataccaccattaagccaagttcgatggatatcagcaaccatactttctatgtacct

SEQ ID NO: 135934 - DNA, 1275 bp, Glycine max
  Clone ID: PAT_MRT3847_93758C.1
ttgcttttcttcagcccatagcttacctgattctcacgcatggtctcactctcaacccaacgatgatgattatgtctcattcaatgatgatgcatcatcatcatcattcatacccatcatagacctcatggatccaaatgccatggaacaaataggccatgcatgtgagaaatggggtgctttccaattgaagaaccatggcatacccttttgtgttattgaagatgtagaagaagaggctaaaaggctctttgctcttcccactgaacagaagttgaaggctcttcgatctcctggtggtgcgacggggtatggcagagcaaggatttcaccgttcttcccaaagttcatgtggcatgaagggtttaccatcattggttctccctctcatgatgccaaaaagatatggcctaacgatcatgcagggttttgtgatttgatggagaattatgagaagcaaatgaaggttctagcggagagactaacatagatgatgttcagcttaatggacataagtgaggagaaaacaaagtgggttggtgcaagcaacataagtggagctgttcagttaaatttttacccaagttgtcccgagccaaaccgagccatgggcttagcccctcacacagacacttctctcttcacaattcttcaccaaagccgaatcactggtcttcaaatcttcaaggaaggaaaagagtgggttcctgtgcaccctcaccctaacaccctggtcgtgcacactggagatctcttgcacatcatttctaacgccaggttccgtagtgcacttcaccgtgtaacggtgaatagtacacgggaacgttactctgtggcttatttctattctccaccgttagattatgtggtttctcctttagttgactctgtcgctcgttttcgtgatgtgactgtgaaggagtatattgggatcaaagccaagaattttggagaagcattgtctttgattagtacttgaaattatatgtatcttaattatgttatgtattaattccttaagcatttatctagttagatgctttattaatttaatttgcttcttataattttgtttctttgtggatttcctatttttgttggttgttaggaagtggtagatatatgatgtacgtggtaggaaggattgggaacagcttcacattttaagtgcaaagttgatgtctcattaactttacaccaagttttgcttctagcacattcaaatttctgaccttctatgccatagtggaaaatagattatgctagcctttgtta

SEQ ID NO: 135935 - DNA, 179 bp, Glycine max
  unsure (1)..(179): unsure at all n locations
  Clone ID: PAT_MRT3847_93759C.1
tttttggaaaaaaaaattaggcgggggctgcttttagccattaatgatgctactgaagcanaagcttaactaataatacaagttgcgttcttgaagccgtatttttttgggaatttgggggcataagagtatgccctgcaataaaagcagatacaaagaattctaaatgagaaggaagg

SEQ ID NO: 135936 - DNA, 294 bp, Glycine max
  Clone ID: PAT_MRT3847_9375C.1
ctaagctcgaatcggctcgagtgcaatccaaacagtctacattttgatttctctgggaatctctcagatttgaaattgctggtaatctctatgccacttttctgttcacaggctctgcagatctttgaaaatgcggatcctctgcatgatctggaattggttttctttcgcttgttcgttgttaattcaataaggaaattaggcatgaccctcttgttgagtatgctctgcctatttgaaaatttccacacctcttttaattgtcgtaatgatgtgtgaagtgtgtgttatttt

SEQ ID NO: 135937 - DNA, 384 bp, Glycine max
  Clone ID: PAT_MRT3847_93760C.1
cccacgcttatgtgctcgcgtccggcactggaccttacagatcgatgattgacctaatatactctgcgaagactaggatgcatcggggcatcagaggtagagcgacaggtggtctttaaggatataaactgcgacacacttgccaggcctaaagctggcttcagacctgctcttgagagtgctctgcataccttatacttaactagtacatactcatggactgctgctgaggggattgattatacctcaagtgatggcgcggactctagggatgctgctcgttaaagagacatctgccctatgaagagcagacggcaggatgaagtgctaccataatgtggacggctgaccgagaatgatgctggcacatctgacagggactct

SEQ ID NO: 135938 - DNA, 366 bp, Glycine max
  Clone ID: PAT_MRT3847_93761C.1
aaaaaaggccaaaaaacctttttttcaaacaaaaatattccctttaggggctttaacccaaaggcaacaggggcccaaaaaaaaaaatccctttttttcttttttgggttcccctcaaaccgacccccagaaaagcctttatgggaaaccccgggggtttttttacaactaaacccaacaggggggggggggtttttggggtttttgggccgccctagttactttccacaatcccctagttcttgggggccaaccttaaaaaaacaatttttccccatgcccagcaggaagggggaccttttttttaattaacccccaaaactggtcccgttaaacgggtaggggttaccaccaaccttggaaaag

SEQ ID NO: 135939 - DNA, 443 bp, Glycine max
  Clone ID: PAT_MRT3847_93762C.1
gggaaaaacccccccgaggggggggaaaaaaaaaggggggggtatttttttaaccctgcccccaaaaaaatccaacaatttttttcccaatcaaaaaatttttttcggacaaacccatgggggaggaaaccccttatttttttcccaaacccattttttggggcccccccccccgggggccctgtggggggaatcgcaataaaacccccccccccgggggccctttttttttggaaaaaaaacgggcctaggtttttttagaagggggttattaccggccggggggaataaaaaaccaaacctggaacaacgccagaaaaaccccaaatttttgaattagcccgaagcccatttggttaacccctttttttttggggaatcctttttaaaccggtatttttgggcccctggattaccggtttttcccccagggggccagtttt

SEQ ID NO: 135940 - DNA, 317 bp, Glycine max
  Clone ID: PAT_MRT3847_93763C.1
ccccctaaccttatctttttatcatatactcaaccctgttttagtgaccgattataacacgggtgggagactaataaaagaaaccatattaacaacccatatcatatgataaaaaaccatatgaagaaaataagaaataaaaaccagcagcatctcaaaatccaatcgaagaaaaataaccagacctagattccaatttcttattttttaatacataaataaaaaaaaaaccgccgagattgtgctcaaattgttcattcattttgtgttttactcattaaaatgttttttttcttcctaaatttattcccaatttg

SEQ ID NO: 135941 - DNA, 237 bp, Glycine max
  Clone ID: PAT_MRT3847_93764C.1
ctcttcttcgccggaatccctctccctctctctgtcgcatctcaccccttcgagctcctctacgtcgtcgtcttgttcttcgccttctgctgctgctgcttcttcttctccttcttctccgtttcgacttctccttcccaagcctcccaccgcgttctccgcgtcttctgctgcggctgcttcgatctacatctacgaactgcaccgttttgaagaggcagcgcccgctacgttgga

SEQ ID NO: 135942 - DNA, 474 bp, Glycine max
  Clone ID: PAT_MRT3847_93765C.1
catgaagctttgattattagctcattcaaaccattcaaggctgacattgctcaatacaggagatgcgttctacacttccatactgcagaaagcacctgcagcaaaggactcgttctcatttctaccaaatcggagcctaccccactaatcctagactcacgtaccatgctgcatcagctatatgcatagctgcatgactcaagtgagctacttgatactagttgaaacagctcaggctgatgcaccactctgttcctgtcatgcccaaaaagcagccattgatactcagtatcgaggtgtgtaagaagcactgctgagagcactagacgctatattcgacgactaatgatgcgactagtctacccgtgcttgggaagtagcctacgatgaattggcagcagctattaagaaggcataattagtatctattgcagtaaagtgtaataaataaatcttgtttcactataaaacttg

SEQ ID NO: 135943 - DNA, 281 bp, Glycine max
  unsure (1)..(281): unsure at all n locations
  Clone ID: PAT_MRT3847_93766C.1
ggagttttcactgagatcgtgccctcctagcttggctttncaagggatgcggtgntcaactattngtgatcagagatttctgnnactgggttttgactnggatanaaatgaaatgngcattttgtngcttgcnaagcttgcaaagccattgattggaacggctcgaatagtgattaacagtcttcatatcaagggtgatctnctgcctacacctattctagaggcagaagcacttctgtattcttntgtatcaantcctgaagtgagaataggaatgcctt

SEQ ID NO: 135944 - DNA, 293 bp, Glycine max
  unsure (1)..(293): unsure at all n locations
  Clone ID: PAT_MRT3847_93767C.1
tgcgagattggtcctacacaattcacctcctctctcacatttatgttcacgacatgtaagcnctctcactttgtcccgctctacatgtcaatccaatgaatagtactattactttactcacatttttaattgagataaataaattctgttttacaattgattgatctttcatgtatttaaggcaattttgaaagcgcggctcgagtctggagctaagcaatagtgcgcgtttctttgggagtcaataccttccttaatccaagggggccaggcggaagtcaccgcggtttgga

SEQ ID NO: 135945 - DNA, 353 bp, Glycine max
  Clone ID: PAT_MRT3847_93768C.1
atctaaaacattttagcaaaatttggggccaaacaatgagaatttggaccttgaataccacgtccagtgtttgtattaaatgcctcaacattggttgtgttgttcacaccactaaacttattaagctcactttttttaccctttatgacaggaactgccaaatactcttcgtatatacgcctatatattttcagactctgaagaacctatgcatttgtttcattctatgttgcatacgcattatgccctacttgccaattatactttgaacttctgatgaatggagtggggttgctgtactcctattttacaacattgcaccactgtttaagttttaaaggcaagttacgatg

SEQ ID NO: 135946 - DNA, 110 bp, Glycine max
  unsure (1)..(110): unsure at all n locations
  Clone ID: PAT_MRT3847_93769C.1
cagnnnaggccggacagaagcactacacgaaagacctttccgaggacgagcggtagaaaccatcacgcaaaacaacctgaggaaccctaaatagaatacccaaaaaagac

SEQ ID NO: 135947 - DNA, 512 bp, Glycine max
  Clone ID: PAT_MRT3847_9376C.1
cctacctttgcgaccgtatccgccatcatagggtgccgggccttaaaagcggaaacaaaagcaatcgcgacttgattccaagaatctctcaatgtcttcctacttttttgagtacgacttcctaagggaaagaaaatcactctctgtgctggccacagacttcgtgaatcattttcttttccattcttagtttatttgctgaacactctcctatttgatataggacttcgtgtcagatttaaacttcttctgcttctttttcaggatctctgtttaatttcaagttcaagctggtgaaatcttggattagcgctcccactctcctatctggtataggactccgtgggtagactgttctatctctctcctttctttcactgtgtacttgtcactgatccggattgacgatgaaagaggtgttatgtgaaatacacttgggcgttggtgcacatgtttgcttcggtaattttctctggagacaacaggatcactgagacaacaatttttaattg

SEQ ID NO: 135948 - DNA, 288 bp, Glycine max
  Clone ID: PAT_MRT3847_93770C.1
ctcgagccggggcggctcggaggacttatgagggatgtcctcaggattgcttctatccctcctacatcactggacggcgtcacggactggcttgacacagcagacgtcgacttttactagagcaggctgcatctgagctgccgccggatcctgtggacaatcacggctggccctgacagcgctatcggaggaggtggctgtgcgtggcggactccgggagcggctgctccagcctcttgtaactcagccgcgcctgctcaaggtggcggaccatctgatgtggttcct

SEQ ID NO: 135949 - DNA, 843 bp, Glycine max
  Clone ID: PAT_MRT3847_93771C.1
cagggtttgcaagcattcaaagagcactttaagaactcaaagttcccatgtgagatggagcattacttgccagtggtgttttcaccgcctcgagatgggaaagaactgacggagccacttccactagtggggaacaagcagcagcagcagcaacaagccattccaattccaatctcaagtggcggtgatggtgacgtggctagcagcaaaagtggtggcgtaggtggtgatgatgagacaaatgaagaagaagtggcctagtgagttctcaagggtagtgttgtgattgtgaatcagtgttagcaggagaaccagacagacagcatttaaggtggttgagcaacgacccacacctctgttccaaccaacctacaactacagcaaccatttctcaatctctctcatcaactcaacctttcctccattatctttattttttcttttttatattttcgtttcctgcttttgtctagtgaaatttaatttctagtttttttttttctttcttttctttcaatcacttgtttttgtttgtattgtagttgtaggttctgacgcttcagatgtactgtagtagtatttagtttgcctgttaaattttcaagaatttcgatagaaaactttatagatatcatagaaaaacttgagttggtgcttggccattactactacgtttagagatgctgatgaaccactgagcaaattaagcggatgtgattgtgttaaccgggtgcacttctcgaggaattaatactggaaactaggatcagtaggaaggatttcatgctagagaaatcctagctgtattatgattctcacttaaatttattaaaaattgttttt

SEQ ID NO: 135950 - DNA, 251 bp, Glycine max
  Clone ID: PAT_MRT3847_93772C.1
aattcgagtgcgtacggctgcgagaagacgacagatgggggaagtaatcacagtttgggcgggaaaaaaaatggctaaaaaatgcatgtttgctaaaaaaggtgaaggtcccgtggtcttgttccttcacggtttcccggagctgtggtactcgtggctccaacctaattttgtcttgctatgaaataattataccgcgccgtggctccagatattcgagataacgggcccactttttacaccgcttttat

SEQ ID NO: 135951 - DNA, 328 bp, Glycine max
  Clone ID: PAT_MRT3847_93773C.1
gacttcatttcactcacccctttaactgccatccattctttctctcttgaggggcaggggtaccacctcaaagaatatcctctttgatccctttctctgtttccttttctttattattattatataataacaccctctaaatacttcctttacccctctttctctctctcatcttaaacacaaacaaatatactactacttcaaactttgatatgcaactggcggcagaactccaacgcacccatcaccgtcaccaaaggcaaaggcaacaacaggacaccacccccatgtgccgccaaatccagctcactatcttcgatcacaccgt

SEQ ID NO: 135952 - DNA, 208 bp, Glycine max
  Clone ID: PAT_MRT3847_93774C.1
aagacgcataagtttcacagacaactaatgtctctacattttctttaaagagaactcaaggggagaacgtggcaaatctcaacaaacctattccatttccttaaaaactaatactaacacctttcctgaactgcactattgataaatcacccactatacacaatatatggcgtagcatgttcactttccatatcactctctgcttcct

SEQ ID NO: 135953 - DNA, 362 bp, Glycine max
  Clone ID: PAT_MRT3847_93775C.1
gaaagaaatgatatgtaaaatagaattgaatgaattagcaggaacatgactgaaaaggaacaatacatttcaccaactagtaacagttacaagacttgaaaaactattttacaatatatcagtgtccttttctcccaaaaaaggttgctcatcgtgttgaattgcagaacctcaaacagcaaccacattttccttatgagaactttaagacaatgatattagctttgtcactcaacagaagaaagaccgacttctctgtcctctagaaattatccttgcggaggggagagaaacatcaaagaaagcagaggagcatgcactcaggaaatcctgactaaattttctccatatgctaatctttt

SEQ ID NO: 135954 - DNA, 1751 bp, Glycine max
  Clone ID: PAT_MRT3847_93776C.1
atcacatacaacgtacacatagacattcataattcattgctatcaccacacacaagcctagctcctcatcataccactgcttttctcttccctctatcgtttgttctttccttcattcactctcgccgccgcgcgtgctaaaaaccgtctattccagattttcttcgcgagtacacattaactttcatatttcatgactatccccacgcaaaaaactaagaagatcgaacgaaggctccttccgttattccattcagcgattccatggtcggcgagagcgcgtgccggcaatggcggcggtggtccgttgtccgcccttgagttcgacggaagacctccaacttggtgagtcgggacagtcaacgcgcctccccgctcgtggcaggagatcgcatttgtccagctggcctcgccctcctctacgggcatcgtcgcccgccgtcgctctcgttctacggtattggcgaatatcaattgagagtgccggaatatggttggaccacgcagaaggtctttcgctttctcactagcgtttcgtatagtgttcggagtccaagggttggtgtctgagtctcgttagcccatttagtttatctttgttttcctgaatttcgttcggtttatagttttcagattcttttggattgatctgatgttgaagtcatagattgctcaacacagattgcttgacatgccgagtcttgctttctttacaacatatgcacttttagtcctgttctggtctgacttttattactcaagaattagctgtatgaactgatgggctgaaactatggtttcagaccaagtttctatacgattaatgctgtggtttatgttatttagtttactttatggttaatatttttgtggaaacctatcagcgtgtctaggattttttttgcaggggtttctttgtttgcagcccttggctttcttctctatggtggaagactattcttgatgctacagctttcctgtgtccttatcaaaggtcgacgcaagaagctacaagaggttggtaaagccgccgacctatgtgactaccatatgcttttcatgcttccttatcagatgtgttatgatgtgctttaatgcatttgataaagctgccgaccttgatgtcttgtaccatcccattctgaattttatgtattacctgttggtggaaatattgccttctactttggtccttttcattttgaggaagcttcctcccaagcgtggtatcactcaatatcacccaattcgctgaaaagattagcatatggagaaaatttagtcaggatttcctgagtgcatgctcctctgctttctttgatgtttctctcccctccgcaaggataatttctagaggacagagaagtcggtctttcttctgttgagtgacaaagctaatatcattgtcttaaagttctcataaggtttgtaggttttgaaacgtgacattttatggattgtcaaacacgttggcttgtgttgtataagtgatatttgtgttgtctctaggaaaatgtggttgctgtttgaggttctgcaattcaacacgatgagcaaccttttttgggagaaaaggacactgatatattgtaaaatagtttttcaagtcttgtaactgttactagttggtgaaatgtattgttccttttcagtcatgttcatgctaaattcgatccattctattttacatatcatttctttcatgtcttttgtgaatttgacgagggctaaattaaatttctatttttggc

SEQ ID NO: 135955 - DNA, 802 bp, Glycine max
  unsure (1)..(802): unsure at all n locations
  Clone ID: PAT_MRT3847_93777C.1
attcaataacccacatggaggattcttctctctacacttcaactccaagttcccagcagcaacatcttctaaaccatcctagagaagggtcagagacagaacaagatggttccaagacaaaatcacacaagaagctagcacttctccctttggtttttctgatctattttgaggttgctggaggcccctatggtgaagagccttcagtgggtgctgcaggccctctaatagccatccttggctttgtggttttccctttcatttggagcattccagaggcacttctcactgctgaattggccacaactttccctggcaatggtgggtttgtgatatgggccaatgaagcctttggacccttctggggctccctcatgggcttctggaagttcttcagtggggtcatcaacttagcctcatacccggttctctgcataaactatctcaaattggtagtcccagctttatcttctggcttccctcgctctgtgtctatttttctctccacttgtgtgttgtcttttttgaactattctggtttggctatagtgggttatactgcagttgttcttggtgttttttcacttttgcctttttgtgttgttgtctttgttttctttgcctaaaattgaccccaacaagtgggctaagttttggtcaagagggtgtggagaatgattggacactctacttcaacaccatcttttggaacttgaacttttgggacagtgctagcactcttagctggtgaaagtgagagcctcatanactttcccaaaggncttgntttctgcagggctgc

SEQ ID NO: 135956 - DNA, 249 bp, Glycine max
  Clone ID: PAT_MRT3847_93778C.1
agctcgtgcccgtgccggtcccggatcgcatgtttcgggccactcccacgcttttggtatcagcgcctgcatggatgtaagggaatcgtggaactctatcgtggttccctaaacgaaaagctactggactttgacactgctggggaagtgcattaatgagtgaagtggtcccatggtacacggtgcgaccctcatagatgcacaggctatgtgcatatgggccggtgagaacggtgctgatcgtatacc

SEQ ID NO: 135957 - DNA, 417 bp, Glycine max
  Clone ID: PAT_MRT3847_93779C.1
cctacccttctcaggaactatctcccctttctccacatcctcctcctttctccattttcctgaaacaaactcccccctttccacctcccctttcttccatctctcactgacaatctccccattctcaatttcacttctccttatcagcatcaccggcttctctggtacaaactctccattctccagctcacccccaaggtccccagctcaccctcttccacttcatccatctccccgcacacttccccactctcaacatcattcccacccctgctgcccactccgtccactgtcaattcactcttcaccaccttctttgccgcaggcgacactttcttcttcacctttaccttcttcttcctcttgccagctaccttgagcaacccagaatcgaacccgttcccactcttgcctccg

SEQ ID NO: 135958 - DNA, 298 bp, Glycine max
  Clone ID: PAT_MRT3847_9377C.1
ccatcccaattgatgtctgttagtgaaaataacacacacttcacacatcattacgacaattaaaagaggtgtggaaattttcaaataggccgagcatactcaacaagagggtcatgcctaatttcctttattgaattaaacaaaccaacccgcgatttttacacaaattcccgatcatgcggaggactccccattttcaaaaaatctggctgaagcctgtggaacaaaaaaagcttgcattagagtattaccccccatttcaaaatctctggagattcccaaaaaaatattaaaaact

SEQ ID NO: 135959 - DNA, 746 bp, Glycine max
  unsure (1)..(746): unsure at all n locations
  Clone ID: PAT_MRT3847_93780C.1
cgcaaatccccaaacaaaaccctcaccaccctccgtcgtttcgcaacaaccctagccgcgaaacccttccccgacgaccccaccgccgcctactacgaccagcttgccttcgccgccgggactcgggcgacttccacgcgctccgccacgtcctcaacaagcgcatacaagacggcttcctcaacaccaagattaccttcaacttcctcaaagacaccaacttctccccctccgtaatcgacaacctcgtccaaaccctctcccacctaaaccaaggtgccacgcgccgcagcgccctcgactccctcgtcacgcgcctctgcaagctccgtcgcgcggatgaggcgcttcgcgtgatagattctctggcgcgtgacaacgtctgcgcccccgccgcgtgcaccttctacccagtcctcaaatgcctcacccgggaagaaaaatccctcgaccacgcgcggcgcgtggtcgatcacatggccaggctcgggatcgcgctcgacgtgacggcgcacaacatttttctcatggcgcactgctacgccggcgagttggacgcggcggccggagttttgaaaagaatggaggaggacggtgtgggggcggacccgcgtacattcgacgcgctggtgcttggcgcgtgcagggctgggaaggtggagggtgctatggtgtggntngagagaatgtggaatgatggagtggccatgttgtactcaacacacatgtgtattattgggaccctt

SEQ ID NO: 135960 - DNA, 307 bp, Glycine max
  Clone ID: PAT_MRT3847_93781C.1
gccattaaaccgttttcatctagggctccaaagcaattaacacacaatgatctgaaatccatactcccacatcacttggcagaacataggaacacattagatatgccagagtcacatccacacgacttagatgatttcttatgcctaccacatcgcccggcaggaaaaattggacacttaagactgcaaccgctcaaaaacgatgaatcttgaaatgatccttctgtacaataccagcctgaactaggaagggagaaacattcttcctatgaccacctggaagtaaaataacctgacctatttctgg

SEQ ID NO: 135961 - DNA, 625 bp, Glycine max
  Clone ID: PAT_MRT3847_93782C.1
acgaggttgccaagcccggtgaggtcaagcaggtcaaggtcctcggtgtcatggctctcctcgacgagggtgagactgactggaagatcatcgtcattgacgtgaacgaccctctcgctccccgtctcaacgatgttgaggacgtcgagaggcacctgcccggccttctccgtgcctccggcgcgtggttccgcatctacaaaattcccgatggcaagcccgagaaccagttcgccttctccggcgagtgcaagaacaagaagtacgccatggacattgtccgtgagtgcgccgagtcctgggagaagctcatcactggcaagacccagaagggtgacatcaacctcaccaacaccgccgtttcccacagcaacgaccgcgtcgaggcctccacccttaacatcccccagggcgagaacaaggcccctgcccccatcgacccttccattgacaagtggttctacatctccggtgcctctgcttgaatttccaagccatcggctgttttgtaggcccgcatatggggtcgtagaagcatgacgcgtacataattacatggcatgagaaaatacagggtgactggcaaagctggcactcacgatgcaatgcaagctaaaagaaagct

SEQ ID NO: 135962 - DNA, 579 bp, Glycine max
  Clone ID: PAT_MRT3847_93783C.1
cctatcttataactgtgaattctatacttgttataatttcttctatcatcatattggatgagtactggcatgtttacagtgtctatatcatacgggaagctttaatttgtcattgaaaatgttctgtaagcagtccaaaagaatctttgctcagtagttatcaccttatttttaggtgttcttgtgttagttataaaaattcagtttgatatattactaaaatacaaatggtagacgggtagtagttagctactaacattagtatttaacaatacgttactgctgtttttaaagagtgaattcatcaattatctcatgattttaagttgattgaatttattggacattgatcatgttaatactaaaagccttggaagaattaatttaaaatgctggacaatgaatggagcagagtctattgatgttgttaaggtaactgactaattcatgcaacttttatattatacttttattgatggtctatatttctattttgttcatgcactttcttgatagataaagagattagcagtcaaagtcgttaaatgatgcaagactatttttgttatattttttctg

SEQ ID NO: 135963 - DNA, 466 bp, Glycine max
  Clone ID: PAT_MRT3847_93784C.1
tgcccacgcgtccgggcattggctatggtcgcagctggttcttcaggtggtgaaaaccgtgctcctgcaacaacttcccatcttaggcgtgatacttcattgatggaacgaaaacagactaaactcactacgttttcaagctttcaaaaaccttcagaagtccctaataaaacatcaccccttccaaaggacaaagcttctgcaaaagctgctgctttggcagctgctcgtgatcttgagagatttgcaaaaattggttctggaagaggtcttagtgcttgtgcaatggccacatctgcacagcggaggaatgctagtgatatggagcgggttaagagatggaatatttctgaagcaatgggagttgcctggatggaatgtttgcacccccatgatacaaaggcggtatatgggaaagactttaatgccttttcttataaatatatcgctgttcttgttgccagtt

SEQ ID NO: 135964 - DNA, 273 bp, Glycine max
  Clone ID: PAT_MRT3847_93785C.1
tctacctacaagtgaccattgccaatagactctctctttgaatctcacccctgccccttctcatagattcctattcttattatttattattcttgcttaggtaccccaataagggttcactcgctcgattggaattagggttttctttctctctatggctattcccgtttaccactatttagtcagcttctttcttttaccagattggctagagattactagcatcgtaccctgcaggagcattgcaggaaatgagcatgagctaagatctct

SEQ ID NO: 135965 - DNA, 293 bp, Glycine max
  Clone ID: PAT_MRT3847_93786C.1
ttttaatgacgaaaatataccctattaaattatgaattttgttaaataaccgtgcgcgaaaggatgctgacactacgccacggctgtttcttgaactgttactgggactatgcctacgtgaatcatcctacgaagcacaaaaaattgaacaagttatgtctttacatgaaaaattatttaatggttccaggaccatggtgtttctggtcaatcttcacatgacatataatcaacttttattaacttttttctggtaaattaaaaaaactcagctacatgaacttactcctggt

SEQ ID NO: 135966 - DNA, 370 bp, Glycine max
  Clone ID: PAT_MRT3847_93787C.1
gcgcgcaaattcaaaggaggatcactcttgcgttctctctaggttattcactctggcgtcgaagcgaatcatgaaggagcttaaggatttgcagaaggatcctccaacatcttgcaatgcctgccctgatgttgctgaatatatgttccattggcaaggtacatctatgggttctccacacagtccatatgccggaggcgttctcctagagaccatcaatgcccctccagattatccctttactccacccaatgttgcatttaggacaaaggttttccccccacatataaataacatggactgcatctccctcgaaaccttgaatgagcagcgaagcccccctctaaccatttccaaggcgatgctctca

SEQ ID NO: 135967 - DNA, 157 bp, Glycine max
  Clone ID: PAT_MRT3847_93788C.1
tcggcccgacttcttttctctctaactcttcatggatcttcttttccacgataatcatttgtggtctaaatccaccatgagggtggtatttctagccaggggggatggattattccattgccctaggaggaagccatctatttgctcccgtgccggc

SEQ ID NO: 135968 - DNA, 459 bp, Glycine max
  Clone ID: PAT_MRT3847_93789C.1
gggaaacgaaaagaaataaaacggtttattacatgggttaataatcaaggtaacaacataaggtcgctttggggaaaagcagaattgaacaaaagatcaaaggtaacccctaaacccaccggtttagctaacctattgggtcgggggctaaacaggtcaaaggggaaaaaaaagaagcaatgcttttacaaacgggaagctacaaaaactacgggggggtcctcaaaaacgacaacggggttataaagctttccaatcacattataccaggggagcccggggaatccaaaagcaccggtttaatctggtcaggggggacatccgggccttttttggattggtggggtttgaacacatttaaaggaaagcccttaaaacaggtaataacagcctgggggacatccaatccgggggtatccaaagccctcatgggaaaaagcaaaaaacctgggggggggg

SEQ ID NO: 135969 - DNA, 409 bp, Glycine max
  Clone ID: PAT_MRT3847_9378C.1
gttttctagtgaaacccgcgatcacaggttgccgcacgtgaaaacctgtaacaaaagcaatcgttacttgatctcaagaatcttccaattgcttcctacttcttggtgtacgattccttaagggaaagaaaattactctctgtgctggccacagacttcgtgaatcattatcttttccactcttagaatatttgctgaacactctcctatttgatataggacttcgtgtcagatctaaacttaaactgactctttctcagttctctgcttaatttcaagatcaagttggtgaaatcttggtttagagctcccactctcctatctggaataggacttcgtgggtaagacttttctatttctgtcctttattacactctattcttttcactgatcccgattgccgttcaaa

SEQ ID NO: 135970 - DNA, 418 bp, Glycine max
  Clone ID: PAT_MRT3847_93790C.1
ggggccattagagggaaacacgcttagagaaacaaatggggcccagggcacaaatgaagattcaacggaacttctttttgtaatccggtttttcttctagcactggccttatttttttaacaattgtttacaaaaatatcattactaaaaattagtttctgaagtgttatggaaaaatattttcaaaaattaattcttagaatgtaaaataattactaaaaattggtttcttaagttttgttggaaaagattttcttcaacttattattagaatgttaaataatacattccagatactagtttttaaaatatattttaaaagcttggcatgacttaatcactatttaaaagtatattttataataagacattttcatttaaaaacctgttaaaaaagctacattgggataaaacattt

SEQ ID NO: 135971 - DNA, 306 bp, Glycine max
  Clone ID: PAT_MRT3847_93791C.1
caacggcaccggaacaaacgtactttaactaaatgtaaaccaaaaggaagacgaacctaaagctgaaacaataataatgggttgaagtttaaacgtgaaaagggtggccgagatgtgggtggaatacatgggcctttcacatcatgggcacgagttcaatgcaacaaacataaattggaagaccaataattttcttgctattaaatgaaaggggggcacaagaacgaatcccaacaaaaacattggaggcgaaaattttgatgctataaccatcatcatcttgacaaagacataatagccaaattc

SEQ ID NO: 135972 - DNA, 288 bp, Glycine max
  Clone ID: PAT_MRT3847_93792C.1
gggaggtatctctaagtacgaggttgacacaaggaaatgttgttacatatagatgaatcaatgaagtgcaagagttatgctttctttctacttagcgtttaactaaggattcaatatctcaacatatacgcccagattgccattttaaccatcttaatacaactaatatactttacaaatgacacacagaaatgataattatcaacaaggacagaaaggagctgacaagaactgaattgtacaactagtttcaactaatacagatccaacctagcaagaaaaataagg

SEQ ID NO: 135973 - DNA, 453 bp, Glycine max
  Clone ID: PAT_MRT3847_93793C.1
gggtcgagaaaggtattgaaatgtgcttttagattaaaatggtggtacacgacagacaaggtgtgatccatcctttttccacttttccttcatatactctgatcaattgattaagtgcatatctcaataaattgacagtaggaaaaaggcagagagtggtacttatatttataatgaaaataatgattaaaaattcatattcctaacattgggtgtgatgtcagtgctgtatacagttattgggaattcccattgcgtctctcttcggatatcatgccataaccattagcgtgtactttctacatgaaggcccttcgagaaagtacataaatattcatgtgtatgattgttataagcaactacattatctttcttgaattgggacaatgctaccccatctgttgtatcactgctgactgttgcaggaaaattcattggacgatgaaacttatt

SEQ ID NO: 135974 - DNA, 228 bp, Glycine max
  Clone ID: PAT_MRT3847_93794C.1
ggctcgagcttgagttattaccgcatctaatttgcaggaactggttagtaattcatatctggtttttttttttatcttacattgatgtttattgcttaaggcttagcatggttgaaatcgattatttgtaggcttgctaggccacactgctggtggttcactttaaagtaaaattgtgtttgcattaatgaagttattgcatgccaaagaggttaaaaataaaatttt

SEQ ID NO: 135975 - DNA, 738 bp, Glycine max
  Clone ID: PAT_MRT3847_93795C.1
ctctctctcactctttcctcagcatttggcaacatctgcaaactctcttctccttctctctatctctcactctgcagcaaagggtaaagtaaaagacttcattcatttacaattgcattatttccagagaaaaaaattgaaccttcttcacatgtcgtcggacataagctagcttattagccactcttgcttcccttctttcaatcttcacaccccttttggaatcttacagggttattcacttatttgtcattcaatggctagttgctggttttgttgttgtgttgttaagtccagtgttgcagttttagcgttaagtgtggttgtgtttttgtgacgggaaaaaaaagttggaagctttggttggtggggtggtgtcaattgtgatgggtgcggatcgtctgatactgccaacagttggaccgccattaaaacggcgagcggggttgcggaggaagcaggctggaagagggtcatacagagggagctaggtgtgagtgagcgagtgagtgtgtggtgtttttggaggggttttgttctgttttttggaggattcagattctcgggggtgttaaagtttctgacttgttaaggggggcaacatgggtaccaacttgcaccaagtactcagaagcctctgtttgatactcactgggactacgccatcttttggaagctcaaacatcgtgctcgaatgatcttgacatgggaagatgcataatatagcaatcctgatga

SEQ ID NO: 135976 - DNA, 437 bp, Glycine max
  Clone ID: PAT_MRT3847_93796C.1
gtttatgtgaaacctgccacactcagcttgattgaatattctcatcaatcggaacatggcgggtggactctccttatgaaagcgagaacactgtttggtgaagttcgtaactctagatcactcacactacttgtgattggtgatgagggaataatcttcatccagacataagtaaatgaatccctccatgtgtcagaaatcagaactgatctatatcaaaccggacgggtggggcgtctgatcttaattgtagaaataaccacccgggaattttacgccctaccgaaaaatttatctactttctattggacaactataattaagcctgattatgcacccactcaagtaggaggcacatattaacctcttgcttctagatctgcgggaactatttttgcatcaaagacattcaggtggctgcgtgccccaggaagaag

SEQ ID NO: 135977 - DNA, 373 bp, Glycine max
  Clone ID: PAT_MRT3847_93797C.1
tacaagcacttgtgagagggtacttggtgcggaagcaagcagcagcaaccctgcatagtatgcaggctctaattagagctcaagcaacagtaaggtctaagaaatctcacggactcagcagcacaaagaatgaagcacatttgtttcaaacacaagcacgaagatccatggagagatttgatgacataaagagtgagtacatagctcccatccacagcagaaggctatcatcttcttttgatgccacaatgaataatgcaaacagtgttgatgggagccccaaaatagtggaagtggacactggcagtggcaggccaaagtcaaggtctcgcaggagcaacacctcaatgtcagattttggcgatgacccatc

SEQ ID NO: 135978 - DNA, 791 bp, Glycine max
  Clone ID: PAT_MRT3847_93798C.1
ctccccctaaaatgaatttacaatgactttacagtcttgttggcttaataattatgagaccacttaatcacaaacttagtagcaccatcgaaggccaatatttcaatcactttcctttttcctaatttccgatgattgattacagcaacaacagaaatatggttagtataatataatatcaccgaatcaaatgatgtccaagcaaggggagtagattgaaaacattttcagcatgcaaaatcatgcaacaattgccctcctccaataacatcttttccaaaatgtcgattttgggattcaaaactactaagaacatagccctcaggctgaagggcaacgccaaaacgttgagctgcactcattccaaagggctcaaacaacccaataccgtgatgattttggtgaagaccaagtgtgagagacaccccattattgctcactccaacacccatgacttgctgattgcctgtgttggtctgattcagctgctcctgactcctcacttgcttgttagcaagttcatttctagggtgtttataaggggcatcatgaaacttctccatggaggtggatggattctcaaaaacaacagagttgtgatctgaaggtaaatgatcacttaggtttttcttacttctttcttcccaatgtgacctcttttgaccttgttgtgattctagcatatgtatttcctccaccattggtttccaaagccttactcttgcattaataaaccaattagacacctggttgcgagatagaccggtttgtttagccaacattaactcgtc

SEQ ID NO: 135979 - DNA, 260 bp, Glycine max
  Clone ID: PAT_MRT3847_93799C.1
accacgccttctaccaaacttattacaaattctacaactcccgtatatattagctctgtttaaagacccaagacgcggcttataaaaatattcctacatcaaacattataatcatcaagcacctttaacaacgtcttaaacaaccataacaccctataaccaaaaccccaattacaattcgttcactgcccataatggaaactacatcaaacacactagtaagatcacctgctgataaacctaatatgcactataacaac

SEQ ID NO: 135980 - DNA, 511 bp, Glycine max
  Clone ID: PAT_MRT3847_9379C.1
ggaatgtgttcccaggacctattgtgttttgaatccacattcctgagaggagataaatcggtggatgggaaaactgactttctcccagggcacttcccgacgtgttaaagagactgcctctttctatagggggaggagctggtgcaaagaatgctattctcatgactacgccaaatgctgttctttcaatgtggagatattttgttggagatctcgtctttgaagtttttaagatgacttctccctacattaaatgtacagcctctttcttcatagcatttggaaatttggttgatgacaccatcaattttgaggcctttccccacaagctggtgcagtttggagagattcaggaaaaagttgtattgtaattcttcacaagaggaaatttttacagcttggtcaactcaggtgcgtcccacaaccactttggtggctgatgggtgaccataattggatgctatggggcatgatcgatcaatgtctacaataccaagtgattttgtccatt

SEQ ID NO: 135981 - DNA, 246 bp, Glycine max
  Clone ID: PAT_MRT3847_937C.1
gcagttcaggtcatactcaatgatgggaacagtcagttctcgggtaatgggaaccctatttatcaggtgatgggaacatccacttttaatcaatacactgcagttcatgatgtcagtgtacctaacattgacccgaaggcacctctggagaaagttgcgcttcttggatgtgggacttcaactgaccttggagctgtctcgaacactgcaaaagtggaatcagggtccattgttgctatttttgga

SEQ ID NO: 135982 - DNA, 291 bp, Glycine max
  unsure (1)..(291): unsure at all n locations
  Clone ID: PAT_MRT3847_93800C.1
tgcaaccagcnnctctaggtgacccattctactcaatctaagaaggggaccnnacaacttccactncaaagcttggtcnnctcgtggcaacgaaatctaatttgactttgtatcaagaagcttttcatctattgagtnntcctttttaaatttttactttttctggctttgcattaatgtgtaacgtatgccttgcaagaccttactattcaaaagagtgcttctnnttccagtctacatttgagtgggcatttgctttggcttttcaaattgaaaagcaaagaaacatat

SEQ ID NO: 135983 - DNA, 470 bp, Glycine max
  Clone ID: PAT_MRT3847_93801C.1
gtaaaacacaaataaagcacacagtgaaggaatggggcagaaaatatggcaagtgactttgaccgcaaaggaaggaaaacgacacaaactttgtttaagggggagggaagagataaaaacacaataataaagtaaaaaaagagggccgcaggaagcaccaaagaaagccagggggctggcagatgaggaaaggaaaaaaaaggacgccagaaacagggatcgcgaaccaacaaaaaagccgggggtcaaactaaaaaaacagggagcaccaggcgccatttcctttacactgaacatacactgtctaggagggagaaaacaggaaggtgggatttaagcgttagtaaaatacctgtgttggcccaggcctctcctgcaggaagaacaccgtgaccatgctccaatgaagcaacaagtgggggggggggaggagaagtagcgggggcccgccgtggggtgaggggcccggg

SEQ ID NO: 135984 - DNA, 173 bp, Glycine max
  Clone ID: PAT_MRT3847_93802C.1
cacacacttccgtgttaactcatactctcttactaccaacagtcttcccggcttacatagccatctactccatctgggctttactccgaccacattaaatccggtaccaaacttactggataaaacacctgctcttatacacaagattttttacacgcctctaagggatcacc

SEQ ID NO: 135985 - DNA, 2906 bp, Glycine max
  unsure (1)..(2906): unsure at all n locations
  Clone ID: PAT_MRT3847_93803C.1
cgttcgcgtgtgcggacgcgtgggcggacgcgtgggcggacgcgtgggcggacgcgtgggcccacgcgtccgacttgggctgatgtttttcgctctctcattcaaaccattcgatctcatcatcgccatcatctcctcaaactgtaagtatacctacaaatcactgtaaatctccattaccactctcttagttattaacttagaatcttccctttctagttctaaattataatcattctttttttatatttccccccccccatatggttatatatattattgggatctatacatattagaagagtcagagataaataaagtcttgttttttaatagtccaaggtagttttcattttctggggtgtggttatttgatcatagaaatgactagtggtagttgtattggaatctctaccatgaagccttgttgtagaatcctatgtaactataaaagtccattatttttgggttttctccaaccaagttcagtcttcagcaatcatgggcatgttgtcatcaggttatcacaactcaacccatttatacctgtaatactcagattcataaatgtgatccatccgaattggagagattttattggttcgaattggggtcttgctgtgaccccaagaattttagcactaggtcataatattggtagtttttggcctagggtcgtgtccttgacaccgcatgtagcgtcggattttggaatcactctacatcggttgattctcattctaatgacacgagctttgagaagatttacattcaaagtggcttgaatgtcaagccattgataattgaaagaattgagactgatcaaagtaaattggaggaagttgctgaagaaagatgtaatgagtcaaacgtaaatatagataatttgaaggatttgagtgagaataaggttcagagggaggtgtctgagattgaaaaggaagctgaagttgcttcagatgcttcgtcacttactgtgggaatccggttgggactgttgcagctaatgatcctgcggacaaacagccgctgaattatgatcaagtctttatccgtgattttgttccatcagctcttgccttcttgcttaatggtgaaggggaaattgtcaagaattttttacttcacacattgcaattacagagttgggagaagactgttgactgctacagtccagggcaagggttgatgccagcaagcttcaaggttagaactgtgcctcttgacggtagcaatgaagcatttgaggaagttttggatcctgattttggggaatcagctattggtcgtgttgcgcctgttgattcaggattgtggtggattatattgttgagagcttatgggaaattaacgggtgactatgctttgcaagagagagtggatgtccaaacaggcataagacttatccttaagttgtgtctgactgatggatttgacatgtttccttctcttttagtcactgacggttcctgcatgattgatagaaggatgggcattcacggtcaccctcttgagatccaggcattattttactcggctttacgctgctctcgtgagatgctaatagtcaatgatgcaaccaagagtctggtggctgctgttagtaatcgcctgagtgcactctgctttcacatgagagagtattattgggttgatatgaagaagattaatgaaatttaccggtacaagacagaagagtattctactgatgctgtaaacaagtttaacatctatccagagcaaattccttcatggctagtagactggatttccgaggaaggtggctacttcattggcaatttgcaacctgctcatatggacttcaggtttttctcactcggaaacctttgggccattgtttcatctttaggcacaacaagacagaatcagggcattttgaatttaattgaggccaaatgggatgatattgttggtcaaatgcctctcaagatttgttatccagcgctagagggtgaggaatggcgtataaccactggctgtgacccgaagaacaccccttggtcatatcataatggaggatcttggccgacacttctctggcagttcacattagcctgcatcaagatgggaaggcctgatttggcacaaaaagcagtcgattcagcagagaaaaggctttcagcggatagatggcccgaatattacgataccccaaatggaaggtttatcgggaagcaatcgcggatggtgcagacatggaccattgctggtttcttgacctcaaagatgcttctagagaatcggacgcgtgggttttcgctctctcgggcaacggatcgatctcttcatcgcaatcatctcctcaaactataatttgaaggatttgagtgagaataaggctcattgggaggtgtctgagattgaaaaggaagcttggaagttgcttcaggatgctgtcgtcacttactgtgggaatccggttgggactgttgcagctaatgatcctgcggacaaacagccgctgaattatgatcaagtctttatccgtgattttgttccatcagctcttgccttcttgcttaatggtgaaggggaaattgtcaagaattttttacttcacacattgcaattacagagttgggagaagactgttgactgctacagtccagggcaagnggttgatgccagcaagcttcaaggttagaactgtgcctcttgacggtagcaatgaagcattgnanggaagtttntggatcctgattntgnggaatcagctattgngtcgtgttgcgcctgttgattaggattgtggtggattatatttggttgagagcttatgggaaattaacgggtgactatgctttgcaagagagagtgggatgtccaaacaggcataagacttatcctttaggttgtgtctgactgatggatttgacatgtttcct

SEQ ID NO: 135986 - DNA, 577 bp, Glycine max
  Clone ID: PAT_MRT3847_93804C.1
tttttttttttttttttttttttttttttttttttttttttttttattttttttttttttttttttttttttttttatatatttttttttttttataaataaattaaataaatatgtttgtatttaattttttttaaaaaactgtattaaaaaaaccagcaaaaaaaaagttattaaaaaaaaaaaaacaaaagaaaaaaaaaaaaaaaaaaaaaaaaacaaccaaaaaaaaaaaaaaaaaaaggagaaaaaaaaaaaaaaaaaaaaaaaaaaaaaaaaaaaagggaaaaaaaaaaaaacccgccggaaaaataaaaccagcttgaaaaaaaaaaaacaaaaaaaaaaaaaaaggaaggccaactaactgttcctaacaaaataaaaaacaggctgccctgccggaataaattacccaaccagaaagaaacaaaccaaaacaaaaaatacaaggaaagaaaaacccccttccaaaggaagaataagatgcgggcttaccaaccggcatgaaaccaaggcgggagtaataaacaaacaagggtgagcaaaaaaagttagcaaaaaccaacccttaact

SEQ ID NO: 135987 - DNA, 222 bp, Glycine max
  Clone ID: PAT_MRT3847_93805C.1
ggcatcaggggcctttgttccactttctggagaggctaaggtgcaaagaggcttgggtgtatcaaaaatatcttgatacagtgtgggcatctgtcctgtccacacccaatactgtgtaaagtttggggtcccccagctgttggcatgtgtaggatgtagagcacatctccctcaccatagagtggctggacacctagtacagtgcctcgcctctgcgtcaga

SEQ ID NO: 135988 - DNA, 295 bp, Glycine max
  Clone ID: PAT_MRT3847_93806C.1
caccaatgttgtacatgtatgataatggtgtactgtatactttaacatgccccatactttgtattggagagtacaataatgtaaatcctaaaagcaccactattttagcataataaaagatagtccaaagagctcctatatagactactccagataacttcgcttctaagatacttgtagcttattgtaattttttttaagaaattcaaggtcattattattgtacaaaataagcgctttgtttaacacagctatatagttttgttaatttttaaaaaactgtggagacggtgat

SEQ ID NO: 135989 - DNA, 468 bp, Glycine max
  Clone ID: PAT_MRT3847_93807C.1
tacggctgcgagaagacgacagaagggagccttctaaagtaagaatttgtcaagtcattagacaatagaggacaatgcttaattagttcattcattgcacatcaaagttattcatttgtatttgagcttaagtgtttatccattacattgactaatttgaatctgtgtattcattcaaatattatttgtttgtgaaagtcgggagtgacttagtattagacaatacttgagtatcttggatttagttagggaaagtctaagggtgtgtcagtagtgacctagagaatactattgtatcatgaagtagtaggacaaaatacttgtttgtaatcaagctttgattagtgaaaccctccacgaatttgtgaaagagaacttgagatagctcttataaattttaaaatcatatgtgaagaagaactggacatggctttgattagtggaaccctcactttttgaaaggcatct

SEQ ID NO: 135990 - DNA, 1245 bp, Glycine max
  unsure (1)..(1245): unsure at all n locations
  Clone ID: PAT_MRT3847_93808C.1
ctctggttctaagatccaaccaagagaggctttgacgcttgctattaccacaaggcacagacaaatggctctgaatttgaaagaagagattccttcataattcgttcttttctactaccttgaaatgtttatgataggcattaattaattaataagaaagaatttctgggaagggatcacaatcacattgatggatagattaactatcacaaactaaactacacacacaagatccggggtttgatcaaccatcatgtctgacgaagtcaacagcgttttcaagaaatatctcaaccagcttcagcttcatcctctcagaaccaaggcgattactgcggcatttttggctggttttagtgatgcagtggcacagaagttatctggggccaagaaacttcagttgagaagggtacttcttttcatgctctatggtttcgcctactctgggccctttggacattttctccacaaattgatggataaaatatttaagggggagaaaggcaatgacactgttgctaagaaggtgatccttgaacagataaccagttccccatggaacaactttttgttcatgatgtactatggcttggttatagaaggaagaccttggagtacagtcataaacaaagttaaaaaggattacccttctgttcagttgactgcatggaagttttggcctatagttggttgggtgaattaccagtatatgcctctgcagctccgtgttgtatttcacagctctgttgctgcttgctgggcaatctttctgaatctgaaagcaaggtctgttgcaattaaggctgcctaggacatcacaaatttcatacttttgggtaattttctgtttccttcctatgtaaattgggatggaaaaaaaatctgccatatttgttaatagtggagcattcatcatagtttgtttggcatattagactattacattggttgttatgacttgtttggacttgcacttgccaatattgataaattagatgtttgtttcctgctgttttgcgatcccttatgtccctcgctgctcccgagtccttggccccctcttcgctctccggaggctcgcccctcgctctccctcgggcgacgacctctttctggggtccgaacccctcaaccccttccttttgccctccctttcccgcctccttctccttcangtctttgaccctctcccttcccgctttctctgtcgcgcggcgggccatctacaccaaaaaaaaaaaaaaa

SEQ ID NO: 135991 - DNA, 344 bp, Glycine max
  Clone ID: PAT_MRT3847_93809C.1
gtctcatagcacgcgatcctcggctccgaatgctgctaatgcggctcgagggcagaatgtcttttctatacatatggacaccacagcaggcctcaagcaacgctctctattgagtctccatgctacggtctcccaaacgcccgtctttgacccctagagcgctccataatggaagagtgtcttaccggactaccgaatgaccgcttattcgtgaaagccttcaccaaagagataggcttagaccagcattcccgatctgctatgcaagccggcattgacgacgatagccaacgcttttgcgctgactcttgggcccagaaggaggaatgttgtggcggatgaga

SEQ ID NO: 135992 - DNA, 256 bp, Glycine max
  Clone ID: PAT_MRT3847_9380C.1
ggctcgagaagagttcgactacagtatcttgctccatcggaatctttcctcgtttttcagtcgccaatattactgtcactaaatcaattgacaaagcactatcattcccttttacgagtattacttttgatatatgcatgaaattgaaataaaaatcacctaaatcggatttcaatttagataagaccaaaacggatgtgtatggcggatattaggggtggaatcggaactttccggttgaatcgaattttccccg

SEQ ID NO: 135993 - DNA, 434 bp, Glycine max
  Clone ID: PAT_MRT3847_93810C.1
gccccctgcgggtgcccctccggaaaatccgggtctacccaccacgctctcacgggtgtgagaagacaacagaagggggcactgaacattgcgacaactcgcttgattctcccaacgcacttccctacctcttccttcaagacgcagatcttacaaatgacaaccaccggaaagaccattaaccttgaggtggaaagctctgacacacatagacaacgtcaaggccatgctacaacacaaggacagaatgcccgcggatcagccacatctcatcttcgactgaaagcaagaccaggactgtcgacccttatctactacaccaacagaaggagacaacgcttcaccatggccttcgtctacgaggtggcatgcagatgttacctaagactgtcactggcagaaccataaccctacatgtagaaagctcttacacc

SEQ ID NO: 135994 - DNA, 455 bp, Glycine max
  Clone ID: PAT_MRT3847_93811C.1
cggctcgaggaaccaccgtttctctctctctctctctctctctctcacggtgctgccactgtcactcttctctcctttctgcttccccgattctctatttttgcggtgctgccactgtcactcttctctcctttctgcttccccgattctctatttttgcgcgtaatcggtggcttagagatttgaaaagttttcatttctaattgagcaaacacaatgagtgaccatgtcggtccacctatttatgaatataatgatgaagtcatcattgatgaatttttccttgatgagtcagatatcctccatgaactttccatggacgatgaagatcttcctgatgcggatgatgattttgaaaccaaacatgttgaagaggttgatgatgccattgacacattcaaaagtcatcacgggggaattgtatgcatgtgcctgcagtacaacagatgtgacat

SEQ ID NO: 135995 - DNA, 911 bp, Glycine max
  Clone ID: PAT_MRT3847_93812C.1
tatatatatatattcctctaaagttctaacccacgcgtccgcccacgcgtccgggttaaccatgaagtttatgtatcttgcattcctacttctatttgttttctctagccaattcttgcttggaggagcagatgcttcccccagacaagtgattgacacagaaggcaagaaagttcgagctggcgtagattactatatccgaccggtcccaacaaccccatgtgatgggcgtgggccgtgtgtggttggaagtggctatgttctcatagcaaggtcatccaaccacacttgccctcttagtgttgcggtggtggagggtttccgtggcctagcagtcacattcaaactagttaaccctaaaaaaggggtcattagggtttctactgacttgaacatcaaaacctccctaactaacacaagttgtagtgagtccacggtctggaagctagatgcctttgatgattcaactggacagtggtttgtgaccactggtggtgtgttgggaaaccctggcaaggataccatcgacaactggttcaagattgaggagtatgatgatgattacaagctcgtgttttgccccacagtgtgcaacttctgcaagcctttgtgtaggaatgttggggtgtttagggatagtaatgggaaccagcgcgtggctctcactgatgagccttacaaagttaggttccagccatctgcttgaagcttcattaatgcatatgcatgaaaaaagatatgtaattaatgagaacatgatatttcatctggaaaattaagcatcatcatcatgcacgaataaaattgatgcttttgtcatattctatttttgtatgaataaattacgtattgatatcttctgatgaaaaaaatgatcaatttccttaattactatactttttctttatatt

SEQ ID NO: 135996 - DNA, 235 bp, Glycine max
  Clone ID: PAT_MRT3847_93813C.1
ccacgcgtccgcgtgttgcttgcgattcttaatcgaataattagcaatcaatcatcatgtcgacggggaaggatatctcactgaagagttcggacagcgatgctttcgaggtggacgaagcggtggctctggaagctcagacgataaagcacatgatcgaggacgactgtgcagatagcggcatacctctgccgaacgtgacgagcaagatcctggcgaaggtgatgagagtact

SEQ ID NO: 135997 - DNA, 494 bp, Glycine max
  Clone ID: PAT_MRT3847_93814C.1
acgaggtttgataatttattttatttattttggtcaagattctttatcctttgagaaaattcatttgatcttttatgttccaaaaaggaatcaaaatgatcattccgtgagtgcaaaatgatcctcccccttccgttgcaagtgccatcgtttcagacacttagcctgtgctgttcgggtgtttgattttgcagctggcgttgtaccctttgttgtcgctgaggcttctgttttccccaacctgtggtcagttagggttttcatagcttttgctttcgcccaccgtgtcggttcctagtcctcgctggagggtaatttgattggggaggtgagtttattttacgggttgttgtgttacctatacatggcgctggtgccagggggaattcaatttgcggtggttggactctgtagtggtccgatgctgcatagtttattctgtaattgggatatcaaagacatcaaaagggtacaattatggactttttttatcc

SEQ ID NO: 135998 - DNA, 220 bp, Glycine max
  Clone ID: PAT_MRT3847_93815C.1
tttttaggaaagcaagaaaaattgtctttttctttatggaaggtatgacgtacattctttgattatattcacggaaccaatgttctgtaattaatataacaaacaccagctcctgtatggatgcgaagcacccttacaaaatacttggtcgacggacaaacatagacccctcttcatactaaggctggaagatacagtaacgcatcatgctctttctacc

SEQ ID NO: 135999 - DNA, 147 bp, Glycine max
  Clone ID: PAT_MRT3847_93816C.1
aggctgcgagaagacgacagaagggggagagagagagttcgatgcagctaccggagatatagatggagaaagagctggagatcgcacttaacacatcacacagcaagagatacagcaatagaatcgtggttcgtatgcagaagaaga

SEQ ID NO: 136000 - DNA, 353 bp, Glycine max
  Clone ID: PAT_MRT3847_93817C.1
cttattcttttttattttttttttgcgcacatataaaggagtatcgaaccttttgtacgtgaatagattacacatgtagaatgttgcaagcaactcttaactgcgccatatttagcctaagtggtagcaagcaatcttataaattttaggcttcgcgggagagggccaagacagggctgttttgaaccggcataaataacagaatttcctttgttaataaaaagtagtcataattggagagcatctttattccacatgcaaaacaatcgccacattgacagggaaatggaaaaacatccttacagtcaaaagaaatgcctggaaaatcttaagcagacttcttttcctttgat

SEQ ID NO: 136001 - DNA, 328 bp, Glycine max
  Clone ID: PAT_MRT3847_93818C.1
cttgctagtactgtcaaggaaacaaacctatatgtacactttcatgcaaattatagaactgattatacctaactctagaatgctatcaaaactcaatgccagtatttatctgaatggagaaggaagggtgcccaacggaggatgaactcttagaacaagatcccagttccccatatttccattccactttgatctgccaatctataagacaaaccaattacattatgatacataagcattgtccttccacaatggactttgaaaataatagttagtactgatatgagtccacaaattttcattgttattggtatttccctgactaaaa

SEQ ID NO: 136002 - DNA, 387 bp, Glycine max
  Clone ID: PAT_MRT3847_93819C.1
attgaaaagctttctagctagtcataacatcatcattgctgatggtattgacaaaactagagcaacttttcaatttagaaagctagcaaattgtgattttatcaatagcaactttaaacagatgtttaatgctttgtgcgttgctcctgaggaccaggcgagtctatggtcacaacatcattatgttgcgagtaataatctggaaatgcaagaatcttatatcgtcaatcttgtaaatgtgttactagaattgtatttgccccatccagaggaagctcgccaattgagaaagtaagctctctttcttattcaatggctgcatatagctgatgtgcctaccatcacaccaattgtagagttccattcgatgcaaaggatgatgaatgc

SEQ ID NO: 136003 - DNA, 517 bp, Glycine max
  Clone ID: PAT_MRT3847_9381C.1
gtaaaacatgttgctcatgaaagcctgaaggatcaaatttctgccgatggcatgatgttttctactaagggtgatacgatggcccatattatgaaccttagacaaagtgctgttggtgatcttaaacttcttactgatgggaagttgtatgagggtaagcatattcctgtatctaatattactgcaggggaaaagtatgtagttcaaatacccataatggcacatgaggaaatgcagtcttctagtgcaagtgagttcagaactgcaatggtgagttaaaatagcaagcctcaaactactgcaatgcatgtgggaactatagaaattatcattgatagttacgcaagtcctgactgaaacatactctgagcaatgcttttggttgatacttatcataccaatcctggaaatgcagctaagtatatttacgatgcgcctttcataggcggaaggcccattcgggtggttacattttcgtatccatagcgcatattgaaccagacatgaattcaaagtt

SEQ ID NO: 136004 - DNA, 388 bp, Glycine max
  Clone ID: PAT_MRT3847_93820C.1
ccagatgatgatagtgaagtagggagggcccttgccaacagctgcaggagtgtgtctggtgtccttgttgatgctcacattggtgacaagcttagtgaagaactgtttctgagagtggaacgtagagccacaagccatggcaaagagttattagagcaactacagttctttcacatagttgcatccctttcttttgctctattataataatgagacaaacataacaagaggcaaagaaagggtcttatctagttctcttattatccctctctttctttttgtgtgttggtttttgtactttttattgcatagagagtcaaaacacacatgagagagacagaaaagagggttcagcactggcttcctctatttttctccctcttatgag

SEQ ID NO: 136005 - DNA, 488 bp, Glycine max
  Clone ID: PAT_MRT3847_93821C.1
tcgaaaaaaaaaaggaacggttaagttggcaagtaagagatgaattcgtacttgacatcctcgatgtgggagtaacaggaacaggttgatgcccaacatacttagccaattcacacgacaaaaacagtggaaatcaacacaatcctcggaccctcttccatggctactgtttcttctctttgcgctgtttttcccatactcacaccaaccttgtcgaaaccccgcttggctcccctctcttgccgaatcccaaaacgacgtcgtatcagtatcatcacctctgttgccgaggatcgagaaatagttccggtgtctgaaggcagaggaacccgtttgaacgaagttgaggggtttcaaccttcggagcctcacacagagtcggaggttgttgtttcgagcctcacaagcagtagctccgtcaatgccatcatcgttttggggtttgggactttcgctgtcaccaagttgctcaccattgaccatgacta

SEQ ID NO: 136006 - DNA, 442 bp, Glycine max
  Clone ID: PAT_MRT3847_93822C.1
tctctctcgttccctctgacgggcctatatagagagcgacgggggtttttcaacctctcggcactatctattcactcctttctccgccaccagcaccctaattgggcgcattcaaccattggattccccttgcgttctttggaccttcccttgctcccacttcgtgtctctgcggcgcagtctcagtctccacagtccatcgcactgctttcgccggaaccgttcgcgcatttcaaagccaagacgaaagccgaagcagggaggtctatggagaagaagaaaaagaccaacaaatatccaggcagggggagaaaaaggaacttccgcagcaactcatatggagtcagaaaaaggaaattgtgatgtttacaggacccgcaacgggggtttggatttgggaccggtgatgagttccatcgtacttgaggtattggcagagaag

SEQ ID NO: 136007 - DNA, 241 bp, Glycine max
  Clone ID: PAT_MRT3847_93823C.1
agaaaatggagcaaggtataccacctttacgttcatagtttatactatagaacacctttcatatcatgaacaattgtatattttgactctcggtgaaaactggccactctttcctttaaaaaaaaaaaaaaaaaaaaaaaaaaaaaaaaaaaaaaaaaaaaaaaaaaggaagaacaaaaaaaaaagaaccagactaacctacgcatgcaagcaaaaaatatagttcttttaaagggaaaaa

SEQ ID NO: 136008 - DNA, 999 bp, Glycine max
  Clone ID: PAT_MRT3847_93824C.1
tcttctcgtctgcgtcccttgtccttctcatccgtcccccatcctcttcccatccgctcgcacccgcatcctcgcccttccccatctttctctgttcccttccctacaacgtccggctccatcgcctaccatatccttctgtctttttccttctctttccatcctcttccgcccttgtcgctctctttgccctccacgtttttcctttgttttgttctatctctcttcttttcgtcccttctcttcctttttttttttttttttaaagatgaagttgagcaatggacattggataaattagttcatatctttctagaacaataagatacataatagataaaaatacagatatggccattactgtttttaccctgaaccataaagctcaagtgtaaatgcaagcaacgacaaatgttcaatgcgaagaattcaccttcaccagaatctaaactatgctctgaacagtcttgcacaggaacaaaaaacaactagctcaataacggtgtatgagttgcttgtatgcatccttgtgcttcgtgtaatgatcaatttcagcctttctgattgcttttatggtagttagcaacttatcactcataaattccttaaggaagtcatccttattgagagcatccaaagattcagaaagtgatgctggcaatctctgaagggtttccggatttggatttgtatcaacaggttcaggaagagaaagcttcctacgaagtccatcaatgccagcagcaagtatggcagctaagcccaagtatggattggcagaaccatcaaatgatttcatctcaaagttgctcactagaccatcaggagttccaggtggagacgtagctcgcaatggagcctccttattttcgtttccccagaaaaggtatgcaccactccatgtgttgggttgtaatcgatcataactgttagggagtggtgctataaatgccaaaattgaaggtagatgatgtagaattccagccataaattcctttc

SEQ ID NO: 136009 - DNA, 223 bp, Glycine max
  Clone ID: PAT_MRT3847_93825C.1
aacccttccgaaaaacctaaattaacaaacacagttgcttttttttttttccagacccacctcaaattggcatggggggtggaggttccagttttttgtttcatcaaggagccagatcatgttgtagtcttttcaaatggcatttccaatgattcaggtcttgaagctggaagggaccataacatttttccagagtcttttgaacaaatcattgggactcctg

SEQ ID NO: 136010 - DNA, 512 bp, Glycine max
  Clone ID: PAT_MRT3847_93826C.1
tggacaagcaagagcaatacactgtggaaggagtgcaaaatcttggaggcaaagcagtgatgtgtcataggctcaatttcagaacggcagtgttttattgccatgtagtccatggaacaacagctttcattgttccaatggtggctggtgatggaaccaaaactaggacactgtcgtttgccactcggatacttcgaccatgaatcagtaaatgcttcgtgaaaccatgggagttgatcctgaaattaaccctgtttgccatttccttggcagcaaggccattttgtgggtacccaatttagctgtggacaggacactgcctatcagactgacgttgttgtttaattagtccatgcatcttaggcaccatgaaaatgagattgtgtataaaataaataatcatttacttgtgttgtgaaagtaatgtgttagggtctgctacccaaaaggagcatcatcctgtgatcagcagcgtgctatgatgatgctttgatgcaataaatatatttgca

SEQ ID NO: 136011 - DNA, 359 bp, Glycine max
  Clone ID: PAT_MRT3847_93827C.1
cagagtaatgaatccctacggaggcaggcagcggctgttgctttcgagcagaaagttcatccagaaaaaatagaatcagaccattcagcagcttctttggagcagaaagttcaaccagaaaaaatagaaccaggccattcagcaactgctttagagcagaaagttaatccagaaaaaatagaaccagtccattcatcaactgctttggagcagaaagttcatccagaaaaaatagaaccagatcattcagcagctgctctagagcagaaagttcatccagaaaaaatagaaccagaccatgaagttgctgttgcagagaaaatgcatgtgcaaccaagaataattgcagataatatgac

SEQ ID NO: 136012 - DNA, 227 bp, Glycine max
  Clone ID: PAT_MRT3847_93828C.1
acgtcaggatggggcacaagtgcgcttgttgatcgagataactatgatcattgtgatgatgatgaaagtccttgttttcttcgtggctataatttcggcagcatggcactgctatgcgtatgatatgttcactcttagaatgaatactggctatggtgcacgtattcctgtggtgaaattcgcccgttggtggcttgctgtggttgcacacatcatctttggctttg

SEQ ID NO: 136013 - DNA, 163 bp, Glycine max
  unsure (1)..(163): unsure at all n locations
  Clone ID: PAT_MRT3847_93829C.1
ttttggcagaaaataatatattgacggatcattgggnaacacgggcgttacacagcctaaaaagccgtaagttcacattttgcagattgggaaacgtacctgaaactgggatcttgactgtatatcgtactgtaatccaaaaagctggggctttaaaaatgat

SEQ ID NO: 136014 - DNA, 586 bp, Glycine max
  Clone ID: PAT_MRT3847_9382C.1
acctacaacaaacaatggccaccgtcaagttatactcttctgataagaaggaatttgtcgtccccgtcgaggttgctagccaatccgtcaccatcaagaacatgcttgaagatttgggctctgacaacgatgctcccattcctttgcccaacgtctctgctaagatcctcgagaaggttattacttactgcaaataccaccacgagcaccccactccccaatctgaggagaagaaggatgagaagagaaccgacgacatcatcccttgggaccgcgaattctgccaagtcgaccaagccactttgttcgagctcattttggctgctaacttcttggacatcaagccattgttggacctcacctgcaagactgttgccaacatgatcaagggcaagacccccgaagagatccgcaagaccttcaacattaagaacgacttcacccccgaagaggaagaacaagttcgcaaggagaacgaatggtgcgaagagcgttaataggtcttcaccccttctatgttgtacattgtttttttaaaaaaaccaaaatttaaaagccaaaaaaattaaaaaaatttaatctagcg

SEQ ID NO: 136015 - DNA, 348 bp, Glycine max
  Clone ID: PAT_MRT3847_93830C.1
gtgaacacggaaagatcgccctcgttggcaaccctcacaggcagaaagaacaaaggaattaaccccaagaaaaggcccttaaaccgaaatgtaacctagggggacagattttattgaaaaaaaaaataaaaaaacaaattaaccaactgggggggcatgggaagattaaaaaacaaagcgggttaatccccccttccccccaaaccggggggggttttgatgggttaatggaaccaaacgcccaccccttttaaagaaaacccccttaataatttttgggaaaaaagctcacgaatttgccccccatgaagaaggggaaaaaaatgggggggccaaataagcggggaa

SEQ ID NO: 136016 - DNA, 1190 bp, Glycine max
  Clone ID: PAT_MRT3847_93831C.1
tttttataataagagctcttgaacttttgttattgatatattttacaatacatagggctgtaatagattctatgattaagtccctcgtttcatttagacattgacaatgtatgtatgactgactctacgcaagcaaagttgaaaacccagaatgtggttgtatctctctccctaaccttaaccttggtactggtgctactgaccagcaaggcaaactcagcggaaactgtttctttcagctggaacaagttcgtgccgaagcaaccaaacatgatcctccaaggagacgctattgtgacctcctcgggaaagttacaactcaataaggttgacgaaaacggcaccccaaaaccctcgtctcttggtcgcgccctctactccacccccatccacatttgggacaaagaaaccggtagcgttgccagcttcgccgcttccttcaacttcaccttctatgcccctgacacaaaaaggcttgcagatgggcttgccttctttctcgcaccaattgacactaagccacaaacacatgcaggttatcttggtcttttcaacgaaaacgagtctggtgatcaagtcgtcgctgttgagtttgacactttccggaactcttgggatccaccaaatccacacatcggaattaacgtcaattctatcagatccatcaaaacgacgtcttgggatttggccaacaataaagtagccaaggttctcattacctatgatgcctccaccagcctcttggttgcttctttggtctacccttcacagagaaccagcaatatcctctccgatgtggtcgatttgaagacttctcttcccgagtgggtgaggatagggttctctgctgccacgggactcgacatacctggggaatcgcatgacgtgctttcttggtcttttgcttccaatttgccacacgctagcagtaacattgatcctttggatcttacaagctttgtgttgcatgaggccatctaaatgtgacagatcgaaggaagaaagtgtaataagacgactctcactactcgatcgctagtgattgtcattgttatatataataatgttatctttcacaacttatcgtaatgcatgtgaaactataacacattaaaaaaaaaaaaaaaaaaaaaaaaaaaaaaaaaaaaaaaaaaaaaaaaaaaaaaaaaaaaaaaaaaaaaaaaaaaaaa

SEQ ID NO: 136017 - DNA, 383 bp, Glycine max
  unsure (1)..(383): unsure at all n locations
  Clone ID: PAT_MRT3847_93832C.1
ggattgaaatnnaacctttnttnnggcggtgttnaanaatatntggttaatggattataggtccaaaaggaacccaacattaaaccacaatcaagtgattcaagtgtcctctctcaactcttatatactttgaatataggtattactctgcaactaaacagacctttttaatcgtgaaaaaaacgaaggtccaaattatttctaactttttaccttctaaagtncattgatttatgcttcccaatgggaagagggggctctccaggggaaaaaaagcccccccacaaaaaaaattttttttttttttgcgccgcccggggggagagaaatatttttttgaggaccaacaacaaatattctcccccccccctctcttttttttt

SEQ ID NO: 136018 - DNA, 649 bp, Glycine max
  Clone ID: PAT_MRT3847_93833C.1
ggggttgcttctgcaggctattcttttaatgtgttaatgaattcatattgccaaatgaatagggcggtagatgcaagcaagattctttgccgactggtgaatgagaaacagttaaagccctggcattctacttacaagctactggtaaccaagttactggttcaaggaggatttacagatgcattgaatattttgggattaatgagaacccacggatttccaccttttactgatccatttattgaacacttgtcaaagagtggaagtggcgatgatgctgtactgtttctcaaggcaatgacatcgaagaggtttccatctacatccatgtttctccgtatgtttgaagcctttttcaagcacagaaggcatgaagaagcacaaaatttcctctcgaaatgtccacgctacatccgcaatcatgctgatgtcttgaatctcttttgttccttgaactctaaagaagctgcttcttctagtatgttggctgcttaagctttcagaatatggctcatgttgtactcttcagaagtatctgcaattgcatttgttcagaaattttggtgagtgcttattcttttttccttcatctaatttattgaaaaaagagagttgaattttgctttgaataatgccaaacaaaccaaaa

SEQ ID NO: 136019 - DNA, 269 bp, Glycine max
  Clone ID: PAT_MRT3847_93834C.1
gggtggagtgtgcacaagagactcacagtctcaaccctacttagatcatttgcagcatcaagctcgtgacaggcaccacccatgggtcctgtgcacagccgcggtaacggtatctcgtcttctgctttgccctacaaaaggacacctcctagctggctcaagatctctgcgcaagatgtcgatgaccatatctgcaagtttgcgaacacaagtttgtcgccctctcagattgctgtcattctcacagattcccaccgtattgctcaggt

SEQ ID NO: 136020 - DNA, 519 bp, Glycine max
  Clone ID: PAT_MRT3847_93835C.1
ggccggtggtggccctaatggcgtgttcgccggcggagtcggtggaccggaaaaaaacgccggcccggtgggcgaggagaatgcatggaggggggttaaatacggtggcgtttagcgaagaggtttgcgatgatgtgagggcgttgctgaggaggtatagggaggggtgggcaatgacacagtgctccgacgccggaatattcctgacgtggaaggagcagccggtggtgtgggccagtgcatggagggccttgacgtagagactagaggagaatgacttgacgtgagtaaggagttgagggactgattcccacgtgcccaacgccgagccttcttttttttcttttttcttttaaggtaattaattaatggtttttcttttgctgtttcaactttcaagtttggtacgtaagacaatgggattaattggagggtatgaggatgataggaggaaggggatttgcctgtattattcaaaaaggaatcatcatcaagtaaattgattttcattgctaaaaa

SEQ ID NO: 136021 - DNA, 2433 bp, Glycine max
  Clone ID: PAT_MRT3847_93836C.1
ccgagcccagacttgaaaaagcgaagaacagacaacactgactagtcccagagcgacggctaagcctctttgttctctgtcccaagcttcgagcagaagaagattcaattagtcctactttgattttgagctctattgagtttgccatgcaaccggcagccttgtaccagacatgtacaggaacgctgcttcacgtcttagggccattagtgccagttcctgcagcaggatccggatacctgccagtgccagatttgcaagttcctttgccacgcaacaatcctctttctgtggtttgggttggtttattgggatggctcacttgaaaaccatacagttcctttcaacctctgtggtttttgcttcttcccggcgttacacttccccctccacttgccttagtaccgttccgccgagcaaatctattattactacacacccggaatggacaatagattgtgtcacaagaactacgaccacaacttttgacagacggtgagatgaaatctgtggaggatttcttgaaagtcagtggaagaagtgatcctcaaagggatatcgcatcaatttcgcaaaaaactcatttcttcccctctcacaatggggtatctatatggagaatgttctctatggttcaaagggtatgaatccagtgagcctcaagcttccgttcctaatgagattgtttccatccatcatattgagtcttctttgtatacaatcaagtcttgtacggctgaaaggtgtaaaattaagttaaacttccctaactagtccttgttgtaggtcaataaattacgtgatatgtgcattaggcgaaatttattccgatggttatttttttcggtgggtaaatcaacctttagattcagaaacagtcctaaataaactaaatggtttgattctggatgagtttgttgctgagaaatatacagcacctcggttagtacttgcagcatctggtgttgaacatgaggaattgttatctgttgcagaacctctcttgtctgatctacccagtgtcccacgtctagaggggccaaaatcagtgtatactggttgtgcatatagatgacaaagtgaatcagggaggacccattttgctctagcatttgaacttcctggtggctggcataagttgaaggatgctatgattttgactgttcttcagatgctattgggaggtggtggatcattctcagctggtggacctggtaaagggatgtattcacggctatatctcaatgttctgaatgaatatccacaagttcattcaatttcagcattcaacaatatttacaatggcactggcatttttggtatccaagttacaacaggctcagattttgtatcaaaagccattgatatagctgctaatgagattcttgctgttgctactcctggacaagttgaccaggtacagctggatcgagccaaacaggctaccaaatctgcaattttgatgaatttggaatcaagaatggttgtttcagaagatataggaagacaaattttgacatatggtgagaggaaacctgtggaggatttcttgaaggcagtggatgaagtaacctcgaaggatatcacttcaatttcgcgaaagctcatttgttctcctctcacaatggcatcatatggagatgttctctatgttccaagctatgaatcagtgagtctcaaattccgtgcctaatgagattgctttcatccacccatcatattgagtcttctttatatacaatcaagtcttgtacggatgaaaggtgtaaaattaagttaaacttcctaactatccttgttgtagtcaataaattagtgattttcacatctcattatttctgggtacataaacattgatctgagagttctcacatgactattttttggactgaacttaaaactactggattattttttggattgaatctctttgggaaaccaaatcataatcgaatatcgttgttatccaatggttcaggaactggttttgaccgcctgattgggttgcgcccggaaaaactattattactacactcccaaatggactcaaagtggcctctgaaacatcaccgactcccactgcgtcggttggcttatatgtagattgtggttcaatatacgagactccgataagttttggggctacacatctgctagaacgaatggctttcaagaccactagaaaccggagtcactttcgggttgttcgtgaggtagaggcaattggtggcaatgtgcaggcctccgctcctagagaggagatgggttacacttttgatgccttgaaaacctatgtttcctgaaatggtcgagctacttgttgattgtgtcaagaacccctgttttctttgattgggagggtaacgagcagcttttgaagtgaaagcttggatttggggaaacttccaaaaattccccaagacttggtttttg

SEQ ID NO: 136022 - DNA, 598 bp, Glycine max
  Clone ID: PAT_MRT3847_93837C.1
aatgaaggtccttgtattcttcggggctacaattgtggtagcatggcaatgccatgcgtacgatatgttccctctccgaatgaacactggctatggtgcccgtactccagaggtgaaatgcgcaagttggaggcttgctggggaagcacacaacatctttggctttgagaccattccttgagaatacactctaagccaccacaaaaatacatccgtagcgaacaatttagtatcacactcgatgacagttaaccacaatcttactttgataccacaaacctcgaaatccatcccaaagacacatttgtattcaatatatataacaccatactctctaatattccatactacaaaaaacatgacatattgagtcaacaaatttaactcgaccttctataataaataacttaacataaacaattcaccagcactacccgacactcttaagaattacaacaagctaatatctctgaacttcaacattatattcttatcagaaacaacactagacaagcagacctcaacataatcaaacttaaagaaagctatctaccccacatagctaagattaatgctgcaagatccacatgatcgttca

SEQ ID NO: 136023 - DNA, 493 bp, Glycine max
  Clone ID: PAT_MRT3847_93838C.1
agagaactatgaagtaacatactgtgatctactgattttcattcccaaaatgaacaaagcaagtgtcagtaacagattgaggatcagattcaagggcatcatattgttgaaatcatttcctgtttgctgatcctgggtgatgaagaagttggagttgattaatattcacaagtcataacctttgaaggttggagaaacagaatctacagtccaagctacctccaagagaattgaaggttcccaagtcacttttaattgaaacctccaaaactgagcccgaggatcaaacaactgcaatacaatatacaacaagaaggtaacaagaaattctaactagaccaccatcatgagtatgggatatttcactgaaattgttttatgcattcaaatggggatagagaagtgttagcaatacactctctaacacactccttctaacacctctattatagctaaaattgatgaaaaccacaaaactatgattgaggcttct

SEQ ID NO: 136024 - DNA, 808 bp, Glycine max
  Clone ID: PAT_MRT3847_93839C.1
ggctcgagtggataacctttatgggctggtgctagagcccagagttgaaaagcaaagcacagacagcacttactagtccaacagcgacggctgaacctctttgttctctctgtctaagaagaagaagaagaagaagaagaagaagaagaatcaaatatccttgagccagacatgtacaggaacgctgcttcacgtcttagggtcatcagtgcccgttcgtgcagcagcagcaggatacctgccagtgccagatttgcaagttccgttgccacacaacaatcctcttctggtttgggtggtttatttggatggctcactggagaccgatccagttctttaccatctctggatttcccgcttccgggcgttacacttcccccttcattgcctgattttgttgcgcccggaaaaactattattactacactcccaaatggactcaaagtggcctctgaaacatcaccgactcccactgcgtcggttggcttatatgtagattgtggttcaatatacgagactccgataagttttggggctacacatctgctagaacgaatggctttcaagaccactagaaaccggagtcactttcgggttgttcgtgaggtagaggcaattggtggcaatgtgcaggcctccgcttctagagagcagatgggttacacttttgatgccttgaaaacctatgttcctgaaatggtcgagctacttgttgattgtgtcaggaaccctgttttccttgattgggaggttaacgagcagcttctgaaagtgaaggctgagatttggtgaagcttccaaaaatccc

SEQ ID NO: 136025 - DNA, 316 bp, Glycine max
  unsure (1)..(316): unsure at all n locations
  Clone ID: PAT_MRT3847_9383C.1
tggaccacagcatccatcagttgttcagaagctagctaaacagtcttacctggtgtccagacttagccccaactttaactgtaagaattattctacaactaattcttacgtcaatgacggaatgcactcgcctgagttgactattatatcacctgtatctccagttactaggcatgctccagcagaaaaaagagtaattgaatttctantaaattgtctaataaataaagtatccactactatatcgaagacagctactactccaattaaacgagtcaaattacttatccaaaatcagaatgaaatgataaaaagt

SEQ ID NO: 136026 - DNA, 1228 bp, Glycine max
  Clone ID: PAT_MRT3847_93840C.1
ggccttcaataaataatcccataatataatcaccataaattagaatttcaactagcaatacaatacacttattcaaaaccagttcctgatccattgattatgatttggtttttcaaagggattcaatccaaaaaatagtctgtgagaactatcagatcaatgtttatgtaccccgaaataatgagatgtgcaaatgtggctagtgcacaatcactaatttattgactacaacaaggatagttagggaagtttaacttaattttacacctttcagccgtacaagacttgattgtatacaaagaagactcaatatgatggatggaaacaatctcattaggaacggaacttgaggctcactgattcatagcttggaacatagagaacatctccatatgatgccattgtgagaggggaagaaatgagtttttgcgaaattgaagtgatatcctttgaggttacttcatccactgccttcaagaaatcctccacaggtttcctctcaccatatgtcaaaatttgtcttcctatatcttctgaaacaaccattcttgattccaaattcatcaaaattgcagatttggtagcctgtttggctcgattaagctgtgcctggtcaacttgtccaggagtagcaacaccaagaatctcattagcagctatatcaatggcttttgatacaaaatctgagcctgttgtaacttggataccaaaaatgccagtgccattgtaaatattgttgaatgctgaaattgaatgaacttgtggatattcattcagaacattgagatatagccgtgaatacatccctttaccaggtccaccagctgagaatgatccaccacctcccaatagcatctgaagaacagtcaaaatcatagcatccttcaacttatgccagccaccaggaagttcaaatgctagagcaaaatgggtcctccctgattcactttgacatctataatcaccaccagtatacactgattttggctcctctagacgtgggacactgggtagatcagacaagagaggttctgcaacagataacaattcctcatgttcaacaccagatgctgcaagtactatccgaggtgctgtatagttctcagcaacaaactcctccagaattgtaccatttagtctatttagagctgattctgaagctaaaagaggatttgccaaggcaccagaaaaaccagcagaatgaattgcttccaaaagcactcgagcc

SEQ ID NO: 136027 - DNA, 772 bp, Glycine max
  Clone ID: PAT_MRT3847_93841C.1
ctaaaagataaaagataaggactttactttccaaagttgatgtgctcaaactcaaacttatatatctacttgccactttaaccccaccagaggcacaggtgcaagttgagattttgattgttgttgggctcccaaattcccaaaacagtgatgatcttaagtaaaagaaatgtttttggcaccaagggaaaaatgggtatagatttcatgattttggtgttaacattgtcatggttttgtctgactactatatgcgtctcagctacaaaacaagcatacccaccaacaccacaaccgaaccagaacctaaggtttgaccaaaatggagaattcaagatattgcaggtggcagatatgcactatgcaaatggcaagaccacgcattgcttgaatgtgctcccttcccagaatttttcttgctctgacctcaacaccactatctttcttaacagaatgatcaaagcggagaaacccaatcttattgtcttcactggagataatatctttgggtttgattcctcggattcagctaaatcattggatgctgcatttgctccagcaattgcatcaaacattccttgggtagctgttttgggcaaccatgaccaggaaggaaccctctctaggtcaggggtgatgaatcatatcgttgggatgaaaaacaccttatctaaattcaatcctccggaagtacatagcattgatggttttgggaactataacttggaggtttggagagttgaaagcactgattttgaaaataatcagtgct

SEQ ID NO: 136028 - DNA, 1652 bp, Glycine max
  Clone ID: PAT_MRT3847_93842C.1
tgttgagattttgattgttgttgggctcccaaattcccaggacagtgatgatcttaagtaaaagaaatgtttttggcaccaagggaaaaatgggtatagatttcatgattttggtgttaacattgtcatggttttgtctgactactatatgcgtctcagctacaaaacaagtatacccaccaacaccacaaccgaaccagaacctaaggtttgaccaaaatggagaattcaagatattgcaggtggcagatatgcactatgcaaatggcaagaccacgcattgcttgaatgtgctcccttcccagaatttttcttgcctcgagccgaatcggctcgagggagatgtcaagtcaattaaaacatggaaacgccttgatgatcaacatcttactggaattgatggtgaggtcctgtggagcaagagcactgtctttcttaacagaatgatcaaagctgagaagcctaatcttattgtcttcactggagataatatatttgggtttgattcctcggattcagctaaatcattggatgctgcatttgctcctgcaattgcatcaaacattccttgggtggctgttttggggaaccatgaccaggaaggaaccctctctagggcaggggtgatgaaccatattgttgggatgaaaaacaccttatctaaattcaatcctccagaagttcatataattgatggttttgggaactataacttggatgttggaggagtacaaggcactgattttgaaaataaatcagtgctcaacctgtactttctcgatagtggagattattcccaagtttctactatttttggttatgattggatcaagccctcccaacagctttggttccaacgaacatctgcagagcttaagaaagcatacataagtaaaccagtgcctcagaaagatgctgctcctggtcttgcatatttccacatccctctgccagaatatgctagttttgactcatcaaacatgactggtgtgaaacaagaaccggatggcaatggccttagctctccttctgtgaactccggcttcttcacaaccttgcttgcagcaagagatgtgaaggcagttttcactggccatgatcacatcaatgacttctgcggcaatctaatgaatatacaactttgttatggtcggggatttggataccatgcgtatggaaaggcatggtaacctatcagagcaatagtggtggtagctagcttggaaaaaacgttgaaagtaagttggggagatgtcaagtcaattataacatggaactattttgatgatcaaaatctgactggaaaacaagatgatggctcgtaagaatttggaaaatatgttagtagcatgaaaggatattttggaatgaccaattatgttttgtccacgtattttttattttttattttatcaaattaacccgtttactacttgtcctataatcaagattcagaatgcacaatacaaggtatgggcaaaaaaatatataaaagggattgagttttcagactaatagatgaaatctatctttagaaattacatataatgtagcagatgccaactggagcctgaaaatgaacttctgtttaggcatcatacttggcatatatgagtttaccacaaagataccaggaaacacataacttttac

SEQ ID NO: 136029 - DNA, 496 bp, Glycine max
  Clone ID: PAT_MRT3847_93843C.1
aaagcccctaactcggctggaggcgccctcattctctctgccaccaggagacatggattgaaggggcagaggcagagcttcaccgactgcaccggggaaacaataaatgcacgatcccaccaagctgtttgaatgctttacgcatacatccacaccacattgcacgtacagagggactgcgactagattgatatcgaacctcgacggcctgctcggtgtccatgagcagggcttatacattgccacccacggactcggaacctaccttatgaatcccttgattggtccactctccccttggggtgaacctgaaccagatccctgcgacttccctttgctgccaaccaaaggctgcgatgaggacacaccctatactcgacgacgtccggaagacaagcactggccaccaatcaccaaggcacgttgcatatcgggatgcacgaccgttgattccgctgcagaggaccctgtcgtctggcctatgtcactctggtac

SEQ ID NO: 136030 - DNA, 261 bp, Glycine max
  Clone ID: PAT_MRT3847_93844C.1
ttcactccaaaagcgagatgatctacatctttcaactctccttgcatagagtgcaagggcggggatcgcaattgaggagctggaatgctcatttgtatcgaaatccaatacgaagtatatactgataaatggtaaatatatgtaatcacttatgtttttgtcaaacaatggtcaagtaatgcaaacaactgatgatgatatgctccagtatgtcacaccaccaaattcgtgattagttactagttagacaaaacatgtaca

SEQ ID NO: 136031 - DNA, 420 bp, Glycine max
  Clone ID: PAT_MRT3847_93845C.1
ctacgataaaatttgtcattaattatcctcagcaaagaaaaataaaaatgactcctcttaagacaggccttgtattcgggttcggagccatgtttgggatcctaatgagtctaggtgcacagtgccacaaaacgggtcaccaccatccctggtcttgtcacacaaaagctcgtacaaaggaaattgcagaaggtgcagcaaaggtatatgcaactattgccaataattagttgctaattagtggtactaactagcacagtttatgtttcttttaagtttttgtgtgtttatactatgtacccatcattttacatcccattacaataaccggtggtgttgatgtattcatatgatttcggcacagttggaaatgatggatccttctactttggagtttgaaaaaaaaaaaaaaaaaaaaaa

SEQ ID NO: 136032 - DNA, 117 bp, Glycine max
  Clone ID: PAT_MRT3847_93846C.1
cgaccagctactagtaatgcggcccgagctttatgatcggcttgggataatcaagaaaaagcaattgtatgatgggaatggctctaaggtatacggggctggtgagaatagacaaat

SEQ ID NO: 136033 - DNA, 265 bp, Glycine max
  Clone ID: PAT_MRT3847_93847C.1
gccatacactcgggcgatttggcatatggatgaaccgctaacacaatttggcgacccctagatccctgagcaaacactatcgactctcgaagataagaacatttcaatttgttactactcattggcgtctgatttcttaagggaacgacacatactctttgtgctggacacagactccttgaatgtttacattttccacatcttagtttattggctgaacactatactatctgatatatagactatatgtataatttcaacttat

SEQ ID NO: 136034 - DNA, 330 bp, Glycine max
  Clone ID: PAT_MRT3847_93848C.1
caacccaattttgaaaaaaaactaaattggttaatgttttttggaaagggtaataaaaaaatttgttgcataacatttgcatttaatccccgtcacaaaatccccgcccttttttcttttgcaggggggataaaaggtttaatccccaagatggtgccccgttccaaaccaagttttaatggtttgggaagattttttgggactgccccttaaatttaaattggcccgcaacaatttaattcccttgggccgggttcataaaacaaaccggactggcaaaacttggggatgaactcaagcgctttttttattcaaagtaatttttttttg

SEQ ID NO: 136035 - DNA, 387 bp, Glycine max
  Clone ID: PAT_MRT3847_93849C.1
atggccaccttgctattcagcaatcagcattcgcaggtcaaactgctctgaagcactggaatgagttggtccgcagaccgggccccgcaaaggtcgaccaacatgcgccgaccgcaagagtgctcctcatagcatttggtatggcctgatcgtccaagtacctgggtccattcaagagcgattcgcatacctgaccggagaatccagggactacgagggcactgtggactatagctgcccggaacctttcagaacctgagctccaggtgttcacagggatgggcctgctgggcacttagctgcccttttcagaggttcctgacaagaatggcggtataatttggcgagggccgttaggtccaaggctgttcattattttcttttttt

SEQ ID NO: 136036 - DNA, 379 bp, Glycine max
  unsure (1)..(379): unsure at all n locations
  Clone ID: PAT_MRT3847_9384C.1
ttcttttccacgcgtacgcccacgcgnccgatggcacaggaggaaagactgacatctagtgcaagggaggtcagaactgcaagggtgagtaaaaagagcaagcctcaagcgactgcaatgcatgtgggagctatagaaagtatcattgataggttcgcaagtcctgactgcaacatagttggagcaatgctagtggttgatacttatcataccaatcctgaaaatgcagttcgtagtatttttgatgcgcctctcagaggcggaaggcccattcgggtggggacattgccgaataccattgtgcagattgaaccagacatgaattcaaggtttcagcctttgagaaccactaccaatggagattctggtcaaggaaaaa

SEQ ID NO: 136037 - DNA, 868 bp, Glycine max
  Clone ID: PAT_MRT3847_93850C.1
gtcaaagaaaggctttgaaatgatgccatattgccccaaaagctcaaacactactcatagaatgacttattctggacaaatgataaaggaaagagaacgtgttaggcggtctgttgtcgatgcatgttcacatgaagttggttgtcatgatagaagaatggaagataaggagcttgaaggaacaaaagacgtgtgtatgatattgattacaaatatcgacaaagagttatgtccactgacaattacagagttcttaaggagacatacttctgtatcagccagggtcgttatttttccaagtttttcaatggaggtatataccaaaggagccattatggtgaattctacaagagagttccaagagctgtgtgactttttgaataatcccaaccgcatcataacatcttcaactggcaggccttgggtgatacttgaaaaggtagtgggattcaaaaatattaaagcatcgataggagcattggtgcatacatccgagaaaataaagaggggaacgagcaacaatttgaaggttgtacattcaggaactaaagaattcaaaatagctagtaataagagggatttgttttttgaattttctgagcaccaagagcggctacgcaagaagcttgcacttgaggaaggaaagatatttgcagctaatgaacaactttcttaactatttgtccttcagattttactgtttctttttgctaatatgtaaatataaatagtataaggctatggcttatggacatgatcttttttacccctaagattgttgggagttgggttgtaaatgtacgtgactagagcgtaagaaaattttgataggtctataattcaaaaaggctcaaaggtaattcaattc

SEQ ID NO: 136038 - DNA, 237 bp, Glycine max
  Clone ID: PAT_MRT3847_93851C.1
cttgacatttttaatgaagtaatccactctattcctgttcctattcctattccccctcgctcatgctcttttcttacgaagctgcttatttttagagaatggccctcaaatccctatttccagcttgatctcccctcacttccgttttggttttgaaagtgtagccttccattgccaagggaaaggaccatattgtttggagtgtctgatggcagaattttcttaagtggcaagaga

SEQ ID NO: 136039 - DNA, 365 bp, Glycine max
  Clone ID: PAT_MRT3847_93852C.1
gcgccaagagactaaattgaccttggatcttcgtatgtactctatctccgattctttctgtgggaggtcttgtaaaagctttttccactatgaacagtagggccaacgtgtgcaaagagctcaacgtctagcacaagaagacactggaagggctttttaaattaccacacaataaggaatgcgctgactgcaatagctaaaggtacagaatgggctagggtacatcttggcatgtttatatgcatgcagagttcaagaatacatgaaagcttgggggtacatatatacaaaggacgttgtgcgacccttgacacttggctttcagagcacgtgtgcattcattcaactaatgggaaacaagaaag

SEQ ID NO: 136040 - DNA, 2497 bp, Glycine max
  Clone ID: PAT_MRT3847_93853C.1
cgacatttcagtgctacgtagtactccaacaacgagcagcgcacgacacaaggaggatgagaaagacccattatttcatttccatgcgcgtggtttacaacgaaagcgttccggcgcgctttccttccgtaagtaagtattcccctttctcgcttttttttccaaaagcactcgagccgattcggtctattcttttaaaccttagtctcccacggaagacttcaacagaagaaaaaggaagaattaatatcactcttccatggttgccgacgaagcttcaccattcgagaccagcgatatgctggcaacgctcctggcgtcgacgccgctgttgtcagagtcatggcggctgtgcaccaccgtggccgccaccgcgccgaggagtttcatgactgagcagcacggtggcggcgctgtggtgtacgtcgctttccccggcgtagaaatggccgcgggatccgactctatctgcagaaacttggttgcgttggacagcatcggcggcctgccactgttttcgctcggcggagtcacaacaaggaaggggaggaaccggtcatggttcatgctggcatgctcaatctcttcttttcacttttcaattctttccagaaccagatgttggaaatagtgggaaacaaagacactaaatcagttgtcatcactggccattccattggaggagccactgcttctttgtgcactctttggcttctgtcttacctccaatccatctcttcatctgtgtcaatattgtgcatcacttatggggcaccgttgattgggaacgagtccttttcccaaaccattttcaaagaaagatggggtggcaacttctgccacgtggtgtcaaagcatgacataatgccaaggttgctctttgcccctataacctctctctctaccgcagctaaattccctgctacagttttggcacttgtccatgacttcaccaggctttgggaagcttgcaaatcagatatctgaaaaagagaaagagttgttcactgctgtaatggattacttggaagcagcaacacaagatgaagaaaaatcagcgcctgttttgtttcacccttttgggagctacttttttgtttcatcagatggagcagtgtgtgtggattgtgcaacttctgttataaagatgttgcatttgatgtttgcatcagtttccccagcttgtagtattgaggaccatctaaagtatggagactatgttaagaatttgtcattacaattcttgaaccagaacaattccgtgcaggggaatattcctgattcaagctatgaagcaggacttgaattgtcggttcaatcttcaggtttgggtaaccaggaatcggcaatcgaacctgccaaggagtgccttaagatgacaaggaggatgggtccttcaccaaccaagaatgctgctaacttatcaattacattatcaaagtttgtgccttataggaccgaaatagaatggtacaaagcttggtgtcaccagcaagttgatcaaatgggatactacgacttattcaagaggagaaggagcacttcaaaaatggctatgaaagtcaacatgaatcgtcacaaacttgccagattttggaacaatgtgattgaaatgtgggagagaaatgagctgcctcatgatgtggcggtgcgggctaaatgggtcaatgcttcacatttctacaaactattggttgagccactagatattgcggaatattatgggaaggggatgcacacaaccaaggggcattacatacagcatggcagagagaagaggtatgagatttttgataggtggtggaaggatgcaatgggcaacaccgaagaaaataatgagaggaggagcaagtttgcaagtttgacccaagattcatgcttttgggcaagggtggaggaagcaagggactggctgaatagtgttagaagtgagagtgacacaacaaagttggctgtgctgtgggataacattgagaaatttgagaagtatgctatggaacttattgataataaggaggtgtctgaagatgttcttgctaagaactcaagttacagtatatggatggaagatttaagaggactgagggaactcaaagcaaaggtgaagacgttttcacaccactttaacccgtttctggatggagaagtaattccttagtaattttaaatgaaatcaataaataagcttgactctgtaatctgtaatatgcctatgaactacttgtttgcaaaataactagtgtgcttatggcttgatctaatcagtattttacttaaatgcttacaagaagtgtgacggggcggtagtgtcgcatgaatatttcaggtgctgtaatttggacccaaaacccttaactcattgtaagtgtagtatgtataaaacctcctcccttctccaaaaaatctcgttttgcttaagtaaaaactttttgtccctttaaaattttccttgaaaccttaaaaagttaaatgaaagtagggctaaagtgcctctttt

SEQ ID NO: 136041 - DNA, 288 bp, Glycine max
  Clone ID: PAT_MRT3847_93854C.1
tgcttttttttcttttgtgtctttgcttggggagacaaagtaacagggctagactgtacaagttttaaaaagggcccaccactcttgaattgcacatgacacacgcgactaaccgtgctaaataacccgagggccacctgtacctaacaacgaccacgaaccattagaatgggtacctcccgggacctgtactcggggctaataccttacggcgaatatctttattacctgtatgggacaaatgacgcccagtataaggagatacgatgggtttcactcaccttgagg

SEQ ID NO: 136042 - DNA, 578 bp, Glycine max
  unsure (1)..(578): unsure at all n locations
  Clone ID: PAT_MRT3847_93855C.1
gggagagtttatcttacgaggtcaacctcttgcaacacattctatttgtatattgcggacttnnnngaggaaaaacgggaaggtnnggttatactaaagctgttaacaggcatgtcccaccccctaggcgaaacggagacaattgctcctttttttatggacaacaacattgtcctggaaccaccannccacaagaacaaactcatttgacaggtagctcctccgaaatgttagtggcctcaaagtanngggactttaggctccgaatcgccgaacgggtgcgacttactagctaacagggaaaggctaaccctcccttgccagttatatgaccagcgacgnntttcatcnnnnnntgggagatgaagagaaatatccctctatcatccataacacccgaatgccgccccatactttccagagatgagatgcgattgatacattcctgcatcactacaaaaaaaaaaaaaggaagctcatggaggaaaaggatctcactcgagcagtacaaactatagcaatttcattcatccataaatannttgatagaatctcnnnacaatgtatgaaatagggct

SEQ ID NO: 136043 - DNA, 569 bp, Glycine max
  Clone ID: PAT_MRT3847_93856C.1
aaaagaacttcaaatatcttattcctattttctctctttcccacgaaagtcaataattagtaatatcatcaagaatcagacaagaaatcgtacaagagatgaatgttgaataattgtttagttactcatacgtagagggattttttaaggtgtgaaaatcacccaatattttcataatataaaaactcgtagagaacaattatgatatatatttatactttaacaagttgtgttatatttttaatgctataaatttatgtatcaatattgccccccactaccaaacatttctagacatgtcactaactgtgatgtatatctataccatagttgtcaataccggcgtagcggaacggtcgaccccaaaggtgagatagcgggatagcggatagcgggatgaccactattttaatgtttttttatatatgttaaataattaataatatatatatatatgttcaaaaacaaaaatataaatatatatatatatatatataagtttttaatattatataattatgatattattatatttatttaatatcatttctatattatttaattattaa

SEQ ID NO: 136044 - DNA, 161 bp, Glycine max
  Clone ID: PAT_MRT3847_93857C.1
gtccaagtcctgtcactcgagagtgtgctggagcacagagtgcaatgtaacccaatcgctacgacgcatagagtcctgaaccaatatgccagtgatccattggactcagattaatacccaacagaccttgtgcaggaacatgattagcatttggtggtact

SEQ ID NO: 136045 - DNA, 419 bp, Glycine max
  Clone ID: PAT_MRT3847_93858C.1
ccggccgggatatcatttctggtttgctcgctggcgtgcttggcggcggcggtgaggaagcagaggagtcggagcaagaaggacgagaggacggggatgatggcggctgatgcggcggcgagggaggaggccgcggcggttatgcggatggagatggaggagaaagtaaagagagcggaggtggcgaagagtgggagtttgtcttggaaattcatcaacatcgctctattgatttgggaaattgaaagtatccgaagccttttgtacagttagcttactattgttgttattacgaattactattattattatcatgtgctatgttacttaaaaaaaaaaaaaaaaaaaaaaaaaaaaaaaaaaagggaaaaaaaaaaaaaaaaaaaaggacatagaactacgaattttgataaatttgg

SEQ ID NO: 136046 - DNA, 671 bp, Glycine max
  Clone ID: PAT_MRT3847_93859C.1
ctttctgacagtttgtcacccaggtccatcttgcaaaaacggccgctatcgttgctaagtccgccgtgaacgtggctgtggcccgccccgccaaggccgtgcgccccatggctgccctgaagcccgctgtcaaggccgcccccgtggctcagcaggctgcggccagcaagatgatggtgtggcagcccatcaacaacaagatgttcgagaccttctcctacctgcctcccctgaacgacgagcagatcgccgcccaggtcgactacatcgtcgccaacggctggaccccctgccttgagttcgccgctgctgactgcgcctacgtgtccaacgagaacaccgtccgcctcggcaactctgcttcttgcctgtactacgacaaccgctactggaccatgtggaagctgcccatgttcggctgccgcgaccccatgcaggtgctgcgtgaggttgttgcctgcacccgcgccttccccgactgctacgtccgcctggtggccttcgacaacgtcaagcaggtccagtgcatgggcttcctggtgcagaagcccaagtccgccaaggactggcagcccgtgaagggccgctccgttcagtaagctgttcagcttgctgactgagtgagccaacttccccctctacagttagcagttgcgtagagtgggttgagc

SEQ ID NO: 136047 - DNA, 446 bp, Glycine max
  Clone ID: PAT_MRT3847_93860C.1
ccgctgcttcggttattttttttttctcggcaaacccaagatagattattaatctgtatgcttgcgcgcgaaaatgattattcactgcactcgaggtatctaaacagatttgaacgaaatgatttattcggaaacggttgagggaacccctactgtgttactggctctaacataaaaagtttagtcgcaactacaccaccatattctaggtttctcttatacaaaatccccagctgatataaaatatgggggcctttttgttttatgcaggtcatacatttaccatacatttttctgttgcctaatgtagggaatgaatatggccctatcctgggggggggaaagctcactgcatacttgaggcaatgcttaattgggcggccctgtggacatatcaattctcccaaggaggaaaggccgctgtagccccaacacgacaggaaaag

SEQ ID NO: 136048 - DNA, 743 bp, Glycine max
  Clone ID: PAT_MRT3847_93861C.1
ggaaagagccactgaaggcaaagcaccaaggtggatcaagacacgaagtagaagttaaactaccacaaggaaagtattactacaagttcattgttaatggacaatggaagcattcaactgcttcaccagcagaaagggatgacaggggaaatgttaacaatataattgtgattggtgaaactgccagcgttcggccttctgttcagcaccagcagaaagatgccaacgttgtcaaagtgattgaaaggcctttgaatgaaaaagagcggtttatgttggcgaaagcagctcgttgtattgctttctctatctgtcctatcagattagctcccaaatagttgcatgcaaatatcacaatgtacagagttgcagttgttgtacatgttaccgggggccgtacaaaatttggtcgcagttctgagggcacgttgcagagagtaatcacaccctggggtatgtcttgtcattcaactagtgaaataaatgagatggtcatgttcattgcactgctaaacttgactctctttcccctcgttctgttattcgtactaaatagtcctatttatagtaggaattcacatgtagtactcgctatttaccaaatgttggcctaagtaatttgctataatggataacgtatagcttttttaatttgagtttatgacaaatgcaaggcaccatagcaatttatgtaatggttgagttaaaattgtgagggtgcttttcagtactactactatttt

SEQ ID NO: 136049 - DNA, 1314 bp, Glycine max
  Clone ID: PAT_MRT3847_93862C.1
tcaggagaactttctaatgtgcatataacataaagcacaatagagcgtaaccagttataacaggtgagaatgttacccaaaagagattttccactatgatcaggatgaaaatattagaaaacaaaacaaaaaacgtaccgagtaaaccaaattagcacacttagtacctacgttaaacatgaccaacataattatgtagaatacaacctcgtggcaatgggctcaaggtctctagagaccaaacaatgatttttactagaccgtaaatgcctctgattagccactttcaaactcacataaataccctgaaaaaccgggagatgattaagattagtagctgttttgccatatttgttgggactgcttggatggttggctttgcggaccacccaaggatgcttcccgaggattttgtggctgatgttccagagaaatgccagtctgagattggtagaaattagggtacccaaggggtccaaaatgctgtgaaggctgttgctgctgttgctgcctttgccgaaatccacctggttgttgttgattctgtccctgcaaattataatagttgctgggaggaactgcagacattgttcgagagccagggccctgaacccacatgggagaattctcattctgctgtagtgaaatcatatgattgttgtccttaaactgagagtttataacatcatcatatccaatggttgtactagtaggcgcagcaggtgggttcaatgggtaatttcctccgggaatgctcgtggaacttccaaaaccatatccagatgcaacagcagcagcagcagcagactgaggtaagctactgacagaaatgctatttttatattgtggaagcatggctgccagagattggtggtatgtgctatttccaggaaaagcctgctgaaatgctgatggcatgtaggtatagctctgaggcaagaatggatagctaatcatattagcaaaatgtcccagaggaagagtaggctgggagtagggatgcacagcaaggtgttgaggaagtgcaggtccagtggcaacattggcaccaggcagagcttgtgaattaggttgaggctatgaaatgttactagcccttagagcctctgacatggttatggtggaaccaccaattgaagaagcaatgttgctatattttgtaggcatcgattgtgttgcagggaagggtaagtatgggatatcttctcttgctgtttgaactggtgaagccaacagagcactgggcaaagaatttgtatgtgccattacaccagagaagggagcaagattctgattctgtgagcttgtctgcga

SEQ ID NO: 136050 - DNA, 708 bp, Glycine max
  Clone ID: PAT_MRT3847_93863C.1
ggcagatcgagtttccaacttggcatgggccaaggatggacaggctctgctttacgttgtgacagataagaaaatgaggccttaccggtgggtggattgttgttgatctatcggtggcttggtgctgtgatagaattgaaagaagtgcaaaatttatatacagttccttggttgcttttagtgatgttcttcaatcagaattgaagtttcatcttcgtaacctatgttaaattagttttgattgaagaatattaccaaaagcacataggaattgcatatgagttgcgtcttttaaagaatcccttagtttgtgttttgcttatgattgctagaattgaagttcatgcgatcttcctcaatctcaagtttctgcttgttgccacagtatctactacagtctgattggatcaactgatgaagatgttttgcttttggaagagtcagatgaaagtgttcacgttaatattaggcacacaaaagactttctatttgtgactgtaaatacattctctaccacatcatcaaagctgacctgttgtctggcttgaaactagtttgggagtgtgacgctctagctcactgcacaattgaacatcaccgaggttacctttatttatttacagatgctcccaaaggtggtcgatcagttgattgacattatcttctttttagtccagtggatgatccttcaagtgcaagaaaatggga

SEQ ID NO: 136051 - DNA, 1434 bp, Glycine max
  Clone ID: PAT_MRT3847_93864C.1
atatccagatgcaacagcagcagactgaggtaagctactgacagaaatgctatttttatattgtggaagcatggctgccagagattggtggtatgtgctatttccaggaaaagcctgctgaaatgctgatggcatgtaggtatagctctgaggcaagaattgatagccaatcatattagcaaaatgtcccagaggaagagtaggctgtgaatagggatgcagccaatcatattagcaaaatgtcccgaggaagagtatgtgcagcaaggtgttgaggaagtgcaggtccagtggcaacattggcaccaggcagagcttgtggattaggttgaggtgttgaaatgttatttgcccttagagcctctgacatggttatagagggaccaccaattgaagaagcaatgttgctatattttgaaggcattgattgtgttgcagggaagggtgagtatgggatatcctcccttgctgtttgaactgttgaagccaacagtgcactgggcaaagaattcgtataagccattacactagagaagggagacaggttctgtatctgtgagcttgtctgcgaatgagggtatgtaacatctggttgttgggcattttcgtaggtaaactcgtgtgaagaagggaaatgaatattgattttcttgagcagtttcagggggttcagattttaaagcctctgattgtgaaatggaggaatgctcataagtcccagcatccacaccagttatgtgagctaaattcccatccgaggtagtagtaagatgctcatcggcataatagtcaggatttctaacatctgaggacccaattgttgaaacatcgtttgctccagatgtatcctccaagttacttttcaagggcctagatgcatatgggccagatccagaaagggaagcatcatttgcagatccaaaacttccaaagctcagatttaagcattcagcagaatggagttgtaaatgatttggaattactacagaagaattttcctcctctggttctgtcccctgatcatttgagtgtaaatttagctgctctaagtttgtggctactgatgaaacaccatcttcagcttcattattttcaaaaggatgccgatgaggttggtaagaatttatgtccttgtacaagctaccatcaaaaacagatgtactttcgggattctcttcagatatacttttagcagatccaacaatgtcgggattctcaacaggatcatcttcagctacaaattcatttacatgggtcttcagctgctgattagcttcaccagagttagacgagtttgtatggtactcagacgttggatgaccatctacaaccaaggatacagaaacagctggttgatgctcaatcgatggccattcatcagtctgttcaacattggagtcaatagcaaagccatggtcattatttgtctctgac

SEQ ID NO: 136052 - DNA, 476 bp, Glycine max
  Clone ID: PAT_MRT3847_93865C.1
ccacgcgtccgcggcgcgtgggcaccgttttatagtgaagaaaacaatagaagagagcatctacaaattgaacaggagcagagctgtctgctctactataaaccgtaaatccaaaaacttcaaagatgagcctgttttgacgctgaaggatgtggagtcgctattcccgatggcaggacctgatgaacccctagaacaggcagatcaaaattacggcgatagcttgaggagtttgcctccatctgttgccgctgggttagctgctgaaagaaggcgactaatggagcaataagttaatggagtttgcctccatctgttgccgctgggttagctgctgaaagaaggcgactaatcaagggacctccatccatcgttgtggcagttgtgctaattttacttgatcagaatttctcttcgcagcacagtaacgacagtaggagaatgatgctcctttattatgaagcacccccatcatg

SEQ ID NO: 136053 - DNA, 272 bp, Glycine max
  Clone ID: PAT_MRT3847_93866C.1
gcaaaagaagaaacttattaattctagggccagtttggataaactcatgataagcaattgtagaaaagaagtccaaaaataagtatactaaggaagcaaattccatcaaacttcttggcaaagttaaaatcaacctttgcacgtcaacttttttaaaactaacttcatttaacttcttgcctttaatcataaaccactaaaaagctctcctaagctagaggctaatctaaattctaaaccaggtaggcccaaatgattaatagttgattttg

SEQ ID NO: 136054 - DNA, 229 bp, Glycine max
  Clone ID: PAT_MRT3847_93867C.1
tttttaacttctacttaatttctaacaacaaagaacatattcccagtaaaaactcccccactcacacgctggttagcgtactagcggactgcgcgtaaaactgacacgccgactcgggaacgaataataggggattcagtgcttccattttaccaggaagggggatcagatttgccctcgctgatgaacctatgagttctttatttgctcaacatggggcggtgcccaa

SEQ ID NO: 136055 - DNA, 244 bp, Glycine max
  unsure (1)..(244): unsure at all n locations
  Clone ID: PAT_MRT3847_93868C.1
cccacacgtccttctaaatactcatccaaacttctctacttatcaataccacatnaaccccgcccttttaaaaaccaaccacccaaactattttaaatttcttttctaaagcctcccacatctcatctcaattctatcacaaactattaacaccaattattcacttacaatgctattccccacactctcctatcatatcttatttaaacaacacataccattatatttcattattaacttcaat

SEQ ID NO: 136056 - DNA, 701 bp, Glycine max
  Clone ID: PAT_MRT3847_93869C.1
cacgcgtccgcttcctccgcaccaacaccgccttcaattccttacctaagtctaatagtttgtagaaaaagagaaatgggacggggcaagaagcaatgatcaaggttggtgttggaagctagagacaaactaagaagaacaaagcagagaaccccacctcacctgaacatgcaaaggaaggaaaagctcggggaacgaattgcagcgttacaacagcttgtttctccctttggcaagacagatacaacatcagtgcttcacgaggccatcggttatataagatttcttcatgaccaagttccggtcctatgctctccttacttggaaagttctccttcctcgtaccatcaaaatcagcatgatccttccagtaacacatggagatgagtaggcattgaagtatggggcagaactacaaaagtatagagtagctaactatttaagtgtcgatcttcggagaaggtgggttgggtccaagatctgtggatcataaagacaacaacgcccctcaattatttgaaatcggtgaatgttgtataccaactctacatggtttaatggatgccctcgtggggattcagaagtgttaatccaatctgtgaatgaaaaatcaaaaggggatccatgcatcagatcctatccaaggcaaacccatgtgagtgtaacttatttttaatttcaatgtgcccttccccttgttt

SEQ ID NO: 136057 - DNA, 894 bp, Glycine max
  unsure (1)..(894): unsure at all n locations
  Clone ID: PAT_MRT3847_9386C.1
gggtggggggggaaatggggggggggaaattgggggttagaaaagggggcggggggaaaaaggactaaattaggggagtggttgaattaaggcgggacgttggaggactgagggggctttttttaaacaaaaaataacacccaactccttatgtttttatttagtttgaatactattattggcatacaaataacttgaacgctatccttcacatagtagatagcaaaataacatttgtgaattttaattaaaaggcgccgcaggtggctctacaatcaaggtagattggaaacaacattcaggcaacatattataaacaaaaagatggacttagtaaagaaatccacgtaggtagattcctgtttattacagaatatgttatacatccatacatatgtagcagaaaaatgttcagcatgctctgcaacaccctccaattccaagtttcaaccaaccttggaacaatcagcattgggagagatagccacaggaagggttattccacagttccccggaagagcctgagccagttgtgagttaatgttgatactcttggaagtggatttgatgcagttgcaagcagccttcttgtcctctgaggttgttgcagcagaggcaagagctttagctcctgagcaacaagcagctggtggctgtccactgccactcaccaagtagctcacacatggcctcaagtccttgatcacatcactgcatgaaattgcagcctctgaagttgtggcgagaagtaggatcagaagcacaagggtagctaatgctcctgaagatttcatggttgctgaaaagagaatgataaatgatgatgatgcctgtatgaattttgaatctcgntcttttttcaccatttataggagtttgatcaaggaagctaaa

SEQ ID NO: 136058 - DNA, 210 bp, Glycine max
  unsure (1)..(210): unsure at all n locations
  Clone ID: PAT_MRT3847_93870C.1
cgtctacactttcttgttttcatttatccaatgtacttcttcttttaaacatctactacatntgcgagctcaaagagtaacataaaatagtggtaagggcaaaaaaccacctcttcctcaaaaactatatatcaattatagatcaataacaaaaattcacaatgcttcactcgtaagatttcttaaataaatccaatccaactactaaat

SEQ ID NO: 136059 - DNA, 528 bp, Glycine max
  unsure (1)..(528): unsure at all n locations
  Clone ID: PAT_MRT3847_93871C.1
ctgagcatcgtctagctatctcgatcgaactgtccaaggtcctgtcacatgggcctgtagcttaacttaaacaaggcggaaagtagtgccaaacgcgttgtctgaagcaattgctacggcggattaccccttcctagaggcggcaacgtaagttataccccggaaataaccctgccgactgcaaaaacggtgggttaagagccggaagcagccgaagttattagaggggcgcagcgcagcgcccacagcatagggttcagcaccatagcgggcacactagaggaaccatacgggtagcgtttggtagggttacgacggttacacagtgggnttggtatgcgaccgtagaaattgattaccgttaaagaggagtggcagcatttgatgcagcgtagcaacggctggtaaccttggccgctggtagtgaacttaaacttaacgtagtgactataaggttaacgggtggggcacactatccgggcacggaggccggttggcgctggtggtgtgacggcccacaggaagagg

SEQ ID NO: 136060 - DNA, 710 bp, Glycine max
  unsure (1)..(710): unsure at all n locations
  Clone ID: PAT_MRT3847_93872C.1
aatggggccacaaagaaggaaattggccgagcaaaagaatacatagtanaacanctgggtttggagaatggtaatgctgtggagatgggtacaatacatgcaggggactttatgaggcgattctgttctaatctttgtatgaataatcaagctgttaaagctgctcaggaagctgtgcagaaatcagaagaatttgatataaggaggagtcccatatcaattgctgcagcagttatatacatcataactcagctttctgatgataagaagcctctcaaagatatatcacttgccacaggcgttgcagaaggaacaattaggaactcctacaaggatctttatcctcatgtttccaaaataataccaaattggtatgctaaggaggaggatttaaagaacctttgcagcccttgaattgtagagcagaatattaccatccatattaacaatttacaagttataatgtcattagagcattctgtttcagatgtaactgaactggttattacaaatcaaagtgccgtttttattcattgccgtcgatcgcaccattttttaaaccctcctaatttgagtactcgttgggagcaagcaacatacaatgtatgaatttcttgattatggtaaaacatcagagttattttttgctgtcaaaaaaaaaaaaaaaaaaaaaaaaagcgaccgcccgctctaaaggatgctagcgtacg

SEQ ID NO: 136061 - DNA, 1337 bp, Glycine max
  Clone ID: PAT_MRT3847_93873C.1
atttagaacatcaaaaggctccggttgtcgccacccgagatgctggctctctctctttccacgcttccgattaacacactacgcgtgcaaagaacctctgctctcctcttgcttttgatagagaagaaagaagcgagaagatgtcagacgcgttctgcagcgactgcaagaggcagacggaggtggtgtttgaccactctgccggcgacacggtgtgctcggagtgcggcctcgtactggagtcccactctatcgacgagacctctgagtggcgtaccttcgccaacgagtccggtgacaacgatcccaatcgtgtcggcgggccctccaaccccctcctcaccgacggcggcctctccaccgtcatcgccaagcccaacggcggcggaggtggcggcgagttcctctcctcctccctcggtcgctggcagaaccgcggctccaaccctgatcgcgccctcatcatcgccttcaagaccatcgccaccatgtccgacaggttgggactcgttgcgaccatcaaggatcgggcaaatgagatatataagagggttgaagatcaaaagtctagtagaggaagaaatcaagatgctttattggctgcttgtctctacatcgcttgccgacaagaagacaaacctcgtactgtaaaggaaatttgctctgttgccaatggggccacaaagaaggaaattggccgagctaaagaatacatagtaaaacaactgggtttggagaacggtaatgctgtggagatgggtacaatacatgcaggggacttcatgaggcgattctgttctaatctttgtatgaataatcaagctgttaaagctgctcaggaagctgtgcataaatcagaagaatttgatataaggaggagtcccatttcaattgctgcagcagttatatacatcataactcagctttctgatgataagaaacctctcaaagatatatcacttgccacaggcgttgcagaaggaacgattaggaactcctacaaggatctttatccccatgtttccaaaataataccaaattggtatgctaaggaggaggatttaaagaatctttgcagcccttgaattgtagagcaaaatattaccatccacatttaaatagttacaagttataatgtcattagagcattgtgtttctaatgtaactgaactgcttattacaaagtgccttttttttagttgtcattcattgccgtcaatcgcaccattttttaaactctcctaatttgattactcgttgggagcaaggcaacaacatacaaagtatgaatttctcgtttctggtaaaacgttagagttattttttaaaaaaaaaaa

SEQ ID NO: 136062 - DNA, 468 bp, Glycine max
  Clone ID: PAT_MRT3847_93874C.1
gacaataccaggtgattttgtccttgtggttaagttgacaaccataaacaatctgtgagcatatgggctcactcctagtatttcacgttctcgtcttttgggcaccattcctcagtccatttcacagctaactgttcgtaatcacatggctacagtgagaacaccatcgatttgtgattctagcaagcagagctcatgacaattttctattgaccttctctgtggaggaattttagtggacaaaactggagatgggagcacacttatacaaaatgctccaattattaacttgttgagagttgctgcttggaacaatggctggttaatggacaagattgcgatgtctgggaatgcaggattcataaggagtgattgggcctcattggtacacgtgtttttaactaacagcatcagtacagagcatttcgatgcatgtgtgtggacaagatcagaaccacattcctggga

SEQ ID NO: 136063 - DNA, 2488 bp, Glycine max
  Clone ID: PAT_MRT3847_93875C.1
taatgctattagttttactattccagcccctcttcgtttttaatagattttctagacctcaaataaaaaaagaaactttaagtacacaatttaaattttagaaactcaaaataaaggtaacggagcgatttttttaacccacaaactctctaatactctctctccctcactgttcactatgttgctcagatctttacgctgctgggaggactcttccattggctccatcgttctcgatctcattcccggtctctgaattggtctcttctcccaagtgatgcctaaatgtggagaatttgctaaggtagatcataaacataatataaactttgaggtgcttgacatggtgttaatggagaatacacgcaaaatagagataacttataacctgtctaaacagagattaatcttaagctatattaaaaaaaatgaaacattgcccatcaaggaatgaattttgcgaaatccacttacgaagattcatttatttttctttgactagtggcttattaccatatgattttttttaactctttggaacattttataacaccaatataagaaactcgaaattaattctattgatttagatgctttttcctatggagaaaaccctttagcaaagataactctgatgatatatcaaaacattcttttcattttttgaggaacatcgagttaatggttttaggaggaggtgagagctacctggaaattcatgattcaaataaacagcctacagtgatatagatatatcattgtaaacataagcatttattttactattaattgttttttgtcggaattaatttttttgatctcattactttcttgtgtatgtgtatgattctttgttcatatgtggtttatatgatttgttcccaaaccgaacttaatgtaggagtatatatgtatgttgttggagttgctgcgtactgcgttagtacgcagattgccatgtcctgcaataaactacgaaagtagaattataaaattaaagtaaatgttcctactaagataattattatgagcagtatcttttgggaatattttaatcatcgttttctttcatatcatgatgtataaatagttacgtcaaactttgagaagaaataaatattgaatacacaaactaattaagaggttgtgaaggctcttattattgacagatgtgcaatcaagtatgttaattacatcttccagaggataattacacctaccaccaaatgggttcaagttaagggattagttaggaattgtgagttagttgttgtccaaacacaatgctcagcaagtaacccctttggatctactcttgtatatggttatcaaaatattgcctttgaggtgatgaagaatggatatattgcaacaataactctcttccaatcatgatgatggcgcttttggttactctcaatctcatctccatattgttctaagatctatcaaggttggatatggaaattcaggagtaacaggctaggtttgtacgagcactgtttaaatattgcagccttccatcatcattatcgtggcaaggggctatgaaaattgtacagctgtgtaacaaattgtacatattaaaatcctgttaaattatgtaattttctaacattgacatcttgcacaaagcaaatgtaatgaattccttttgctttgcctctcacaatgcaactcggaaacagaacactcgctcctatgctccctccgcagcaagacttgacaaactccgccgccgcatcggcaacacacagtatgcagtctccggcagccaagtccggcgtgcactgcgcgagaccatacagtgtcacactgccagaagcattttcttgcttaaccgcatatccattagactcactaagatccagtgctgctttatttggtaattcatcgaaaatggatcctaacgcagtgtagaatccattactatgcaaaaccacaggatcccccaatggaatattgatcttgtgccttggccactcttccattttagagaagatgaacctgtaagagtagcgcaacaaacactcgttgtaccaaatcacagcttcttttgatgtgggacatgacgaaggtattgtttgtgttgcaaaacccacacactctctgcatagagcaaacggcacgtctccacggcacatgtagaggccatagacggtgttcgaatctttccctacggttgcgttgaagaatctaacgttgttggttacgtttgaggaaaggtaggagagaagggtgttgaggttggtgttgaaggtgctgtttggagtgaaagtcttgttgctcgtgcagctaacgttgttgaacactgatgccgaggtttctgctatggtgagtaaaagggtgcaaagtaggaacagagttagactctgtttggacttggtaatcatgattctgttatgccgagaaattttcttcactgagtcgaagaaataagtgaaggacatgcaaatgcgcgtaaacgggcagtaatcagagacggcgc

SEQ ID NO: 136064 - DNA, 431 bp, Glycine max
  Clone ID: PAT_MRT3847_93876C.1
gggaacaaccactttgtcccctttttttttggggagagagaatacgaagccccacggaccaccgggggatgccctttttatggggggaagcacattttataaacacacagggggggggggaaattctagctcaaacaacctagctggaaaagggggtacttgcccaaaccacagcacatgatagttttttttatccacaaaccccttctcagggggctcaagaggcgggggctaatgaaaccacaatgggggcccgaggggcggggcccccaaataaatgggggacccaaaaaaaggccctgcttccaaggaaaggggaaacaggggtagctccccgaccaacccccataattggaagaaacgtctgatgattccttcccaaattatttgggggggaaataccaaaggcccgagttttggttccctccccc

SEQ ID NO: 136065 - DNA, 350 bp, Glycine max
  unsure (1)..(350): unsure at all n locations
  Clone ID: PAT_MRT3847_93877C.1
gaaatgnannnaagnnanangatgagnaaangnaannaaagnganacnangngagngttggtagtanagntgtgnnntagcagcantnganatnaagnatagagggncngtgngannnganaggtgtnattggtgggnagatataggtgnggtgnnnatnannntacagangnatnanangtnaanngnanagnanaggganntntngtatgaaaagntgagtggagnngatntgnangatagtaanggcgagagnnntatggtaggtgngntanngtnangngaggtgnanagngagaganangtanggngngngtangnanagcgngnaagtnngnnggnatatctgn

SEQ ID NO: 136066 - DNA, 330 bp, Glycine max
  Clone ID: PAT_MRT3847_93878C.1
tattttcattgcacagagacacatgagaggtcaactctaactttttctccctcaatttcagttcttctacgttctaaccattcgcaaaacgccttcgttttaatcttacatcctcgttagtcgttagttcttacgcgaaccagctgaatgcacggcaacgtcggtcacgtgaccaatggcttctcatcaattcctcgacaacttcataattcccgatcacattctcgtaccgggctcctccgactccgaggttgaaaatgtcggtgacgtgcctcactgtccggtccttgttttcgtcaactccaagagtggcggtcaactcggcggaca

SEQ ID NO: 136067 - DNA, 477 bp, Glycine max
  Clone ID: PAT_MRT3847_93879C.1
gtttcgtttcgtttcactatttttttcaggtgaatattattgcgcttttcgtgtttctccccgaaagtacaaataacgcattgccttccctattgtctgtgtgtccgtgtttggctgcccataatattaccccatttttagcttctgccaaacaacaacttgtgcctttttttttagctcctttcttatttgtttctttttagcctttttgtttttttattggccgccaaactaaaaacaatatcagtatttgcgtcttttaatctggtattcctctcttctgactggtgcttcgttttcgcctttcaagatatttagacgaaaacaagaatccgcattctgattctgaagattcatgtctaatctcatttctttcttcccttggttggagctcgttttttagttgatggactgttaccccaagagcagtgacaagaaaacattaaagaggtggttttttattgataaaagagttgg

SEQ ID NO: 136068 - DNA, 399 bp, Glycine max
  unsure (1)..(399): unsure at all n locations
  Clone ID: PAT_MRT3847_9387C.1
gggaaccccctatgcaaaaaacttcccaagtttttcttagcaaaaaaaaaaaccttgggggcaaaaactcccccacccttttatgggaaattttcatgggataatttatgaaacaggcttgtacttaaacccccgatcttaaaacacaaattttcgtcccaacaacaaaattttttataacttgggaagcccgcgggcaaaaagctaaaaagtaactaatgccagccaaagatcaaatttcattaaatgacaaacattggccgaaacaaaattttctccgatcgcaaattttggttccacaactggtcaacgattggcctttgcaaccctctcaaattcatcctttttcttgaaagcanaactgggggaagacccttttgctgcttaaaaaggtcatca

SEQ ID NO: 136069 - DNA, 186 bp, Glycine max
  unsure (1)..(186): unsure at all n locations
  Clone ID: PAT_MRT3847_93880C.1
aaacccgggccgacgcacgcaaccgtacgtctncaaaaaaacaacataatggtgtcttaaacaaacaatctacctatttcacgtcggtatttttataaatgctggtgggccctaaaaatataaatattcacaacctcatttaatttcaatcccatctccattaattttttaaacacctacacctta

SEQ ID NO: 136070 - DNA, 257 bp, Glycine max
  unsure (1)..(257): unsure at all n locations
  Clone ID: PAT_MRT3847_93881C.1
cacaaaacttccacacgagagannagaggacgtattaagactacaaattnncaatttnccaanggcgtcgnggcaacaanaagnggnncgagctgaggcagccgcgaaaggggcngcgnaagancgcgaacaaccnaaccganaganagaccnagnttccaggggaggcgtagcngancancatcancaagacgnanacccgnaagntcaacganagcgtggagtaatcanttccaaacncaaggcggtgcagacac

SEQ ID NO: 136071 - DNA, 553 bp, Glycine max
  Clone ID: PAT_MRT3847_93882C.1
tttctctcgaggcagcaagcacgggagagattttccaaaagggtttgcttgtttatttttatgcttctttttttttttcagaagctcagaaccgaagatcccagtagaaaagtttcaagcttttttgcttcccactacttgaatcggttttttgggtttcatggaagatgtcaaagttgttgcttggctcatttcactttttctgtggaattgggtgcttgttgttgatggcactgatggccttctctctccaaagggtgtcaactatgaagtggccgctttgatgtccatgaagagtaaaatgaatgatgagttgcatgtcatggatggttgggatattaattcggttgatccttgtacttggaacatggttggttgctctgccgaaggttatgttatttccctggaaatggccagtgcgggtttatctggaacgatttcctcaggaattggaaatttgagccatctcagaacattgatattgcagaacaatcagttatctggtcctatcccgactgagatagggaggtatgtagagcttcaaacccttgac

SEQ ID NO: 136072 - DNA, 541 bp, Glycine max
  Clone ID: PAT_MRT3847_93883C.1
ggctcgagctgaccaccttttttaaagagaattttgtcaaacaagttgattgcttggagggtgatcatccttgtttttgtccacatgagaaggggcctctaccagtaggactacatgttgtttgtcttttaatttgttgttccccataggctgcaagtcttgctgctcctttaaatccctccttttgcactacaagatgttgtgtccaacaactttgcagacatcacaaaagggaagaagttttcatagttaactttgacaagaaaagcatacgactctctttccaccatgacctccaaatgaagggttgtggcgaggtcaacatccataaggatgcaggagaaatggccaaaagttttggatttggtggcctcatccagagtgatgggggaacccactgcccctacaatttcgaatagaagctgtagatcccaatattcctgcgagaactcgtgaactctctttcagcattgggcgtgcgtatgccttacctctgtagggttgaaattagagctccattgggaaagcctcaacgatcatg

SEQ ID NO: 136073 - DNA, 488 bp, Glycine max
  Clone ID: PAT_MRT3847_93884C.1
cacgggcaatgatactttgtttcgacaggctgcgatggtggtcatgtgaccattggcgacctctcacatggaccgtttaggcctaaagtatcgaacgctggctctagtgcgcgactctagatcaatacaacattactgtgttaccgggcgttgtggccaacaccggtttggtaacaccattgcctcaacacacaataccggaagcctctttcatccatgttgacatggattgtgcctaacactcaaacacacggatgctgcctaaaatgtatcaacgttctctaatgtagctaatgcattgtgcacgtaatagatagcactacgtggcttatgcaacattagaacatgtcaaagcaattgctgatctcagagctatactccaggaaaagatgcatactgccatgttactaccatgtaaacatatgaaactgtgaagattgcgtctcatacagaattgagagacactggacctgcccatagcacagggc

SEQ ID NO: 136074 - DNA, 475 bp, Glycine max
  Clone ID: PAT_MRT3847_93885C.1
cgagacttgcccctgggctcggtttgcgccctcggtccctccgcccccgtccgcccctttcagatctgagatgtcctctatctttccacctgagttgctccaccattacatcaatggtccgatgaggaaatacttcaacactaagttgcggtgcgctcatgaaagtacccatagttgctgtgaagcacgtctcggaaatccaatcatacgaacagtgatgcaaaggagtagtatcgtctcgtcgtgagatgaagtgtggcaatagtgccctccaagtccaaatcgtgttgcggtgcctcaaagcactctcacttctccaattcttgaaaacgtgtctcatggccagcttcaaacccgatcgtctgtgccttttgatttcgcaatcatagttacttatgatttttattttttttatgttgattggtattgtaaatttcttagatctatttcttgaatctggtatcataaatttctg

SEQ ID NO: 136075 - DNA, 496 bp, Glycine max
  Clone ID: PAT_MRT3847_93886C.1
ccgcggcggaattcgggggaccaacgaggcggcctccctctctttcggcttacctattggcatggccattcatatgtctgcttctgggtctgtttctcttacaatcttattctggttgactagcttggagaagagtacagcctttcaagcaacagagggggacacagaaagcaacaatcctcatcaatatactcatattgtacaccttagctcactcctttctacatcttcctgcagatgttctgccaaaggagccaaaagaaaagcatcactcgaagagggacacagacatgggccatgctcccaactgaagaatcatgagggcacagcaccgcacacaacaccacacagcgagatcctgaaccaggacaaagacagggtctagtgcatcaactcaaggatctcacagaacttgggccaagatagaagtgacagagaatcggtctcagccacactaccaggcaagactgggagccttattgagtctgggaattac

SEQ ID NO: 136076 - DNA, 285 bp, Glycine max
  Clone ID: PAT_MRT3847_93887C.1
gctgccagacgacctcggaagggggttctagatgcatgattgcttaccgacctgacggagttgagcctatagtgatgggccccgttcgtcttggtagaaaaatacacatgacattgccaaagctaacagtggatactggggatgctgaagatccatgctgttcgcattggcgatgatggtgcatttgaatgtgcccaggctggagctcctccggagcgaccacctgcggcacctctaccataggagtgcgccctggccaggctgacttcgatgctgccgaaacgg

SEQ ID NO: 136077 - DNA, 566 bp, Glycine max
  Clone ID: PAT_MRT3847_93888C.1
attatgtgttcaatagtcttctttactgcttgcttgttatgcatatttattggtgggtgctgatatttcggatgcttgttaaacaaatccaagcaagaggaaaagttagtgaagatgttcgatctgattcagaagatgaagatgataacatgaagattgagtagggaagcaaaagcataatatattctttaggcaaaggtgaatctaaaatgatgacaaatggttttacaccctaacatgatgaatattgtcgtatgttatgtgggcttatgttatgttaaattgtccatattttatttttttattttttattttttataaaaaagaatctgtttgtccataattattttgtaaactataaacttgtaagttttttttttctactagttcattgtatcaactaaaggttaggcggaaactgcacacaaaaagtgtttaacgtcttttgcctctctcaatgcatgtactgaactcttctataatctttttttgcattattatctcatggtacactggcatatgaggcaaaagagggaatttaaagttcatctttgttaggtgttgcc

SEQ ID NO: 136078 - DNA, 458 bp, Glycine max
  Clone ID: PAT_MRT3847_93889C.1
cccacgcgtccgcccacgcgtccgggtgaaactgctattgttggaaacagagttggactgatgcatggtgtaacattaggaggcacggggaaggaaataggtgatcgccatcccaaagtaggtgaaggggcactaattcgagctagtgcaactatacttggaaatataaagattggtgaaggtgccatgattgctgcgggttccctggtgttaaaagatgtccctcctcactgcattgcggcaggaataccagctaaagtcattagtggtctacaggagcatgacccatctttaaccatgaagcatgatgctactaaagattttttcacacatgtagctactaacttcagagatgaaaaacccaatggagcgcagcatccagatagaaatggaatgaacatttgagaggttcggcaacgtagtctcgtttggcatgcattgtcctcaaaggagcatga

SEQ ID NO: 136079 - DNA, 228 bp, Glycine max
  Clone ID: PAT_MRT3847_9388C.1
cttctcttgaggtaaattgcatgctgcttcaccttgctattttgtttacattcgctgcagtgttttatcttggaatctccagtgaaacgtcgtgcggttcatgtgcgctactattattagacgtgcaatgaatcactaagtgcggtgctccttctgccgaggttcgcaatatcacatttcagtgtttgaatattgttgacagtgctggatttggtactgcaggaattg

SEQ ID NO: 136080 - DNA, 711 bp, Glycine max
  Clone ID: PAT_MRT3847_93890C.1
tgcttatgccaaatatgtcaaagagtactacattggaacttttggtactgatgtgcagacttatgatcagaagtacttgaaaagaactgctatgaacgaggacaattctgctcgattatggtggtttcaagtttgcactgaagttgcatactttcaggtggctccctcaaatgacaatattcgctcctcaaaagtggacataaaataccatttggacctttgcaaaaatgtctttggagagggcatctttcctgatgttgatgcaactaatttatactacggaggcactaaaattgctggttcaaaaataatatttacaaatggctcacaagatccttggcgccatgcatccaagcaaacttcatctcctgatatgccttcctacatcgtcaaatgttacaattgtggccactgttctgattatcgaggatgtcctcaattccctttctccattgaaggtaatgagaaaaactgcacctctcctgatgcagttcacaaagtaaggcaaaagatttcagaacatatggacttgtggttatctgaatgcgtcgacacaggcagaagttttatatgattatttacataagatgtgaatgatgtacttttttttctaagttgttaatgatgtactataactccgcatgacttttggtatttctttccttcataagctaattatgacaccgtgaaatatatttagtgacttcgtat

SEQ ID NO: 136081 - DNA, 447 bp, Glycine max
  Clone ID: PAT_MRT3847_93891C.1
cactgagacaacagtgacataattgctgagatttggacatacttgggtggttatgatacaatagcacctaacttgagaaatttgataccacattacatgaggtggcatattgttaccttgctgatctacatcctcccatataatctcactgttgaaatgaaatatacgcggattcagagtgatattaaaatgtccggcttattgtacgacggcagatacaaattctggactaaacactaaaaaaatcttgctttgacagatgaagaaaagatggaagtgattagaaatagaggcattcctgctgatgctcttgcaaagcgagctcatgaatgggaaaaacatgttgctcatgaaagtctgaaggatcaaattcctgctgttgacaagccagattctactaaggttactacgtgcgcataaattatgaaccttaaacaaagcgtagat

SEQ ID NO: 136082 - DNA, 481 bp, Glycine max
  Clone ID: PAT_MRT3847_93892C.1
cttaacttattgagatcatttttgggtgtgcttacattgaattcttttttttttggggaaaaacgattcgacccagtttattccaccacaagggcaaactatccactttagagatgaaatcccggggggtgcactacctcaccgcagggcctaagggaaaaaacccttgtccttccaggcccaccatgaactacttagctctgggataagaggcaaggcaatgttcccaccagaatgcctgggcctggaatgccctgagactcaaacattcgctaaagaagaacctgcaccctgacatattggtttgaccaaccgcacaccctttggcacagaaactctggaacttccagtggggggctcaggcgccctgaactcttgaggcctatcgccaacaacacgccggcacacccggagggaaacgaattgatcatgagctgagcagggggtcatcacccttgaggggtggttgcattcaaggggg

SEQ ID NO: 136083 - DNA, 164 bp, Glycine max
  Clone ID: PAT_MRT3847_93893C.1
tacggctgccacaacaccacacaaggggggggacaacccctccccatcacaaaactcaccaagcggccgctccacaggactcaagcttagatacccgttcacgcaacctcacacctcatctaaagcgtcacctaaactcaattcaccggtcatctttttacaac

SEQ ID NO: 136084 - DNA, 293 bp, Glycine max
  unsure (1)..(293): unsure at all n locations
  Clone ID: PAT_MRT3847_93894C.1
gcttgaggaagcttgagagcctgttggggagnttaaaagatgagaggctgaggggctcggttgacctgcgtatgtttgctttgagcactgcgggnccgaccaacagctcaccatgttcctggcgcgnctgacttcacagctggtcaggagtgntgttccctgggcaggtttcagtcgntcctggcctggctctggggtgattggaagccatgcttttcgacncctttacagtttgcagcctgcaagcccaagtcgggctgcctccctccctggtnagaaggnccattagagnt

SEQ ID NO: 136085 - DNA, 684 bp, Glycine max
  Clone ID: PAT_MRT3847_93895C.1
gataggggaatcttggatgggatgccactatttttactccagaaaatcgtttattacattacatagtgccaggcaatatatgatggattgtggtatcaacagatgtgcaaaatagtatttgatcatatagcatagaaacagggttaacaacacaatacttaagacaactctgaaactacattctaaccactgttggagaagaatctggctgacccacagaggaagactttgaagcctccaccatcactggtgcctgttccaaacaactctggctatcatcattgatcatcatcccaattgtcatcttctccacctcatcttgtgtatgtatatgaatcttggataccacatcacagaactcactgcagacaaaaggcaaaatgcaatttttttcagtgtatttcacctaaaatgttatgttacataggatggaacaggtgtgaggttctattggtcccatcaattaattttgtagaataaggagatgatggccaacgataactaaaacatgaaaaagctaaggaagatgactacttactgccacggatcatcccccacaaccataatgtcgttttcactgtcagtgtagaggattctccatcccttattaggatctattagaaggccttccatgctaaatagtctctctagttcaatcagcaggtcattgtagctgctcaatct

SEQ ID NO: 136086 - DNA, 343 bp, Glycine max
  Clone ID: PAT_MRT3847_93896C.1
ctcgtctggttttggcatctccgcagaaccaccacccaccaccctgcttagaccaggtcctgtctctctctagagggagggagaatatgggaggagatgagagcagctcacaggatgcttgtcatagtaagacatggctgaacccagtatcaacggggagctagataatacccagcctacggtgcaggttgagcagcaccagctgctggttcagcgggcgttaggggcccagccgcatgagccttagctggattggatggctatgctgtacccggacaccgccatggccatgactcagcagcagaggctgaagtgccctgagcactatatgccctatggtcac

SEQ ID NO: 136087 - DNA, 733 bp, Glycine max
  unsure (1)..(733): unsure at all n locations
  Clone ID: PAT_MRT3847_93897C.1
atatatctttggtttcaccctacactacacagcacgctcctcgttgaaggtttctgaacacgtttcgttctctcttcgaatcaaacatgagccggcaggggcagagatccggtgcgacgggggtgcaccataaccgccagtactccgaacactatctcgacgcctcttccaagtggtttaataactcttcctccaatcacattcctcctcttcaggactacaatttgtacggcggcggaggaagaatgtatcggagcaacgcgcagaggagcttcaatgaatattgtttggatccgtccacgcctcctcggagttacgccgttaagaaaaacggcaacggttacggtgaggaagacgattctcctcgcgatttcagccccggcctcttggatctccattcgtttgatacggagcttcttcctcagattacgtcctcgaatttgtatgattccgagccttacattttcggcaaacaacctgtcagagctcgcgcttctgaaaacaatgtctccaatagtgttgctgctgcggacatgtgaaatctagcaatgtggctaaaattaaagtcgtggttcgcaagagaccgcttaataagaaggagacagctaagcacgaggaagatatcatagatacagtttcgaattctttgacagtgcatgagactaaactttaaggttgacctaactcagtatgtagagaagcacgaatttgttnttgatgccgtcttgatgaa

SEQ ID NO: 136088 - DNA, 745 bp, Glycine max
  Clone ID: PAT_MRT3847_93898C.1
cacgcgtccgtgcttatttccctttctctcctcactcttatctcctctcctttctttttctcttcatctttcttcccttctccccaccatacacacaacacaacacacatccctttaatatatcaatgaagctatctaggtcccaccttctgtctttcctttctttctttgttctcactcactcattcttgtttcagattatgagatgaactattgaacagaaaactgcttctctctccttgctttaatgttgcacttcctttcaagttccaaccaaagagtagcatatgttattgttcttgggttacttatcctctgcaacccggtcttaattcttatgtgtaatgcctggtaggcccgagattgaagatctgcaatggaagcatgacgttggtgacatactaattgttatgttactgcataaaaattctgttcaggaggcattcaacttttgcttcaactttcatgattgaacaatatgaaattccaaactttgcagcacccaccaattctgtgacttctaggaatcagaaaagttcagacaatatttgtctcatttgcttagcaaaataggttgtgtgtataagtttgctgtttttacttataggtagccgccgcccgtaatctatcttaggatttttcaaacagtgggttttcccactgtcctaaaattatggcaacttactatacgagttcaagtaatgaaaggaacgcagtgcctatgctgtgtcttagggaacctttg

SEQ ID NO: 136089 - DNA, 743 bp, Glycine max
  Clone ID: PAT_MRT3847_93899C.1
cccacgcgtccgcccacgcgtccgtacggctgcgagaagacgacagaagggggtgttgctttagaatctgggtgctgcggctgaagatctcgattagccgaaaattgcaagaacggcttcaggctcttgcgatcaacaaacgcagcgttttgatctcagatttgagggggagagaatggcaacaacagtgagaagtctgaagataaagacaagtacgtgcaaacgtatagtgaaggagctgcattcttatgagaaggaagttgagagagaagctgccaaaacagctgatatgaaggaaaaaggagccgatccctatgatctcaagcaacaggaaaatgtcttggctgagtctaggatgatgattcctgactgccgcaagcgccttgaggccgctttggcagacttgaaaggattattggctgagttggaggagtcggatgagaaggccagtcctgagattgatgaagctcggaacaccatcgtagaagttgaaaaagtatttgaaacaacagaagattaacaaggttgtttgattagggctcttgatggaggatattggacctgtattgtacattttcctggtcacaaacaatcatacattcttcttgttccatgtgccctctcctccccagtttaattctgtacttttatagaacatctgaaaatgaatgattatggcattgctctacttttctaggcttgaaaacccggtatcaatttatcaaagtttttacatccaaaaa

SEQ ID NO: 136090 - DNA, 310 bp, Glycine max
  Clone ID: PAT_MRT3847_9389C.1
tttttatgccagctgattcagcgccacaggctgctgccagaccttatgaaaatgcgcaatcctctgcatgacctggaatttgggatttcttcacgcttgttcgtacgtataagtgaacgaaggaaataaggcatgaccctactgttgagtatgctcacactctttgaaaattaccacacctctcacaattgacgtattgacgcgacactcgcgtgttttttttaagacttagagtcagatgggcactcgttctatatgattctcgcttacctgcgcaatgcatacgatcaagctgctgatatatagtgtt

SEQ ID NO: 136091 - DNA, 454 bp, Glycine max
  Clone ID: PAT_MRT3847_938C.1
atttgcacttcacttctatttcttttctgttctgcgatggaacttgtgcctgactctgaccctaactctgcgcggcaccaccccaccgtggcacgacatgttccgatccgcatccctccgaaaacccacctccgatcctcctcctcctcctccgccgccgtcaaatgccgaccaaaaagtcaacccctccggcgactctcagtctcaggcgcgccttgccctctacatagccatggcccacgccgggctcgccatggccattctgatcctcttctctctctacaaactcctccaacagtacctcaaaccctttcaatgggccgttctctgttccatccctctcagactcattcaccaaaccatcgtttgcttttggtctcaccctctcaaactaggcctccttcacacccttctagcccttcccctcaccgtattcacgctcttcattacaacc

SEQ ID NO: 136092 - DNA, 1249 bp, Glycine max
  Clone ID: PAT_MRT3847_93900C.1
atccaagtagtctattccaagaaaacgataataggctacaaaatttgctgattactaatttaacctttttgagttttttaacacctgtcatttttttcttctatttctgtcttttatcaaaatttgtctttgtttgtttggagtttggaccacaaaatagcgtttcaagattcttggtaacacacaacggaacttgtgattaaacggtgcgttttagtaagaggaaggtcctcttcaatcctgtctttttcatcgtggatctgcgctagggctccgtaatcagacacctttttcctcttacttcatttaacctcacaacaatcaagttttgggtgcggctgaagatctcgattagccgaaaattgcaagaacggcttcaggctcttgcgatcaacaaacgcagcgttttgatctcagatttgagggggagagaatggcaacaacagtgagaagtctgaagataaagacaagtacgtgcaaacgtatagtgaaggagctgcattcttatgagaaggaagttgagagagaagctgccaaaacagctgatatgaaggaaaaaggagccgatccctatgatctcaagcaacaggaaaatgtcttggctgagtctaggatgatgattcctgactgccgcaagcgccttgaggccgctttggcagacttgaaaggaatattggctgagttggaggagtcggatgagaaggccagtcctgagattgatgaagctaagaacaccatcgtagaagttgaaaaagtatttgaaacaacagaagattaacaaggttgtttgattagtgatcttgatggaggatattggacctgtattatatattttcctggtcacaaacaatcatacattcttcttgttccatgtggaacctcattagttgaaaatgaaacaacagaagccctctcttccaccgtttaattctgtgcttttatagaacatctgaaaatgaatgattatggcattgctctacttttctaggcttgaaaacacggtatcaatttatcaaagtttttacatccaaatttctataattttatgtggtatgcgatatgccacctaaagatcattaagtcagtaattccggcagtgattgtgtgtttgaagattactacaagggtattgtccacaaacttgtataaacttgtcaaattatatggttttgaatatcagtatcagcgcatgatcatatatttatattattaccaaagataattttatataatgacagattgttatggg

SEQ ID NO: 136093 - DNA, 548 bp, Glycine max
  Clone ID: PAT_MRT3847_93901C.1
ctcttttttttttttttttgtccttgtaaattgagcattagctctttgtgaaagggaaactcttggagaagagttttttctcatatgttttgttcttttcttactattcaataaaatctatcttttatttcccattctgtttcttggctcctaacaggctttcaggatttctggaatcacccagcaaatttcagcaatcctatcaacaattttccatagcaatgttaaatgtatatttcctgagactttctgttgagtgttgatggatcatcctttctgagttgaataatatctacaatggtctatccaagagtggagagccaacatcatcatactcaccggtcactgccataatcagcgttaaaagtacccataagtagcctaatgttatgatgtgtttaggctttcaattcctatgacattctttccttaaagtttccacgagaatttatgccttggagagagttgatggattctttggaaaacaaaggtcagatccactagagaatcttcaaaacaaaaaaagagcatattagccccaacctcac

SEQ ID NO: 136094 - DNA, 380 bp, Glycine max
  Clone ID: PAT_MRT3847_93902C.1
aacaatttctattggtgttcctcgaggggttttttttttgttctgttgcttacattacctacctttcatacaatcgtcaatggagaccgtcactaaggacaactagtatccatgtgaatattattaacaaaatggatggaaacttcatggtaagatggaactttaccaatagctttatccctcccaacatcagcagaaagatcaagttggaattttcacatgtgatcaaattctatggtgtttcaggggattcaacattgccctaaggtctgtcatatactcatatccacaatccatccgcatatacttttatatagaaatttttttcctttaacttttcgaaaagtcaatgtgaataagttgatttttacttaccgacc

SEQ ID NO: 136095 - DNA, 291 bp, Glycine max
  Clone ID: PAT_MRT3847_93903C.1
aggacaaaaggaaaaggccccaaatttaatttaaggggcccctttaacccaaaaattttagggaagacctcccaattttaaaaatattataaaaacatttaaaacttgggatattctttttgcccctaaaacattggaaattttaaaaagggtcccccccggtcccataaaaaattttagcccttggatcaacccaacctttaggaaccaaaatttttacttcccaaatttgctttgcccccaattcaagattggaaaaaaatccccccgtaaaaagcctccccgggagcc

SEQ ID NO: 136096 - DNA, 1372 bp, Glycine max
  Clone ID: PAT_MRT3847_93904C.1
cctcttccgaatgggctttccagcgcttcctccaagaagccaccgccgccggtacctccacttcatctccccctcagccacctacaatgacggcgtcttcctcgtcatcttcgcaccaaaacgacgtcgtggagatcaaggatgagaatctttctattcctaatttaaatcccagtacggcgttgaattcgaagccggcgtcgtcgtttggcctcgcacctccgccgaatattgccgttgattccgaagagtatcaagcattcctcaaaagccaactccatttggcttgcgccgccgttgctttgactcgcggcaagagtttaaaccctcaggattcaggctctacagctcacgacaaaggatcagagactgctagtgcagctcaatcaggatctcacgtctccactttaggatctggtcaggaagtggcaaaaattcaagataaggatgctggtggaccagttggaattccctccttgcccccggtgcaaaagaaacctgtggtgcaggtgaggtcaacaaccagtggttcatctagagagcaatctgatgatgatgaagctgaaggagaagcagaaacaactcaaggcatggatccagctgatgcaaaacgtgtaaggagaatgctttcaaatagagaatcagccagacgttcaaggagaagaaagcaggcccatctgacagaactcgagacacaggtttctcaactcagagtagaaaactcctctctactgaaacgtctgactgacataagccagaaatacaatgaagcagcggttgataatcgagtcttgaaagcagatgttgagacattaagaaccaaggtaaagatggctgaagaaactgttaaaagagttactgggttaaatccgttattccaagctatgtcagagatttcctcaatggtaatgccatcctactctggtagtccttcagacacatcggcagacgctgctgtacctgtgcaagatgatccaaaacatcactactaccaacagccgccaaataatcttatgccaacccatgatcctagaatccaaaatggtatggtagatgttcctccaatagaaaatgtagagcagaatcctgcaacggcagcagttggggggaacaagatgggtagaacaacttcaatgcagcgggttgctagcttggagcatctgcagaagcgcatccgtggtgaagtgagttcctgtggaactcaaggcaggggagagcaataaacacggttaaagccaccagctgcaccgaagattttgcacagcatgttgataaaatcatactgttccaattccaaccgtggcaggaattgcccattctttgtatgacaatgccttcttggatgagactaatgcattgacatctcttttct

SEQ ID NO: 136097 - DNA, 1014 bp, Glycine max
  unsure (1)..(1014): unsure at all n locations
  Clone ID: PAT_MRT3847_93905C.1
ccacgcgtccgcagaaacaccactgaacgaggttgcttgctccgacgccgaaatgaaagccccttcctctcttttcctcaaaggccacgttctcccttcttccatttttctcctcagaaactccaaaggaacacccaatgtgaaaatgcaccccatctggtgcttatgtaaagccattcaaactaattcatatgaaatttccaatggaagctatcatcccactgtgcaacaaacaacagaaaagaagacaatggaaaagctatccaggaaagttgaatctattggggcatttcaaaagttgcccatagtgatgccatctattgacattattggctctgcactcagaaaggcgaggaaggtttctccaacgaaaggaattgccaacattgcgaaaagggagaaaaataagggtgcaaagcaacttgatgcgttgatgaaagaaattgctgttcccttgaggacgtatgtggagaattttcctaacaaaatgcatcttcatccttatgagagatctcttattgagctgacacttggagatggatactacgaaatggtgctacgaaaggtagacagtttaaggaagagggtagtatctgttggaaaggaacatgcttcactttgcgctaagtcttcatcaaagcgagaagcagaggaaaggctgaatgaggggcttaagaaaattgaagagatttttgctcaagaacgaaaagttgttgatgatttgttaggcatagccaagactctcagggcaatgcctgtaattaatttggaaacaccaactctctgccttgttggagctcctaatgtaggcaaatcttctttggtccatgtactctctactggcaagcctgagatttgtaactatcccttcacaacaagaggaattcttatgggtcatattattttaaactttcagaagtttcaggtaacagatactccgggcctgctaaggagacatgatgaggacaggaataatttggaaagttgactctggctggnctttcgcacctgccg

SEQ ID NO: 136098 - DNA, 474 bp, Glycine max
  Clone ID: PAT_MRT3847_93906C.1
aaaaaaacaaaactgagtgaggagatcattattaactacattataccgtgacagtgaagtaaatggttgcaaggcggctctcatccatttttaactacatgaggcagcgaagcatttctagcctgcttatagttagcaatgtttagttttcagaaaatttatcttctattgacagtgttatttctgctagggaagcctgtcataagcaaggatcggtgcagggagaagtgtggacgcgttcatattgaatttccattttacctcagaaataacaatttgagtcacaccactggccatcatcctgggttcgatctgttttgtaacgataaagatgagactgtgctggagctccctgctgttccaattaaattatttgtaaaaaaaatagattacaagtctcagcaaatccaaatttatgacccctgaaaatgccttcccaaggtgttcttaaaaactcggtaattactctattta

SEQ ID NO: 136099 - DNA, 410 bp, Glycine max
  Clone ID: PAT_MRT3847_93907C.1
tatagtatttggaagactctacttcaagcaagttttaaaacaccagtttcaaagtttatattttatttttcttttattcttaaagtttttgttgaattttacccttttctagacaatgtaagaatttatatattgcttcccttctacttatagtgtgtaaataatgtgttaataactcttgtctcactagctttgttttgtgcttatttttttaataggacaaaggaatttgtccagtatagttatgtggcactgtcatttagtagttgaaggactttgtgcttatcccatattttgtctcttttttttcttgattatctcatatcagctcttattcctgaaactatgttttaatcattcctccaatgtaaaccacttgaacttagatttgacaatttcacaactttaat

SEQ ID NO: 136100 - DNA, 389 bp, Glycine max
  Clone ID: PAT_MRT3847_93908C.1
ggctcgagaacccacataaaccctttttggtgagggagatagtgggagagatctgattgtgtgtgtggttttatacgcgacgcggtgcgaagggtaccttccattctcttcagaacccttgccgcccctcgcgccgccacctatttcgccgtccccaaccgccttattcaggccgcgctctacggcagcgccaccggcgcctcccgttctcaccgccgccgcttctcctcgctcctaggtcccttcgccgccgcgtccctcggggtcgccggggctctgatctttcaggaagtcctcgccaaggagcccccgccgttccgggctttttccaacgacgtagatctctaccagatcgaggcttgtcctttatgcaacaaagtcaaagcatt

SEQ ID NO: 136101 - DNA, 302 bp, Glycine max
  Clone ID: PAT_MRT3847_93909C.1
tattgacggcacacgcacgcaagctaggatcgtatacacgagaggggctcgccttttttttttaacaaggttttattttttaataacaacaggagcatattctccctcacagaggaaagggacctattaagttccacggaaaataactacagcacactaattaatatacaccataggaccgatagagtagcccttggaggaacaaaccctagcagaagcacacacataattcagagtaattaatcaggcgccccttgataaacacactaaacccttgcggggctcaaaaagaaacaagctaa

SEQ ID NO: 136102 - DNA, 6320 bp, Glycine max
  Clone ID: PAT_MRT3847_9390C.1
tacggctgcgaggaaaacaacagagggggattgaatcaatgactattcatgattccataattgaatcaattacatactggatccaagctaaaggaatgttatggtaaaacttcgtttgaaacgatgtggtaaaaagcaacgagccgtttatcgaatcgttgcaatcgatgttcgatctcgaagagagggaagagatcttcggaaagtgggtttttatgatccaataaagaatcaaacctatttaaatattcctgttattctatatttccttgaacgaggcgctcaacctacaggaactgttcaggacattttaaaaagggctggtgtttttatggaacttagctcgaatcaacaaacgaaattccattaatgaaataaaaaaaagggggtgtggatgacttgtatatagatttctaaaactcttttctcttttatccccccgctctcttgttctattcatacctaatttttcttatttcttgttgtttatatagaatgataggatgtagttttctatagccagaaaaagaaatgaaatttgcatcgatcttcaaaacaaaatgaaaaaatgtatagagataaaagatagaatataggaaaaagaaaaaaaatagtcactaaatgaagtaattggacttataaatagataaatagattacccctattgaggtacttttttttttaatgtttcttattatttttgattttattatcatttctttttaataccaactcgctctttattattttcagttactaatcctagttatttgatttatatactttttttatagtaaatacatgagatagaatattcaaaatggaatatttctattattttattcttcatccaatgactatacattcattatatttttgtgtaaatagaggaaaaactcgatggaaaaatggtggtttaattctatgttgtttaataggaagttagaatacaggtgtgaattaagtaaatcaatggatagtcttggtcctattgaaaataccagtctaagggaagaccctaaaattttaaccgatatagaaaaaaaaattcacagggatttggattatttagaaatggaaggttttttttctagcgatctgaatactgtttctaagaatgatgatgatcattacatgtatgagactcaatttagttttaacaataatattactagtttcattgatagttgcattgagagtttcaatttaggtgatattgacaaatacaatgatatttatttttatagttacatttttttgaagggcagaaattgtagtgaaagcgataattctagtactagtataataactagtacgaatgatacaaatgatagtgattccactataggagaaagttctaataatctcgatgaaagtcaaaaatataagcatttgtggcttgaatgcgaaaattgttatggattaaattataaaaaattttttaaatcaaaaatgaatatttgtgaatactgtggatatcatttgaaaatgggcagttcagatagaatcgaacttttgattgattcgggtacttggaatcctatggatgaagacatggtttctctggatcctattgaatttcattccgaagaggaaccttataaagatcgtattgattcttatcaaagaaaaacgggattaactgaggctgttcaaacaggtactggtcaactaaatggtattcctgtagctattggaattatggattttcagtttatggggggcagtatgggatccgcagtaggtgagaaaatcacccgtttggtagaatatgctactaatcaacttttacctcttattctggtatgtgcgtccggaggagcgcgtatgcaagaaggaagtttgagcttgatccaaatggctaaaatctcttctgctttatatgattatcaaaaaaataaaaagttattctatgtatccatacttacatctcccactactgggggggtaactgctagttttggcatgttgggggatatcattattgccgaaccaaatgcttatattgcatttgctggtaaaagagtaattgaacaaacattgaataaggcagtacctgaaggttcacaagcagctgaatatttattccataagggcttatttgattcaatcgtaccgcgtaatcttttaaagggcgttctgagtgagttatttcaattccataatttcttttctttgactaaaaatgataaggcatagccataaattctttgaataagaaaagggtatattatattatgatatatattggcttagctataatcactagaattattatatactaagtataaatatatagaaattctagtgattatagactatctttatataataatataaataagaataaaaaaataaaaaaaaaaaaaaagaatctatataaatataaaaataatatatataaggtacaaatagtaaatcgaggtacccattttatgataaactttccttccatttttgttcctctagtaggcctagtatttccggcaattgcaatggcttctttatttctttatgttcaaaaaaacaagattttttagatacagaaaacaaagtaaaattctggggttttttattccccaattataatactaaattcaaaaaaaggagagtaatgagtataatctttcgctcagacgatgtactgatatattctatggcggaggttcgaagaacaagcaatttattttgggccgttttcactttgttaggttcattggggttattgttcgttgcaatttccagttatcttggtatggatttgttctttatttctgagaaaattagtgatttttcttttattccggactttatttattttccatttattccacaaggggccacgatggctttttatggaatcgcgggtctctttagtagtttttattttgggtcgattattttttgggatataggtggtggttttgatatcttcaataaaaaagggaaaaaggtacgttttgttcgttggggatttcctggaaaaaatcgtcgtattattctcgaaatacctatgaacgagcttcactccatcagaataataacagaagttaaagaagagggtatttttactcgtaccagtacttttgagagtatcgtttatctggaaaccatagaacaggggtttattcccttgactcgtattgaagataatttgaatgggacacaaattgcacataaagctggcgaattatctgtatttttgggtgtaccacttttttactgatgagaattgaacttaattagaaattaaattgcacaaaaagcttcagaattgtcctatttattttgtgtaccttttgaaatattttgaaaaaaaaaaaacgtttttttttttcaaaatatttccatttttatagatgaggcgttatttgatttcgaaatccgattattatattcctaacccgaagtgctccttggtgtattcataaaaagtaataatttttcttcgaatcttagcaattgatatcctttcgaaacaccatttttttcttcatttgaattgacagtgaattctttcgatttcttattcgatttatgtattcttttttctaaattaaacaaggcaaggactaactcccgaactgcaagtaaaaaaaatgatagaatagaatatagatttatctataagctctatgacttgtaatagaacttatgcttgatagaaaggttattatcatatagagttgacgaatgagatgaagttgagttcattaaataaagacgaaaaatgacaaaaaagaaaacattcattccccttctatatcttacatctatagtctttttgccctggtgtatctctttcacatttaagaaaagtctcgaatcttggtttattgattggtggaatactaggcaatccgaaattttcttgaatgatattaaagaaaagagtattctaaaaaaattcatagaatttgaagaactgtttttcttagatgacatgttaaaggaatgtccggaaacacatctacaaaacctgcgtactggaatctataaagaaacaatccaattaatcaaaacgcacaacgaagatcgtatgaatacgattttgcacttctcgacaaatataatttgtttctttattctaagcggttattctattcttggtaatcaagaacttgttcttattaactctttggttcgagaatttatatataatttaagtgacacaataaaagctttttctattcttctattaactgatttatgtataggattccattcaacccatggttgggaactagtgattggtttcgtctataaagattttggatttgctcaaaatgatcaaattatatctggtcttgtttccacttttccagtcattttagatacaattttaaaatattggatttttcgttatttaaatcgcgtatctccatcacttgtagtgatttatcattcaatgaatgattgactgacaaaatgattcacttatcaaattttaatttaaagttttttagctaaaaagaaaataactttgctttttcccttctttttaacccccttaaatgaaaaaaggggttccccgacttggatagggaactatgcgagtgacctacctaatcttattgtagaaattttcaggatcaatgattagaccatgcaaactagaaatgctttttcttgtataaaggaagggattactcgatccatttccatatcgatcatgatatatataataattcgagcacccatttcaaacgcatatccaatttttgcacagcagggttatgaaaatccccgagaagcaaccggtcgtattgtctgtgccaattgccatttagctaataagcccgtggatattgaggttccacaagcggtacttcctgatactgtatttgaagcagttgttcgaattccttatgatatgcaagtgaaacaagttcttgctaatggtaaaaagggagctttgaatgtgggggctgttcttattttaccggaaggttttgaattggcaccccccgatcgtatttcgcctgagattaaagagaagataggcaatctgtcttttcaaaactatcgtcctacaaaaaaaaatattcttgtggtaggccctgttcctggtcaaaaatataaagaaataacctttcctattctttccccggatcccactactaagagagatgttcatttcttaaaatatcctatatacgtaggtgggaacaggggaaggggtcagatttatcttgacgggagcaagagtaataataatgtgtataatgctacagcagcgggtatggtaaaaaaaatcatacgaaaagaaaaagggggatacgaaataactatagtggatgcattggatgggcgtgaagtgattgatattatacctccaggaccagaacttcttgtttcagaaggtgaatctatcaaacttgatcagccattaacaagtaatccaaatgtgggtggatttggtcagggggatgcggaaatagtacttcaagatccgttacgtgtccaaggtctcttgttcttcttcgcatctattattttagcacaaatctttttagttcttaagaagaaacaatttgagaaggttcaattgtccgaaatgaatttctagtcccgcatatttatcaacatattaaactcataaaaataactcaatttttttgttgataatttatgtaattctattcagtataatatcagtataatagaataaaaaaattatgaaaagatctttggttctgtatagtctttttatactatatttaaagagttacttgtaacgtaatacaaataaactcgagtatggatattgtcaggaagactatttgactttgttttttcaaccccccaataaattcgaatattatggttatgacactgtttttttcagatttcatttttctataatagagagttctattatagaaatttcgattgtaaaatacaataaaattggattcgatactaaacataaaatagatatctatatagatagataatttgaaacaaaatcaattaaaatatggaaaaggtactctaggggggattttttgtcttttcctagagtccgattcctattccttcttgtttgtgtcgaaatagaaatattctaaaaatatcaataaaataatcttttttaaccccttcctgaaaaatcctatatcttagtttctattttttccaacttagaatatttctgccatataatattttattgcatataatacgtagtgaacaaataaaaagagagggggttggggaatttgattaaacaaattgaatttcttcaattaacttgtaaaaaaaaaaaagaatgaaatggagtctttttgaaacatcggaaaaagtagtcgtttatatgg

SEQ ID NO: 136103 - DNA, 397 bp, Glycine max
  Clone ID: PAT_MRT3847_93910C.1
gaatctgtgtccattgatgataccaatgtaagaagtggacaaggtacatgtactacaaatggtgtggaacattctctatctaagcctttacttgaggttccaagttatgataatgttaatcctgcacttgagaaagaaagtaaaagacactccaaatgcaataatgttatgtcacatagtcatgcagagcctacacaaccaccacctcctcctccacctcttcctccaacgcaatggcgagtctcaaaaccacagttggatatgacaaatgggacacaccatttgtctgaagatgctgaacatattgatgatcacggtattccacattctactatcttccagcagcctaagctcacccaggttgagcattaccaaataatcacgatgatcatgaatc

SEQ ID NO: 136104 - DNA, 292 bp, Glycine max
  unsure (1)..(292): unsure at all n locations
  Clone ID: PAT_MRT3847_93911C.1
cacctttgttcactcttcttctcttgcggntagggttttagcgcanttcttctagatttaaggnagatgggtanngaaaaggttcacatcngtnttgtggtcattggccatgtcncactctgggacatncactaacactggtcanctgatttaacaagcttggagggcattgacaagcgtgttattgagaggtttgaganggaagctgctgagatgnnacnagaggtctttccaagtatgcctgggtgcnggacnaacntanaggctgagcgtgaangaggaatcaccattg

SEQ ID NO: 136105 - DNA, 373 bp, Glycine max
  unsure (1)..(373): unsure at all n locations
  Clone ID: PAT_MRT3847_93912C.1
ttttcaactttgctattctcaggctacttcaataaccatatagtataagatttctcattggtaatagaattccaatggtcttgaaaactacttatttagacatggttttatatctgcttctatgagaatatgagattctgaagtttggtaatgtaggataatgtgtcaactttttacttattttggcaaacctcaatttaacaaccagctaaggcatcttttagccaacttttttctgtttgcaacttgtggattacgcagagatgctacctgtatacgggtcctttttttttatcttgccaaataaacttcttttctaattatgcaagctgcaaccctgtttaaagttataaaggagacccttntatacctg

SEQ ID NO: 136106 - DNA, 459 bp, Glycine max
  unsure (1)..(459): unsure at all n locations
  Clone ID: PAT_MRT3847_93913C.1
tggtggaagaacacaccaaagctgtcatttttatctcaaaactctgagtgtgggttcgttttctttgtgacttttgacaatacaaaagtttaaatttttatattttgttttctgatttctcacaatacctttactattgtatgcagagaagctgaaagaacactaaagctgtgattnttatctccaaaaagcttcgatttttatctcaaacagatttgttttctttgtttctcacaatacaaaagcttacatttttttagtcagtctttattgcatgcagagaaggtggaagagcatactacaacgacagtttttatctaaaaactccacgagtatgggttcattttctttgtttttttggtttatggttaaatttttttcgtctttgtcagccttatcaaacgtgttcattctttcttatacccattcttttggggttttatgatttttcacgagaca

SEQ ID NO: 136107 - DNA, 499 bp, Glycine max
  unsure (1)..(499): unsure at all n locations
  Clone ID: PAT_MRT3847_93914C.1
gcacttagcatttgaagaaaaaaaaaatttcatcttaaaaacttttttttaacttcttccgaaactaangtgtataagttgatcttaggttatggagaaattgaacgtattttactttcttgtttccttcttttgtaagcatttatgaaaaaaaaattatctaaagtaggccaagactacttacaattagtttgccaagattctatttagggcataattttttccctccgtaagatattacgggtgtttctcaactcaataggttagaaactaatcccgcttacaatacgtaactgttgttggttcaagaaaatttaattttgcatacgatagaaatcgagtacaagttctcttgttaaatatatcttttccccacatgtaaatgcaattaggtcttgtaccattgcatcaaccctatgggttcaataagggcatattttacatattaatttttaaaatcaagctttgttattttaatattaactaaaatatcagtaaa

SEQ ID NO: 136108 - DNA, 299 bp, Glycine max
  Clone ID: PAT_MRT3847_93915C.1
cgcgtcctgctgattttcttatatattgtggtgctgacttgaatcttgttggtcatgaagtttgttctgcgtaggtgagcttgaagatacctatttttgtctcgtgttggaaaaacatgtcttatactgatgcatcgggtttgtatgcctatggtgctaatggttctgctactagcttggacaatttaggctcttttcgtaatgagtttttccccaaactgtttctcactttttttacatattatcatgtttgcaatatgatgttttttgcccttaatgaagataatattttttaaatt

SEQ ID NO: 136109 - DNA, 383 bp, Glycine max
  Clone ID: PAT_MRT3847_93916C.1
cagggctcactaagccttattctctaacaaaaagctaattgcgcttagcgagacaggctcgcttagcgcgacacactacacaggcttagcgccaacaggcacttagcccaacttgaccactggaacataattggcttagcgagtaggctcgctaagacttattccaaaacaaagaagaaattgtgcttagcgggacaggctcgcttagcccaattcaaaaattagaaaacatgagagggatttaggcttagcacacagttgcgggcttagcgagttttgcagccttgattggtctgcaactttcgcttagcgggacatgaccgacttagcgaattaaatgcctccagatgcagtaggggggtcacgcttagcgagatggtctc

SEQ ID NO: 136110 - DNA, 160 bp, Glycine max
  unsure (1)..(160): unsure at all n locations
  Clone ID: PAT_MRT3847_93917C.1
gaagaagaagggtgagctaaagtcaattttccttcctttcctttccacacgacatatcgatttgnnagaggacatgagcagactcatcgctgagggcgagggcgacgccaccatcatcgtcagcgcagatgacgccgccgggttgcaagagtcgatcggt

SEQ ID NO: 136111 - DNA, 328 bp, Glycine max
  unsure (1)..(328): unsure at all n locations
  Clone ID: PAT_MRT3847_93918C.1
gctagagaagctctgggntgataatggatttggcccncnnccngngcgnggccnnggcaagctcagaaaactcatcaccctcaaaactattgatgattgagatagtagcaagctgcataagacgtagtctttgccggcgacaccaacaaccccgatgactccgacgactccaacgacaccgggatcggcccgtaaagctgacaacgtctggaggagcgtcttgcatcctgtgatcaattcccccacaaagaccatcggggctcagatgttagacaaaccactggccatcactgccactggctgtgacgggctgttcagtggggatacc

SEQ ID NO: 136112 - DNA, 388 bp, Glycine max
  Clone ID: PAT_MRT3847_93919C.1
tacctgcccaggtgtgggattaaaaagccacgaagcttattaatcgatctttttagtttgttactagcttgaacaccatggcaacaacctaaatttgctcagacaaatcacattaaacgatggaggtgtattgtcgaagaccaaatctaatgagtgactttcgagctggcgagacgatgcggacttatgatggccgacaggatgagggaccgagcctgctggctgaagctgagattgaccgacaagtctcgcccagttctatagagttagggatactgtagctaattcacatactcttcttgcggctaaccaagactttataggctgcgatattccctgagctgactattgagccaagaagaatgcactttatctattcacaggaaac

SEQ ID NO: 136113 - DNA, 1125 bp, Glycine max
  Clone ID: PAT_MRT3847_9391C.1
gcgtccgctttagccgaggtcaggaggagcactagctaagttcacaatttcaaaatggctaggggactaaagaagcatttgaaaaggctcaatgctcctaagcattggatgcttgacaaactgggtggtgcatttgcgcctaaaccctcatctggaccacacaaatcgagggagtgcctccccctcattcttattctgcgaaaccggctgaagtatgctctgacataccgtgaagtcattgctattctgatgcagcgccatgttcttgttgatggcaaagtcaggactgacaagacttaccctgctggtttcatggatgttgtttcaatcccaaaaacaaatgagaacttccgcctgctctatgacactaaaggccgattccgtcttcattccatcagggatgatgaggcaaagttcaagctctgcaaggttaggtcagtacagtttggccagaaaggtatcccatacctgaacacctatgatggtcgcaccatccgttacccagaccctctcatcagggccaatgacactgttaagctggatctggaggaaaacaagattgtcgattttatcaaatttgatgttgggaatgtagttatggtaacaggtggaagaaacagggggcgtgttggagtgatcaagaacagggagaagcataagggtagcttcgagacaattcacgtgcaggatgccactgggcatgaatttgctactcgtatgggcaatgtgttcactattggcaaggggacaaagccatggatatccctgcccaagggtaagggtattaagctatcaatcattgaagaagctaggaaaaggattgccgcccagcaagcaactactgcttaaaaaaccccccttttggatgaatagacttgagtgcttggtagttttgttcaatgtttttgttttctaatttcttttgtctaagtttttaatcgttgaattttgactcttgcactatacaactttattgtggctgtgttatattcatggagtaatctttctattctcttggtcgtcatacaaaatcactgaatgaatttcacgatagcaaaatgccgcagctgtagtaagatggtattgcttgcaattgaagagaatatggatgtttatttgaaacag

SEQ ID NO: 136114 - DNA, 333 bp, Glycine max
  Clone ID: PAT_MRT3847_93920C.1
aaagtacaaatccacttgtctgtaaaggccattaataatcataactcttacaggttttctcaaccatgggctgatatttcacatggaatttaaggcaaaattctcacattaaatagttcatgcatgattaataacccaacaaataggaaaagtactacatgctctcggggtgtatatgtgcctgcccaatgcaggaccagaaactaaaaatttctttagctctccctgcttcctaaatggaaaaacttggactaggtggcaagaccttgtagccttgtgtctaaacatcttgggaaaaaaacagggtgagaataaaaaattgagccttaaaac

SEQ ID NO: 136115 - DNA, 470 bp, Glycine max
  Clone ID: PAT_MRT3847_93921C.1
tttttaagaacctaggaaaaatattatgattctcaaggatcaattctcctaaaagcttaagtggttttgtgaaggtacaagattgtttatatatctcttgacaatgatatttaatattcaagaaactttttgtaactctccgcatctatatctaactatttacaataataaaaaaaagaagaccaaaagccttgtttacaatgccacgcaagcatgcaccattaaacaaataagtaagcattactttcaggatgtgtgctttcatctgaatcattataatctgtagcctcagcaaatgtattgacatgtgctccttcttcaacatcttgtatgcccaaagcaaaggcagcagcccgacttttccccatctcctgtacaactctagctgctgcatgaagcacaggtctaaaaaagctacggaaagaactctctaacaagtttaataagcagttgaggtgcgttcatcttct

SEQ ID NO: 136116 - DNA, 1317 bp, Glycine max
  Clone ID: PAT_MRT3847_93922C.1
atgcattctgtaatctgcaacagcgccgtttcactttcgccttaccactcttgtcgccggaaacctaaccgattgcgggccaaatcctctctgctcgttcagaaacaggaagcccaacccgcccggctcctcatgaatgtgggtgcgtgtgagaggcattctgtaatctgcagcaccgtcgtttcactttcaccatacgactcttgtcgccggaaccctaaccgattgcgcgccaaatcctctctgctcgttcagaaacaggacgcccaactctccgactccgactccgactccgtctccgtctcgcgccgcctcattctccttcgccatgctaagagttcctgggataatcgctctctccgcgaccatgaccggccactgagcaagtctgggaaagaggatgctgtgagagtttcccgcaggctccaacagttgggttggattcctgaacttatcttgtccagtgatgcagcgcggactaaggagacgcttaagataatgcaggagcaagtgcaggagctggtggaagccgaggttcattttgtttctagtttctattcgattgcagctatggatgggcaaacggcagagcaccttcaaaagattatttgtaaatattcaagggatgagatacttactataatgtgcatgggacataatagggggtgggaagaagcagcatcaatgttttctggggcctctgtggaattaaagacttgcaatgctgcactgcttgagtctgctggaaaatcctgggatgaggcatttgccactgcaggatttggtggctggaagcttcagggtataataaaaccaagtagctagctagttgagattttccgtactgggtaaacttaaaaatagatatgcaagaggttggaagcatcattacttattcaaggaacccaaaacgcctcagttaaggctacagagctgatgacttcggaaagtatatacttgaggaaagatgaatatgatggcaaaagcttcagttagatgtgtttaatttagcagctatgaattgtttacatggtgattcaagatgaaacgttgctgtggataatgtgcaggatctcaatgcttcatatatgctgcttggtgttgagcatttgttcattgaagtgaactcatgctgctcagtggttgttaatacatgcacaactacaggtttccaaaggaaaaaagtattggttttgtaaatcatatgctgtggaaaaaaataaaggcatttcctgttaccttttcccttttaccccttctcttctaccttgataataaagattggaaatctatttcgaaataccaaaatggtattgg

SEQ ID NO: 136117 - DNA, 576 bp, Glycine max
  Clone ID: PAT_MRT3847_93923C.1
ctaatacagttctagctcgcgatctagaactagatgcattctgtaatctgcaacagcgccgtttcactttcgccttaccactcttgtcgccggaaacctaaccgattgcgggccaaatcctctctgctcgttcagaaacaggacacccaactcggcgagccactctccgactccgtctccgtctcgcgccgcctcattctccttcgccatgccaagagttcctgggataaccgctctctccgcgaccatgaccggcctctgagcaagtctgggaaagaggatgctgtgagagtttcccgcaggctccaacagttgggttggattcctgaacttatcttgtctagtgacgcagcgcgtactaaggagacacttaagataatgcaggagcaagtgcaggagctggtggaagctgaggttcattttgtttctagtttctattcgattgcagctatggatgggcaaacggcggagcaccttcaaaaattatttggagatattcaagggatgaagaacctactataatgtgcatgggacataataggggctgggaagaagcagctcattggtttctggggc

SEQ ID NO: 136118 - DNA, 319 bp, Glycine max
  unsure (1)..(319): unsure at all n locations
  Clone ID: PAT_MRT3847_93924C.1
gtcgcangcacgcgtacgtaagctcggaattcggctcgagntnnagantttgnctctgtctcggatgcantggtggaacgtgtactannagntgnattggtntcngnnaacttnttntnaatggcngcctnatgatgctaatgatcntcagnaagtgttggntttangaaaanaaccnnaaaaggctgnccggngtacaatgagntncttcgccnggttcanaattcggnttcnggancnngngggtgtccccggttcccccaancagcttgggntcnattcagtngaattcccgtaggtactngttcccatgggaaat

SEQ ID NO: 136119 - DNA, 2204 bp, Glycine max
  Clone ID: PAT_MRT3847_93925C.1
ttcgctccgtccgcccacgcgatgagcagcaactccggagcagttaagggaagagaattccctcttcctcgctgcccctgcccctcctcaaattcaaatgccccttcccttgatctctggtcacaaatcgttgccgctgaaacgccccgccccgaacgaatcgacgtcgtttaccggagaagacaccctcgcaatcctcaaaaccacgccaactcaaagcctcccgattctgctataccgcgcccgcctcggcagagtttggccgatccaaacaagcgagtcagttggaaccgttctctttccacccgagggaggacaagtatagccgttggggcttttatggtataccagcctcagttgaagaaggacaaaaggaaaggaaaacccgctcttcccaaaggaaaggttgtgcaacctccaaacgttgacaaggagaggatatactttcaagaggttgatgcttatgagttgttggaggaaagcccctcccccaagaaaagcacatggaccataggaaatatgacacaacaggaaccaattccagctgtatgctccagattagaaaaatggttgcactctagaaggttaaaccccttctgcggtccatctagcacactatcgaagatactggatactccttccacacgtttggaaactattcgtgacattgacttcggtgcttctgacttgaaaacattggaacgaactgaccgaagcaattctcttctgcataccatcaaaactgaggagaaggaaacttctattgagaatggcagtcatttgcaaacaaatgaaaagatgctgtttgctcaaagtggtgaaggatgtgaagatattgaagctggtgttaagaaactttctctggtatcaacgtcatcttcaatagatgatgaccacattaatccattttctgttttattatcgatttgtggacagtctgcaccttcagtgttacaagatattttctctagtggctcagaaactattgtgaaagttggtgaaggaacatatggagaagctttcaagattaacaattatgtctgcaaaatagttccttttgatggggaattcagagtgaatggggaagtccaaaagagatccgaagaattgctggaggaagtgcttctttgcaaaactctcaatcaattgagaggaaaagatggagattctgataatctttgcagcgcattcatagattgcatagaatttagagtatgtcagggcccttatgatgcgtctctaattcaagcatgggaagattgggatcttgagcatggctcagagaatgatcacccaaaagagttcccagataaacagtgttatgtggtgttcgtacaagaacatggtggcaaggatcttgaaagttttgcactcctgaattttgacgaggcaagggctttactggttcaggttacggctgggcttgctgtggctgagtctgcgtttgaatttgaacatcgagatcttcactggggaaatatacttgtgggccgaagtgattctgaaacgttgcagttcactctcgatggcaagactatgttggtcaaaactcatggattaataatatctattattgacttcactttatcaagaataaacacaggtgatagcatactgtatttagatctttcctctgatcctgacctatttaaaggaccgaaaggggacaaacagtcagaaacatatcggaggatgaaggaggtgactgaagattggtgggaaggaagctgtcctaaaacaaacgtgttatggttgatctacttggtagacatactcctcatgaagaaatcatttgaacgtactacgaagcacgagagagatctacgatccttgaagaaacgtcttgacaagtatgattcggccaaggaagcaattcttgatcccttcttcactgatttgttcgttgagtctgacccaaacttaacaatctaaagctccttttcccacctaacatggcattttgtcaaaactttactcgactttcttgcatctttggaggcagctttactccattgttcaacttgatccgtacaaggtgaattttgtttttgccaagttaaaatattaatgtatagatcgaagtgtgataactgaatatatagctgcaaaacttctacagcaatgcaggttaattgtgataatttcttctgtttatttttcctagttaatgttatcacattttaattttaatgtttatacttgac

SEQ ID NO: 136120 - DNA, 419 bp, Glycine max
  Clone ID: PAT_MRT3847_93926C.1
ttggggggggggggggggggggggggggggggggggggggggggggggggggggggccccggcaaactacactgaaagggatgccagaaagggaagtaaccttagaaatagcaccgggaaccctttaccaaatgcacttcccccagtacatgaagcccctatctcgaggtaggcccagtggagcacccaaaaagagggcagatgactggagaacccagatacggatacatataccaacccgggaaatgggaattgaaagggcccaatgtaactaggggatggccagctggccagaaaattatcagtagcagggggcttagaaacaaggggaaggataaaattgagctaccggggtgttgggttaattaagggcatcactgtccggtggttatattccacgtagtgggggtgttgggccc

SEQ ID NO: 136121 - DNA, 220 bp, Glycine max
  Clone ID: PAT_MRT3847_93927C.1
ctcacgcgtacgaactcacttccacacgtggttaccaagaatacttgttcgtccaggaagaggcagcttatacggatttcactactgaatcggatgaccctcgtctgacgaatttctatacatgtagcacacagtctcgatctcgtgaactgtggacactagatcacaatctactcttggccaataacggactagctcgttacttacgataagatagaca

SEQ ID NO: 136122 - DNA, 927 bp, Glycine max
  Clone ID: PAT_MRT3847_93928C.1
gaaacattcatagctggtattatttctcggaatttggattgatggtctacagcatgacaaaaaatagatactgtgagcgaattggcagacagcataaaagcaataatgtgatatatgtggttgatctacgaatggcagtgtattatcagaaatgtcatgatcctgactgcagaggttatcgatctccctcacgtcaaatcccagttcatgtgttctccaatccttcagatgtaattggttcctttgggttgttagatgatgaacagccagtagatgataagttgagacatcaacttgatgacaacaaggagcaaaatcttttacaattcaaagacactgttgaggacaactccaatgattcatggtggctagaagccataagagttgtcgaggatatggaaaataagcaaacaaagacagaggaggtaattgatgaagatgaggagtggtggcaggctgtagaaagtactgcatcccaggttgaacttacctgctccagtcaacaagaactctgcgcaatttaagtcctttggggatttgtacaaagaattttctacttgtgggatcaataaatacttcagataactaaaaaaccagagaagcagcatgttgcacttatctgctgcaaacaaccagaggatcttgtgaattgattctcttgaaggataaaaaaatgctcttgcagaggattcacattcacacacgagctgtaggagcttctctgtaagctgtaaccttttgctatgtatagataaattatcaagccagttcttttagccagttcctacccatttcttgactttttcaaccttagtcaaataaaattagtgaacatttaagtttttttttgtctaccactgaacgtataacttatcaaggaattgttcttgtggtttggaatttgagtcaagaaaatgcaattgtgtt

SEQ ID NO: 136123 - DNA, 343 bp, Glycine max
  Clone ID: PAT_MRT3847_93929C.1
atcccaaaaagggaacccttccttatggtcccaaaaaagagttttttatttgcttgcacctaaacactgacttacggccccaataatttcgcttgccgggtacaccaattggaaggggggaaccaatttctaatcccgccttgcgttgaccgcccccattaaaatcaccccaaattcctccttttgtcctgcctgggcgaacctttaataccacaaaccattggcctaagccagggtcttagtgcaaaaaagggctttttgccttattaggattaaaccccccacccggtactcctttatatcaaattgggggccccccaattgggttcctctaacaacccaa

SEQ ID NO: 136124 - DNA, 1770 bp, Glycine max
  Clone ID: PAT_MRT3847_9392C.1
tcttaagggggaatacagattgtatatcagaattaaaattatccccctttttgaattattcgtctctaatctaaatcgacttgctttcgaatatgtggattcaaaaacaagtcgagtttttgttactttcttttttgtataaaaattgttttaatgtaatcatttcattatatatatctattataattttataattttttcaattttttttttctttttttctaatatttttaaattcccatttttctactttacaaattctaaaaagagagtagaaaatagattgataaaataccgagttaattttcatttacgtctttactttaaaaaaagttttcgttatatagaagaaaaaccctgacctaaaaaggatagattattatgtatcgattgaatcaatgactattcatgattccataattgaatcaattacatactggatccaagctaaaggaatgttatggtaaaacttcgtttgaaacgatgtggtaaaaagcaacgtgcgacttgaaagacatgattagattagctgtggattcttacatccgccattttttctagtatatagaaatgaacatgctcttgactcgacatcgtttgttctgttccactagaacttattgttttggggacgggaaagcagttgatgatgtaagttgatgatgtaaatagtacatgatggagctcgagtttattcatttatcaggggcaagtatctaaggttagtaaaaattaataagttagaaaaacttcgtaagtttatttttgatagaaaaatagaaaggatccaatttgagcaaggttcaaaaaaaatggttggaattagtaaaactgttttgatcaaaagtgtagccgcaggaattaaccttctatttgtatgattctttcatagaaagaaaaaatggtatgttgctgccatttttgaaaagattgaagattcccgaagtaatgcctaaacctaatgattcaaagaaaagctaaaagatcatggaacaagtaaataccattttcaaattgtctcatcaattctattatcaaaaattataaaaaataaattataaagaaacgaaacacgggcaagaaaggggagtagagaccactcaataaatgaaatagctactaaaggctttgttctctttttagttatttgataattatccaatttgagttatggagttataaatatgaggagttttttttcaaaaagaaaatacgaaagaaaaatacttaagtcatagtttaattgatttgatgattttattgatctatttgacatcataattttctacatacattataattttttattttctcgagccgtacgaggataaaacttcttatacgtttctagggggggggtgcattatttatctatctctatcccaatgagccgtttatcgaatcgttgcaatcgatgttcgatctcgaagagagggaagagatcttcggaaagtgggtttttatgatccaataaagaatcaaacctatttaaatattcctgttattctatatttccttgaacgaggcgctcaacctacaggaactgttcaggacattttaaaaagggctggtgtttttatggaacttagctcgaatcaacaaacgaaattccattaatgaaataaaaaaaagggggtgtggatgacttgtatatagatttctaaaactcttttctcttttatccccccgctctcttgttctattcatacctaatttttcttatttcttgttgtttatatagaatgataggatgtagttttctatagccag

SEQ ID NO: 136125 - DNA, 262 bp, Glycine max
  unsure (1)..(262): unsure at all n locations
  Clone ID: PAT_MRT3847_93930C.1
ctagagaggggcccgccctttttttttttttttttttttgttggccccnccccaaccagacaagacttcggggacacatcggaccagataaaggcgccttacaagatgcacaaatgccaagccttattgttcttctacggctactaacaactttacaactgtcattcattatcagctgccactcagtaatcatgctatacatttaccatggcaaagcatccaaatttactcgtccttgcgttcacccatgtcttaagaccac

SEQ ID NO: 136126 - DNA, 551 bp, Glycine max
  unsure (1)..(551): unsure at all n locations
  Clone ID: PAT_MRT3847_93931C.1
gtataacaacaaaaacaacaccaaaaatatatataaccaggcttcntagcttgaaacctcaactagcacaaaactggtatgagaaaaaataatccaatcatagcaccaaacaatgagctaaacaacatccctgcaatcaaaaggcaaggaatccattcaggccaatcatcgtggatatcaatattgataaaggtagttgagcaaaaagataaaggaaaacatagttaaagatatgtaattctttaaaatgataaaaaaaattgaacagagaattttaaatggaaatattgaatgcaccaagcaaaactgtaaaattgttctttccggtgataattagtcaattttttatgtatcccgtcctgttcatgacatagtagtgattcttagcatatagcagatattatatgattaatgtccccatcactttaagtaaccgtattctgttccaagtccacattcctcccatgtgggaaggccaagcttatattccacaacagaacgttcatacaacaaggttccccacaaaagatgtatctgagacctcatctttg

SEQ ID NO: 136127 - DNA, 269 bp, Glycine max
  unsure (1)..(269): unsure at all n locations
  Clone ID: PAT_MRT3847_93932C.1
gttttcnccctcctatcctttcatgngtgattggtgggaagtgctttccattgtgnnagtgtgtnctcaattgggatagaaattgtgtggttgaaaataagaganataataataaaaaaaggatggaatgagaatggattggccaccatctgcatttcatctctttgggaaaaanagaattcattcttggctgagatgaaagtgcaatttttgcgggtgcnagatgcaaacagaatgattttctacaactttgttntctatgtctgtgc

SEQ ID NO: 136128 - DNA, 593 bp, Glycine max
  unsure (1)..(593): unsure at all n locations
  Clone ID: PAT_MRT3847_93933C.1
ccacgcgtccggctgtgcacctctggcagccttcactttcaacccctttcaaatactttaagtaaggattcccttggctatcactagtatcggccaactagcttgccaacatacctctagcaaaaaggataagaaatctgataagcattaaaataacatgctgtataatacaaataggaagaggtgcatacttaggaaaggagattatggtttactntttcagttttgtgtcatgtttctgatctaagttcctatcagagaatcacagtaaataaaaaaaagcagtgaagccaccaaatcaccatgcacaagtgaaatcgaaatgccattgaaatagccataagagaacaaagganaagaagtcgcatacacacaatcatattcatatcccagaaaaaagttgatgggcagagagattccctgaaatatgccagcaatttaattaagctgcgtttagagagagaaaatggcgacatgtgataaacaacatagtggactgtgaagaataagagtagtatagtggggtgaacccaagatcttatcacaaaccatggaacaatatgcaggcagcccatacagaaccaataacatgt

SEQ ID NO: 136129 - DNA, 1771 bp, Glycine max
  Clone ID: PAT_MRT3847_93934C.1
gcacgcgcgcccacgcgtccggtaatccataagtcatcgcttgtgtgggaaaactgccttctattcatgtgcatcatcctgtattaaatatataacgtgttcgtttcattttcttgatgttaggggtggaaattttttatttttcatgtgctatttcatgtacagtattgttgtattgggatgcgaattataatagtactaattgttattaaaaaccctaaacataataaaatgggctaagtagcaaattgtttcagtagtcatgttttttgtactaattttatttgttttcaactcagtttaaggtggttgtgttattgttcacatggagaaaataaacagtgggggttcttccatcagaaggcgttcattgagcatatcaagtcacataagccatcatacagacaatgatgatgatgctgaatgtgagagtgtttcagaggctggagacattggagatcgtgttactattcgaagctgcagcttccgcttgtcttttgacaacaggtcagaaaatgaagctgttgttgtttccaattcagaggaacacagattgcatcccaactctgttaggcctttgcctcctgcactcacatctgaagacaccaaacatgatcctcataaacgtttgccagtgttgctggactatgcttcatttatgattcctttagcagtttttggaattcttggggtcttcacaagatatttgctgcagaagttatttggccctggggttgcccatgtgacaagcgaccaaagtattctttatgttgatcttccttctaatatggtatattactcgtgggctattccatcatatttgggattgaaactgccaagagtttcagggggtttctcaacaggctgaatattagttcaggcaaagaaggctctaagatctttatcaactgcaaagtagacagctaccgctgtcagttgatagttatggcgatatccgtggttgcgttgggcatattatggggtgtcagtggtgcattagttaaggctgagttcaagaatggtggcaatgttgctcagttatggtttgcttgcatggttggacctataggtgtgtggattagatggttcttagccaggctcaacggacgtggattgggaaaggcagggctgtttaaatggattccatttggaaccttaattgccaatgtatcagctgcttgtattatggctgcactttccactgtgaagaatgcagtaaacaccagggattgtgatactgctgtagcgggaatacaatttggtctgatggggtgtctgagtactgtctctacattcgctgcagagtttaatgcgatgagagaaagcagtcgccctatgagagcatatgcatatgctatcattacagtttttttgtcattctctttaggaatcttgatatactgcatacctgtttggacaaaggggttagatattgacacatagcaattgagtaaggcaatcatgttttttgggcactttattggttgaaacatagctgtttcaggacaacctccctcctgattttaaagataacgcattgtttttgcagagaatgagttggcagttcagagaagtagagaaatgtatctagtatctactacttataatagttagatctgtcaatattaggattgggtgtgaagggaggtttcgaactgatgcatcatttcctactaatatagataccatgtctttatgtaaaaacatgaacaaaggaagtttgagaacttttaaatcctgaaagaaattcatatttaacttaatttttccc

SEQ ID NO: 136130 - DNA, 158 bp, Glycine max
  Clone ID: PAT_MRT3847_93935C.1
acctccgatctaattacgttataagaaataagttctagtgtaaaattcactacatcatgtttcttatatattgaacgatatatagtattttaaaatgttaatgacaatttacatactttctaaaataatcccttaccttagcaagtaatcaatgtgtg

SEQ ID NO: 136131 - DNA, 760 bp, Glycine max
  unsure (1)..(760): unsure at all n locations
  Clone ID: PAT_MRT3847_93936C.1
ccatttgttttggttcgaagatggtgtccggagtgttgtggttgtgttagtgttcagatggagagaataagcagtgggggttcttccatcagaaggcgttcattgagcatatcaagtcacataagccatcatacagacaatgatgatgctgagtgtgagagtgtttcagaggctggagacatcggagatcgtgttactattcgaagcaagaggatcagtgagagcagcagcagcttccgcttgtcttttgacaacaggtcagaaaatgaagctgttgtttccattccagaggaacacagattgcatcccaactctgttatgcctttgcctcctgctgcacgcacatctacctcccctctttcaactgatgcaatagttggttctcaagacacaaaacatgatcctcataaatgtttaccagtgttgctggactatgcttcatttatggttcctctagcagtttttggaattcttggggtcttttcaagatacttactgcaaaagttatttggccctggggttgctcatgtgacaagcgaccaatctattctttatgttgatcttccttctaatatgattggttcatttcttatgggatggtttggtgtggtattcaaaggagacataattaatgtctcagagcatctagcagtagcaataacaacaggttacttgngaagcctcacaaccttcagcggttggaatcaaaaatgctagaactcagtgtttccgggcattggctcttcgctgcacttggctt

SEQ ID NO: 136132 - DNA, 418 bp, Glycine max
  Clone ID: PAT_MRT3847_93937C.1
caaagagacaagggtctgcctttgagacctgaccaaagtgtctgatcccattacaggaggtataggaatctgtaaatttggaccatcttgtaagtttgaccacccgatatacttgcaggccgcgatgattcctgaacttggtcagcaatcctactcatactcatctagagctgtagtggctgagatatttggaagtacaagagtgagaactgatgcgacatttcaacaatctgtgcaaacatgattgtctgaggatctttctgctgtgaggatcataacacccgaaatttgtagttatctctttaaacatgatagatttattttacttgtcctagcactgaccaatgcagcacaagctttgcgaggagttcgaacacacacactcatcacacagtttttatgcaataaaaagatttct

SEQ ID NO: 136133 - DNA, 227 bp, Glycine max
  Clone ID: PAT_MRT3847_93938C.1
tttgattaccaagcattttttgaccaagatggcagaaatgatagacaggcttggtggtggggatgaaaaatggatccgtgaaaggcccccccggctggtggctggtggttcaaggatggcaattgtaagaaagagttggagagttgatggggaatcctctggatttcgctcacagtattgcatacatttaatgagagctataaatacttgaaaaacgccagtaactc

SEQ ID NO: 136134 - DNA, 314 bp, Glycine max
  Clone ID: PAT_MRT3847_93939C.1
atgtcaacaaaaaaaacccaaagatggcaaaaaaaaagggacatagggataaaccaataggacccccatactacaatacaaaacacaaaaaaaaatgcgacgattctaaaagaaattaatcgtcaacacaaacgccccagcgagccacaaggcggaccccatgagggactagccacagaggcgaatatggaaaaatggggcgaaacgcaaatacatggggaccccaaaaaaatggggcccaaagggccccaaaagatcccccagagaattttgggggccaaatcccacacacaaaggacggacctccgagacat

SEQ ID NO: 136135 - DNA, 1121 bp, Glycine max
  unsure (1)..(1121): unsure at all n locations
  Clone ID: PAT_MRT3847_9393C.1
ccacgcggaatctctcatgatattattctctgccaaccaaaataaccaaaccaatcaataatacatcatgatcataatcgaagctcccatcgccgtcagattccacgccaccgccgccattcgctccgccgccgcaccttcacctcgtactctctctctcacttctctttttttttcttcttccatttactttcgctgactcggcttagctttgattctgacttacggaatgtgatgttgtgagaagtttcggagattgtttcgaaacaaaaaacggcggcgttttgcagtgttcgaatggactaacagtagttgttgttgtgcattcgttcattgactagtctgcactttttggcagataataaccgttcaatgtggagcgccgatgacgcgaaccacgcgtccgcataaataatattctctaccaaccaaaataaccaaacacaatcaataatgatgataatcgaccctcccatcgccgtcagattccacgccgccgccgcctttcgctccgccgcagcaccaccacctcatagtaaccgttcaatgtggagtgctgatgacttgaacggtgtgcgttatttcgcgtcatgccggctcgcatgcagctgcggtttcgatgcgccttgggtaagaagtaaaataaacacaggcactccgttcacaagaagagacaaacttgtaaagaatagaatcagggcatcatcagagcatctaggatcagctcaggatccggtaaagaaaaatgagaagccatcctatcatccatttgaagaagtttctgtgtcaacatcagagaatagtgaagatgctacacttaccacagcagaaacaagtagaacaattattgaggttaacagcaaagcaacactgatgttctcaagtttgattagtgatgagtttcatgaaaatattatttggccagatttgccttatttgactgatgaacatggaaatatatactttcaggtgaagaacggggaagatattttgcaatccctaacttcagaaaataattttgtgcaagtcattgttggtattaactccatggaaatgatctccganatggacttatctggtccttcagaaattggctttggggaaggaagaaattgatgagg

SEQ ID NO: 136136 - DNA, 295 bp, Glycine max
  Clone ID: PAT_MRT3847_93940C.1
agacgttcccttctcgggggggacagcaaaaaaaggccacccccaagaggccccaagaggaagaaaccccaccaaaggtggcacaagaaagggcagaggaagggccagacagggcagacgaggaggacccccccgaagaagccgccacaagtgcagcactcaacggtgccgagggcccgcactacatggaaagacagccccccgccacatctgaggggaagccgcaaggactcacacgcaaaaaaggtgaaaaaggcaaaaggagacccgaccctggggatggcgaacagacgac

SEQ ID NO: 136137 - DNA, 233 bp, Glycine max
  Clone ID: PAT_MRT3847_93941C.1
aagatttgtcatggtgtgaagtgccaagacaaattttagtcatatattttttacgaaatagctattcatataaaaaaaatattcataaaactgataattgatcttcggatcaattaaaattaattcaagttgatataaggcagaccaaattaaactaaaccaatccacttggttggattatctacaaaaccaaaacagaccgaccccttctacttatctcaaggagacaaatg

SEQ ID NO: 136138 - DNA, 227 bp, Glycine max
  Clone ID: PAT_MRT3847_93942C.1
cggaaaatcatttagttcaaaaacccctaacggggcaggagggaaatctgtcttctagggcaagtgaattcagaactgcaacggtgagataaaatagacaagccccaagctactgctatgcatgggggagcttcagaaattatcaatgatagtgttgcaaggcccgactgcaacatagatggggcaatgcttttgggtgatacttatcataccaatcctgaaaatgc

SEQ ID NO: 136139 - DNA, 260 bp, Glycine max
  Clone ID: PAT_MRT3847_93943C.1
gctttttgatgacttctagcaagcctcgctaatctcgccttaccccgcactattaacctactgggagaactctctgtggtagtaaccacgttgtcctgatctgatatcactctcctcacttacaggactcaacatactagtgcaaggcctatactccctctacatatttaccagaacacaatggggctcagtcagtcaccacattaagaacataaaaccctcattcacacgagacaacaccctcatggtcatacacctat

SEQ ID NO: 136140 - DNA, 2026 bp, Glycine max
  Clone ID: PAT_MRT3847_93944C.1
ccccgacctccgcggcgctctcgcccctgaccccgggtgcggttgcgatacggaagccgaccgatgtgtccgggtaaatattcattgattcattgattccagatcctgaactcaacaacaacccaaagataaaaagcacaacacaagacactgaactcgcactcactgggttttcaaccatggatgcgatacggaagcagctcgatgtgttgatgggagccaaccgtaacggcgacgtccgtgaagtcaatcgcaagtactacgatcgcgacgtctgtcgtctctacctcgtcggtctctgccctcacgaactcttccagttaacgaaaatggatatgggcccttgccctaaggtccactccttgcagctccggaaagaatacgaggaggcgaaagcaaaggggaccgataattatgacagggagttggaggatgtaatagataagcttattggtgagtgtgataggaaaattggcagggctctaaagcggctcgaggacgacgatgcgaaagcggctattgcaatttcggtctctgaagttactcaaacagatgaggtgcttgagttgtcgaagcaaatcaaagagaaattgaaagaagctgatcaatatgatcttgaaggcaagtcagatctcaagattcgagctttagaggttgtagaggaacttagaactaagagagcggacaagcagtctatgcttcttttagatgccttcaacaaagatagggcatctttgcctacacctctgccaaatccaccacctttggcacctcttcctgtagttgctcctgatgctcgaacacaagagatgataaatgaaaagctgaagaaggctgaggatcttggtgagcaaggaatggttgatgaggctcaaaaagcactggaagaggctgaagcacttaagaagcttcctgccaggcaagagccagtgttggattcttcaaagtatacagctgtggatgtgcggattactgatcagaagctacgtgtgtgcgacatttgtggagcatttttgagtgtttatgacagtgatcgccgtttagctgatcattttggaggcaaacttcatttagggtatatgcagattcgtgagaagttagctgaacttcaagaagaaaggaacaagagccgaaagactgatcggcttgatgacaggagatcaaaagaccggagtagggatcgagacagggagtctagtagggaccgtgaacttggtgatagtcgtgaacgagggcgagaccatgatcgtaggagcagagatcatgataggcattatgatagagatcgtggatatgatcgagaccgtgacagagactcagaccgcacccgctcctatgactcaagaagtcgtcggaggtcacgctctagatcccgagagcgatctagagattatgatcgacataggcgtcatgatcgatactagcaattgccatgaatcttatgggtatgagaaaatgtctagtttaggtgggtgttgaacctcatgttggacaaataattttgcaatttcttctgtgttgaaccgtttctcggatgatggatgtaacttaagcttaggtgtcgctaaattatggtttgatgttgctttgcagacattaaatccaatttgtaatctgccttactttggagcagttcttgctattgtgcttaaaaatagtagtttgattggattgccaaaaaaaaaaaaaagggcttactagattgtctctcttaaagcatcccttgtggtatccaaatacaagaggagcacagtaaatttctgtgttgaaagtctttgctttatcttcctttgtttgattcttttctttttcttccattattatgaatttggctccagggtgtgtactttagagacaaaagtgggggatttcaactatcaaagaaaaaagagattggtttgtgacacatgcatggattgtgcatgtgcatatgatgatatcaattgttgattttttcttcaatcggttgaaatcccataattacttcagccgtaaaataaagcgaaatccttatttttttttattg

SEQ ID NO: 136141 - DNA, 482 bp, Glycine max
  unsure (1)..(482): unsure at all n locations
  Clone ID: PAT_MRT3847_93945C.1
tccaaggaaggtttcccgtcatcactgtatgacgtcctccttctttgggggggggggggggggggggggggggggggcaaaccaagaagagtatttggagagggcagagatactagggttgcgatatgcaaaataattaaaatgaggtatattccgtggtacgtaaaagcgagagggagagagggatgagacgaagttggcacgtaaaagggcgatggaactgaacttgggcctggggcgacgtggtaccctagtataataggatgataccatacntgtgggcggcgaagatggacttaacgcgggccaatggcaaccgagagcgagcgataatgataaatcgaacggctgtgggtgatacacccagttactttggcaggacgtttcgtgtacgattatcgaaaagcagcgtaggccatggtnaacaggtggcggagtggctggttgctgcagaggtgttttaatggggggccgcgtttttt

SEQ ID NO: 136142 - DNA, 826 bp, Glycine max
  Clone ID: PAT_MRT3847_93946C.1
ccacgcgtccgattttacaaggctcaaaaggcgaaagacaaagaagaaaatgaaaacttggtggaagaattggacaaggatttcacttccttggttcactctgaagccttgttatctttgactgaacccaacaagatgaatgctttgaaggctctggtgaacaaaagtatttcaaatgagcaaagtaataaggactacatgtctgctactcggacaatggataattctgtgcaggaaaaacctgatgattatgacaaacttgtcaaacaaatggggttggaaatgcgtgctcgcccttcagataggacaaagacaccagaggaggttgctcaggaggaaaaagaacgtgtatagcaattggaggaagagcggcagaagaggatggttgctgctgaagattcaagtgatgaagacagtgaagattcagaaaagccatctgaacagaaaccaagatctatctctggtgatgatcttggtgattccttttctgttaataaacaaattatgaccaagaagggttgggttgatgagattcttaaaagaagagatgagaaagattctgctagtgaagatgatgatggtgaagattctgacaatttgggaagctctggagatgccgatgaaggatcagatgaagatcttgatgaacatgagaaggatctttctttaaaagattgggaccaaagtgatgatgatgatattggtgcagatttagaagatgaagatgatagtgatgaggatatagaaacagcttcagaagaccttgatgaggtaaaaggattggatgctgcagttcatataaaagcaaaaagaaatgcttctgttg

SEQ ID NO: 136143 - DNA, 381 bp, Glycine max
  Clone ID: PAT_MRT3847_93947C.1
ccacaaagacaaacaccttatttcgcacaattcttcaggggaatgctcttttttaaggataccccatggacaaatgtgggcacgggaaataatctaatttgggggccaaaaaaaatgccccacaataaaaagatggcttattgtttcatacccctgctttttattgagcactttggatgaaccatggggacggccccactttttcttgtccctgggggacacaacaactgtttttaaaataacccctttttctccctttaaacccaccccaaacccgcttttttttggtacgttgggacacccacccaccacatatgggtttcttattgggtgacaggggggaaccggtttattttccaatttcctcgcccccaacttttt

SEQ ID NO: 136144 - DNA, 360 bp, Glycine max
  Clone ID: PAT_MRT3847_93948C.1
cgaaaaaaaaaaacccaacctaacccattacctcattcctcaattcaattcaatgttttccctctcaaaacccatcctttctccggttcgccccacccttcctccggttcgctgcgggtcccgcgagctccgcgagcgaatcaagaccgtccaaaccactcaaaagatcaccgaagccatgaaactcatctgcgccgcgcgcgtccgccgcgcccaggaggcccgtgtcagtggccggcccttctcctcaaacctcgccgcaatgctaaacgacatcacccagcgcctgcaaaacgacgacgtctgcacccctctcaccctcgccagacccgtcagaaccgttgcactcgtcgtcgtcac

SEQ ID NO: 136145 - DNA, 676 bp, Glycine max
  Clone ID: PAT_MRT3847_93949C.1
aagggtaataaatgtttagtataaatcattattttcttaaatttacaagaatgaacacgactttccttttaggtaggaagtattaccttttggtctatgggggacaaaaagagaaaagggaacgccgcacatacatgaaccgcactcctttatgtacgggtaaaattcttaaaacacacgctcccagaaaaaatatattaatgtcctcgacacttaatatttgaatggttcgtaacaaagtggcgaatcacaaagttgtatgcaactaaaggtatacaagtcctatttacctttacgtatatagcctaaacctatttttttacaaacttaggttttaacatatatgttaatgctcctaggtcaaaacttattgagtcctagatataactaacaaagactacaaaattttccttctaaatgtgaaaacacatcggggtatttgaggctgtctaaacactagtgttttcagtctctttgacagcttttttcttcagatcacatgctcagtcagatgctccttgttctcattgctgaatatttggtgaagcattttctcttgtattatttgataataaagttactgattgccgtgttgttcggttatttttttctgtagtacgcttggaggtgctgataggaggcttccatgaatttcctaagcttttgtcctggactg

SEQ ID NO: 136146 - DNA, 1335 bp, Glycine max
  Clone ID: PAT_MRT3847_9394C.1
aattcggcaccagaatttgattaaacaaattgaatttcttcaattaacttgtaaaaaaaaaaaagaatgaaatggagttttttgaaacatcggaaaaagtagtcgtttatatgaataaaaaaaaaaaaaaaaaattcctgcgtccgcttagccgaggtcacgaggagcactagctagtttcacaatttccaaatggctaggggattgaagaagcatctcaagaggctcaatgctcctaagcattggatgcttgacaaactgggtggtgcatttgcgcccaaaccctcatctggaccacacaaatctagggagtgccttcccctcatactcatcctacgaaaccggctaaagtatgctctgacttaccgtgaagtcatcgctattctgatgcagagacatgttcttgttgatggaaaagtcaggactgacaagacttaccctgctggtttcatggatgttgtttcaatcccaaaaaccaatgagaacttccgcctgctctatgacactaaaggccgattccgtctccattctgtcagggatgatgaggcaaagttcaagctctgcaaggttaggtcagtgcagtttggccagaaaggtatcccatacctgaacacctatgatggtcgcaccatccgttacccagaccctctcatcagggccaacgacaccattaagctggatctggaggaaaacaagattgttgattttatcaaatttgatgttgggaatgtagttatggtaacaggtgggagaaacagggggcgtgttggagtgatcaagaacagggagaagcataagggtagctttgagacaattcacgtgcaggattccactggacatgaatttgctactcgcatgggcaatgtgttcactattggcaagggcacaaagccatggatatcactgcccaagggtaagggtattaagctatcaatcattgaagaagctaggaaaaggattgccgcccagcaagcaactgctgcttaaaccccttttggatgaatagacttgagtgcttggtagttttattcaatgtttttgttttctaatttcttttggctaagagattttaatcgttgaattttgactcttgcactatacaactttattgtggctgttatattcatgaagtaatctttctattccttacctagtatttgactgggtttttggttttcgtacaaaatcaccgaatcaatttcaccatataacaaaatgccgcagctgtagtaagatggtattgcttgctattgaagtgaatatggatgttttagtaaattattcaaaaaaaaaaaaaaaaaaaaactcgacctcgtgccgaatttcggcacgagg

SEQ ID NO: 136147 - DNA, 256 bp, Glycine max
  Clone ID: PAT_MRT3847_93950C.1
caaatacacccgctaatgctagaaggctacagcccaatgtaccacaccaaggagagctcgccaaccggaaaagtctacgctggagcaacaactggcttgactatctggactgagactctacttggtctttgagctggaggggcacttcttgtctacaacacaagggctttggttcaatagactttgcaaatcgatgttcaagttataacatagcccatgtaactatctaaaaatgaagaactatctcggagcccct

SEQ ID NO: 136148 - DNA, 360 bp, Glycine max
  Clone ID: PAT_MRT3847_93951C.1
gagggcgactataagttagaacaaaaggccaatgctgcggtattatatgaatagcttgaccgtagctactcaactttttgaagattataatgctgatcctacacaaatagcacatatggaggatgggcgctcaacagtgattgacaaaagcgaatcacgtaagcacttcgagctgcatggtggtgaagaaactggtaagaaagacactgaatgtagcgatttaactaatgcccgctataaaggaacaagcagtttcttcaaatgttcgaattgcttgataagtagctaacgagatgcacactctcaacaagttgtatgttcacacactacacatgatgctgaaacaccttgtatcaccac

SEQ ID NO: 136149 - DNA, 615 bp, Glycine max
  unsure (1)..(615): unsure at all n locations
  Clone ID: PAT_MRT3847_93952C.1
agaagattcaatngncatctatctatctgcgtgtctggagcgcaataaccttgaccatttgcgccaggacctttgcatggctagcccaaattttcatctgagaccacacttctcgacagacgtagcgcgcctacatgcacgtgtctctattgactcctcgaactgcaactgcagttctcaccccctctcctttcatgctggacggttttcattgaccaggaaaccgcacatgatgttgaaaaatacaacgaaatcgcgcagtcacaatctccacgctgaacattgcgaccgcggggccgcggattcggcttcgtgtagcgctgttcagagagaccagctgaacgcgcggaattggttgcaaacaggtaagtagccgtaacgaatggacgacgtatgtgcttcgttttttcccttcccctccttccccttccaaaaatttctaccatcatcgtctcactaccacgccctgacgtcttgaattccgggcagcatattcgttctcggacgagcaacaggagctggaatcttccccgtaaccgcaccgagaaccgccacagtccagttttacccgatctcccccgcgtgtgatgccgtagcgttcacatctacagcccg

SEQ ID NO: 136150 - DNA, 360 bp, Glycine max
  Clone ID: PAT_MRT3847_93953C.1
ccggcagcccggccattttttactggaaaaaggatttgccaaatccaaatcaccttttaagagggggtaatttctacaaccccttgagggggaaccaataaacgtccaaacaattaacttatgggggtctaaattagaacatcctttagtttattccccattagcaaaaaagggggccccaaaaaaaaaaaaagttttttggggagcaactgaattaccggggctaaaaatggaaggcaaccaatcaagaaaaagggcccttatttctttccactttttgggggcccaaaacctcaaaaggttccttttgggggggcctgggctataaactcctttagcgcctacctcccttcccttttt

SEQ ID NO: 136151 - DNA, 337 bp, Glycine max
  unsure (1)..(337): unsure at all n locations
  Clone ID: PAT_MRT3847_93954C.1
gctaaattcatntaaaaactctaaatttcacccagcgcgttttaaataaattttttcaccacacctcacataaaactccaaaaatacccgaacaaggcaagtttccccgaaaggacaacttttcacatttcccgcgaagaaaaaccacccacaaagttaccttattttgcaaacttctaaatataaacctcttctttatcaccatttttaatttcctcttcaccaactttcttataatccttcttcagggcaacaaaaactttaccggccttaaaaaacatcccctctttcataccctcaccaacataccaatgaacgaaccccccctttgcataca

SEQ ID NO: 136152 - DNA, 753 bp, Glycine max
  Clone ID: PAT_MRT3847_93955C.1
gtgtttttattgaatccagagttctgattaccaccacgacctccttgaaactgaggattaggtgttgtgtgtgcgacattagcaaatacaacaggtgttgctaattcctgcttgaatttatctaggtgtgattcttgcactaccagtaatgattcaatttcatcatcacaaaggtactatactcctcagataatccatcgatcacaacatcaagcaattcttgatcagatattgtctctcctatagcaatcaaggaatcgactaaagcatgaatacggagtgtgtactcagcaattgaacgattacctttctttgtggttttcagttcagatctgagttgccgcaccttagccttaagtgtggcgtagtattgagtgtggcttttgtcccaaatttcatgcccatggtgacaattcaacactctcgaaagcaccgattcggaaagagtagacagaagccatgtgaagagagactgatcttgaatgaaccactttccatattcaacaaacatgcgatccagttgacgatctagatctgaatcatactttgaaggaattgtaggattgacaagtaaacaatgcaatttttgcattgcaacgattccgccaacccgttgattccacagaaggaattttctgtcatcaagcttaattgaaagcttcagagaatgaagaaaaacgcagagaagttacggaaacgcaacgaaatgaacgaaccctaggaccgactcagcgaatgataccataatacaac

SEQ ID NO: 136153 - DNA, 330 bp, Glycine max
  Clone ID: PAT_MRT3847_93956C.1
gccaaccgaatgctgtgattaaggccgtgttgtgtagatccaaaatttcccagggcctaagaaaaaaaaaattatttaactcctaaacgctacacatgtacaaaacacaaccccacttatgggttggagggggagggggagggaccctctgctttttttttcgcatttaaaggcaaacgccatctgtcgcatttatattttcgccaacagccatattttctattgtttggcgaattataactcatcttcccacatgaggttggacacggacataaaaagtatctcttacaaactcatttttacatatgatattgcccaccataatgaaag

SEQ ID NO: 136154 - DNA, 461 bp, Glycine max
  Clone ID: PAT_MRT3847_93957C.1
ttcagtacataatatatcaaggttctcaagctcctaaagggtcgttaaactgtggtaagaaaattggacttggtaatgttgttcacatgtttgtttactaatgcgagcccaaataaccttaatagagtcacataaacatcgccaaacttaaattattattgtcaatggtcatgtagaacagccaagcaaaatattatacaacaagtttgttagtttaataactcattggcatcgtaatcaagattatgattgatcctccaaaattccaagtttgatatattttatagacccattcattaaattcaatgtgattgttaatgatggatcatttgtctaaaattatgagtgtctaattcctaacataccgttcaaaggaataaaataattccaattaaataacgaaatacaaggccacattaaaattaggaacatatatcataggtcaaaatatagggttcata

SEQ ID NO: 136155 - DNA, 497 bp, Glycine max
  Clone ID: PAT_MRT3847_93958C.1
gttttctttcttaccaaatgatccaaaaacaaatttttctatttatttttattttcctttcttttataaatcaaacataactcttaataataaactagtatattcatttcaaagataaattacactaaattgtagaagtgacacaaattgagagcgatcgatggtttgacccaaacaacccacaattaaagttggttcagattctcaaatttaggtccaaaaagttagtctatttgatctaactcaatgagcttgatgggtcaaattgagctcataaaatatatacaattactatttctacttctctttttgctattgcactcccttttcaaatttatttacccaaaatacctttttaccggaaaatagactatggaatttatttacgctcctctcccattaaaagcaaacacaaatggctttggacgaggagcagatgattgaatacgtgaagtttctttttccttgtgtgttactgaggtggattttcacgagat

SEQ ID NO: 136156 - DNA, 515 bp, Glycine max
  Clone ID: PAT_MRT3847_93959C.1
gtttattaaaaattaacattgagagcttcatctgtttgtacgttacaatgatttgagcgtaagacattactcttttaacgctaccaccgtcaaagccttctcctttttaccattctaatggcttggctttcaaatctcactttgatgggttctgtgtgttatgtgtgtgtgaaactgtgaaatgagttggagatagagacaacggtttaaggttaaggttaagtcttttttgtctttgctattaggatgcaagttttcttgggcaccctgtttgcaaattttcaattgcagactgtgaaaatttcaatttttgttgtgttttctgagttccagatgaagaatttctggtgggatcgagatattttgatgattaatttctgagtttgatagtagtggggaatatagagataattactcattagtaattaccaattgttgggagagaaagatgaacttttttttggcagagagaaaaagagagttgttgatgattaatttgtggttttggtattagt

SEQ ID NO: 136157 - DNA, 399 bp, Glycine max
  Clone ID: PAT_MRT3847_9395C.1
caaacaaaaacttatttcttttgccttcactttattaatcaaaaactgggatatatgtgcgtcccttcaaaaagctgactaccactcatgccttatcctatctgattacatctctatcaattatcttcatgtttagtttttaatttctacatacatctttaatatatgcttaatctgcaaattattgtagagttgttgacttcgctgactctttataataaccatgatcatgactgcagcaatcgaactcatcaatttggtatttgaacgaattgaaattgatttcatccaaatttcccaactttccatgatgaacactaatcttgatatcaatggtacctaccctccaatcatttgttcttttcttcaaaagattcttcaagctgatagcattctctt

SEQ ID NO: 136158 - DNA, 621 bp, Glycine max
  Clone ID: PAT_MRT3847_93960C.1
tcttctcttccatccctgtgatcttttcgcctctctgttcagggctcaaatataacaaaacattaaggttcaataccttaactttccttcatatcctcaaactgatgcacacatatgtgcctactctatagtattcacaatatcataataatttgcttctatctgcagtgaaaatgacgcagaatgcaatagtgtccaagacaaaatccgggatcaagggggacatagccgtggcacagaagccactggcggcgcctccgccgccggggtacattcccattccgaggaggagggttttgaagaacctcgaaatcaatggaggacaaagaattaatgcatgggttgattccatgagagcctcttctccaaccaattccaaatccacctcttctctcgccgaaagaacacagctcttggattcttcgccacccttcagcattagacatgtttgagcaaattatggatgcgtccaggggaaagcaaattgtcatgttcctcgactatgatggtactttgtcgcctattgttgatgacccagaccatgctttcatgtcggattcgatgaggagaacggtgaggaaacttgcaggtggtttcctactgtatagttaccgcagatgc

SEQ ID NO: 136159 - DNA, 252 bp, Glycine max
  Clone ID: PAT_MRT3847_93961C.1
cttcgcacaattatatattttctatctggtttattgtcacatatttatatatatatatatagttgtgttcaaatttggttgcgcataatatatagtaattatctccaatgtgtcactgaatagtatatatatcataacgttggagaggatggatgatggtaagtaccgttctccttctccttctcttgggcagtacacaagaaagactgcatgtataataatagagtgaatttttatcttcattactaaaaa

SEQ ID NO: 136160 - DNA, 306 bp, Glycine max
  Clone ID: PAT_MRT3847_93962C.1
gaacaaaagaacaacccgattcgggttttctattcctttaaaagggttcagcaagtcctccatgatcccttattttgaactaccccaaagccccaattaacgttgaagaaccattccttaatttataacttggtatcccaacgttgccttggatctacctatgggtcaccacccagctccacttgcaaattggcatatggatatactttgggggccaaccggggtttggagggtttggcatttcacacaggccacaattccagggaacccaaaaaacttaattccccacacaggccggccaatggt

SEQ ID NO: 136161 - DNA, 347 bp, Glycine max
  Clone ID: PAT_MRT3847_93963C.1
ggttatcttttttttttcactattatcttgctgcattacacgcagtgtgccgcttacagcaacttcttaacggcctacaggacaacttctagtgcccgtaaaaagaccccggcaaagggtaattccatagcatccacttgcctccgcacgggggaaaaacaaacattttatgagtgccagatcccatcgcgtaccattcagtaaacttggcaggttaaaattacaatttgccataaacaatgtgggctaccctactcgtccctaaattattgacctcacaagtatttacttgccggaaaatacatttaacaaaactctgtgcagggactttatacacggccgtccta

SEQ ID NO: 136162 - DNA, 254 bp, Glycine max
  Clone ID: PAT_MRT3847_93964C.1
ggctggtgtgctcggtatctacgggctcatcatcgccgtcatcatcagcactgggatcaaccccaaggccaagccctactacctttttgatggctacgctcacctttcgtccgggcttgcctgtggccttgctgggcttgcagctggcatggccatcggcattgttggtgatgctggagtcagggcgaatgcacaacagccgaagctttttgtgggcatgatcctcatcctcattttcgcagaacgcttgctct

SEQ ID NO: 136163 - DNA, 202 bp, Glycine max
  Clone ID: PAT_MRT3847_93965C.1
agaagacgacagaaccgccggcatttgtgtgagtcatgggtctggtttctatccgagcgttggagctcctctcctttctgcaactttctgtttcattctttactcctggctttactcttcctatctctctttggctcttttccagataattccacaatatttccaataacgtcaggcaatgttatgttgataatcatattct

SEQ ID NO: 136164 - DNA, 244 bp, Glycine max
  Clone ID: PAT_MRT3847_93966C.1
agctctatccggaaccatggggagcacctccttcatgaggaagcaacctatgactaccaagagcctaaagacattccccaacgctctttttggtctgaaaggtggaccaggtggtcgtgtaacttacatgacctcgtacaaagtcaagctcataaccccacaaagataatctaattttaaatacccacataatattttcattactaacaaatctaataaacacaacattcaactatcctactcc

SEQ ID NO: 136165 - DNA, 293 bp, Glycine max
  Clone ID: PAT_MRT3847_93967C.1
ctcgggcggtagaagaaaaaagccatttcaatcattgttaactccagaatactattcccccactttttccacaatcacaatcattatcactgccctgctagagaaaatatagactatggctgcaagtgatgaaatttatgaactccctactctgacagatgacccacagtacccaaaaacattattctttttagacgactttcatccagacacaacaatccttttccattcgagcaagaccccctctgcacttgcttttggggtatatacatcggcaatcggtttttttagac

SEQ ID NO: 136166 - DNA, 317 bp, Glycine max
  Clone ID: PAT_MRT3847_93968C.1
cctacataataaaatgatttgaaatctaaaggtgtctatggtcaatagataaaggagaaggatgagaaggttattaataagtgagacgacaattacaatgatgacaaaactgatgtatagaacgtcaacgtgaaagaaaattattgataggatgatcaatattatattgcaaatttcaaatagtataataaagacaacgatatcaaaacttatacatattagatcaatatcaaagaatatgatttgaacgatgatgaatataataacgataagaacaacaagtttcacaaaatttattcatagaaagtcaacgtgta

SEQ ID NO: 136167 - DNA, 188 bp, Glycine max
  Clone ID: PAT_MRT3847_93969C.1
aggggatggcgctctggagcactcggagcaaggagagcctcttgttccccttccagcagctcgctctaggagcgcgggcgccgcgctgtcagcgtgagaatcagtgtgctaggatgctgatagcgaggaacgtctatagctctgagagtctttatctctactgcatatagaggcatccaatgaagccc

SEQ ID NO: 136168 - DNA, 811 bp, Glycine max
  Clone ID: PAT_MRT3847_9396C.1
gaacaaggtgggtactgctgcgccaggagagcaaatttgctgattggcagagggtcagaatgcaggagacgtccaaagagatacctgcaggctcccttcctaggtcattggatgttattcttcgtcatgagatcgtggaacaggccagggctggcgacacggtgattttcacaggtactgtagttgctatacctgacataatggcattggcatctccgggagagagatcagagtgccgccgtgatgcttctcaacgcaggggttctacggctggaaatgagggtgtgagtggtcttaaggctctgggagtcagagacctcaactatcgtctagcttttattgccaactctgctcagatttgtgatggtagaagagaaatagacatcaggaatagaaagaaggatgctgatgaagacaatcaacagtttactgatcaggaactggaagaaattaaacggatgaggagcacaccagattttttcaccaaacttgttgaaagcattgctccaactgtttttggtcatccagatataaagagagctatccttcttatgcttttgggtggtgtgcacaaatttactcatgaaggcatcaacctcagaggagacataaacgtttgtgttgttggagatcccagctgtgcaaaatctcaatttcttaagtatacttcaggcatagttccaagatctgtgtatacatctggaaaatcatcatctgctgctggcttgactgcaaccgttgccaaggaaccagaaacttgggagttttgtattgaggcttggtgcttgatgcttgcagacaatggcatttg

SEQ ID NO: 136169 - DNA, 653 bp, Glycine max
  Clone ID: PAT_MRT3847_93970C.1
gcgcgcgagcgttacgagaagacgacagaaggggagagggagattcgggagcttattgagcaacgtgatcttgctcaatctcaggttgaggatttgctgcgcatggttggaaatgatcagaaatctagaaaagaaaggatgaacacctgggaagatgatgattcaacatcagagtcatcaagcatttacccttctgatttacgcattagagaattcaacaatcctcactacaacaatgaaaacagtgaaagtagtcctgataaacaccctgatgaatgctgcaaagaaattctaagtgttgaattggaggaatcaagtagagatgaccttgaatatgctaatccatcagtaagtgacaatggggtgttggcattaacattgtatggagaggaaaatgtcataagtcaggagataccgacccctgtgaatgaggatagggaggacagacagaaccaattaacatatggtgtgttggagcacagaatcgatgattcacaattgagtaatgattctgctttgactatgtcagaaacagtgtcaaattgtatgaatcttaaattaataaggagctggagttgtagggaatattacatgactggttctccggagaaaacgggagaaatgcagaggactccggccagtagttctaaaaa

SEQ ID NO: 136170 - DNA, 248 bp, Glycine max
  Clone ID: PAT_MRT3847_93971C.1
attaacaataacctcactctcatcaacgtttttctctacactaataattcctctctatcgggtccatattaaaggtactcttgaaaacatatatcaaaaatctttatacatatattattctctagaccatttcccaataaatatcttcaacttactctaaaacctttttttaatgatccaaagccatcatactgatatcactcaaccctttactacacttatttttccaacacctcttatattctata

SEQ ID NO: 136171 - DNA, 292 bp, Glycine max
  Clone ID: PAT_MRT3847_93972C.1
gatctatccgggcgaatgtggagaggatgaggaagaacttagtgcttatgcttacccccttctagccagcgcttatgaccctccctgcggcgagctgcggcgcgcgccacctgggccgcactggaccaaccgccgactgctgaattatctaaaggcacgcagcgcaccgaacccacccccccgccggggataccgctccgcgccacacgccgaccgcagcaaactctatctgcccctcctacttgaccaccacctcctctccacgccaccaacctatgcggcgcagcaataa

SEQ ID NO: 136172 - DNA, 415 bp, Glycine max
  unsure (1)..(415): unsure at all n locations
  Clone ID: PAT_MRT3847_93973C.1
tatttttattaaatattttttatttaatatttatttttttggggggaaaaacaacctnntgagagttgaagcaataaccataaacaattgtaattgtcataaaaatacaaggacaacaacaacatttgttttataccaaacaaaagctaacatatattgacaagggaacctttaaaaaaaaaatttttttcaaaaattttttaaaaaccttccaatgacctttatgctaacaaagttgactaaacaacaaaaagaaaacccttgtgcaaatacaaactgtataacttaaggggaccttagttttggcaaaaaaatgtttttaggtaaccaaagaaactattatgcacaattttaaaaaaccattatttttaatgcaatacaatttgtcccaaaaggaactgataccctttaaaaa

SEQ ID NO: 136173 - DNA, 348 bp, Glycine max
  Clone ID: PAT_MRT3847_93974C.1
cccacgcgtccgctcactcagtctcctgcctccctcgtggcacggctccgtgcgttggctgcataatcgtggtgtgcatatcgttatagaggtaatctattatattttcatcttcatccaattaaggcttttgttgttggtggtgactttagctgggtttgcttcctgaaacagtctcatttgtagattgatacatgtattatatgttatattaagtttgtaaaaaacccttttaatgcaacaatcttgcataatcctttgaaaaaccctgcttactatgatttggtactgaaattcgtgaagaaatgcagcgtctatttgaactgcaacaagcattaattgaagttt

SEQ ID NO: 136174 - DNA, 1583 bp, Glycine max
  unsure (1)..(1583): unsure at all n locations
  Clone ID: PAT_MRT3847_93975C.1
ggatttgtttgattggnagcattttatnaatatgctgangaatgaggtccacatagttgagaaattacctcctgcctatgctggaattgagcctttcccaaaaatttatgcaaatcctctgccaggatgtatttgtgaaacaagggtgctgccccgccttccccggcgcttggcggtcttttgctcgcatgcccgtgccgggctcgatagccgtggcggccctcccgccatactgtttctaccctgccgtcttgaggagatagcaatgtgctgggctaccccgtttggtgctcttggttgcccgccggttgcgagaaggctacagatggccaagccggggcctgccctccgtgtgtcctagctgcaggatttaaattaaggatcaagcacggacaggcctgagtataccactgtcaatacaatagagagtaaaaaccgtacataagtcagtcactggaaggaaaagcctattaatgggaccgtttgtttattgcttggttgatgaactttaactcaatacgagacccacctattacttgtgggactgaataagttgtatccttattgtacaattctggtagctggagaagcatatggaagaggaagtatgaaatatcttgaggacgatttccccaacattttctctcattcctctctgtcctctgaagaagagttgaattcattcaagaatcatcagaacatgttggctggtatagactatgttgttgcccttaagagtgatgtatttctttacacttatgatggaaatatggcaaaggccgtacaaggtcataggcgctttgaaaacttcatgaagaccatcaatccagacaagatgaattttgttaaacttgttgatcagttggacgaaggaaaaatttcatggaaaaagttcagctccaaggtaaaaaagcttcacacagaccggattggtgctccatatccaagggagactggagaatttccaaaactggaggaaagtttttatgcaaatcctctaccaggatgtatttgtgaaacaagatagtagtagagactcccctgaagattgtctgtcttatgatggcactgcaaatgctatcaaaagacattgtggctgtgctgcgatatttttttaatccttctgccttgaggagatagcaatgtgctgggctatctggtaaggtgctattgattgtctgactgttgggataaggtgacaaatgaccaaggtgggggcaagaaactgagattcctagctacaatattaaaatttaaggatcaagcacgggcaggccagaatataccactgtcaatacaatagaaattaaaccccatgcgtttttaagcaaacctcatctctctaaccacacttttgaatgattttttttctttctttattgattatattttatccaatacctgtattaatagcaaggggatggaactgaataagttgtattcttgttgtacaataagatgaaaaaatagaaatctagtttttattgatctgaagttctttcaaacaggtttctttagaagagtaatactagcaatgtactctttaaaatatttcttttaatatattgtttattgtcgtgtgg

SEQ ID NO: 136175 - DNA, 193 bp, Glycine max
  Clone ID: PAT_MRT3847_93976C.1
gcaagctaaccaacatgggcaaagatttaacaacagacccattggaattgttaaagaaagcattgaatggcaagccctgtacacactacaaactgagtttttaagctgtttaaagaaatcattcatgccaacctacttctgtgatcaattcacgttaaacacgatcttagttttcaaaaaaggtttgtttgaa

SEQ ID NO: 136176 - DNA, 257 bp, Glycine max
  Clone ID: PAT_MRT3847_93977C.1
caagaccagaaggggaaggcaagggaaaggccccttgtggttcctcctggccttcgccggtcccccggttccccgttttggggtcaaaacggaacccaagtccggaatccaaacaattttaaccacccaaggtggaaagcctaaccctttgacaaaccccagttctgataacaaggattccaacaaaattgaggtggttacaatccagaatacaaaggacaaggaaaagggcctaaaggctttgaacgcaaaggcgc

SEQ ID NO: 136177 - DNA, 652 bp, Glycine max
  Clone ID: PAT_MRT3847_93978C.1
ccacgcgtccgataaacagcaaatatttatactacaaattaaaaaaagaaatgtaaacaaacttgagagatatctgctaagctaattaactaaaccatgcataaaatcctcctaaaatatagcataggaacatgtctttatttaactgatttgactccttcaaccatatgctgttggagtcacaaaatcccaacagcttttcatccttttatacagaactaggatggtttaatttgcaatgtcattcataattggcaaatcatcagcaacagtgatgagcttttgttgcttaggttttgatcgtggtttaatcctacctacttgcattggcttgaatttggaatgtcttttccctgttgtctgactcttttatgcttggcatgggatcaaatgtgattgatgcatcttaaagttcatagaacatatgcataacaaagaagagtgaaactctagagctttaattgtccaatctggttcagttaaatgaagacacgtttatttaatatttcgaaatgtaggttttcgtactccataatggttattctagaaacatatcctattccaaaataggcgataggacctccctttcctttttaaacttgaacccgagccgtcataccgatgtgtgccttgtctacacctctgcaccatc

SEQ ID NO: 136178 - DNA, 172 bp, Glycine max
  Clone ID: PAT_MRT3847_93979C.1
gccaactctttgtattataatgaatgtggttgtcctaaggaggattgggttggatcattttcgttcattacactttatctcattattttcggcttgaagtcctattaattcaacatgtaactcatttttagccacaaaattgacaacatgatgagcataagattttcttaaa

SEQ ID NO: 136179 - DNA, 344 bp, Glycine max
  unsure (1)..(344): unsure at all n locations
  Clone ID: PAT_MRT3847_9397C.1
aaaaataaccactttctccttttgcggagagtttcaaactaaattgtgcctccccctctctcccccancctaaaactcataatttctaactatcattttgtttctttaaacaaatacaaagataatttaaatttttcttttttcctcttcaaaaataaccctatatttttttttttaactgataaatattcttcacactaaattttttctctttaatattgaaaaaaaaatttttctttactaaaatttttttgttttttttttcccaacaacttttctcctcaaaaataaactatttttcatttaacttttctttttttttaattcaacctttaaatatttac

SEQ ID NO: 136180 - DNA, 572 bp, Glycine max
  unsure (1)..(572): unsure at all n locations
  Clone ID: PAT_MRT3847_93980C.1
gttagtgcccgcgccggcgatgggaagaagaaggaggtggctagccagagcagggtgggatttcacgagggttccgtcggcagtgccgccgccggaggttggggcgataacgggggcaattccgataatgtgtcaacgtcggggagcttgccatcgagggagcagagtccggtggtgttgccgcggtcgcggttgcagaatggagagtcatcatcggaagctgcaggtatcactgtaactctgtgtgcatgtgtggattttgtaatgactctgattgtgtggtgttgattggttttctaattaggtaagtaaaggattattgtttggattgttttattaggattttggtggagaagtgttattaagtgcccataaggccagtgctatacttagattatatttatatgctttagaagaatggcttgatgtcattttgttttaataagaagtataaagaaggaggatggggggttctgctgagtggactggggagaatgtctattgcatcggtatctctatttgtgagtatcttgcttggtcatgttctggtactatgattctgnagnnnnnag

SEQ ID NO: 136181 - DNA, 256 bp, Glycine max
  Clone ID: PAT_MRT3847_93981C.1
cgacgttcaatactattgttggagatgcagatgtatcttcttggagatactacatcattaggcagtactgatacagaggagtcagactacgactcaccattgatcgccacagcattgagatgcttctataccagcgtatgcatcacgttgagtgaaatgagatcatctgtggatctatgagctcagctagctcaactgtgtatatggattggttaatctggcaacttcttttcccagccatgctactccaggtatt

SEQ ID NO: 136182 - DNA, 966 bp, Glycine max
  Clone ID: PAT_MRT3847_93982C.1
ccacgcgtccgggagatcttggacaaacagattggaccaagtcaactttggagcatgtgaagaagtcaaactacgacatgttgttattgcctggtgatctatcctacgcagacttcaaccaagatctatgggactcctttggtcgattagttgaaccattagctagccaacgtccttggatggtcacccaaggcaaccacgaggtcgagacgattccattgcttcacaaaacaccattcacagcctacaatgctaggtggctcatgccattccaagaaagtggatcaaactctaatctttattattctttcgatgtggctggtgttcatgtcatcatgcttggctcctacactgactttgacccttcttctccacaatacaaatggcttcaaaatgacttgcaaacggtaaacaagagaacaactccttggattgtagtattgattcacgccccgtggtacaactctaacactgctcatcaaggtgagcctgaatccattaacatgaaggttgccatggaagatttgctctatcaagcccgcgttgatgttgtttttgcagggcatgttcatgcctatgagcgttttacacgtgtttataaagacaaggctaacaattgtgctccgatgtacatcacaatcggagatgggggaaatcgtgaaggccttgctactaagtacatggatcccaagccaacgatatcaatattcagggaggctagctttggacatggtacgttagaagtatttaacgtatctcatgcacgctggacctggcataagaatgataacgatgaagcagttgatagtgattttgtgtggcttacaagtttctcctctattccttcctgtaaatagtgatactttgtgaaaataatgatcctagtggtgttttatttgaagccaatatgtctcatttatatagtatatattaacatatattccacaaattaaagaataatagaaa

SEQ ID NO: 136183 - DNA, 237 bp, Glycine max
  Clone ID: PAT_MRT3847_93983C.1
gaagaagacaaatttgaaggttaaacccttatttttgtcagaatcctaaaaaagaacaaagaccacgggccataggttaacttaagataaaaaaaaagcaccatctggcccaccttatgtatgccgggtcatccgtatttataaaaacgggtggacagacgtcacaagggccccataaaagctctaacttaaaattaattggcgttattgccacctcttcagtctctcttataatat

SEQ ID NO: 136184 - DNA, 122 bp, Glycine max
  Clone ID: PAT_MRT3847_93984C.1
ttgctgcgagatgacgacagatgggggcacaagaatacaatacaacacagaacagcgcaaagagagagtgtgtgaacagtgcaaccagaaacagatcaacaatggcgacacttaaggttcct

SEQ ID NO: 136185 - DNA, 226 bp, Glycine max
  Clone ID: PAT_MRT3847_93985C.1
gttaactgtttaaaaggaacagaaacctaagcatgcagaagataacagagcaaagttccaaaaatgacatctaacagtggtgtgcaatcagtaagagccacttcttcttcaactttgttaaaatataaaatagcagtcattaatttaactgaatgagattgaatactaagttctttactttagtcacattcggatggtcaagtttttgccagacagcaatctcctg

SEQ ID NO: 136186 - DNA, 610 bp, Glycine max
  Clone ID: PAT_MRT3847_93986C.1
gtgtgctaagaagcacggccaaaagccgctgagcagcgtttgcaggtttacatctgtgttggcactggtcaccatactcggggctcccgcactcccgcaagactcccgatagctgtacagcgttatctacttgaagaagaaggccttgatttcacggaaccgcagccaggcctgcttcgtgttgtgatatattgagccgaggaggtatacaagtttctgacagtaaaaaaaaaatccatcatgaacacagacattgtagtcattcttgtatctgtatatgggaagtaatggcaatggccaagccaaaaagaaaatggaaaaaaaaaagaggtttggggggttgaaaaaaaactggaaaaggttagaagtaaagagaggggttgtagcagaattgtaccattaaggtttccgaggcatctgatcacattagtcagtcagcaggaattccactttagcatttaccttctgttaattttgtaccctaattttcatttctttgtcaaattcccttctttttttttggattcagatgtaactgatagaactcaattacatgatagaacaattcactttgccaattagattcaatgccaatttacagctcgggccc

SEQ ID NO: 136187 - DNA, 2132 bp, Glycine max
  Clone ID: PAT_MRT3847_93987C.1
tcgagttgcttgaacatttgttccgagctgtaaattggcattgaatctaattggcaaagtgaattgttctatcatgtaattgagttctatcagttacatctgaatccaaaaaaaaagaagggaatttgacaaagaaatgaaaattagggtttgaaatttataaattgtttggcattgaatctaatttggaaaatcaattgttctatagggtaattgaattctatcaattacatctgaatcaaaaaaaaaaaaattagggtacaaaattaacggaaggaaaactgacgctgcccctaaaccttaacgatacaattctgctacaaacccttctctttccttctcccctaactgtttttttcttctttttttttcctgttcttcgggcatatacagatacaacaataactaaaatgtccgtgttggtggactttatactgtgtcaaaaaacacattcttggctggttcaatatatcacaacacgtagtaggcctggctgagtttccatgaagtcaatgccctcttcaagaagaaaacgctgtacagctattggaagtctcgcaggagtgcgagaacccctggtatgatgacctgtccccacaagaatataaacctgcagacgctgctcggcagctatggcagtgcttttcagcacactcaactcatgtttcagcacatgaatggcttcacttgcgtgcaacccgtgtaggtctattatcctctcatttcctcttccatcgccctgcacctctggagcaacgggatttctctgggggcaaatggattcttgagcttttccatgaggcctccttcatatgcatgttgtgcagtcgcccattatcacttacctcctttgctagggctttatacctatttgctgcggcttgaaattgttgctgtaaattggcattgaatctaattggcaaagtgaattgttctatcatgtaattgagttctatcagttacatctgaatttaaaaaaaaaggaatttaacaaagaaatgaaaattaggatacaaaattaacagaagaatgctgaagtggagttcctgctgactgactaatgtgttcagatgcctctgaaaccttaatggtacaattctgctacaacccttctctttacttctaaccttttccattttttttcaacccgtaaaacctcttttttctcaacccgtaaaacctcttttttttcatttttctttttgacttgaccattgccattacttcccatatacagatacaagaatgactacaatgtctatgtgttcatgatgaattttttttactgtcagaaacttgtatacctccttggctcagtatatcacaacacgaagcaggcctggctgcggttccgtgaaatcaaggccttcttcttcaagtagataacgctgtacagctatcgggagtcttgcgggagtgcgggagccccgagtatggtgaccagtgccaacacagatgtaaacctgcaaacgctgctcagcggctctggccgtgcttcttagcacactcagttcgtgtttcagcacgtgaatcgcttcacttacgtgcagaccgtgtaggtctatcattctctggggccctcttccattctctggagcaacgggattcctctggcggtaaatagattcttgagcttttccatgagctgctttcatatgcatgttgtgcagttgccccttaacacttagctcctttgcaagggccttgttgccaataaggtaggcttgtcgtgcctgctcaaaatatgcattacgcaagcgtgcatgatcacgagcctcctcccgcagctcagaatacatatttgcaactgcgtcaccagtttcaagccaaacaggagctgcccgagcagaaccacgactctgtaatctatcaccaatgttgactctcccctgtccaccattgtaggcactagccagagcatttaaacccctactagagccagtggaagcatcaccagaaccatttttatcatacttccatataccagaatcctgagaagccaattttctgactgctgaagcaaagtcaacagaacctctagatggaatagaagagccagatttgaacatgagcatgtctttatcagatgatatgtaggaattccactttgttaacatatctgcagcaatttt

SEQ ID NO: 136188 - DNA, 669 bp, Glycine max
  unsure (1)..(669): unsure at all n locations
  Clone ID: PAT_MRT3847_93988C.1
ctagtgcttcctaccatctttataactatctcctattggatgggtggtctcaatccttcattggtcacatttgtgctaacactcttgatcatgcttttcaatgttctagtctctcaaggcataggcctagcacttggggccattctcatggatgtgaagcaggccacatcactagcttcagtgaccatgctggtatttctcttggctggtggatactacattcagcaaatgccggcttttatagcttggttgaagtacatttctttcagccactactgctataagctactagtaggagtccagtattcagtaaatgaggtatacgagtgtggacaagggttgcattgtagggtaagagattttcctgccataaagtgtttggagcttgaggatactatgtggggagatgtggctgcattgactgtaatgttgattggatacagagttgtggcatatctagccttgaggatggggcagcctcactgaccaagacttgacaaattagagaccatgttattaattttcaagtttggttgttttaattaatcacccctcagttaatgtggtgattcgattcaaattgtacggtgaatatcttaagtccttgtgattaattgacataaatgaagcaatcaaaatttgttgaaaaaaatcataaannnnnnnnnn

SEQ ID NO: 136189 - DNA, 475 bp, Glycine max
  Clone ID: PAT_MRT3847_93989C.1
tcgttcacgcgttcgcccacgcgtccgtgatccttgtcttggtggaattcaaaaatatgccactcccatgatgcccctagatgaagaaattctttctaaggttgcacaagatatggtagaggaatggtttgattgtgttgatgaggaggattcctttgtggtagttgacccaagagccgaactcaatgcaaaatgtggcgtcggactatattggatgaactctattcgctacattgtagggattaatttcagaggccttactttagtggtgtgttcatggcaagtctggtatatttgatcattcaaatcaccattaactgttggttttgacaaaactcgtgcatctttgcaatttagaacgggggcatacctggcgtgttctaagagaaacttcagcagatgtttatgctgtgtgggtgggtcctgaggacaaggcgagtttatggtcacaacttcattatgtttccgtgtaatt

SEQ ID NO: 136190 - DNA, 260 bp, Glycine max
  Clone ID: PAT_MRT3847_9398C.1
gctatattttgtgttttgccgagatagaggtgcaaaagttacacacacgtgtatgcaatttaatattgggtttatcctgtcacctaagtacaatagactgaggggggtggtactacaggatccatgctaaaatcgcgggcatgccaagtaaatcgccttatataagatacctaaattgcagctgtggtcatagctaaaaagcgcttagagttggaaaaccctaacagttgcacagtcagaatggttaaagggactcgccc

SEQ ID NO: 136191 - DNA, 256 bp, Glycine max
  Clone ID: PAT_MRT3847_93990C.1
ggaatgagcaaagcggacatatcagattccatgtgggagtaatacagacacgtggagctacccgcaagaaaattgcacgctgcctgcatgcgtgccaccttttgctatattgtggcagacgaaaggccgcgtgggtcaagcccataattgcggaccgggacaagaaggcataccatctcaatctatcacgagatacaatccagctgggtgtagtgatgggcctgggtggcctctggggggaactgacttacattaa

SEQ ID NO: 136192 - DNA, 217 bp, Glycine max
  Clone ID: PAT_MRT3847_93991C.1
atctgatccaaagatagaagattaaatactggaagcagaagaagaactgcagtttcccgataacgagccacttatcgtgagaaaacccaaccggaaggttattgcaggatttggatgggggtgggttgtgcagaacaaggtgcattgcacattcaaggcccaactggtgcactaggccttttggacgtgctttgttaagtgcaagtgtgttccaact

SEQ ID NO: 136193 - DNA, 461 bp, Glycine max
  Clone ID: PAT_MRT3847_93992C.1
cggatgctgtggaaaaaggcggatggggaaactgactttcccccagggcactccccgaagtggtaaaagaatgccgctttctatagggggaggagcaggggcacagaatgctattctcatgactatgccaaatgctggcctgtcaatgtggagacatttggttggagatctcgcctattaagttgataagatgactcctccctacattaaaggtacagtctctttactcatagcattcggaaatttggctgatgacaccatcaattttgaggcttttgcccacaagcaggtgcaatatggagagattgaggaaaaagttgtatcgaaatcttcacaacaggaatttcttacacattgggcgactgaggtgcgtcctgcaacaactctgttggctgatgggtgtgcatatttgcatgctatggtgcacgatagctcagtgtgtacaataccacgagattcca

SEQ ID NO: 136194 - DNA, 410 bp, Glycine max
  Clone ID: PAT_MRT3847_93993C.1
ataaggggcgctactactgctgtctgtgaaaatatgactgcatgatctgattttttcttgcgtgtcgcatgcactgctgtacaacattcttatctttaccacaacactgaaccttatatgctgatgaaggtccattaggcgctgcaggagtttcctttaagctgaagctacaccttttgataacaattaacagccagaggcattccaccgattgattcacctagcaacaatcctaagagtatatctgcctcaatctcttgaccattatgtatgatatgtaaattgttaataccgcagtcagggcgaatcatgggcagcttgcaagcatctcagctaatgattagatagataacaggctatgactcataacatactgagggacacgaaagacacttatatgtgtaaaacct

SEQ ID NO: 136195 - DNA, 176 bp, Glycine max
  Clone ID: PAT_MRT3847_93994C.1
atcgctaaatcagcatatgtctcagaggcccacgattccacaatcttgtaccatagcgtgcggccttcagtctcatctggtggtcaccagtgagatgatccctagctaccaattggtcccattagttacctctttcctgcatctcatatatcccatgcttctcatccagacaacat

SEQ ID NO: 136196 - DNA, 174 bp, Glycine max
  Clone ID: PAT_MRT3847_93995C.1
gcctgcatgcggagacagctgctatcgggtcttatctgaggctggctccaggggcctatttagaatagcctgccccggattgaggctgcgttatagcactgtgaaatcaagcttggcgaggctactgcacgagattgaatggataccatctgatgagcgagacagttgatctaa

SEQ ID NO: 136197 - DNA, 450 bp, Glycine max
  Clone ID: PAT_MRT3847_93996C.1
agcggaagatctgaaaccgttattgggactcgggaccacttgataacatacataatctgactcattacacgggacacatataggcagagtcgggtctgaaagcgaaaaatcagtcgctcactgatcatagactacaactgtgctataagctatggcgatgtataggacagggtacacgtggtgactagtgaagaggagaggaccactgtttgaggtgtcaggagcctgtactaggaacatgatcctacataccatggacctttgttcagaacgggatatctatgagggggcactcaatagtcgaccttgggccataatcagggcccagggagtgaaggctgtcatgagatcatagctcatggcagaccaatcctatgcgtgcacctgatttcctagtgcttgagatcgatcgcacttggataaccaggggcgtccaaatggagaagatgc

SEQ ID NO: 136198 - DNA, 160 bp, Glycine max
  Clone ID: PAT_MRT3847_93997C.1
aaaacattctgtggccggcgttttacaacaaagtgagtggaaaaaccctggtgttacccagctaaatcggggtgaatcatttccccatctcgccagatggcgtaataaaaaagaggccctcacctatcgcccttcacaacagttgcccaccttaaatgga

SEQ ID NO: 136199 - DNA, 765 bp, Glycine max
  Clone ID: PAT_MRT3847_93998C.1
tacggctgcaagaagacgacagaaggggatgtaaaagctgtgatgaaagactctggaactgctatgcgtgggtgtgggcgtttcctccgggaaaaaccgagcataacaagctgcacaacaggccactttgactcctttaattggctcatctattcagtcagctactggggtagtgtataacattactggaggaaaagacataactctacaggaagtgaacagagtgtctcaggttgtgactagtttagccgacccttctgccaatattatatttggcgccgttgttgacgatcgctacaatggggagattcatgtgactatcattgcaactggcttctcacagtccttccagaagacactactaacagatccaagggcagctaagttgcttgacagagagcttgggggtcaagaaagcaaggcagtgtctcctcctctcaagtcctcaaactatccatcaacggttgcatctagagcatccccacgaaagttcttcttttagttgcttagttcttttacccttcttggttgtagttaatcagctgtgaatgtgatcttgaagcttagttgagatatcattgtgatgacggtctcttctttcgattgtggatcttgtttttacaaattcttcttccaagagttggctatttgcatgacttgtgagtcagattgttagtgtaacaaacagcttgcttgtagatcagtaaacaacatttttgtcaaaggaatggatatatagaagttactttatgcttgttctaaaaa

SEQ ID NO: 136200 - DNA, 499 bp, Glycine max
  Clone ID: PAT_MRT3847_93999C.1
gttgattcgtaccccggaggttccctccggagcgcggggagagcacacctttacggggaaaacccttaaaaaaagccccagcccttttgggtgaccccctgcaattgggccgaaacagtttttgaccagttttttttacccacccaaaggaaaatgttttcattaccaccaaaatcccaaaaaaaaaaaacttttaaaacgttcgggctaaggaggccagggcaaaaaaagactttttttcttaaaaggaggaacaaaaagcttcaaaaaagggtgggtggagacgggaattcaacggggggcgccctttggggagggggcccttgccggggggggcgttttggaatgtaaaccccactaaaccccccctgggaaaacgggctcgtttattctccgccaattaagggggggcttttttttttgggttctgggccccgccccatgggtgaaacaaaccgccacccgggaaaagccttttttgtgggaggggctttgtatt

SEQ ID NO: 136201 - DNA, 823 bp, Glycine max
  unsure (1)..(823): unsure at all n locations
  Clone ID: PAT_MRT3847_9399C.1
gggttgctactcatggctgcggacaattgctctctgggttaaatcaggaaagtgttggtttgaatagctcaaaaaacgttgatgcccaacagctgtttaggaactggaccaccttggatgatagtgccatgtttgacattgggaattcatatattgagaacggtagtcttgataatgacaatacctttcaggaagctgttgattttttagagaaggccggtttccattctttaactctgcctagcttgcctcctgatgatgctccagataagttccacatctcatgtgataatttgaagagagagaatcatcggagctgtaaaagatcatcaaataagttaactggggattctgaagaaagacgagaagctgtgaaatatctttgcaagaatcgttcaaggagaggggcacttttgaaatttgttactccaaacaaagttttggacaagaagagaaaaaatatggattcattgcagtgtaagaaaagcnccaaaaaaccaagccatacatctgtcaccccccctgtggccgcaggaagttcncggtgaatattttttggttgtttggtgatgtacttgagttcttttggcgaaaagcctacagccgttatcttttctctctctctctctctttttttaatttgtcaatacctagtactcaccnccgaattgtatagtttcacacccgagcgagtgatgcatggatgaaatgggtgtntggatatgttcccccttntgcacaggtagaacatagccagtgaggacaaggatgtaaaaacaattacattgataaataagacgatcctagtggttntgaacatctt

SEQ ID NO: 136202 - DNA, 1111 bp, Glycine max
  Clone ID: PAT_MRT3847_939C.1
ctgaaagtcccaattttccctccacaatttaaatctccctctaaaccaaatcaaatcaaagccacgcccctaatctcaaaatccctccataaatattgaatattgtcttcccttttctcataccaaacacgcctttccgcattcaaactatggcctcttcttcgtccctctcattggacacagccaaagacctttcgaactcatctggtgaggttcatgtcatcgtcggtcccatgttcgctggcaagaccactgcccttctttgtcgcatcgaatccgaactcaacgctgccaagaatgtggtgttgttaaaatcgagcaaggatacaagatatgcaattgactcggttgtgacgcacgatgggattaaatttccttgcagggcgttaccggatctgttgtcgttcagggaaaaacacggcgatgatgcttatcagaagttggatgtgattggcatagacgaggctcaattttttgaggacctatacgagttttgctgcaaggctgctgatgaagatggcaaaaccgtaattgttgcaggcctggatggtgattacttaaggagaagctttggctctgtgcttcacataattccacttgctgattctgtgaccaaactaacagcacgttgtgaactgtgtggcaaacgtgcttttttcaccttgaggaagacagagcagagagagactgaactaattggtggggctgatttgtatatgccggtttgtcgcctgcactacctgaacagccaagttgctgagaggagtgttctcgaatctcaaaattttaaaaccgattgattcccttcttgaggcagctgaagatgtttaagggttattgggaaattggcttgtatgtagcccaccatgtttaattgttcgactgatacatgtttttatctatttgtttttatcacccttttgtataggtacttgagtttcttaatgctcatttcttatgttacatgtttttccttgccttgtaggaaaatttggtggctctattattgtctattctttatttgacacattcatatactagaagccatgaaactgctaaacaatatttaaatgcgagtcaaaaacagtcgttaaaatattgatttttttaa

SEQ ID NO: 136203 - DNA, 418 bp, Glycine max
  Clone ID: PAT_MRT3847_93C.1
cctcgtgccgaattcggcacgaggcctcgttgcttctgcatcgtaactggctcagccacaacctactcctcttcccttcagagaaacaaaggtgcaagaaaagtaactagcagacgcagtgagcctagtgaagtgataaacaaaggggtgcacatctagaagagaaagcaaaaagaacaatcaccaagccttcatacctgaaggactatttgtgatgatcgcggctgagctgacaagagaggaatctgtagaatattgttatcgttcatcaggggacagcaataaccaattccgttttagcttgtgatattttcctagcacagaatcacaattctgttagggaattttcagtataaatatacacattgtaataagctacaaattatgaatgaaatacttatcttctaaaaaaaaaaaa

SEQ ID NO: 136204 - DNA, 274 bp, Glycine max
  Clone ID: PAT_MRT3847_94000C.1
caaaattgaagctaatcttgacgaagatttcatgtcactagactaccgtgtgagatgcctttatcgatcaatgtcagccaatatatatagattacgcatataacactggatggcattttaagctgaataaagaaatgcaatcatgatcctatgggaacctatcgttcttgttccttgaacatgggaaaagctacacattggtgctgactgtatcagaagaaggagttccatcttcaaggcttgtgctttgtctgtggatgtcatattgtatttt

SEQ ID NO: 136205 - DNA, 426 bp, Glycine max
  Clone ID: PAT_MRT3847_94001C.1
ttaaaaaaaaagaaaacaaaacaatgtttttttattaacaaaacatgtttctcttcatataccaggcaacttgtgagaattgtgtattgttacgactccctagccaagcgaatcctctcattgttcatgatgtgatttgataaccaagtccaagtgtaatggaggagcagcatcaaattaagaaacaggaaaagcaaaggaaagagagagggagagagaagtggaaacaaatttcattgagtccaatgctaaaacaaacagttttgaatttgtcatctcatctcagaagcacgcatccaaaagacagcagcagcagagggcagccaaacagccttccaaacaaccagggccggttgaattttgttgacggggcggaggctgagcgtattgaggagcgtaaggcggaggatacccctgcgccgggta

SEQ ID NO: 136206 - DNA, 245 bp, Glycine max
  Clone ID: PAT_MRT3847_94002C.1
ggattcatctacggtcatattataagtatctaaagatagataataaagagcataatcatattaaatattaaatagaaaaatggaccgatctttatcaaaggccatcttcggtagaagagaaagatcctattggaacacttaaaactatttcagtataccaggtctctatcttacatttcaaaagattaatagaattacgattttgacatgaaagaaaaatgtggggcataatataaatgacaaaa

SEQ ID NO: 136207 - DNA, 190 bp, Glycine max
  Clone ID: PAT_MRT3847_94003C.1
aatcgaataacatagataggtgaaaatggcgcagtgtgtgaccaacacattcctgcaccgaagacgcgtttcttacagatgacgggctcccactaaaaacgttcctagagcgtgctcactgcacaagcgtggtgcattgccgaatgaggatccatccctcaattctacaacagacatcgaagcatgtact

SEQ ID NO: 136208 - DNA, 683 bp, Glycine max
  Clone ID: PAT_MRT3847_94004C.1
acaaaatcccaaaaacaccaacgccactaacaccactctgctcagctcaagttgtttactaccgatcgggaatgcgaagcttcttaacaacaacaccaccatcacaaaaacactattctactccgttgaaacgatgtcgcttcacccaaaccctagcctcactcctccaccagccacaccagcgttaaagccctggctcaacaccaccgccaccacggagcccctcaaccctatggtcctcgccatgcacctctccgaccccaaatctaaaaccctaatccccaattccacactaatcataatggacagaacccttcttttatcggacgagcttctcctccgaatcctctccaagctccccaattcgcagcagcagcggaactccaactccttagtctgcaaacgctggctgaacctccagggtcggctcgtccgaaccttgcgtgtcctcgattggaacttcgtcctctcgggtcggttaattattcgcttcccgaacctgaaccacgtggacttggtcccaggttcgttcacttcttctgtatactcatcgattgtcgtaagccacaggctcgtttcgatgcacgtggattccgcgtggcgaaatcgcgtcgaaaaaaacccctgtaccgtcgagacggttgacgcccgactcaaatcgctcgcgggcggggtgccctaat

SEQ ID NO: 136209 - DNA, 777 bp, Glycine max
  Clone ID: PAT_MRT3847_94005C.1
acgcggggaagaaaaagaatattagttttaatttcgaagatgaagttcctatttgctgtgctagcaatttttgttgttgctttaccttgtgcgtggactaaactggagcttgatgcaggtcctagcttcaatgttatcgattatggtgccacgggcaatggtcaaactgatgattcccaagcttttctgaaagcatggaaagacgcgtgtaatgcaagttatggcaccgcaacacttctcatacccaaagagaaaactttcatgttacaaccggtgttgttccgtggtccttgcaagcctccaaccgttcacattaagctcaagggaaccatcattgccccaaacaagattgaggcttggaaattgccaaaaagtacaaggatggcatggattcgttttaggcacataagtggtcttgttatccgtggagggggatggggactaattgatggtcaagggtctccatggtggaattcttatttcaataccgaaattaagaggccaactgctttacattttcgtgaatgtgactatctatttcttagtggattgactcacattaacagtcccaaaaatcatataagcataaatagatgcaacaactcactcatctccaaaattcatatgattgccccagacgaaagcccaaacactgatgggattgatatctcacagtcatccaacattgtcataaagaattctaagatggaaactggtgatgattgcattgccattaaccatggatccaccttcatcagcataattggtgtcttttgt

SEQ ID NO: 136210 - DNA, 286 bp, Glycine max
  Clone ID: PAT_MRT3847_94006C.1
atttttatttcataacaaaaacaatgaaaaccttcttaatgctaaacggggatagggaatacattatcttctgccaacacacttggcactacccaaagttattaaccatgcttgcacacattactgaattaacctacaatctgaaaccctaacagacccgatgggctgctgtttccatgctaatatttgaagagcatgtgaaattgctcacatcacaaattctagacaagaggctactgtgagctatccatgaactaacgcatacccaaacccgaaagaaaatcat

SEQ ID NO: 136211 - DNA, 749 bp, Glycine max
  Clone ID: PAT_MRT3847_94007C.1
agaagatatcttagtggtggcataaacacaacaacaacacaaggaaacaccattatcatccccgaagctgggaacaacactcctcaaaatcaaatctctgccatattatatatcagatgttgcactctcagtgccaccaccaccttctcttcccactcacactcgcacaccacaaagttaaaccccctctctccattcttcctcctcttcaccacaaacccaccattctccactctgtttcggcttcagccattcctccatgggccgcgcaactcgccgatgcagcagcagacattgacacagagggccctgttgaacttccattctcttccactccttccattttcgccacctccgacgacccttcgcccatccaagtcgcttccagtgttctcctcaccggcgccgtctccgtcttcctcttccgctccctccgccgcagggctcaacgtgtcaaacaatcccaattcaggtcttcaggagagaagtcgataaaggaagatgcattggatagcttgaaagctatggggtcggcttcagtgaaggctaaggaggattcagcttcacctgttcaggcattgcttgggggaatatctgctggagttattgctcttattctctacaagtttgccactaccattgaggcagctctaaaccgacagacaatttcagataacttctctgtatgtctcatctcctgtccttctatatctgtatttattcttttttgttgcacaacatgttatttg

SEQ ID NO: 136212 - DNA, 147 bp, Glycine max
  Clone ID: PAT_MRT3847_94008C.1
gggttttgaccgagtgaacccctaaacagactgattcagcacattctgcaccgaaaggaagaaaaatatgacaccgtgaagtcttacttgatacacatacataccacgatgcttaacacaaccttgaagtgggataagaagaaggaa

SEQ ID NO: 136213 - DNA, 415 bp, Glycine max
  Clone ID: PAT_MRT3847_94009C.1
cccacgcgtccgttaaaccacccaaattaagtgtggtttgagagaactaaaaacccgaatggattcggggaagaacactcagaaaataaccggggctttgaagcttggggctgcagccaaagggggaagagctcaagaggctgttgtcaacggaagacccttttaaaagaccttggttgaagtcttttacaacataaacgggcagttcttaactggggacgtaaacatccttttaacaaaggttaggcctgtcaagaaagttgtatttgttggggtcacggggaaccgggttttttgggaggggttaaaaacggattcttaaaaaaagtttaggtttaattaatggaatttgtatggtctttggtttgggaatttatcttgctaagggtttcgtcaagatgggtaattttttttt

SEQ ID NO: 136214 - DNA, 430 bp, Glycine max
  unsure (1)..(430): unsure at all n locations
  Clone ID: PAT_MRT3847_9400C.1
cgcgtcgaagcaagaattgggcggcggccgcccttttttttcctgttttttttttttttttttttttttttttttgccttccctctctcctccctttctgggtttttctccccccccgttgcttcccttggggggttgctcccttttcccccctcccnttccttccccttttctgggccctgagagcccatatgggggggggaacctcccaccgtcaggttttgggggttttataggttgggaccttccggagctggtggtgctggctccnccccccctgccccccgacccccccgtttgtgttttttctcatgatccccaaggccgttttagtaccaaattctttccagtccccccctgccttaagttgtgcttccccgcccttttggccttgggttgctccctccccccgcccccgcccccctcttcc

SEQ ID NO: 136215 - DNA, 623 bp, Glycine max
  unsure (1)..(623): unsure at all n locations
  Clone ID: PAT_MRT3847_94010C.1
tccggaattcccggctcgaccccgcgtccggaataattttgttatctttcgtatatatatagtttaccaataaaacacgcaacaacattaacacttccctataaatatgttttctgttggctggcctattgtgtatttgtgtgattattataatagaagtgtttgctgacattagtgcctttgataaagtggttgcttcaagtgacatcttaggcaagcttccctttccacatagactcaagtgcctagtgggggtgtgaaggaaatggctaaaatctccatcttgttggtggggctttggctactaggtagctggacagggttgttggatgcagaatacatgaaatacaaagacactaaagagtcaatcgatactcgagttgaggatcttgttagcaggatgactcttgaggagaaaattggccaaatgttgcagattgagcgcaagtatgcatctgctgatttggttaagaagtattttatcgggagtgtaatgagtgagggagggaagtgttccagctcctcaggcttctgctgaaacctggattgacatggtgaatgaatttcagaagggtgctntatcaacccggctcggaattccaatgttttatgggattgatgct

SEQ ID NO: 136216 - DNA, 878 bp, Glycine max
  unsure (1)..(878): unsure at all n locations
  Clone ID: PAT_MRT3847_94011C.1
ggctcgagtgctggctttctgttagccttaatgaagagtgtgtagtgtactgtgtacctattagtttctgcgctagagatttgggttgcgtgttcttcattattgaagggttaatttgatgcatttgagttatgtgcaaagtggacttaagtttttatggacattgacttttacatattctgttgaatttgtctcaggcccttcaatggatctggagggaatggctaaaatctccatcttgttggtggggctatggctactagttaactggtcagggttgttggatgcaaaatacatgaagtacaagaaccctaaactgtcaattgatactcgggttgaggatcttgttaagaggatgactcttgaggagaaaattggccaaatgttgcaggttgagcgcaagtatgtgcctgctgatttgcttaagaagtattttattgggagtgtattgagtgagggagggagtattccggctccacaggcttctgctgaaacctggattgatatggtgaatgaatttcagaagggtgctttatcaacccggctcggaattccaatgttttatgggattgatgccgttcatggacacaacacgattcacaatgctactatttttcctcacaatattggccttggagctaccagggaccctgaattagttaagagaattggagctgcaactgcccttgaagttagagcaacaggaattcaatatgtttattcaccttgtatagcagtctgtagagatccaagatggggtcgggtttaatgaaagcttcagtggaagatcctgaactagttcaagctatgactgaaatataccaggattgcagggnggacatccctatgattcaccaaagggtgtcccttttatcact

SEQ ID NO: 136217 - DNA, 324 bp, Glycine max
  Clone ID: PAT_MRT3847_94012C.1
gctgctctggctatatcgaagtcttatccaatagtgaccatcgtggctgcacaaaatgctcatgctgcatcgaaaggtccagatcataatcgtgcaacaaatgccatcagccagactggcttctcaacacaagatgctgaaccttgcaatgatgccaaccaccactatttgatccttccctcaaactgtataactgacgacggtacgccctgaattgcatgctgacacaaccttcgaggatgagtgtgttacgtctattgatgcagaaattcacaaaggtgtagagctctaagaacagcttgatattgatgttcttgtcatgga

SEQ ID NO: 136218 - DNA, 526 bp, Glycine max
  Clone ID: PAT_MRT3847_94013C.1
ggcaaaccattgcagagcttacaagaacagagcatagcatgctctgtttgtagtttgaactctgaagtgtaggagaaggagagagagagagagagagcctgactctggcgcaccaccccctccgctagccaggtctcgccctcacactcggactcgacacctcggccatttcattctcacaccatcatccatttcgcacactcgcagccaccctttcccttcctcaacactagccacaatctcacttcctccagcagcgagaatcactggctacacccacttatggtgctctaattacaccaccgtcggcaccatcgaggagggttccgagaaatgctacctgaacctctcggacgaggagctcatgcggcagtgcgaaatggacacgtttaaggcctcggcaccaggtggtcagcaccgtaacaagcgtgagtccgcagtgcgcctcacacacctacccacacgaatcattgctcatgcttcagaagagcgctcccagcacaagaaccgcgcttcagcgatcaac

SEQ ID NO: 136219 - DNA, 225 bp, Glycine max
  unsure (1)..(225): unsure at all n locations
  Clone ID: PAT_MRT3847_94014C.1
agactccctctcntactcnngccgactccgaccgcnctgctctgctcactcttgtcctcccccgctgcctacgccgncgtctcntcttccctntaccggctccnagtccgaccccctctgcnactggctctacgacacnttcntctcctccganccccaatccgcatcgtcgtcctctaccttcgtcngcctcttctntgggcntctacgtctgcnngaatngat

SEQ ID NO: 136220 - DNA, 290 bp, Glycine max
  Clone ID: PAT_MRT3847_94015C.1
acggctgcgagaagacgacagaaggggatgtgcccatgtaacaccctctactaccacctagatttatttataaaattaggacaagtagaatataatgtttttgtttttttttaaaaattttcttataaaataagatgatatcatataacttcaaatgttttaaaagtcatcgcatagacaaataatactagtttaaatcgcattggctctccaaaggtcatttaaaatccataactaaactattacaataaaaagaagtccaaagaagaaataaacatgagtctagtcct

SEQ ID NO: 136221 - DNA, 420 bp, Glycine max
  Clone ID: PAT_MRT3847_94016C.1
cagattattatcctttttgggaattgatcttcccaatagaggtatgtggtcctaataatggttagaaatgtggagttctgagtgggcaaatcaaacttcatggcactcgagttttcttatagacaatcccaaacagtctacagttttgatgttctcagggaatatctaagatttgaaatcgctggtgaactcttatgccagctttttctgttccacaggctactgccagagcttctgaaaatgcggaatcctctgcatgatctggaatttgtgtgttctttcgttaggtcggttgtttaattcaatctatgaaattagacatgaccctattgtagagtatgctctgactatttgcaaatttccacacctattttaattgtcgtaatgctgagtgaagtgtgtgttttgttattaaatatt

SEQ ID NO: 136222 - DNA, 154 bp, Glycine max
  Clone ID: PAT_MRT3847_94017C.1
ggcccgagcttttgtaaaaccaattaatatggttctgtctgggttctctgggctgctgcacattgggcctgctctcaagactctgtccttgctggcgacccaactgtcttaactgaacttcgtgtatgctacaccactgtttcacctgtgggtg

SEQ ID NO: 136223 - DNA, 697 bp, Glycine max
  Clone ID: PAT_MRT3847_94018C.1
gatcaaggcacgaggtggcagctcatcccacaggtttggtggatcctcaaaaagacagcccttttgtaacttcttgagcatttgcctatgagtagaatgaaagaaggtttggtgacatcgtgtatatctcgtcccacagggttgtgagatgctggagagcacagccattttgtaacttcttgatggcatgcctggtaatagcatttgttctgccgtggttttttcgtgtaaatatgttctagctgctgaatcaacctctattattcttgtctcgaattcttcatactcagctcactaacatggtgaatgaatgattggtttgtggcatacatactgtggcatcagcacattttactgggttattaatgcctaaattaaccacatgtccaagttaacattctgaaggtgtgttccctgaaggtgtgagatatagttgacattcttaagatgtccatatgaagaaattaccagccagacatgtgagatagccaaattgtttcctggatgccttctttggagtgtgtatgatgttctgaggtaaatatatacagagagagagagagagcatgtcttacatttggtggtaatagatcttatttgtaaaaattaagtaaagaatttgatgcaaaacaaacaaaaagagcctctttttgttttcctttctatttttcacttattttactttcttttattgcta

SEQ ID NO: 136224 - DNA, 466 bp, Glycine max
  Clone ID: PAT_MRT3847_94019C.1
agaatctaatgaccgtcgcatgccacgccgtacgtaagccttggaatcctcctaaaccggccgcccttttttttttttttttttagacgaaggtatgtatgtttcaccaccctctccattaataataccttaaagacccattttaattagggttagaggaaagaacatactcttgagatttttagcaataccctaacggatatataatggatgaacagggtgattacattgccataaaaggggctcatcctaaattgctcaaaggtgacttacctacaacagctaacataaggggccttacaaacacaagggactctaagggatttgcccgaaagaggggggcgctcattaccctgactgtctgcttaggaaggaacactgtaaagcacatcgggaattttggaatacatcagaatgtgagagggggcacccccactactgccctgcgaagcggaagaactctcct

SEQ ID NO: 136225 - DNA, 890 bp, Glycine max
  Clone ID: PAT_MRT3847_9401C.1
ctaccatcgttgctaccactcattttgatgctgcaaatgaaaaaagagtttggatcgtttgctgtgtatgcgactaatgttagagtggcagtttaaactatagcataagagagtgacaccatccacaattagaatctagaaaacgactttggaacttagtagtagcagtagcctacatccaacataaagtgtttaaacacattcaacactgattatctttaactacatggtgtcacttcaatgtagcaacttattagttgtcttaaaccattattaaaagatagcacaagcagattattactctcatacactttagcctggaggccagttcatctgtcttcccccgaggaggtgcacatgaatgtggtaaactgattggcatcctttcggcccatcgttaattacaatcctgaagccgtcgtcgagtccttcttgcttcgcaaccagcttggcagtgtacagaaggcggccaagaatctcaaagtgcctctcctcagccttggatagaccacttaacccgtctttgaatttaggaatgataagaatatgtgtaggagcttgaggagttatgtccctgaaggcaagcaccttgtcatcctcataaaccacagtagaaggaatctccttattgatgatcttgtcaaatatggtaggagcatcagcatcagagggagtgacggcaagagccgcttgcttctctgaagccatgatggggctggatctagcgaagtgtgatgacaacacagagattcttttacttatattgttgttgttgctgctattgccactcattcataataaaataatggtgtgcttagggaaccccaaatccagtgaatgaactttgggctgaatcccaccgggttcgttttttcggacgcgtgaacgat

SEQ ID NO: 136226 - DNA, 283 bp, Glycine max
  unsure (1)..(283): unsure at all n locations
  Clone ID: PAT_MRT3847_94020C.1
gcacctgaaatcttgggataaagataacaagtataattgcaggcagatgtaaaacatatgtganagccaggnagaagtgacagtgtggangcnccanatnttcttacaattgtattaaaaacgatttcagtctggtaacttgaggagttgaatangtcagttcagntccctgaggttctgaatatggctccatatatgagtggnacaaaagataaatctccgttatacagctcnatgcngtggttgtccattggattggatatcatgaatgcngccntttcag

SEQ ID NO: 136227 - DNA, 371 bp, Glycine max
  Clone ID: PAT_MRT3847_94021C.1
taattcccgtggggtcgagcgtactactaataagacgaccaataactccaattcatatatgaacattttttcctccttacctgggaaaatattaaataggaatcccccaaggaattccgatctaattttcttcggcttcaggatcggcctaataagaaaacaaataattccaattcatatatgaacatttttgcctccctatttcaaagaaaaagtgtaattggaattccccgacgaattccgatctaattttcttttgattcacgatagtcctaataagaaaacaaattattccaattcatatatggacattcatgccttcttatttattgaaaatgtgtaatttgaatcccccgtggggatccctctat

SEQ ID NO: 136228 - DNA, 351 bp, Glycine max
  Clone ID: PAT_MRT3847_94022C.1
acattcaaataaatatattgggtataaaatatgaaatttcactagatctacacttcaaggaaggctatacataggcacatgctatgactataagcgtcttcatgaagaatgctggatgcggggctacgtatatacataggccatggagagcctaatgtcagagctaaaggtgtccaatgaagatcagtttacgtgcgacatggtgatacaacaactgatccactgtggttataacttatactttagattcagcactatcgtcatgatgatgtcatgcaccaatttcctagtcactgatgccacatggatttgaggtgggctgtgataacctgtaacgttccttgcaaagtg

SEQ ID NO: 136229 - DNA, 277 bp, Glycine max
  Clone ID: PAT_MRT3847_94023C.1
catatattcacaacttcttccatggaggactgggcgggcctctcatgagtagaatatgatgcatagaagcatcttatagcagctgaagtctcgagtatattacagagtagcttgtttcctggtcttagatcatccattgattttatggtggagggatacctaagatacatcggcgatagctggctcgtgatgagggaccttatggtcccatgggacgcagaatccccgaggggttattgggaatggcattctgtaacacaggcttagatggtcgtta

SEQ ID NO: 136230 - DNA, 166 bp, Glycine max
  Clone ID: PAT_MRT3847_94024C.1
tgactattctcaacctatcgcgaagagtgtctctattgctgagcatcctttattggactgagatctctattttgacacatttgagtgtgatgcatgcctgccatcatatggctcctagtacattcactacagaggaggactagagacagacatatcatatgcctac

SEQ ID NO: 136231 - DNA, 464 bp, Glycine max
  Clone ID: PAT_MRT3847_94025C.1
ttctttttgatcaacagggctgttaaggtgtggaaagagttgcagactccggtggataaattatctgagaccggacatcaaacggggcaactttaccagagaagaagaggacaccataatcagtttgcatgaaatgttgggaaacaggtaatcaaacattttccctagctagctagcataacatttcacattatttcgttaaagatagatgatttagtccaacttaatggaaataaattaatccttaatgaaagaggttaattgaaaagccaagactgcacaagggatagtctcaataatacatataaccatatgtagtactcaggctcgaacagtgaagcaaattaattaagattcccagatatcttcatttctatatgttgggtcctcttctattctgttccatgaaactgatggaggagatgcatgtgacttcataaacttcaactctcggtagtatatac

SEQ ID NO: 136232 - DNA, 476 bp, Glycine max
  Clone ID: PAT_MRT3847_94026C.1
gggcgtgcgtggagctcaagaactacctagtgaaggtgcaaaggggaactctgagaatcaacagaagggagaccaacaaccaatttcaacagccaacaaggcttgtgggaagaatgccaaattggggtctcaagcttctgatcctttatggaggaggggtacacgttagggctcgccggggtcaagcaacaaatagccatagccttgcagagagagtgaggagggaaaagataagtgagaggatgaagtttcttcaagaccttgtacctggatgcagcaaggtcactggcaaggcagtaatgctagatgaaatcatcaactatgtacagtcacttcaacgacaggttgagtttttgtctatgaaacttgctacagtaaatccacggctggattttaatattgaaggacttcttgctaaagatattcttcaacaacggcctggtccttcaaccggactagggtttcctctagaatat

SEQ ID NO: 136233 - DNA, 231 bp, Glycine max
  Clone ID: PAT_MRT3847_94027C.1
cccacgcgtccttctatatcaagtatagtgttgactatacctaaccaattgttcagatggtgcatggcattatactgtacgtctatatctagattctaatttctgtcaactcataccttttttaatcgatacgtccattctctatacaattaaatcatctctcccattcggaaatggcgcttctttagatatatcacacatgcacgatgctctcattcgtgctaatccagc

SEQ ID NO: 136234 - DNA, 303 bp, Glycine max
  unsure (1)..(303): unsure at all n locations
  Clone ID: PAT_MRT3847_94028C.1
bntngtgtncncgtggtggncggngttcggctcnagagctnggtggggngtngtttggttttgtngnangtgtggtgcggttncgnnnntggtgncggtgtgtctggtnttgncngtgngtnttttggtgttgnntgtnttaagggtngttngggggggttncacnnnacatnggacttnagnnggtgngntnntggnnanggnngnngcgnnntgnngggngnnnngnnnggnngnnggggnggnggngngnggnnnnnnnngnnnggnnnnnnnnngngnnnnnnnncngggnggngnngg

SEQ ID NO: 136235 - DNA, 214 bp, Glycine max
  Clone ID: PAT_MRT3847_94029C.1
aactcgcatacccactggccgtttctctacatggcctcaatattcctgattttatcagtcaagaacttgggtcagagtccacgttgccatagatacactcctgagctcaacggggaaagattgctcgtgggtgccaacttagtctctgctggcttggaatcctcatgacatggagtccatttgaaacacatagaatccaagacaactggatatt

SEQ ID NO: 136236 - DNA, 322 bp, Glycine max
  Clone ID: PAT_MRT3847_9402C.1
cctaaaacctgcccttttaactttgaagaagtcctaagttaaaggctttccttccttttaagggaactctttttatttcaaagtggtggccaaggttggcaaaaaaatcaaaattgccaacccttttggattaaatggggccttggttttaagggaaggagtggatccttctggccggaaaggaaaggaaaaggccttttcccagttgtgtacacaatatccgggctattgccaatggtaccagtctctatttacaaccacaggattggtctccaacgcggatatatatactctggcgtaccaatctgtcttgatcttctgg

SEQ ID NO: 136237 - DNA, 404 bp, Glycine max
  Clone ID: PAT_MRT3847_94030C.1
ctcgagccgaatcggctcgagcttccggatcagcggaatcaataaactataatttttttaccacttaaaatttgcaatcttggatttcagaaaactctacggggccaatcataaaccctagattcatagaggggggattttgttttttcagtgtaatataaccgtatttcagttgatttttctgctatttggggatctggaatacccagaaagagaaatcaactttgttttgttgttaatttgttgagtttggagtgagagagggattgttgagagtgcattgcgaattggtgtgatctgggggtggagggagagaaagagaagggggtgaggaatgagatgagggtcataaccgcatgattcacagccattcgacatacactatcgacatacatgctacttgt

SEQ ID NO: 136238 - DNA, 227 bp, Glycine max
  unsure (1)..(227): unsure at all n locations
  Clone ID: PAT_MRT3847_94031C.1
taaaaacaaatacgttttaactaccaactctgcaattttttttatttgataccgatcanaacaaatggggcttctatattaaacaagatgtgtgcgcatatataatacaaccatctatactatctcccacttttccacaaaacatttctctctcaaactataactttcacacatggcaacttataaaactctttctcaactacatttaaatttctcacttcataaac

SEQ ID NO: 136239 - DNA, 317 bp, Glycine max
  Clone ID: PAT_MRT3847_94032C.1
ggtaaaatagggtgtgtgagagagctatactaactcaacacaaacctactagtgagtgagagaaagacagagacattacttttggtagtagcaacaagcaaagagaggaaagaaagaaagagagagaatcttcattcaatttttttctgctcattttcagtgtacgcctttatcgtttctctttccctaacattggagtctgctttacaccacactccacaacaaagatcgtctgcattccctttcccttctcttttcaccccttttttctttctctcttggtctctctctctctctctctctctctctctctctct

SEQ ID NO: 136240 - DNA, 1795 bp, Glycine max
  Clone ID: PAT_MRT3847_94033C.1
ctttgttctgtatccttttcgggggaaaatgaggtacggtggaggaaagaggaggagcttgtcactgaaaccattatttgttttgtgtgtagtggtgactggtttgggactgttggtgctttcgctgaggcccttggatgctcccgctagtagcaccgtgcctctctcgagagcttcttcttcggagttcaacactttttccaacaatggctcgcgcgtggaaagcatcttggcggttcggcacgtgggagagaggccatgcaagacggtggaagaaatgggggaggatttcggaggtggtgtgggcaagagtcccctagagtgagaaggattattcagaatcattttcttgccaacggtgcttcaagagtcagggattttcccccagagcagttctgtagacatggctttgttctggggaaggcaagtgaggcaggttttgggaatgaaatgtacaaggtcttaactgctgcagcacttagtataatgctaaaccgctccttgatcatcagtcaaaccagaggaaaatatccttttggagactacatttcttattccaactttacttttacggtgaaagaaatcaagcatttgtggagacacaaagggtgtgaaagcaaatatgggaggaaactggttatgaggattgatgattttatgaaaccagtagaaacaaatgttatctgtagcaattggaagaaatggaagcaacctatcatatggtttcaaggaacagtagattctgtggcggcacagtttttcttaaagaatatgcactctcagatgaggactgctgctctcaatttgtttggtgacccacaagttctaggtttacggccgaatgtttttggggagctcatgagggttctcatatccccttcagaagatgttgaggcagctgtcaattgggttattggtggtggggagaatcctgacatctcattgcatattctaatgcttatgcataggtctggaagagctgtgcaggcagtgttgcattgcctgaacaaagccatgcgcagtcaacatctaatgtcatcaagaccaaaggtggttgtggtgtcagatacacctgctgttgttaaaagtatcatgtatatgtctaacctaagtgaatttgtagaggttcttcattttgattatgacaaatacagaggaagtatgtttaaaggtttgcacatcacagattctagaaggagggattggggtacagcgcctagatgggttgcttttgtggatttttttcttgcttctcgcgcaaaatatgccaccatttctggagctcaccggcgtgtcgggactacatatgctcaattagtcgctgcactgtctgcagcttacaatctgggggacatgtctggttcaaggtttatattccttagcagtttccagagtaatttgttgactgatggcctaaagaatcagcgtggttggggccatgtgtggaacagatatgctggtccattgagttgtcgcaagcagggcaatcaatgtgccttcacaccagttctcccttctgcttggtgggacggtctttggcagtctccaattcctagggatattaatcgtctggcttcctatggcatcaaattatctgctcttggcactgttgataaaaattcccttaaaaatcactgtaagaaaaagaaaaatgttgtacgaacctttacattcaaattgtagtgtttggaagtcatatttctctgtattcttagttgtataaccataacaattagtaagattaattatgtttaattcatatattaatttatgtgcgacttgggtcgcttgttct

SEQ ID NO: 136241 - DNA, 273 bp, Glycine max
  Clone ID: PAT_MRT3847_94034C.1
actacaaaaagacgacttaatgggtatcctaaaacaaaaaccgacgacctattccttggatgctggggaccatcccaatgaaggccccaatcttaacctagactaggtacattgagttactcaatctaaacatgactatatactaaagaacatagataccacactaacttgggtcatatggcattataattttgacaccgtaacaacgctcaccacaatacttacatgtatatactacaaccatattacattaccacctcttgccttttcccc

SEQ ID NO: 136242 - DNA, 446 bp, Glycine max
  Clone ID: PAT_MRT3847_94035C.1
gggctgatttatgtgcgttggaagatgatagaagggcatggtcgtgagaagagatacaaggctggtcgtgagaaagggagaagccatcgtcgtgagaggatgatggaagggggaggtgaacttccattaccgtctgagacgggcgaagaagcgaaggttgtggccttagagctcgccccgaagaactagaagagagaggaggaacgggtgccggttaagaagtaggattctgaggtcgtgaagaagaagagagttgagagttgtaaatctactcataatagagtcaagtagcatgtcaaggagcatgactattagcagaaggaaccgacctggccgaaatgtgacgttaagtcgaaaggcggacctcacgctgacttacatgtccagtctcccgccaccgcctgtacttgcggcaccaacgttaccgattttaaactaaggaagac

SEQ ID NO: 136243 - DNA, 395 bp, Glycine max
  Clone ID: PAT_MRT3847_94036C.1
aacaaggaaaacgggccctttcttcaatatcaactttaagccagccccttgaccacaaaggggtaaaatccactttcattttttttttttggggaccccattcaaaaaatttgttgcccaatggaggggccccaacgggggctgttgatatgccccaccctggcccccaggagcagttgcagcccccccaactccaacgttgttgccaagggcggggggcccaaaagggggaggactacccatggctgctggctggggaggagtggggaccatcccgggaaaccgcatggaaaaaaactgacctgcacctgcattaaagaaaccatgacctgggggggagggcatgaaagccgcatgaggggtttcccctggcctgttataaagggagaaaattg

SEQ ID NO: 136244 - DNA, 280 bp, Glycine max
  unsure (1)..(280): unsure at all n locations
  Clone ID: PAT_MRT3847_94037C.1
ggttttgccgtggaagagagaagccctagggtttgggagaagctgatcggagaagatggtgcagcgtctcacctaccgcaggcgccagagctatgccaccgaaatccaaccagcacagagtcgtcaggactcccggtggcaagcgtggttatcagagcacgacggagagggccagcggacccaagtgccctgtcgctggaaagaggattcaanggattccacatttaagggcaacagaatataagagatcaaggttacccaaaaaccgaaggactgtgaa

SEQ ID NO: 136245 - DNA, 450 bp, Glycine max
  Clone ID: PAT_MRT3847_94038C.1
atcctgcgattaagtcccggctcgccgagtctcactaggcgcgggctcgccctttttttttttatttttcattttttttatatttttattatctgtcaaaacgcgcgggagagctctttaccaaagattggtttcaacctaattaaagggtggctgtgtaaaagcaaacgacttagttgtctttgaacccataccttttaaatatctaatcggacgttcgggtgctttatctggacgatgctgtgctgtgccctgtctactatgaagcctatccaccagcgtcgcactggcccatgctgttaccttgtgatgttgacagctgtctagtacaaaagattggcgcagctggtaccttacattgcggcccccactgatacactgctttaaccatacatggctaagctggtgatgtgactgaccgcctttttgccataaccattttgctctggg

SEQ ID NO: 136246 - DNA, 470 bp, Glycine max
  Clone ID: PAT_MRT3847_94039C.1
gaattcggcacgagattgccctagcacaggtggggacagcaatttggcccctcttgacaccacaagcccaaacacctttgacaatgcttacttcaagaacttgcagagcaaaaagggtctcttgcactcagatcaagagctcttcaatggaggatccacggactctcaagtaaattcctacagcagtaatcctgcaagtttccaaactgactttgccaatgcaatgattaaaatggggaaccttagtcctctcactgggtctagtggccagattaggaccaattgtaggaagaccaactaagatttttggccttcttgtactaagtatgaaacaaaatcaaggttatgggatattttagatactcaatgttgtatcagtcgcagttaattaggagcaaagtaaatgcttccttaattgtagtaataatataatataagaatatcaatgtcaaaatgtttggactttggcc

SEQ ID NO: 136247 - DNA, 664 bp, Glycine max
  Clone ID: PAT_MRT3847_9403C.1
actcggattctcctcgactcgagccgctcgagccggaagccatcaacacatgaccaaagccacaacctaatcctaccctttcttctactactactagtccccaaccttcaaacaccaaccacacctctcaaagctcaaattgattttcacggttcctgttaattagttgaggtggctgccccatatatacgctggtatgatcgttttctctcatgtagggttcatgcatcatgcatatggtatatatcacttgatcatgatttggtggtaaaggatcacaaagctttacttaaaactttttctccatttcaaccttctatctgctgcttctgaaacagtgaaacccttttgtttaaaaagactatgatagggaaaacacagatcacagagcaggggtacaaagagaacattcagcagaggtgcagaatatggaaaagcccaaaaggagagtaatgaggccagcttaccttcaagattatgcctaagggtagaaaagggattagtgggatagtgccgttagagcaggggacaagcttaacggaattgattctgtgatattcctcttgcaccaaaaagataagaattctgttagcagaggatagtataaataagtatgtaaataaaatcagaatcatgaatgagaatatattttccttgccttaaa

SEQ ID NO: 136248 - DNA, 1133 bp, Glycine max
  Clone ID: PAT_MRT3847_94040C.1
acatttatacctaatcataagcctctcaaccctatccttcttagttacatatttcaattttaaaattccaattacaatgattcttccaaacatcaaagttcgttttttcttactcttttgccttattgggatagtgtcagcacagttatcctctaccttttatggcaaaacgtgtcctaatgcactttcaaccattaaatcagaagtagtgtctgctgtgaacaacgagcgtcgtatgggagcctcgttgctccgtcttcatttccatgattgctttgttcaaggatgtgatgcatcagtactattggatgacacatcgagtttcaagggtgagaagacagcaggtcccaacgctggttcgattagaggttttaatgtaatagacaccataaagtctaaagtggagagcttatgccctggtgttgtttcttgtgctgatatccttgctgtagcagcaagagactcggttgtagctcttggtggacctacttggactgtgcaattgggtagaagagactcaaccactgcaagtttaagttctgctaactcagacttgcctgctcccacttcaagtttaagtgcccttatcagttctttctccaacaaaggtttttcatctaaagaactggttgctctttcaggatcgcacacaattgggcaagctcaatgttcaagtttcagaacaaggatttacaacgacaccaacatagattcctcttttgcaaaatcattgcaaggaaaattgccccttacacaggtggtggcagcacattggcccctcttgacaccaccagcccaaacaccttcgacaatgcttacttcaagaacttgcagagcaaaaagggtctcttgcactcagatcaagagctcttcaacggaggatccacagactctcaagtaaattcctacagcagtaatcctgcaagtttcaaaactgactttgccaatgcaatgattaaaatggggaaccttagtccactcactgggtctagtggccaaattaggaccaattgtaggaagaccaactaagattttgggccttcttgtactaattaagtatgaaacaaagtcaaggttatgggataatttagatatatgttgtatgcgttgcagtttaggagcaaagtaaatgc

SEQ ID NO: 136249 - DNA, 539 bp, Glycine max
  Clone ID: PAT_MRT3847_94041C.1
ccaaaaacttcaagttattcagtggaaaaatgaccttcttttcgaaataccatcttcaaatcaagtccaagacatggaataaagattcttatggcttatatgactatgagacaaggaatcatcatacacagaacttgataatcacgcgaccctcaaaaattattcgttcccagaatgaaatctctcattataacacccctatcgcaatggaagctgtggctcgaaaaaatacaggagttattctcgaattcgagtcgccaaagagcttggcttctatcacagatggtccaaatggaatccagataactccagaaatgaaagatgatggcataagcccagaaagcttttggcatgtgctggacagagatgatagtacaaatggatatgctctaaaagttaacgatgtgattaaattggggagagtcatgttcaaaattaaccaaataaaattatctcaagatagacaaatgcagagtccaaatccatatgaatcgtcacttgctgactcaatcagaaaccatatgcaaaaagctggacta

SEQ ID NO: 136250 - DNA, 458 bp, Glycine max
  Clone ID: PAT_MRT3847_94042C.1
tttgggctgatttatgtgcttgcatggtcgtgagaagatgatagaaggggactctacgctctacttttatatcagagagaatgcagaaattacaaattaccttatattcctataaatatataaatctaaagaaatatatatatacagagcgagatagagagagaggtacggggaactataggcccaagccactagacacgaccttaaacgtccggccccataagtcgagggatacgggcaaaggaagagacctaagaaagtaaaatataatatttctcaggaaaaagaagtaaatcctatttttcctaattatatacctactaacatgaaattaattttattaataaaataataataattttagaaaacttcatcaccctataagagattctaaaactctatttccaaaatattttaaaatcacccttttcttcagaaaactaattaattaagaattt

SEQ ID NO: 136251 - DNA, 246 bp, Glycine max
  Clone ID: PAT_MRT3847_94043C.1
gcaatattggtgctcatagaactaattctatggatgtatccactaatatgctctttagaagagcgagctctagtgaataataatcctgctacacctgtgaaggattatacactcggttcactgatgcattgcatgattaacacatcgttttgcattctttataaacatgaacgttcagatctgacagcgctgcatacggatgagatgtttttagctaatgctagatcctacgtgctgtgatagcat

SEQ ID NO: 136252 - DNA, 235 bp, Glycine max
  Clone ID: PAT_MRT3847_94044C.1
cttacttttggggcgatgacaggtggccgcaccttacaaccggtgacaaaagcaatcgatactagcttccaagaatctatcaatttctgcctacttagcggtggacgaatacttaagggaaagaaagtcactctttgtgctggtcacagacttcgtgaattatattctttaacactcttagtttatttgctgaacacgctgctatttgatatagagacttggagtcacatttaaa

SEQ ID NO: 136253 - DNA, 362 bp, Glycine max
  Clone ID: PAT_MRT3847_94045C.1
ggacaaaaaaacgtaagggcaataattttggtctgggaggtttaaaaattttaattgccccaataggtcccccaccacccctgataatgctttaattttaattttaaacgaaggggcctttttaacggtcaagagccttccccccccaaccaaccagggcttatttgaaagccttaattttcttcccaatattaaaaaattcccttttaaaagggatttttttaaagtaaagggtcccttccggtcatgttttcttaaaaggttggcaccaaatgttaaccccctttaccagtaccattccttttatttacccacaattcctggaccattgccttttttgggatttttccttggggaccatt

SEQ ID NO: 136254 - DNA, 295 bp, Glycine max
  unsure (1)..(295): unsure at all n locations
  Clone ID: PAT_MRT3847_94046C.1
ggcgagggtaactaaccaacgctangcagttgttgagttnggttggtagtanatggncgangtgttnacgattgcggacgncncggcgaagcttgcaagcagcagccaccggatccancccntacncgctcnccacnaatctccctctcntctccgctttcctctccttcgctctcgcacagttcctnaagatcttcacctcctggtataaggaaaagagatgggattctaaaaggctgcttgaattcgggnggaatgccttcgncacattctgcganagnctcgggctctggct

SEQ ID NO: 136255 - DNA, 520 bp, Glycine max
  Clone ID: PAT_MRT3847_94047C.1
atgaattcccgaggactaggattagttgcgtcggtcaaaaacaacaatggcactgctgacaccctaccacctgatcatgcacatacgccatatcaacgagcttgaccacatcacgatgagactgttcttgagctacataaagaaggcaaggcacatgagcatcatgcattatccagtgccactttactttgaatccagagctctctgcaatctatcttgaacgtctgctacaccaaattgacttgctaataccataaatcattactcaaaaagcgcatacgcgtgctactgacacagtaacgcgctcggcataatcactgatgccatccacctctaggactatggtcaaaaccaaggtgatgggattgctcgatctttgttactaaatttagaatgactgcatagagacctgcgcattctggtgtaatatgatttgaaagcttaaataacatacattggagacatgtctcaatctcattgcagtctaccgacaaaccgtatgtgagcataatgaacgttc

SEQ ID NO: 136256 - DNA, 901 bp, Glycine max
  unsure (1)..(901): unsure at all n locations
  Clone ID: PAT_MRT3847_94048C.1
atcagccatgtgctgcagatagtggtccctagnagtttgaggtagtgctgtgctaaatccaacccaggataaagactcccacccataagggtaggatctttntacagcgtccgtctaaatgggcagcctcctcctctacatctccacaaaatgggcactgtacctcatttatcataacctgccgccttctaagattcatcctatttggaagtctgtccctaattagcctccaagcaaaaaccagtgatttacttggtatttagagcttccaaatgtccacaaagtccaaattctgattagctcccatctgtgcttcccatatcaagtcatatccgctttttgttgagtagtatccactttgatcatgcttccagctccacctatcctccctatttggctgaatctgctgctgtgatagttctccaaggaaatcatctgccatttgaatttcactgtcaaaaagagccttcctccaagatagcttccactcccatccgctgttggtgttattccccatattcataatgatttgtttctgttgatcagaaattcggtacagccttggatatttgtccattaatggtataacattatgtgtccaagggtcctcccaaaatctgaacttctccccacctcccaccttccagtttctctcccttttgactacctggttctgctgttgctgctgacttgatagcaggtccctccaccaaatagaatcttggcttcctctaatgccctcctccaatgccctccagcctccatactttgatatgagtatttttgcccaaggttcctcttgcttgtgaaataagtcccagcaccatttggccagcaaagctgagttaaaggtcttaaggtctttaatactngagacccctttatcttttggttggcatac

SEQ ID NO: 136257 - DNA, 225 bp, Glycine max
  Clone ID: PAT_MRT3847_94049C.1
ctttcattcgttactcttctgtccaaccaaataaatcctgaagtgtttttcttaaccattaaggaactttatatccccagcattatattacgcgagctagtgaaaaagaaaaaacgactcaacgagaaggatttcatccactctgttatttcttggtgggatcattagcttaactgttatgtgaagtacgttaaccactttttcagatactatgagatatctaac

SEQ ID NO: 136258 - DNA, 364 bp, Glycine max
  Clone ID: PAT_MRT3847_9404C.1
cagattggagcaaccgaagggcgtgataggggcatagacgccgggtgttctcacaccgtcgatgggtgatagagagactctccagactacttgtgaggatgttgtggctagaggaaaaccggaggaatattcgatggaagcatgagactttctgggtaccctaagaagcaagaaacatttgatcgaatatctggctactgtgagcaaaatgatatgcactcacctcatgatacagactacgaatgcttgctctactctgcatggctacgttacgttcaagcgttgagaacaaaaccagaaaggtgttcattgaatatttatgaaactgctggggctgggcccattaaggaactcactggttgga

SEQ ID NO: 136259 - DNA, 225 bp, Glycine max
  unsure (1)..(225): unsure at all n locations
  Clone ID: PAT_MRT3847_94050C.1
aaacccccaacttctttctctgctcatcatctaccactctcgaggtggtttcaaaactatnctgtgcctattcatatttacacacttgcttaaagaacttccaccatattcacgtatccgtccacctcttataactcacatttccgtaaaatcaactctccacctatatatacttaaacttcatctaccacaatcattcaccattcacttccctaatctcaaata

SEQ ID NO: 136260 - DNA, 290 bp, Glycine max
  Clone ID: PAT_MRT3847_94051C.1
cctgtttctggctctgtgtttgcagctgacgattccgaacgagcgaccttcttcgttcctcgcatagcctaagtcatcatgggtaaggaaaagactcacatcaacattgtcgggattgtacaagacaactctgggatggcacctaccactggtcattagatactacatgcttgtaggcattgacaagcgcgtgactgagaggttccagaaggaggctgctgctatgcacaccaggtcattcaagaatgccatgctgcttgacaagctcacggctgagcgcgcaagaggga

SEQ ID NO: 136261 - DNA, 564 bp, Glycine max
  Clone ID: PAT_MRT3847_94052C.1
atcgcaaattatcactctcaaccctcccagaaaagggtcgttctctcttggccactggggtgctctgtcctcggctcagtcgcagattctctccctcttccccccctggcccgcgccgttctcgcttgcccgcttgggttggcgttccaggggaagtgattataagccaagagccttacgtttgtgttccaaacaactcctcggtctccccccagaaaaggtgcgatggatgtttcactacaattaataacaacgtccttagcaggtgctcgcgttgccaacttgcattctattgtggaaccgcatgtcagaggtcagagtggaagctgcatcgtcttgagtgtgaggtcctctccagcctccacaaatacaagagaaaatctctcacaccatccatacgcctgatgctcagactttatcttcggaggaagttgcaaaatgataagatcatcccaagcactgcaatggacaactacaacttggtggaggcattagtggctcacatgtctgacatcacagaggagcagctggtgctttatgcacagatggctaatcttgtaaact

SEQ ID NO: 136262 - DNA, 179 bp, Glycine max
  Clone ID: PAT_MRT3847_94053C.1
ggttacagcgtatgtcggacaacgtgggcaggcagcgtgggcagactcgtgggttattggtctatagaaacctacgtgacaacaaccgaatccttttttttttttgttttggtaaacaaaacataaaaaaaaaaagttgtgaattttccagttgcgtttctggtctattgcatgtgcat

SEQ ID NO: 136263 - DNA, 534 bp, Glycine max
  Clone ID: PAT_MRT3847_94054C.1
gaaagcacaaccatggtgtttttcgtgatatagcttaagccatcatcttctatacaagaaacctcaataatggacaattatttacctatgacagtcatgccaaatgacaaattagatactatgaacatagacctttgtctatgcaatcgagctcaaacagatataagacgttgtgatgatattaaagaatagaacgaccgtggcagcaacagcaaaattgaagaatatgcaagttctccagtcaaagatcctgacttcatcatgccattagctgaagcagttgtccactccctcaatagccagagttataagcaagtgggtcttaacctgagtttgggtcttccagaaccccaccactagtgaatgcacctcaacaaaagcatgtgtttaaaggaatcaaagtactaaagcaaatagagtctggctaaatgcatatgaatatagctagaggtttcaatcttgtgagaaagaattaagaattaagtaaatactactagtaaaaaaacatgtttatcctcgagagtccgtcatagt

SEQ ID NO: 136264 - DNA, 558 bp, Glycine max
  Clone ID: PAT_MRT3847_94055C.1
gcacgagggttggtggttgtatactcaggtaccattgatcaattcaaggcacgtttggtggcaaaaagttacactcaggtgtatggacaggactacacaggtactttctctccagtagccaaaatggcttatgttcatcttctttggtctatggctgtcgtctgccattggcctctcttctagcttgacgcaaagaatgctttcctgcatggctatcttgaggaagaggtttatatggagcaaccattaggttttgttgctcagggcgaatcatcgaacatggtgtgtcagctttgcaggtccttttacggacttaaacagtcccctcgagcctggccgtttttgtactgtggtgcagcaatttggtatgattcacatgaagccgaccactctgttttctactgccactcacctcagggatgcatctacctcattgtctatgtagatgacattggaataacaggtagtgatcaacatggcattacataattgaagtagtacctttgttgtcaattccaaactaaagaccttggtaagcttcggtattttcttggtatc

SEQ ID NO: 136265 - DNA, 288 bp, Glycine max
  Clone ID: PAT_MRT3847_94056C.1
ctaccaattggttttttttttttttttttttctttttgggaaaaaaaaggggtgttaatccttttgcaccaaaccggcccaaccaagctttgtcccaaaaatggccttaaaacctaaaacacttataagccgtgcctaaaaaacacggggcacccaaaaagttcaaaatacccggggccttacccccgggaattcaaccaaactggggcataacacaccgacttaaaaccccccccaaaggggggggacaaaaagcaggggggagtccctcggaaatttggaaacccc

SEQ ID NO: 136266 - DNA, 346 bp, Glycine max
  Clone ID: PAT_MRT3847_94057C.1
aattgggcttgttgctgaccatggagttcgtgaatccttgataaggagattctctgataatggattgaactagtatttggtctattagaatactgttgagtctatgacgtggattatatctaaaaccaggtcaacttatggattgcttagaggttgcaatgatttatatcagtatgagaaaaaggaatctgagaaggcttatagtgcatgttattatgcatgcatagaaattgtgtatgagtgctatgaggatataaccagcagttgttatagatgaagtgttgtattgtttgggcgactatattatgagaaagatgggctacctgcttagcgaatgggaataata

SEQ ID NO: 136267 - DNA, 246 bp, Glycine max
  Clone ID: PAT_MRT3847_94058C.1
gttggggttgggggggaaaaaaaaaaacgggggggaaaaaagccaagaactttttttatttaaaaagggtcctttagaaggccccttaggggccaccccccgggggggggggccaatgggaggccccttaacatttaccgaccaaaattttttttccgtgggcaaaaccccaaaattaaagggggcgggcgggttttcaccccaccccttccttttgtagaacgggaaaacggggaaatttggggc

SEQ ID NO: 136268 - DNA, 281 bp, Glycine max
  Clone ID: PAT_MRT3847_94059C.1
gttttgacaaacatgctataatctttttatactgcacatttattgttagataaagccgagcttatccaatctctacgagtggattggtatctactgtgactgtgcgccggcacggcacacagctgaggcaaggcgccctggagaagacaacctcccatccgaggcaaggggacaacagcgtagagacagggcaagcaatttgggctcaagaggatcatgcactggatcagtggctgtcaagacctgaatagagatgcacagcagctagcgcgctcgggaac

SEQ ID NO: 136269 - DNA, 368 bp, Glycine max
  Clone ID: PAT_MRT3847_9405C.1
atgggatctctgggacctaatatgttttcaatatgtttcattttggctgatttgaaaaaaaaaaaaatctccttggttagaaaagctgggtttgtgtgactatgcatgtgtgtaggggagattctaaattcacacacacacattcatgcgtgtcttcaaaaattaaattattaaatggttttttattcaatataaattaaacccattttttaaaattgggttattttattattataaagttaaactattaagtgtaatacatgatttatttttaataaaagcattggactattattactttcatactagtttaatgggcaatgttttttaagctaaatattagtttaatttttttatgataataatta

SEQ ID NO: 136270 - DNA, 324 bp, Glycine max
  Clone ID: PAT_MRT3847_94060C.1
ctaccttgttttctttttctcaaccttcttcttacctatatctcattctaataataactatatattcatacacccactcacacacagatatgcattattttatataaaaaaattcaatcacctctcccccatacactaaaaaatacatcaatccattatattaccatactccatccttttttttttaacaaattagtttaataaactaaatctatttcctttttcatattatcctccacaacaacacatttaccccacatatcatattcatactactccatattttactctaaatattctcaataaacccttcaattatacttc

SEQ ID NO: 136271 - DNA, 750 bp, Glycine max
  Clone ID: PAT_MRT3847_94061C.1
ctcgagccgaatcggctcgagcggctcgaggttttttcatcttctcaaagcttctaaatcaatctttacatctactacatcctaaatatcaacaatggtgtttattgaatcaatgcttaaagaagtcccaccagtgactaagctcctttgtggaagctctattttaattcattttctatgttatatcgatgtgataaatcaatacgatgtctttttcaatcttggcttaattttctccaaggggcagttctggagactatacacaaatctcttccattttggagacgaaggaatgtttgttttcttccaactaatgatgctttatcgttgttctaagagacttgaagaacatacctttagaaacaagaccgccgactacatatatttccttttagtaggaatagtcttaatgacatgctatggtgctgttgcaggcttccctacacactccagatcattcttgaccatgctcttgtatatctggagcagatataaccaaaatgttgtccttcttgtttttggatttgtacctatgaaggctccttacatcacctggttctttgtcttatttgatatcttaattggtaaatccatcgcagctgacattcttggaattgtccttggtcacgctttctacttcttccatgatgtttttccccagttaccactcagcaagggcaagcagttattaaaaactcctgccttctttgagaagatggttaatatgatgaacattaagcccaaatgagc

SEQ ID NO: 136272 - DNA, 295 bp, Glycine max
  Clone ID: PAT_MRT3847_94062C.1
ggctcgagggcccttgatctcacaagttcaacactcgccgctatcgccttttcttctacctcctgtgttttcacgaggttggattctggccctctttggtgcctttggagcccactgctttaccgctgtgatgagagacttcaaaggtttcatggggttgaacgcagcgcactgctaacgtcggaaatttgctatgactgttatgagagaactttgccaactttagatcctaggacaggagaagcaattgctcatgttgctgagggtcactctgaggatgtgtgatcgattcagc

SEQ ID NO: 136273 - DNA, 511 bp, Glycine max
  Clone ID: PAT_MRT3847_94063C.1
ctcatgtgctaaaaagcaaattctcctttacttacccttcctttctgttcctttccaattctcaaatacattttggcttttagtttagttgtatcagcatagaattaacaagtaaagcaaatctcactttttctctctatctttcctcttctggtattccattctaaagaaatatatagactcgaatggaaaatgaagagttttggagctgattttgaagaatattggctatgatcttttccagcatatgaattgataaagatcagatttcaggaaacaagctcagataattttctgctgctgccatgaaggagtttccttcttgttttggagaaaatggtgttcgggttgtagattcctcctattcaagcaccacaaggggagcacaaaatgctgttacttgtgtctatcagtgtaagttaggaggtcgttcatgcttgatcactgtctcttggaccaaaaatttgatgggacaaggcttgagtgtgggaatagatgagttgggcaatca

SEQ ID NO: 136274 - DNA, 357 bp, Glycine max
  Clone ID: PAT_MRT3847_94064C.1
tggaaccctttcaaatataccggctttttttcaacgccacttaccaaatctgggggatatctaaatacagggcgggtggaataatttactcaaaaataaaattcgtaagccttctactctgacttcatcaataaccactacacaatagtgtttatccccacctccaattcaattttaattccaatcaactacatcactatggcaaccactaaaatgtaacaacaaatcctcccttgcaagaaaccttattatactcgtcgttccccctatttatgttagacactagttcattagatcatggcacaacaactgtatacaccaccaataatgtactagcagaacttttccaagattcat

SEQ ID NO: 136275 - DNA, 338 bp, Glycine max
  Clone ID: PAT_MRT3847_94065C.1
gaggaactgattcagatgtttagcttggaactatgtttgaaggtgaatttcaatttacacaactttatttttcccatttatatttgattcctaactttggtcttattggggaacttatttcaaatgggcagcgattacttgttcttgaatttatgtccattggttatgacacttcaacagtagaacagttgcattggtcaactcagctttatgatgaagaatttaaagatttgaaagactgcaatctgtactgtgaagagactcatggaccagttcccccaagattaagggatgggaaatctgaccttgatgctttaagatttgacaaccaacccaac

SEQ ID NO: 136276 - DNA, 239 bp, Glycine max
  Clone ID: PAT_MRT3847_94066C.1
cccactgcgtccgctgattacatttctaatctcattctctcttggttcaaacactctctctcatggcgtgagggaagattaacaggatcggcatccactgatttgagaagatagacctgcatcttctctaggagggtgtctcatgaactattgtcttgataaaacccagaaacgaaaccttcattgcgccttggtacatagcttgcgagagattattcgtgatggcatattctgagaac

SEQ ID NO: 136277 - DNA, 255 bp, Glycine max
  Clone ID: PAT_MRT3847_94067C.1
cggactagttgtggctgtggaagcagtgagtgatgcattggaaactctgaaggatggagcagtgagtggagcagaatattggtcatcgtggttgctttatggtgtgggagctgaagctgatgtgaagacaattggtgttgctgggtcaccgaggtttgaggtttatggtagtgactttggttggggaagaccaaagaaggtggagatggtgtctattgaaaaaactgcagtctttggtctttcagatagcagaaa

SEQ ID NO: 136278 - DNA, 340 bp, Glycine max
  Clone ID: PAT_MRT3847_94068C.1
gagactcgttcttattcgtcgctatcttcttcgttcgttgattgcgtgtacaggtgctctctcacctgaaaatgacaagctgcgaaggtaactgtacttgcggaagcacctgcaagtagcggaacgaaatagcagtggctgcacgatgtacccaaacttgagctacaccgagtcaaccaccaccaggaccttggccatacaagcggcaccaggatatgctcaattcgagagtgctgaaacgggtgttcccgctgagaacgatggctgcaaaagtggagctaactgcacctgcaaaccctgcacttgcaagtgaagtgttcgatagctaaaactacaagca

SEQ ID NO: 136279 - DNA, 186 bp, Glycine max
  Clone ID: PAT_MRT3847_94069C.1
ggggtccaatcaatggattaaagaaaatccttttaaaatttttcaaccttgagagtttaaatcaaatatcattggcctaaaggaacagctagcttgactgtccaaagcccccaaaaaccttcaaggccctgctgggtttggggggggccacctatttttatggccccagagccccacctttgccta

SEQ ID NO: 136280 - DNA, 449 bp, Glycine max
  Clone ID: PAT_MRT3847_9406C.1
aggccttttcgtgcacaaacctgttgattgagtcacacttatacaaaatgtctccaattagtaacttgttgagagttgctgcttggaagaaaggctgctaaatggttaagattgtgatgtctgggaatgcatcagacaaaaggagtgtttgggcctcattggtacaagtatttttaacaaacagcagcagtacagagcatcttgatgcatgtcagtgtacaaaatcggaaccacattcctgggaattgatctttccaatagaggtgtgtggtcccaataatggtttggaaacgtggagttctgagtgggcaaatcaaactccatggcatctgagtctccttattgaccatcccaaacagactacagttttggatattctcttgggactttctcaagaatgtgaaattgctggtaatactattatgccagctttctctgttccacaggct

SEQ ID NO: 136281 - DNA, 436 bp, Glycine max
  Clone ID: PAT_MRT3847_94070C.1
agtgatgctggtgaagaacatacaaccaacatcattatcattattatcaacaacgaagttattatctctgtgtggtgagacactgaaccctgtggtgacacagcagactctgtgcacgcgccacatggtgctctgcgtcgagcagtacactcacatcttcgtgtgtgtgttctgtgacagcgacagagtgggctctccgctctcacaagcgcagaagaacacacatcttgacaccgcacatctttacaactctttcgtctaatatcggagagtgtatccacagagtgagaatcatagagaatcccacgctgcaccacaggtgtcgtacagtggcacagccacaggagacattgctaaagtggacgcatattgggagatctttaagaatcccaaggggctatattgcgcgaaaacgcacgccgtgtgacaccctaaa

SEQ ID NO: 136282 - DNA, 210 bp, Glycine max
  Clone ID: PAT_MRT3847_94071C.1
aataacccaaagttgaaaataaagcattgctacttgactatacatcacccaataaattgtaaaactaagtgcttattttacataactaaagaatgtcactaattaaacactttatttttgctttataaacaatttatatataaattaatttcattaagtttttaaataatatagtggatagttcttaaaacataaaaatatatttagaaa

SEQ ID NO: 136283 - DNA, 424 bp, Glycine max
  Clone ID: PAT_MRT3847_94072C.1
ggcccttttttgcttggtgatggccggttgtgttctgtccactcttggtcccgcgagataaagccttgccatatacgaagatcttaggcgtgctgtttggccaaacgctcccattccaccctcattgcgagatcttccaaagcctgcccctgcaagtgttgaaatcgatgatctccctatgcagattgaagaaactcagtgcccgcaaaccttcttctattaagaaaaccttcgtccatgcaaaacaatgaaggtacaattcaccacgcctccctttctaccgccatggggtgcagtggcatggttcaaggaaattgaagacactgctcaggaacgatatagatttgaagagctgtgcgtcaagaaagatgccatagatggagaagagaggtctcgtgccgaatccttgggaacagtaattggt

SEQ ID NO: 136284 - DNA, 342 bp, Glycine max
  Clone ID: PAT_MRT3847_94073C.1
ataaaatctactgccagattaatacattagacgtattgaaaaagttgaacataaaaggctctaattaaggaaaagaaaaaaatactatatgccttacggcctaacagtagctttcctaatatataccaatcttatctcttcttttttggtggaaaactacaaaaattatatcccactaatttccattttcaacaggcattttgtttttccaggaccaacatgccttagtcaacaaccaccccccacagaatctgtcgcatggtgccaccagaatctttaacttccaccatcccccattgcacgacctatgacaattactaatcaaatttcctaattgcccat

SEQ ID NO: 136285 - DNA, 2297 bp, Glycine max
  Clone ID: PAT_MRT3847_94074C.1
cacattacataatacaaattaaagttaaaaataacaaacttattttttgtttttcattatattgagataagtgtaaaaacaataatacatatacacccgcctttctaaccaataacattaaaaaagagagagaaaaaaaagccacagatataaaatacaaacttgataaaatgaaagaattggacctgcccactgtctagtgtcttcattgctacaatatgcaaacattgcaagaggcaacagcaaaatctaaaaggagaaactaaaaaacactctccatgcatgcggcgtcacattcaaacttggacactaaccacagctacgcccattatataggccgaaagcaaaacgctatgataagaacccaaactatggtatatacccaataaaaccacactatctcaacagataagagcattttaaagataactgaggaaaggtatagcagctaaagaagcagacgtcactctttcatttcaagtttagaacaattcgtatttctttttcagcatgtcttgcttccatcttggcaacttgtaaaatgcttcttttgccattccaaatacagtgttgaactcatcctctgacagataggcctctctccgtttaagatcaattccaggcacattatgaccagatttagtctttaattgctcataactgaacatcctttgaccatcatttccttcctccacattttcttgttttggttccaaatccccattgctacctgtctcaggggggagttcctctgtttccttggcttctgcaacttcttcaacttcagaggagtcacttttagtttcagtagcgctaccttcagtgataggactcctgctagcaacaggagaaccatcaggtgattttttcttttcagccataagaacttgtgaaagagcagctactgctgcagctctttgtgatccttgacctcttccagatggcctaggagtaaaagtcttcgtcccagatgatgaattaaatgcagagtttaaagcggctaaagcttctgccctttgccttggtcccccttggcctaacccattcaatctatcttgtgccaaaccggatgctttctcagaagatgaaccaaatgcattagataaggcagccaaagcttctgctctttgtcttggtccccctggacttgacccattcgacttttcctccacagcatggccaaatccaaagagtagtgacacctttttctgaaatgagttccccataaccatagcttttgcatgatcccatgaaaagtatgttgtgaaaaagcaaggttcattcccttctgttactttatatagtggtacatgtggagatagcccctccagagatgcaaccaaatctatgtatttctggccaatttcaaaagcatttcgcttttctttgggttccacagaatgaccaatccaaataaacacttctgcatgtgtgtcaagtataaggatatcctccggcaacaggtcgtcctgagagaagttgtaaacctcctctacattgaactttcctttgttaaatgataaagtgaacaaatgtggatctctgacaacctcattaacaactttcttgctggtgtaactttgttttcctcctagtgcagaccagaaagctgagctttctgttccttctttagcatgctttaaagtagctcctggccgtaaaaaatcagcaacctttgctgctagctcttgcccctaaaaggtaggctgattaacctgcgagccggatgatgaaaagaaagcagagattaaggctgcaagggcaaaagcccatggtcttggtcctgctcgacttagcccattcgacttatccgcactggatgttgcctcaggagatgaattgaatgcattaattaaggcagccaaagcttctgctacttgtcttggtccccctccttgacttgacccattagacttttcctctacaggatggccaattccaaagagtaatgtcacctttttctggaatgagtttcctggaaccatagcttttgtatgatcccaagaaaagtatgttgtgaaaaagcaaggttcatacccttctgttactttgtatagtggtacatgagggcatagtccctcccgagatgcagccttatctatgtatttccgggcaaaaacaaacgcatctcggtttagtcttgggtccccacaccgaccagacaattcaaccatttcttcgtgtgtgacaaggttcaggatatccccttttaaccaatcgtcttgggaaaagtcgcatacctcctgcaccggtggcatttccttatattaagggggaattttcaagttggggtttcc

SEQ ID NO: 136286 - DNA, 413 bp, Glycine max
  unsure (1)..(413): unsure at all n locations
  Clone ID: PAT_MRT3847_94075C.1
tacagagaaatccataagttaaatccctttattcaattttaaaggactctgataaatcttttcaactgagactattgcgaaaaatcagtaaaagcatgcattcaatatcttgatctaaagcccaagctgtgagcctctccttccctatcagactctcaaaagcaattgcatgaatataacagtaggtatctgccaggttgaatgtaagatttaatatatcattcacaattaaaatataattttggccacttccagtggcgtgtccctgaatgaaattggttcgaaggctgtatccaacaagttacagcagttgattgggtagctaagacagagttaagggcaatatccttcagggtgcatattattttagcccagccccttaaatttatacaatgccccaaaaaaaanaaaaa

SEQ ID NO: 136287 - DNA, 359 bp, Glycine max
  Clone ID: PAT_MRT3847_94076C.1
gaccctccattaatgtcccctcctcgattttccaaaccctctctctctctctctaccctaatctccttctcgcccaccctctatataatactccatacaacatagcataacattcgtatatacacacagtaccaaccactcttttttacttatggcatctttcatcttcacacctgtactctttcttcttatcatctccgccgtccttctcttcctccaccgccgatcccgctgccggcgcttccgcctaccgcctggtacactcgggctccccttcgtccgcgaaaccttacaagtcaataccagcttacaagagtgacaacccggaacccttcatgggacagcgcgtgaaacggtac

SEQ ID NO: 136288 - DNA, 221 bp, Glycine max
  unsure (1)..(221): unsure at all n locations
  Clone ID: PAT_MRT3847_94077C.1
cgcnacngcgtacgtaagctcggaattcggctcgagttttgagtcaaaaaaaaaaaaaangggnggccgccgantantganctcgtcnnccngggaattntttccggncgggnacttgaaggcntncnnanttnccnanngtgagtngtnttanatnttggngnantncnggnnanngngtttcctgtgtaaattgttatccggtnaaanttccnnnnaac

SEQ ID NO: 136289 - DNA, 955 bp, Glycine max
  Clone ID: PAT_MRT3847_94078C.1
ggaattcttcacccttcggcaaaggacatggatcggataaaagggccatggagtcctgaagaggacgaagcgttacggaggttggttcagacttacggccctaggaactggtccgttataagcaaatccattccgggtcggtctgggaaatcgtgccgcttgcggtggtgcaaccagctgtctccggaggtggagcgccggcctttcacggcggaggaagacgaggcgatcctgaaggctcacgccaggttcgggaacaagtgggccaccatcgcgcgcttcctcaatggccgcaccgacaacgccatcaagaaccattggaattccaccctcaagaggaagtgctccgagcctctctccgagcctcggcctctgaagagatccgccaccgtttcgggtagtcaatccggatccgatttgagcgattcgggtttacccattattcttgcaagaagcgtgagcgtgacggtagctccctctaaccaccttgcggaaaccgcgtcttcttcagtaactgatcctgccacgttattgagtttgtctctaccgggattcgattcgtgcgatggggctaataatgggcctgggccgaatcaggggcccagttgcggcccgttccaggagataccgatgcttggttcccaaaagcagttgttcagccaagagtttatgaaggtgatgcaagagatgatacgagtggaagtgagaaattacatgtctgtactggaacgtaatggtgtgtgtatgcaaaccgatgccattaggaactcggtgttggagaggatgggaattggtagggttgaataatgaattcaagagcggaaaattatattcatattaggtcatggaaaaatgattaggtgaaatcgcagagaaatagtgattctatctttttattttttgtcaggttaattatcctttttttaaatgataattattttttatctgtgccgag

SEQ ID NO: 136290 - DNA, 416 bp, Glycine max
  Clone ID: PAT_MRT3847_94079C.1
gttgtttctggcactccaaatgatcaatctgatgatggaaagaatggggataatcaaaccattagcaagatgaagcttgctcacattgagaaaaggcctactagggtgcctagacctcctcctagaccatctggtggagctgctgttaccgcaactgcaaatccttccaacggagtaccatctgctccaccacctcctcctcctcctccaggcgctccaccaccaccaccaccgccaccaggtggaccacctcccccacctcctcccccaggaagcctatcaagaggtggaatggacggtgacaaagttcaccgagctccacagctagttgaattttatcaaacattgatgaaaagggaggcaaagaaggatccttcatcactattagttacttctgcaagtaatgcatttgatgc

SEQ ID NO: 136291 - DNA, 472 bp, Glycine max
  Clone ID: PAT_MRT3847_9407C.1
tcctctcgtccgggctaataagttggcaaaaattatgaaccttagacatagcgttgttggcgatcttaaacttcctactgacgggaagatgtatgagggtaagcatattcctgaatctaacattagggcaggggaaaatcatgtagttcaaatacccctaatggcacatgaggaaattctgtcttctagtgcaagtgatctcaaaactgcaatggtgagtaaaaatagcaagccttaagctactgcaatgcatgtgggagctatacaaattatcattgatagtttcgcaagtcccgactgcgacataaaaggagcaatgcttttggttgatacttatcataccaattcttaaaatgcagtttcgtagtatttttgttgcgcctctaagaggtgggaggtccattgaggtggcttcattttcaaatacctttgtgcagattgaaccacacgtgaactcaacgttttagctttt

SEQ ID NO: 136292 - DNA, 698 bp, Glycine max
  Clone ID: PAT_MRT3847_94080C.1
cccacgcgtccggtttcaccaacagactcagttttgacgacaacaaagaagatgcttgaacttcgtgcaagttcagctgttgtgacggttggtgacaaactttgtggtattcttacttcaaaggatatcttgatgcgggtaatagcacagagtcttcctccatcgtcaactcttgttgagaaggtcatgactccaaatccagaatgtggaacaattgatacaccaataatcgatgcacttcacactatgcatgacggaaattttttgcatcttcttgtggttaatagagatggcattgttgttgctacggttgatgcgattcatatcacgcatgctgctgtggcgacagctagtcaggtcggaaatactcccaattttaacagcgaagctgccaactccatgatacaaaaaatttgggattcggccatggccttagctccaaatgaggaggaagaggattcacaaagcgagacttccttgaaaatgatttctgagggaggagaaacaggaagatccatttcttatcttgcgtcaagcatgcagaacgcattttccttcaaattacaagacaggaagggcagattgcataggttcacatgcgatacttcgagcttggcagaggttataacgtccgtcattcagagagtcggtgatgatattgaccccatggacctgccccaaattttgtatgaagatga

SEQ ID NO: 136293 - DNA, 314 bp, Glycine max
  unsure (1)..(314): unsure at all n locations
  Clone ID: PAT_MRT3847_94081C.1
aaaacaacaacaaaaaaaaggggtgggggacgaaataacaaaacagttttttattaaaaaacgaagaaggtttggattcaagggaaggtaaaaaatattcctttttcaatttttttttggccaattggtttgaattnttggtggccaatttaaaaaggttattgcgtttccttttttgtggattatgaaagggggaaccaaatacctaatggataaggagggggttctcttcccttttctaaaaacctttggaaaatttcacaaggttggggggcgaaaaagtcattttgaccaaggtttattagaaaattttt

SEQ ID NO: 136294 - DNA, 815 bp, Glycine max
  Clone ID: PAT_MRT3847_94082C.1
cccgcgtccgaatttttatgtcaagctacagcggcttgatctcagccagaataacttttctggttcctttccagatgaggttggaacacttcagcacttggagattctcaagctctcagacaataagctgtctggatatattcctgcagcattaggcaatctgtctcatttgaactggttgttgatggatggcaattatttctttggtgaaatacctccccatttgggttctcttgcaactttgcaaattgcaatggatctcagttacaataacctttctggaagaataccggttcagcttggcaatctcaacatgcttgaatttctctatctcaataacaaccatttggatggtgaaattcccagcacatttgaagagctttctagcttattggggtgcaatttctcattcaacaacctctctggtcctattccttccactaaaattttccgaagtatggctgtaagcagctttattggtggtaacaatggcctctgtggtgcacctctcggcgactgcagtgatccagcttctcgctctgatactcgtgggaaaagttttgattctcctcatgctaaagtagtcatgatcattgcagcttctgttggaggtgtttcactcattttcattttagttattttacattttatgagacgtcctcgggagtcaattgattcctttgaaggcactgagcctccctccccagattcagatatctattttcctccaaaggaaggtttcgctttccatgatctagttgaagccacaaaaggatctcatgaaagctatgttattggtcagggagcatgtggaa

SEQ ID NO: 136295 - DNA, 451 bp, Glycine max
  Clone ID: PAT_MRT3847_94083C.1
tgattgaagagcatgtatttgctttggttgaccagaaggtggaagaatccttcttaccggtcatttacccttcttaccacccaatgagtctgtaggctacattacctcacactacatagcgccatttaaaatctttagcatgagcttttagatgaatgatccatactgggctgtcagaaaattcctgggtaggcggaaccttatcttgattctggatgatgagcagcatctctctttttgttcaatccttccaccttcttccaaccctaatgtactttccccctttatctgaatgtgcttataaagagagatggtgcagtcgatgctccatatagggttaggcttgcaaatgaacaatactacgtgattgctgctctgctacaacatatactacaggatgatcaatatatgccactaggatcaaaagattatatgtagttcttttcttttt

SEQ ID NO: 136296 - DNA, 359 bp, Glycine max
  Clone ID: PAT_MRT3847_94084C.1
ttttttttttttctgcacttatataatttcatttttgttttccttttttggggtgggggaaaaaaaaaacagaccaattttttttcaacttttggaccactgtatattttaatagtaatatatgccagatggctgcgtattaatccaggcatttaaaaaaaaaaacttttgcttcaaaaagttccaacaaacccaccctcggaggtttttttcgacttttttaaacctgttatttcccccctatttttggcccccggaatttcaatagtcgccttaaatttccacatggttttttaaaatcctatttctgctgaaattctttcttcttaccaaattccttttattttttctggcggttt

SEQ ID NO: 136297 - DNA, 285 bp, Glycine max
  unsure (1)..(285): unsure at all n locations
  Clone ID: PAT_MRT3847_94085C.1
gggggancnntgaaatcanaataccttgtggnntaagatttaggggcttgatnggtgaatcctgatgaacagaatgtnggttaanttatacaanttntncaagatggtggaatagctgattcattataaannccgcganaagaagcatgcatgagtgattgccctctgattctttgtgaagtcaataaagtccctataattacnaactgagattcagaagctccggtangggtatagctagagcttatgcctgttancacatgtaantatttggcggattagaga

SEQ ID NO: 136298 - DNA, 245 bp, Glycine max
  Clone ID: PAT_MRT3847_94086C.1
ctcgagccggttacatatttaactcgatgaccaaaatgctttacggtatctagtatgagagaatacaatgctagtttatgataactgttgtgtcaagtgtattcttttatgcttgaataacttttctctgcataaaattgtgtttcctgtagcctttatcatacatcggattgacattgttacatggcacaaattgagacgtgtcatattgaacatatacatgactattcggcatgtaacgcaga

SEQ ID NO: 136299 - DNA, 241 bp, Glycine max
  Clone ID: PAT_MRT3847_94087C.1
gaaaaagctagatgggagatattatcaggtgagattgattatttgtaatgttgtaacaagagtttatgcattataggttttttatatgctgttttataatgcctgatttgagcctagaagtcacttcaagatgcaaccgatccttcattgacttctactttcagattaatgaattcatttgccaatagtatagttatttttttcttgtaagattaattctgacctgttatttatttattta

SEQ ID NO: 136300 - DNA, 605 bp, Glycine max
  Clone ID: PAT_MRT3847_94088C.1
agcaaaaaaaagttattttcataagatatcatatttcaggaggcaacaaatactagatgaaccaggaaaaataataaaaatacaagcacaaacacgtaaacaggggaatctgacagccccaacatactcatgaagtaagaaaagaacactatcgaacctattaaatctcaatatgcagcattagatgccttcaagcctggctcttcatttcttccttgatccattttgatgatttgtctgtagcagttcactatcttcttatctaattcatagtagtcttccactttacttaagcgctttaaatcaaggtcgataaaatacaccttataatcaaaggattgctccggtgagtccagatatacattatcgggcacggatccagaatcctcctcattccttggtctaaaacacaacatcaaactgcagtcttttgcagttgttgctatcaggtagtcctttacaattctcaaactttcatccagtgaagctgaatgcaaaggggtatatatttttgcctgttcttcactcaattccttacacaccatgcactgttgagaagtaatgttataatatgcatggatgaccccttctatgtcaatattatc

SEQ ID NO: 136301 - DNA, 196 bp, Glycine max
  Clone ID: PAT_MRT3847_94089C.1
gggtgggtgggggggaaaaaagtttgattaaaaattcagggttttttaacccacaacaattatccactcttgggggggccccttattaaacaaccgcgcttttttaggttaggttaatggttttttgaccattaaaaaggcccaatagttgggttttttaaaattaaaagttgattctttattcgaacaaaccaaa

SEQ ID NO: 136302 - DNA, 525 bp, Glycine max
  Clone ID: PAT_MRT3847_9408C.1
cggacgcgtgtgctgcaatgcatgtgggagctattgaaattatcattgatagtttcgcaagtcccgactgcaacatagttggtgcaatgcttttggttgatacttatcataccaatcctgaaaatgcaatttcgtagatattttgttgcccctttcaaaggtggaaggcccattcgggtggttacattttcgaataccattgtgcagattgaaccagacatgaattcaaggtttcagtttttgagtaccactaccaatggtgattttgttcaaggaaaagatctcgcaatggttaaagtttaatgtatcatgtgctgcttgtggcttgacatcaattacactccaactccattgttggaatctggtttgcataaagacagatggttaatttgtggagttcttttgaaggaagtcttaagtttgttcataacgttaattagcccctaaagaaaaaattcgttggacggaaatattttcctttgacattaaacccccctctataatgggaaaaagttttctttccaa

SEQ ID NO: 136303 - DNA, 1740 bp, Glycine max
  Clone ID: PAT_MRT3847_94090C.1
ctcgcgctgttcgagcctctcggctatgtgaaaacggctgcttgaagatgacagaaggggactttcacaccaccttcttcttcttcttaagggttcccattcaatttatatttctttcacttcatggaaacgtaaaactcttctctctcttcatctttctctgttcctcacaattcactaccccctacaaatatattcaaggtcccatttttctcatctgggtcatcaacttaatcatctctctcttgttctctatccaattaattgcttttccctctgagtttctctccaccttgttgttgttgcaactaattgattttcatggttacaagatgaagtgtttcttcttcaaggagaagtgcaaatccgccccggaactgcacaagaagaaaacccccgccgtgaaccgcgccgcaaactccaccggctccgtgtcttcgcccaagagcgtgaaggacttgtacagagagaaagagcacagctttagagtcttcactttgcaggaactgagagatgccaccaacggcttcaataggatgctcaagcttggagaagggggtttcgggagtgtctataaaggatccattacgcaacctgatggacaaggtggtgatccaattccagttgcaatcaaaaggctcaacactcgtggcttccagggtcataaagaatggcttgctgaagttcaatttctcggcattgttaatcacccaaatttggttaaacttttgggatactgctccgtggatgcagaaagaggaatccaacggttgttagtgtacgagttcatgcccaacaggagcttggaggatcaccttttcaacaaaaacttaccaaccctgccttggaaaacaagattggagatcatgcttggtgctgctcaaggactagcttatctacatgagggactggaaattcaggtgatctaccgagatttcaaatcttcaaacgttctattagatgcggatttccacccaaagctctcagatttcggtctagctagagaaggacctcagggtgatcagactcatgtatctactgcggtagttggaacacagggttatgctgcaccagagtacattgaaacgggccacctgaaagttcagagtgacatgtggagttttggtgtagtactatatgagatcctcacaggaagaaggtcattggaaagaaaccgtcccacagcagaacaaaagcttctagattgggtcaaacaataccctgccgacaccagcagattcgtcatcataatggacgctcgtctcagaaaccagtattctcttcctgcagctcgcaaaatagctaagttggctgatagctgcttgaagaagaatccagaagatagaccctccatgagtcagatagtggaaagcttgaagcaagcattgcaatattcagacactacttctcaggacattgctgaatcctcctcctcatctcgttctaaattggtccgaaaaaagtaaatatggagcttttttttttttgaaggacttgtgggaaatttagcattttaaggtaagttgattagatcatctatgtagtaagtatttaccaccattgaggtagttttctggtcaatcttggaagtcagttttgaggatttttcttacttgtctgtttggcctagttcaaacaaaaccaagtccttctttactttgtcagctgttggcttttaatacagtttagatgtcattgtagaaaaaaaaaaaaaaaaaaaaaaaaaaattctttacttct

SEQ ID NO: 136304 - DNA, 374 bp, Glycine max
  unsure (1)..(374): unsure at all n locations
  Clone ID: PAT_MRT3847_94091C.1
caccagtttacaaatacaagtcaccacccccaccctacaagtacccttctcctccaccacctcctaagaaaccctacaaatacccatctcctccacccccagtatacaagtacaagtgccctcctcctccatacaattactcttctcctccacctccaccatacaagtacccttctccaccacccccagctcactactacaagtcacctccaccaccacctaagaaaccatacaagnatccatctccacctcctccacactatgtctatgcatcaccacctcccccataccactactanatagngattttagtataacgccccatggatctgaagaacttgtgcctataaaggaaagggaagaagcaccatgca

SEQ ID NO: 136305 - DNA, 2396 bp, Glycine max
  Clone ID: PAT_MRT3847_94092C.1
ggctcgagaaaagattctctggagagtcaaaattttactgatgtgaggagaagctctaatggttcaggtactggtggacgggagaaagctattgtgtcttctcagtggacgaggatgctagatttgcttgaagcgtgtctcaggaattcttcgattaactatagagggcttgatggaacaatggcagttgttgcaagagataagagctgttaaagattttaacacttgtcccgaggaaaccgtgattactatgtctttgaaggccgccagacttggtctcaatttggtggtagcttgccatgttcttatgctagatttatgggggaaccctacatctgaagaccaagctttagatacagcacatcggatggcgcacactcgtgctgtgactggctcgaggctaagcgaagatggtgtttgtcagggactcctatccagaatgcaattgatgatctctacagttacttcagatttctaagatatgacccttattctgaccatgcatcattttgtactagaattaagaacccaattagcagaaatccagcaaacgggtatagaaagttgcaagctgtcttgaagacaataatgttacgccggaccaaaggtacacttcttgacggggaacctattatttccttgccgcctaagtatatagagctgaaaaaagttgatttttcaatggaggaacgtgatttctattccaaactagaggctgattcacgtgcacagtttcaggaatatgctgatgctggaactgtcaagcaaaattatgtcaacattttgctgatgcttctgcgccttagacaagcttgtgatcaccctctgcttgtcaagcgatacaattcaaactctctatggagatcttcggttgagatggcaaagaagcttcctcaggaaaaacaaatctctcttctgaaatgtttagaggtttccttggccctctgtagcatttgtaatgatcctcctgaagatgcagttgtctcagtttgtggccatgttttctgtaaccaatgcatctgtgaacatctttctggtgatgacaatcagtgccctgctgcaaattgcaaaagtcaactgagcacatcaatggtattttcaaaagccacactgaacacttgtctttctgaccatggttgttatatttcacccatttatggtggtactgtagcagaagaaactgagccttggtcagaaagtaagccatatgattctctaaaaatgaaggcggcacttgaggtattgagagcaatatagaagaagatcgtgtactaatcctgcagtaatagaaaagatagaagtttgcgtctgcatttggagaggatggaactggcgatcgtcagactcgcctcactgtggatgatttaaaatatttgttcatgatgtgattagacgtacatatttacagatataatctacattttttggattggtgattttttgacctgggggcagatgtcatcttgagtttctttccggtgactgctgacgaaacagaaacagaacatttctagcaagggattggaagtggtaacaaggttgctagtaacttttgacattaagattatatgaagaaatgtttatatgtttagaatgagatgttcattctttgacatggaaattttagtttaatctcacgtatagctagccttgagagtatggtagcttaaagtggaatcctcaaactgaagaccaagcaatagatagagcacatcgaataggccagactcgtcctgtgactgttttgcggttaactgtgagagatacagttgaagatcgtattctagctctgcagcaaaagaagagaatgatggttgcatctgcatttggggaggatggaactggtgatcgtcagactcgcctcactgtggatgatttaaaatatttgttcatgatgtgattagacgtacatatttacagatataatctacattttttggattggtgattttttgacctgggggcagatgtcatcttgagtttctttccggtgactgctgacgaaacagaaacagaacatttctagcaagggattggaagtggtaacaaggttgctattgacttttgacattaagattatatgaagaaatgtttatatgtttagaatgagatgttcattctttgacatggaaattttagtttaatctcacatctttgtaggatgtagagagcagtagcatatatagcaacacacagaagatttttatggattgttcttttcactgtaaataatagaaatttttgctttaccgttttgttcctttttatttctccatttcgtgttcagtttttaagtgcaatgtcaccgcaggtgaaaatcgatatccatgtataccttgagattatctcgaactgaacaattgtgaatgtttttgtaaagctgcattttgtcgaat

SEQ ID NO: 136306 - DNA, 886 bp, Glycine max
  Clone ID: PAT_MRT3847_94093C.1
ctcagtatagccctcctcaactacatttgcaatctcataatgaaccccaaccactacagtatcagcctcagcctcatccacacttactgtctcagcccccacccccaccacacttgcatcctcagccccaaccccagccacaatatcagccccaacccgggcccattcagcaacctcaaccgcagtcacaatttcagaatcaacattttgaataccctgcaagatatcctcccccaccatgggccgctacacctggatatgccaactatcaaaacaactcacctgctacaaatatgattcctcaagccaacactgcggcagctacaatttcagaatcaacattttcgcccgcctgcaagatatcctccccccccatgggacgctacacctggatatgccaactatcaaaaccactcacctgctacaaacatgatctcagctcctccagccaacactgcgacatcttattcatctgcacccggggttaggcccgtgcaacacaataactcattccattccagaggtactggtggaactgcctgcaagtgcaactggacaaaagccttttgttccgtcgtacaggttatttgaagatttgaacgtttttggaaacacggctggatgggtaaagatgaccagtagtggctcgtcatccagcttgtcagggtcaatgggacctggtatggttggggggcgtaagtgaagggcttttattcatgtgtaaaaagatgtgttgatatactgtacataaaaatgggaccagtcagtattgttaacttctcatttgcaggttatgtaagttctttagatttgatacaagtgactcctccctattttatgagtagatcataaagtcatttcttattaaaaaaaaaaaaaaaaaaaa

SEQ ID NO: 136307 - DNA, 597 bp, Glycine max
  Clone ID: PAT_MRT3847_94094C.1
ggctcgagaaaagattctctggagagtcaaaatttgtctgatgagagtagaagctctaatggttcagttactgttgtaggggagaaagctattgtgttttctcagtggacgaggatgctagatttgcttgaagcgtgtctcaagaattcttcgattaactatagaaggcttgatggaacaatgtcagttgttgcaagagataaagctgttaaagattttaacacttgtcccgaggtaaccgtgataattatgtctttgaaggccgccagtcttggtctcaatttggtggtagcttgccatgttcttatgctagatttatggtggaatcctacaactgaagaccaagcaatagatagagcacatcgaattgggcagactcgtcctgtgactgttttacggttaaccgtgagagatacagttgaagatcgtatcctagatctgcagcaaaagaagagaacgatggttgcatctgcatttggggaggatggaactggtgatcgtcagactcggcttactgtggatgatttaaaatattcgttcatgatgtgattagacatacatatctacagatataatacattttttgattggtgattt

SEQ ID NO: 136308 - DNA, 289 bp, Glycine max
  Clone ID: PAT_MRT3847_94095C.1
gatctagaactatgttttttcgcttgtgttcgttttgggttttccggtccgtgtcgtggtggcgtttttttttttttttttgtgtgtcttattatagcttggggtatttttggttatagctgtttgctgggtgaaattgtgatcaactttcttttgggggggggggcgatccggggcataatatgtgtcgtctgggttgcctattgagtgagcgaacttaaattaatttggttgaactccctgcccgctgtctcgtcggtaaacctgtcgggcccgttggtttaatgaa

SEQ ID NO: 136309 - DNA, 353 bp, Glycine max
  Clone ID: PAT_MRT3847_94096C.1
caggcatacaaaagctggaatgatcacgggataattttcagtcgtaaaagcaagaggaccgacacaagcctcggttcatttgaaatatagcaaaggagatttaacggcaaccccgtcacgtgaagatctaaaacaacactagaacagaatttgacgatgccaatgaaaactgcgtatactcctgggatggggttttcccaaatagccttctccaaaaatttcgaccaccggattctttggcgggtacaacggccatagaatcaacactggccctgctatcctggccgttaagtccaaccaaaaggaagaaattttccagtggctgtctgaaacctgcaatgcgggaggaactg

SEQ ID NO: 136310 - DNA, 466 bp, Glycine max
  Clone ID: PAT_MRT3847_94097C.1
accatcaggtcttaatctaatggtctgaaatacgaaccagtcgctattgatacgtacccatacctacagtgagttagtagagaaactggtgagcatggtgattcatgagggatcatgttgctagagtgatccagaagatggaggacagtagacagcctattgattccaactcggtacttgacatggtgaatgtgcatagctcggagggacctcacagaggatgatagcatgctgatgaacaactctcttgatcaattacattctctacccaactactatactctgtatagaccctcatgatcattgcctgtgatatcatgcatggaatagaagctttatgaactgagacgatattatcactgtttgtaaaaatgtctcaagatgagaggatcatctactattgatatgcagacaatgcctaacatgctcttttctgcctctactgtagtataggaaatgtgattag

SEQ ID NO: 136311 - DNA, 2497 bp, Glycine max
  unsure (1)..(2497): unsure at all n locations
  Clone ID: PAT_MRT3847_94098C.1
gttctaacgtataagttatgattattcatcccccgcgtccgctctttcactgttccaagtcacatcctctttcccaagatatcttaaagcacgtcacattctttaacccaaagcctctttcaattccattcctttactttgatttcatcctccacaattttccaattccatttctctttcccaaattctccctaaacaagtaacaccaataaacacaagcttctctctttcagctcttggagggtttcaattctccattgtgatccctcatctgggtacctttcaaatttgaggcaccttcgatcctgtggtccaagtttgcagctttgactttttttctcaacatgggtgggagcgagagctcgaagggtgtggttatgggtcgtttggttgagtgcatcaaggagatttctgggttgccagagtgtcagaacttgtgcaagagggtgtatgggaatttggttcgcagggtgaagcttttgagtcctctctttgaggaattgaaggatggtgatgagtccctcagcgatgaacagcttcaaagctttgagtctctctttgttgctttggattcagctaagacccttttgaaggatgtgaaccaagggagtaagctttatcaggctttgcggaggaatgatacagcagataagttccaaaaagtaactgaaaaaattgaagctgtgctcagtgaaattccttactgcaaacttgagatatcagaggaagttcgagaacagattgaactggtgcatgctcaattcaaaagagccaaagctcaaacagaatttgctgatatacaactagacctagatatggcagtggcgcaaaaagaaaaggaccctgatcctgctgtactgaagagactttctgagaagttgcatctaaggacaataaatgacctaaagaaagagtctagtgaattacctgaattgttgatcacaagtggtggagaactcggcgactcttttgaaatgatcacatcccttctcagcaaactgagcgaatgagtgctcacagaaaagtctgaagttgtcagacatgaatgtgaaaaagccacatgatcccagatgattttcgatgtcctatatctcttgaactaatgaaagatcctgtaattgtctccactggtcagacatatgaaagatcttgcattcaaaaatggcttgatgctggtcacaaaacctgccccaagacacagcagacacttgtgcatacagcccttacccctaactatgttttgaagagtttgattgctttgtggtgtgaaagcaacggtattgagctaccaaagaaacaagggaactgtagaacaaagaaatgtggtggcagcagtctttcagattgtgatcgaactgctattagtgctttattggataaactaatgagtaacgatatagaacagcaaagggcagctgctggtgagctcaggctgttggctaagaggaatgcagacaaccgagtatgcattgctgaggcaggagcaataccacctcttgtagatttgttgtcttcttcagaccctcgaactcaggagcacgctgttacagcacttctcaatctttccatcaacgagagtaacaaaggaactatagtaaatgctggagccataccggatattgtagatgtactgaaaaatggaagcatggaggctagagaaaatgcagctgcaactctcttcagtttatcggttctagacgagaataaggtgcaaataggtgcagctggagctatccctgctctaataaagttactttgtgaaggtactcccagaggtaagaaggatgctgctactgctatctttaacctatctatttatcagggaaataaagcaagagctgtaaaagctggtatagtagtcccactgatacagtttctgaaggatgctgggggtggaatggtagatgaagcactagctattatggcaatccttgcaagccaccatgaaggcagggtagcgatcggtcaggccgagccaattcatattcttgttgaggttatacgaaccggctctccacgcaatcgagagaatgctgctgctgtcttgtggtcactatgcaccggagatccactgcaattaaaactagcgaaagaacatggtgcagaagcagcactgcaggagttgtcagaaaatggaactgatagagctaagagaaaagctggaagcatattggaactcttgcagcgaatggaaggggttgataatctgcagagttcatagtctcagtgttgcttcgttatatagctcatagatggtctgaaaattatgtgttataaaccatgccattattgccacatcataatagtgtattcatcttttttgttttaaatcctgtgcaggaactttgcattatgtttggctgtcatttgtctgtataggaaattctgtgaattgtctattgaagatgttatgctaggattataaatggaataagtttctgccattgtctgtccaaaaaaaaaaaaaaaaaaccaaaangaagggcggccgccgact

SEQ ID NO: 136312 - DNA, 254 bp, Glycine max
  Clone ID: PAT_MRT3847_94099C.1
cccgtccacacatacggacactactaactctatgttagattaccattttaaagaaagagatgaggcgttaggagccgagacgctaacacttgagaatatcacaagacaacatgaagaaatatgtcgataccaatataacgcagattcattaccatattcgaaattttgtattattcaaaaatataccatacctacaagtgactatcaaaagaaaaataaatgaaaaactttcttctaaattctttgtaccctac

SEQ ID NO: 136313 - DNA, 503 bp, Glycine max
  unsure (1)..(503): unsure at all n locations
  Clone ID: PAT_MRT3847_9409C.1
aaaagcagnngnnactagatttcaagaatctctcaatttcttcctacttctttgtgtacgatttcttaagggaaagaaaatcactctctgtgctggtcacagacttcgtgaatcattttcttttccactcttagtttatctgctgaacactctcctatttgatataggatttcgagtcagatttaaactttttctggttctttttcagatctctggttaatttcaagttcaagctggtgaaatctcggattagcgctcccactctcctatcttggataggacttcgtgggtagactatactatttctcttttttccttcactctcttcttctcactgaaccgcattgccgttcaaagtggtcttatttgaaaaacacttgcgcgttggtgcacatgtttgcttccgctaattctctctggcgacaacaggctcactgtgaaaacaattttaatttgcagagattgggacatcttgttcgttattatacaaatgcaactaaatt

SEQ ID NO: 136314 - DNA, 294 bp, Glycine max
  Clone ID: PAT_MRT3847_940C.1
ggctcgaggctagttttggaggcaattgcttttggatcattcctatgggacaaagaaaactatgttgaatccaagtacccttttcttaatgagtagactagatgacagtacacagattctttcctttcactgcatggaacttggtaacttagtaatatgttaggcggcgtttgggtggtcttgctatatttactaggttgagattctgtatcatttacaaagtccacgcttgcatagattattatcatgtctacatgctaaatatggacattttcctacataactccacgcctc

SEQ ID NO: 136315 - DNA, 315 bp, Glycine max
  Clone ID: PAT_MRT3847_94100C.1
ctcatagatggtctgaaaattatgtgttataaaccatgcgattattgccacatcataatagtgtattcatcttttttgttttaaatcctgtgcaggaactttgcattatgtttggctgtcatttgtctgtataggaaattctgtgaattgtctattgaagatgttatgctaggattataaatggaataagtttctgccattgtctgtcaccgcaaagtttgtaattcttggaactttctgttgtggtaaaagccaacgtttaagtagaacaatttaaagactattttcttatgatcaataaacgtagaacaattt

SEQ ID NO: 136316 - DNA, 1041 bp, Glycine max
  Clone ID: PAT_MRT3847_94101C.1
tgctgggggtggactggtagatgaagcactagctattatggcaatccttgcaagccaccatgaaggccgggtagcgattggtcaggccgagccaattcctattcttgttgaggttatacgaaccggctctccacgcatccgagagaatgctgctgctgtcttgtggtcactatgcactggagatccgctgcaattaaaactagcaaaagaacatggtgcagaagccgcactgcaggagttgtcagaaaatggaactgatagagctaagagaaaagctggaagcatattggaactcttgcagcgaatggaaggggttgataatctgcagaattcatagtcccagtgttgcttcgctatatagctcatagatggtctgaaaattatgtattataacccatgccacgttaaaatagtgtattcatctttttttgttttaaatgctgtgatgtgttaaaccgtgcaggaactttgtattatgtttggttgtcatttgtctgtataggaaatgctgtaaattgcctattgaagatgctatgcaaggattataaatggaataagtttctgccattgtctgtccccgcaaagtttgtaattcttggaactttctgtcgtagtaaaagccaacatttaaggtagaacaatttaaagactattttcttatgatcaataaacgtagaacaatttaaattcctaagatatcattgttcttgagaaaaacactggtcaagagcatcttagattctagagaagccttaagcaaattaaaaacctgacaacctattaagaagggacaaaagacatgatctgttatcacctatacaattattgaaagtgtagaagagaatttctcacacataaatatctccttgcattaactcatgaagggtcaacataattttctttaacattatcatcattcatctcttcaccatgtctctggatgcaggaacatagccatctttactctcttcaccatttctgtaacaacaaggtttgtctggcggagtatccacgttactaaggatgatcctttaaatgaaa

SEQ ID NO: 136317 - DNA, 555 bp, Glycine max
  Clone ID: PAT_MRT3847_94102C.1
ggctcgaggtcttacctcttacctacgaacgaggcaaagaccttttcaaatggtcaaacgcaaaacctctccatgtcttaatcttaaataaacactctttcttcaattctttccaatttcaattccattcctttactttcatttcatcctccacaattttccaattccatttctctttcccaaattctccctaaacaagtaacaccaataaacacaagcttctctctttcagctcttggagggtttcaattctccattgtgatccctcatctgggtacctttcaaatttgaggcaccttcgatcctgtggtccaagtttgcagctttgactttttttctcaacatgggtgggagcgagagctcgaagggtgtggttatgggtcgtttggttgagtgcatcaaggagatttctgggttgccagagtgtcagaacttgtgcaagagggtgtatgggaatttggttcgcagggtgaagcttttgagtcctctctttgaggaattgaaggatggtgatgagtccctcagcgatgaacagcttcaaagctttgagtctct

SEQ ID NO: 136318 - DNA, 364 bp, Glycine max
  Clone ID: PAT_MRT3847_94103C.1
gctcaaacagaatttgctgatatacaactagacctagatatggcagtggcgcaaaaagaaaaggaccctgatcctgctgtactgaagagactttctgagaagttgcatctaaggacaataaatgacctaaggaaagagtctagtgaattacctgaattgttgatcacaagtggtggagaactaggcgactcttttgaaatgatcacatcccttctcagcaaactgagggaatgcgtgctcacagaaaatcctgaagttggcactggtgaatgtgaaaaattgtcagttaagcacaggtctcccgtgatcccagatgattttcgatgtcctatatctcttgaactaatgaaggatcctgtaatag

SEQ ID NO: 136319 - DNA, 760 bp, Glycine max
  Clone ID: PAT_MRT3847_94104C.1
aaaagttgtgcaatggagagacttctaatgagcaagatcttgacagtgttgcttgggaaggagatgtgtattctcaagtattgggatctgaaagaagtggctatattcgtgggttaggacttggtcctactccttctctgttatggggtgataaattttctttgggaaatatttctatgaataataataatatgtctaatgagatggtcccaaaattagagcaagagatgaaggagttaaaggagaggcatgaggaagaaatgaaccaaatgaaagagttgaatcaaaagcaagttgcagaattgaccatcatgagacaaaatcaagaaaaaatgatgttagaattatctttcatgagggaagttatgtgtagatttatgcatacggagttaccaacgcctaactttaatagaagctatggacaagtctctgattctaatggtggtcgtgaacgagcaccgcgagtaccacattagtcatgtcacttgcatagtatgggggaaatactacagattatcatggcactttgattttcagaaatccacttcactaggattataagccgaagtggaatattttgtttatagacactacttttgtatggtaaatgtgattagacttgttattggagaattggcactatatattagatttgtatggtattaatactgtgtcttttcaggttcattagcttgctataatggttgatgcttgtctttctttttgtgaatttaatgaaatatattgtgttttaggaatt

SEQ ID NO: 136320 - DNA, 353 bp, Glycine max
  Clone ID: PAT_MRT3847_94105C.1
cccacgcgtacggtagaagatgatgtcaaagtcgttgtgagccctactttcgcgtgccttcatttagtaaaaagtttgctgcgccctcatacacatgtctaggcccagaatagttgtgttcacaaacgtggtgcttatactggacaggtcagagctgaaatgctagttaattactgaatcactttggtcattattggtcactctgaactgagtcagcttatgaatgaatcatattagcttgttgaatataaagttgcctatgcacttcaacaaggtctgaacattatagcatgcattgaggaaactatggaacagcttgaacctgttacaacaactgatgttgatgctgagca

SEQ ID NO: 136321 - DNA, 411 bp, Glycine max
  Clone ID: PAT_MRT3847_94106C.1
tcgagcgacactgaacggtctaccactcccaaccttgccagccgggatctcaccgcctatgatgctcacatcattgctggcgtatctgtcggatgctcttgtggctcctgcttttcactctcatacacttcttccataactgcaatgctagcgctcctctcctcgaatatagcacctatttctcaatcagcgaaaagcggaagttcgcgtatcgagtggtagatacgcaactgagtcggcaccgaattcaatcgcttctgatcctgatcagttgaagagcgccacactagatatcatggtacttcttaactacaaattctgacatccaaaaatcattctttggatatgacatgatgctggtacttataacaagaatattgaggagtggccacatagaggtggagctaatgg

SEQ ID NO: 136322 - DNA, 581 bp, Glycine max
  unsure (1)..(581): unsure at all n locations
  Clone ID: PAT_MRT3847_94107C.1
ccacgcgtccnaatttaagtgaggagctanagagggtgatgaagtgtgctatgtgtgcagtggggggtgtagcacttcttcttctgggggggggggggcccatgggtgaggctgtgacatgcaccccaacagagtggagtccgtgtcttccagcaatcacttccggggctaaaccttccaatgcgtggggcgcgaanctnaancancaaaaaccatgcgtatgtgggtacctcaaaaacgctaggttgaagcagtatgtgaactctcctaatgcgcgaaaaaccggtgcttcttgtgggattccctttccaacttgtgaattaattaagccttcttataattaaagtgtggggtatatatatatatatagagaaacaggttaatttatacacactttgagcctacaaagcatcttgacacaagcattcaataggagttcaccactttatcgcgacattttaacatgaggcgggaataaagtaaattcttgtggaatatttngataacgaggttatatactcataggttgtgggggtaaattaaacttatatttattatttactctatatatggcactctac

SEQ ID NO: 136323 - DNA, 397 bp, Glycine max
  unsure (1)..(397): unsure at all n locations
  Clone ID: PAT_MRT3847_94108C.1
gagacggctctggcatggcttatgtggctacctcaaaaacgctagcttgaagcagtatgtggactctgctaatgcccgaaaaaccgttgcttcttgtgggattccctttccaacttgttaattaattaagccttcttataattaaagagtgggatatatatatatatatatatatatatatatatatataaacagnttaatttatacacactttgatcctacaaagcatcttgacacaagcattcaataggatttcaccactttatcgcaacattttaacatgatgcggtaataaagtaaattcttgttgaatatttggataacgatgttatatactcatagtttgtgtgtataaattaaaacttatatttattatttactctatatatgtcactct

SEQ ID NO: 136324 - DNA, 664 bp, Glycine max
  unsure (1)..(664): unsure at all n locations
  Clone ID: PAT_MRT3847_94109C.1
nncgtcgcatgcacgcgtacgtaagctcggaattcggctcgagcacgggtctagagctgcctgtggatgccgtggtcacattgtctcagcacccaaatatcattggcttgaaggacagtggtggagatgtgaccaggactgggctgattgttcacaagaccagcaagcaggatttccaggtgttggctgggtcagttggcttcctcctggccagctatgctgtgggagctgttgggggcatatgtggcctggccaatgtcttgggggcccaggtgtgccagctggagagactctgcctcacagggcagggggaagctgcccagagactgcagcaccgcctcatcgagcccaacactgcggtgacccggcgcttcggaataccagggctgaagaaaaccatggactggtttggctactatggaggtccctgccgtgcccccttgcaggagttgagcccctcagaggaagaggcgcttcgcttggatttcagcaacaatggctggctttaatgacaagcgggggacaccttggtctgagctgtctcagactctcgttcccacagtctgaggaggagcagggcattggaattagggcttatttttgtctgtgttctattgctgtgaagagacaccatgaccatgacataaaagagagtgtttaatgg

SEQ ID NO: 136325 - DNA, 474 bp, Glycine max
  Clone ID: PAT_MRT3847_9410C.1
tctccacgttttcattttttcgcccgcccacgcgtccgttgaaaaacatgttgctcacgaaagccttaaggatcaaattcctgctgttgtcacgatgcattctactaaggtttataacgtttgctaatattttgaaccttagacatagtgttgttggtgatcttaaacttcttactgatgggaagttgtatgagggaaagcattattcctgtatctaatattagtgcaggggagaatcatgtagcttaaatacccctaatggcacaggaggaaactctgccttctattgcaagtgattttagaactgcaatggtgagtcaaaatagcaagcctcaagcttctgctatgcatgtgggagctttagaaattatcattgatagtttcccatgtcctgactgctacatagttggcgcaatgcttttggttgatcactatcattaccaatcctgataatgccatttcttgcttttttgt

SEQ ID NO: 136326 - DNA, 329 bp, Glycine max
  Clone ID: PAT_MRT3847_94110C.1
acctagcgtgctcaatgacacgacaactgtgacatgcagagataagggcatagaggtggacaattaggcagtagattctacattaacaacttaattaccacattacattccgcggtacatgaggaggtagctgatctccatgctgacatacattctcactgctgtaatcactgatgagcggaattagcggcggattcagagttacggttaattttacgactgatgatacaacggctggtccaaacactggactaatcacgatatgactgttgatgagacggaggaagagatgatggatgggggcattactggtggtgttcctgctgagg

SEQ ID NO: 136327 - DNA, 752 bp, Glycine max
  Clone ID: PAT_MRT3847_94111C.1
gtatatggctccggaatacgtgatgcatggaaatctatcggtgaaggcagatgtatttagctatggagttttggtattggagttgatcaccggccaacgaaactcatcttttaatttggacgtggacgcgcagaatctgctagattgggtaagagtctttattattatttttttcacttccttagttgtttctttatcaccaaaatatttattgtattcttttagaaaataaatgcgtctcattgacatttccataagttttgaggactttttgtttgatcaattgattaattattagtagcaactggtcattggacattgattgatgatcttttcagtcttgacaaaaataactctaataacctcaacacccccaagctaacttcaccattacggcattacctcatggccacataatcaaactgcatctagaattgccattaagaactagaccaataatgataataccacggttactactagtgccacagggactagctcagctactgcagaaacagaccccaaagggaaacgtccaatgcgggaggcttagttagcttagtctaagtcaatgtaaatactcaattcttattctttaattattatgtaatctctcatcacatgctgctgctgtaatcagggaaaagggtgtacagtatacatatttttacggtttctttcaaatccttttctattttggatttgacccattttgctgtaaatccaagagctctcaaatcaattgtttcata

SEQ ID NO: 136328 - DNA, 497 bp, Glycine max
  Clone ID: PAT_MRT3847_94112C.1
gacctttttctttttttttcagggaattaggggggtcccaattcccgcaatacagctgtactaaaaactcaacaaaagtgttcgcataacaacattttatagtatggtatgattcaaactctgaatatgtttacttttacgtggcttacagctgacatataattccttataaaataataattcacgtaaatgcaatgccactttgggctccttcattaaggacatcaagttcatgggttcggtctcactatatttacccaattcaaaagcagagtagatagggggcgggctgctcccagtaaaataataagcacgccactgccgtttcgtccatgaaaaagtccaaaacccacaactcaatagttgttttgggcccttaaaactggacactagtagggaaagtctggccaaaagcccaatttgatggaacaacgtcttggaaaaacctagttacaccatcgggggttgtgaccctgaaagacaaagattgaccattc

SEQ ID NO: 136329 - DNA, 418 bp, Glycine max
  unsure (1)..(418): unsure at all n locations
  Clone ID: PAT_MRT3847_94113C.1
acggctgcnaaaagacgacagagaggggcaccttattttgccagcgtgtgcactctatcacatgtcgtaggtatagttgccatcgacagacactaacgctcatacggtaactaatgcaaggcctactttcgatgctaccacatcttatctgtactgtgttggaaactccactggaggctcatctgcgtacttcgccacattttacatacatggctgtcctaaacactctgactctgaccagaggtcacgaggataacgggcgtgacagcgactctacacttgaaagctatgttggcgatgatccgagtgagacaaaagcgagaccttgtgagcgtaaaccactgtcacgtaattcttgtggggaaggtttgccctatgcacctggaggggggcctaatcctagtgatggatggggctg

SEQ ID NO: 136330 - DNA, 431 bp, Glycine max
  unsure (1)..(431): unsure at all n locations
  Clone ID: PAT_MRT3847_94114C.1
ncatcacctaccactgataactccatcccttccttcctctttatcatcactgacatttgcccttcatgtccctctaactcgaccacctttgtgtgtcaactctcaagactttctgagaaatggggtctaatcttaatgctgaattatccaagaaaactcccatttttggtctaaaagtttgggaaatatttggaattgtagttggattgtctataatagtcattctttctgtggtctcactttgcctaacctcaaggaagaaatctagaaaagataaagacaagattccccttagtcaaataccaactgtctcaaaggaaatcaaggaagtgcgggttgaacaagtgccaactaatgtatttgctcctcgtgatggaatacttctcacgattcaggataagtccagtgacaaggaatcagacaaggtcatg

SEQ ID NO: 136331 - DNA, 291 bp, Glycine max
  Clone ID: PAT_MRT3847_94115C.1
atattgaaacacacttcatttgcccattagtatttgcggctttattaaacccgaataaattgtcacatatctaggcccccaaatgcgaaaaagaaaattattacccacttttttgaaactttttcaggtatccggggggcgccgtattttaaggttttatggcgttaaaaatcaaaatttcattcttaacgccgaagagaacaacccataaagtttcttgttaagggccaactttagtaccaaaaaaaattttgttaaattttccaaatgctgtgaaaaaacctttttttt

SEQ ID NO: 136332 - DNA, 609 bp, Glycine max
  unsure (1)..(609): unsure at all n locations
  Clone ID: PAT_MRT3847_94116C.1
ncnnnnnnaatttttcaaatgtgcacnggcaaccaagcagaaacccagggggcgccggagggggaaactcaagggaccgaaacacaaaaagaacaacccaagagagacacctnggccgggncgaaacagcgaaaaaggcaaaggggaccgaagcaaaagccccagctnncactagcagttaaccacgggcggcttatctagggaaaacaaaaaacactacgacggaaatataactatccggaagataactcccgcccacccttgacccgttgggcaaacctcctagagaccatcatgtacaccctctgcctgggggccgtctccagctgccgcctatgaagcagcatcggagccatggccagcttcatcagcacctccctcttccccaccagcatcagaggcaacggggacaaccgatgattcctcctctgcccccttcttctcagccgctacaaaggccgccttctcaacagccttgcgctggccccaggttacatcagccagcgggcgggcatatccaggaccaccagaaactaagacagcgccaaacaaagaaccagagttcacctgccacaagtcaaggcccacgtactccaagttggggaaaac

SEQ ID NO: 136333 - DNA, 515 bp, Glycine max
  Clone ID: PAT_MRT3847_94117C.1
gtccggattcccgggtcgacccacgcgtccggtgaaacttgcgggaagatttttcgtacactggctctggaaatgagattattggcactgtctaagtggatgtggtacgaatgctcgtacaaggagcacaagagttctgctatgtaagcaggaagtaaggtggtagactgagtttttgtggaagatgagagtaccctgcttatgcatgaaccacaatgggcaaggttaacatgctcatatatttgatagacaatgtactcacattgtgttagatgatacaagtggtacttctaatgaagacttgggaattaaaaagcaagattaatacatatataaaagtgcacttattatcaactgtgatgggactgaaatctgcataaatgaaactagatttctttgaatgcatttcctgatggacctacacatttgcttgaagagaggggtatttttgggagaactatatgtcagtttatagaaggtgcatcaatgagagacaatgatgagctttacgttta

SEQ ID NO: 136334 - DNA, 424 bp, Glycine max
  Clone ID: PAT_MRT3847_94118C.1
cttcctttttttttttttttttttttttttttttttttttttttttttacatgggtttgctggcttttgaatatacaaactgaagctgttaaccaattacaaaaagaacgcgtgcaaacgcacaacacaccgaaggcgccaagcgaaacaccaacgaacccatacaacaacagcaaaacacacattcatgaagagcacaaacactcctaggacacccccatagataagtacacaacgtctgatacccacgaaccagcaagccaaaggcgaggcgaacaccggagagcatgtactcaacggagcaacagcatgaactacagaccgaaggccctcccatacagctccataaaccagcccatgcccataaacagctgattggccctcaaaggcagaagcaaccacatcaatgctcacatgccgacca

SEQ ID NO: 136335 - DNA, 353 bp, Glycine max
  Clone ID: PAT_MRT3847_94119C.1
ggacgggctctcctcctatcccaaaaaactcccatttgcacaccctttccccaaaccccccctttcctcatctgcgaatcaaaccccaccaccatcctccctggtggctgcaagcccccggggcacggaggcggagaggccgcgcccccgcggagaagacgagtggctgcagaagctcggagaagtcgaagccgtctatccacagcctcctgcatgagcctggcccggagcctggtctgccagagcaaggaggacagagcccctgggcgtcacaacccgatggacgcgcagcctccctgagcaccgactcacataggactgaagagggaccggaacctgaaaaggaggggaga

SEQ ID NO: 136336 - DNA, 482 bp, Glycine max
  Clone ID: PAT_MRT3847_9411C.1
atccgggatcataggttgccgtaccttaaaaccggaaacaaaagcaatggttacttgattccaagaatctctcaatttcttcctacttttttgtggacgatttcttaagggaaagaaactcactctctgtgctggccacagacttagggaatcattttcttttccatgcttagttgattagctgaacactctcctatttgatataggacttcgtgtcagatttaaacttcttctggttctttgtcagttctctgtttaatttcaaggtcaagctggtgaaatcttggatgagggctcccactctactatctggtataggacttcgcgggtagacttttgtatatctctccttgctttcactctctccttctcactgagccgcattgccgctcaaagtggtcttatttgaaaaacacgtgggtcgtggtgcaaatgatggcttcgataattatctctggagacagcaggttcactgagacaac

SEQ ID NO: 136337 - DNA, 506 bp, Glycine max
  Clone ID: PAT_MRT3847_94120C.1
tttttatcaaaattacatgataaaattattattgtcttgaattatgtaaacgatgataacaaatccttttccagctacaaaagaaccagcataacaacaaagaattataaagttgcttaagtaatctctcccttcatctcaaaaagagctatatctagggggcctaggccacagcaacactttcacttaaagggtactttccatcctgcgacacacaagctcccaggatcaatctacttggccttgccgttctcgacagcagcagtcgaggggttcagctcatcccaggcctcgatccaggtgaccatggcatcggcaagcttgacgaagtaggggtcgatcttgccgagcttctccctgacctgctcggcgagggagaggtagcacttctggacggtgtcgcactccttggggatggtggcgttctggaagaaggggatgatgtcctcctgccagaagatgcccttgtattccttcttcaagttcacgaaggggttgctagcctt

SEQ ID NO: 136338 - DNA, 334 bp, Glycine max
  Clone ID: PAT_MRT3847_94121C.1
ccttggtgcaaacccttctgctgagggtggaggagaatatgagggaatgcttgatgcctctgtgaaggccgtggaccttgttcacaccttcacacttcatgagcgaccaactttcggtcgtaggcacttagtttccttcgtgaaaacgtatatcaaaagtttaactgccaagctccatgcagcgcaacctgagtggtgtaaaaaacacatgagccgagcccctaaatccctgctctttagatctaagatttccacttttgatgttcgatcacaccatagaaggataatgctttgcttgatctttgactcctacctggacggtgcttcttatcca

SEQ ID NO: 136339 - DNA, 905 bp, Glycine max
  Clone ID: PAT_MRT3847_94122C.1
aattcggctctacctctctctgacacaagaattaagttgtgagatggagagaagtagtgaagaggagatgttaataacgaaaggtccatggacagagcaagaggattctcttctcttcaattacatcactgtccacggcgaaggtcactggaactctgtcgctcgctacacaggtctaaaacgaacgggcaaaagctgcagattaagatggttgaactacttgcgtccaaatgttcgacgtgggaacataaccctccaagaacagctcttgattcttgacctccattcccgttggggcaacaggtggtcgaaaatagctgaacatttaccgggaagaacagacaacgagataaagaattattggagaacgagagtggtaaagcaggctaagcaactaaaatgtgatgtgaacagcaagcaattcagggacacgttgcgttttgtgtggatgccacgtatgctagagcggattcgggctcaggcctcatcatcggcccaagcccaccaaagcagcttaatctccaacagtaacactcaagcacacagtggattgttgtcatcagcgcttcatgcccacgcgccttctctctctgactcgagcgcgtcgtacaatcttatgggtgctgatgctggaagttgctcatctcatagctactactcagacatagcaggcaatggttttggtggtgcggacttgtggacggatcaaaacatttgctttctgcaacaccagcttgctcatcatgacttgttctgatcatgcatacttcaacatcttgctccaaaattcactctaaactgcaacatataaagcaattgtaacactagtcgtgaaacatgcatgtttctttttatgttaatttggtgtgaaatttaataatctatacttcaattaatttcaagag

SEQ ID NO: 136340 - DNA, 324 bp, Glycine max
  Clone ID: PAT_MRT3847_94123C.1
catgggactcacagactgaaaccagacactgacgggacaagcaaccgataccatatcatgggttcgtccagcagtcacacttcgaccttcattcaacatcagtcacctgtcatcttcgcttcagatgctcatcagcaacatcgcctgtatgcaagtccgactctgcgactcatcgcgccacgttgaacgatgttttggccgacttcatctcaaccttcatcttcgtgttcgccggctcaggctccggcatcgcctatagcaagctcaacgacaacggagctgccactcctgccggcctcatctgcgcgtccatcggtcatgcat

SEQ ID NO: 136341 - DNA, 979 bp, Glycine max
  Clone ID: PAT_MRT3847_94124C.1
acacaagaattaagttgtgagatggagagaagtagtgaagaggagatgttaataacgaaaggtccatggacagagcaagaggattctcttctcttcaattacatcactgtccacggcgaaggtcactggaactctgtcgctcgctacacaggcatgcaaagcattaattatattcatcatcttaatcctagcttctttcttactcacactcatcacgttttcaatcacaggtctaaaacgaacgggcaaaagctgcagattaagatggttgaactacttgcgtccaaatgttcgacgtgggaacataaccctccaagaacagctcttgattcttgacctccattcccgttggggcaacaggtggtcgaaaatagctgaacatttaccgggaagaacagacaacgagataaagaattattggagaacgagagtggtaaagcaggctaagcaactaaaatgtgatgtgaacagcaagcaattcagggacacgttgcgttttgtgtggatgccacgtatgctagagcggattcgggctcaggcctcatcatcggcccaagcccaccaaagcagcttaatctccaacagtaacactcaagcacacagtggattgttgtcatcagcgcttcatgcccacgcgccttctctctctgactcgagcgcgtcgtacaatcttatgggtgctgatgctggaagttgctcatctcatagctactactcagacatagcaggcaatggttttggtggtgcggacttgtggacggatcaaaacatttgctttctgcaacaccagcttgctcatcatgacttgttctgatcatgcatacttcaacatcttgctccaaaattcactctaaactgcaacatataaagcaattgtaacactagtcgtgaaacatgcatgtttctttttatgttaatttggtgtgaaatttaataatctatacttcaattaatttcaagagaactgccatttgttgtt

SEQ ID NO: 136342 - DNA, 1019 bp, Glycine max
  Clone ID: PAT_MRT3847_94125C.1
cttcaaattgctcggaccaggaccaggatattcatgtggccctgccaagattgttccatccactgccatcctcacagatgatcgcaggcgaaaaatgcaggcattgatgtcctggaatgtgacatgcacttactcacagtttcttgcctccaagaatccaagctgttgtgtttctttgtcatctttctacagtgacaaagtcacaggttgcccaccttgtgcttgtggttgccagaataacaatacctgtgtcacgaaagattcaaagatcctgcaagagaatgccaccttacctcaccgaaaatcagacatcacactcacaccaaaacctttgttacaatgcactcaccacctgtgtcatgtccgggtgcactggcatttgaaagacaactataaggactattggcgcgtcaagattgccatcatcaatttcaactatcggttgaatttcaccgattggtctcttgttgtgcagcaccctaatctcaataatgtcacccaagtctatagctttgaatacatgccgcttcttccctatgaatccataaatgacacaggcatgttctatggtttaaaatattacaatgatctgttgatggaagccggccctaaagggaatgtgcagcctgaggtgctcatgaagaaggacaagaacacatttactctcaagcagggatgggcatttccaaggagggtctacttcaatggtgatgaatgtatgcttccacctcctgattcatatcctatgttgccaaactctggccataaactaccaacaactattacattgatggcaacctatgtggtttttacattattttttcatttggttgtaacacttttttgaggtataagagcggctatatgcttacatcttagagagatgagttagctggcagatatgcagaatggaatttcttgtgaactcttgtatatatatctatgatatatactcactctgaaaaatatgtttcttttcataagacacgtcattaaagaaaattctcttataacaaaaa

SEQ ID NO: 136343 - DNA, 424 bp, Glycine max
  Clone ID: PAT_MRT3847_94126C.1
caccgccgtgcaggaatctgaagggatgaccggctcgcctagctgactagcgccctgccgccctttttttgtatttcaacagaaaactctatgcctctcgggggtccgttgataccataacgactaactgattgaggtggtccgtacagaacttacgtacacgaataaaagccagatccttgtacaattctaaaccgcctgtgctgtgggacgcatctgcccaaccaagaaaatattctattggctaagggggctaccttaagaactctacgcaaactccggcttgaaggtgggtcacagtgtttgaggaacaggctgctgtaacactggggtgccttgaaattttatctagcgagctaagggcatgtacccgtttatatcatcgcgggagagcttcgctaacccaaatttacgagggcatatt

SEQ ID NO: 136344 - DNA, 671 bp, Glycine max
  unsure (1)..(671): unsure at all n locations
  Clone ID: PAT_MRT3847_94127C.1
ccacgcgtccgggagagtcgttcttctttgtctctttctttctttcctttcttcaatcgaaaaaaactgaaaccctaacgagattgagagaagatgtcaggctgggacgaaggagccgtctactacagcgaccaagcgctcgccggcgacgacggttccggtgcccgcggtgaagccggcaccgattcgaaccactctctcatccagaaattcaaggaattcatccgaaacttcgagaccaccaacaatgtcttgccttacagggagagtctcctccataaccctaagttccttctcgtcgatatgggagatctcgacaccttcgactccgaccttcccgataaactccgctctaaccccgccgatgtcttgccattgttcgaagctgcagcggctcaggttctcgtgaatttgaagacgaaggtggctggggataccggagatatggaggatcagacgcccggtgatgttcagattctgctcacatccaaagaggatcccgtgtcgatgagatcgctcggggctcaatatatatcaaagctttgcaaattgctgggattactattgctgcgtccagaactaaggcaaaggccacttatgttaccctgatatgtaagaattgtaagaaaggaaaacanggttccgttcgggcaggacttggtggagcaatt

SEQ ID NO: 136345 - DNA, 516 bp, Glycine max
  Clone ID: PAT_MRT3847_94128C.1
tccctgtatcttcatcattgtccaaagcgtttcaccaacaccaagctgttaccgaaaccacatccacgctttctctttctctcccttttgaggttcaattagactatggtgggagtggtgcaccctcaacaattcatcaagttgaagctttttcagttctgattcatctgggtctcgcgattgctcggtgctgatttagtattttagggtttcaaatttagagaagccccatagaagctttgtactctgtctatgttctcttttgcaatgaaatgcttctgggtggccttgtaatttcttgtttcgtgtttttgtggtctaagttcactgctttgaacgtttcccccaaatagtgtacaatcgacaattatcatggcgttgctatagtgttctttttttttttttccttttaattttttcctcttcttgtactatcatcttgtttttatttgattttgttgggaaaaaaaatgaaaaatatgatcaataactgataactctcacagctgctcccta

SEQ ID NO: 136346 - DNA, 145 bp, Glycine max
  Clone ID: PAT_MRT3847_94129C.1
ggtgctaatcgtagctgagcgcgctaagcactctagctgttgcaaatttctactagttgtcaatggcttctgcaggtgttgagttccgttgcgttgttggtgggcgggcttgggtcgcgggcaacggggcccgcgagaaagcctt

SEQ ID NO: 136347 - DNA, 418 bp, Glycine max
  Clone ID: PAT_MRT3847_9412C.1
ggggcgggggacaacaggctcactgagaaaacaatttttacttgcagagatttggacatcttggttgtttattatacaaatagcaacttaatctataaaattcctaccgcattacattaggtggcatctgtataccttgttgatttacattcttcctacttttcttactgctgaaattaaatcataagcggaaactgagtaatattcatattttcggcttattttacgacggcatatacaaattctggactaaacacgagaaaaatcttgctttgacagaaaaggaaaagtaggtagttatctgaaacaaaggcattccttgctgattgttcttgcaaagcgagctatgaatttgaaaaacatgttgttacgaaagccccaaggatcaattcctcgtgttgacaagttgtatattact

SEQ ID NO: 136348 - DNA, 152 bp, Glycine max
  Clone ID: PAT_MRT3847_94130C.1
cattcatcgttctgcaagcaagatgaatagacttatagttctggcatttcatgtcgtccatgcctggtgctttactctgccagtttatgggcgtgcatattctgccttgtgttataaactcatgagttataattacatccgattcatttgct

SEQ ID NO: 136349 - DNA, 495 bp, Glycine max
  Clone ID: PAT_MRT3847_94131C.1
gaaggtttcccgtcatcactgtatgacgtcctccttctttgggggggggggggggggggggggcgctggagtaccgggctaattattaaagcggacgtataagaaaccacctatgaactaagaggggagagctagataaaaccaccaactaattgggaggagtaggagttctattagggatagaaagtcgagtggtgatagccaggtgatagccaggaaggatagacgtggattagcttggaatacctggaaaacgagcgtgacgtataattattatagcgttgacaagcgtataatttataaaataacggtatgtagaagtaaagggggggcaacaacgaaagtgcgaagggaagtacaagtacacgtacaggtgaagtgggcggttgtacacgtgcgtaggagtgttggggaacggtcttgtgtttgcgtggcaacgttggcctgagtgtggtaagcccaagtaaaccgacagatttcatcaaatgagaattt

SEQ ID NO: 136350 - DNA, 425 bp, Glycine max
  Clone ID: PAT_MRT3847_94132C.1
ggaatcaagaaagttgtgaaattacaatagtaacaataatcatacatacaatacaagaatggccgtgtgattgatttacaaaagaacccctcaaagaattgcaaagaactaaaaccacataaccccaattttaactaaaaaagaccgaacaacacggagaaccccaacacaatgagccaaacaatgtgcaccaaaagcagagcttgcccaggaatcggcgccgatccaccgttccccactttacagaacccgaatttcgcaaccttgacgccggcgcacgccgctttcgcgcagccgcaccagtacgtcacgccgtccgcgccgcaaacggggtcggctcggaagcatttcgccgggcacgataacggcatcgtattgccgcacaagctcttcgacggtagcttgagcacgccggggtcctcgag

SEQ ID NO: 136351 - DNA, 264 bp, Glycine max
  Clone ID: PAT_MRT3847_94133C.1
aataattatttttttttttctttatttcttcacgaaggcacctaaatctgcaccaagccaccaacaaatttctccatcaactaacatttttttcatcttgaaggaaagaagccgaaccagaattcaagcctcaatacaaacagaatcaaacaacttgtctcctaactcatcagaaacagtaataagctacaacaccaaacatagaaaaattcaccttaatgtatcactactgtatttcagctttattttatctcgagccgaatt

SEQ ID NO: 136352 - DNA, 646 bp, Glycine max
  Clone ID: PAT_MRT3847_94134C.1
gcaactcttgcaaactcttttaggttggaacaccccaccaccaccttaaaacattaactcaccccttctttacgaggaacactgctgctccactgtcacaaacgcacgcacataacacaattcagacagtcaatgagatctcatcttctctgacttttcgtcttatttatttccatgtgtcttctatagtccttttttttagacaaatttgggattttgatttcattttcttgcacccaattggattttgatctgaacccagtaagctttttttgatgtcattctacttttactaagttcgtttggcttgtgtgtggtgtggcggttgtgatggatctgaacactgaagcgttttgcaacatgggtgtgtttgatgtggttgctgcccattgaatgcaacttagagtctattttttaattcgttgttattcataagtgttactcgttttaatgctaatgatgtttattttgcattgggctagatctgcaagttcagtttaactgcgtggttagtgtttgtccttaagatggttcatgttgctcgatttaaatccatcgaagtttctggaatcatatatgtgcaaaaggtgtctttacttgtcaggtgtcaccttagatcatgtttcttttaaggggtgattcggat

SEQ ID NO: 136353 - DNA, 587 bp, Glycine max
  Clone ID: PAT_MRT3847_94135C.1
ggatccagcatgcaaacgaggataatggatttacattctaatagcacatggcttgtcttacaagttggccattgactacaattcattgcaagtagtagtggtaaattagtcaccaaccaaactcctgcacggatctcctttctctcaagttatttatagaccctattccaaagtttaaatttagagagtggaggtgtagtgctattcgggaagacaagtttgaagtgcttgtatatggttaaatgacaggcaacttgaattagcaaaaggttgagaaaagaagaaaaaagacaattaatcatttgtgctttctacattctgaaaagggtcccttcagctgccaagataatgcaccttaaaccagcaaccttcagcggccccggagaaagtatgaggagacatggtaaggtgtgccatgggcctctttccgcttaccctccctccggtgtctgtcctgctggtgtggggcccgccggggaggggaccactatggctgggcttctagttgagaccacatgctgtggacaggactgtaaatcagagaaaccattcctgactgaacgacacacatctaacccagtagtggc

SEQ ID NO: 136354 - DNA, 346 bp, Glycine max
  Clone ID: PAT_MRT3847_94136C.1
ctcacacttccgatcctactctaaatccttctatacaactatctatccggttatatatatggctaaagttattgcaaactatttcttttgcgatttgacttacgataagacataatcaaattcataccaacaactttaccaacgtctctccatatgtgaccatatatctgatatgcattcttataagcgaatttacgagagcctatactggagccatgtgactataattatgacgatgatatggtaaatgctctgctgattggctaacaactggacttaaacctagcatcaatcccatgcttaaacgcaagctgaacctataggggaacataatgtgcacactaat

SEQ ID NO: 136355 - DNA, 753 bp, Glycine max
  unsure (1)..(753): unsure at all n locations
  Clone ID: PAT_MRT3847_94137C.1
gaccacaactccacaagtgtgcagcttaaatttgcacttgcaatataattaacattttctgcaaaaatagtctacctatttggggactggaatataatttaccgcatgtaacatgcaaacactgcttccagaggacataaatacaacaggtgcatgcaaaagttacaggtgactttacaaaaaaaaaatgtgcctacagcaaaatacacaaaattcatcatgttctctcagtatctggtacttagcaattattaaaggatcagtctaatttcactgatgctataacaataccaaacaatgccctagcacaggttcctgagtgacaaggagctcagaatcacatggcttgatgaaattaacaccaaaagataacaagaatctaatatgtggacttcaatttggtaaaatgacattggggtttcttatatgtggatttagtgcagccaactccttccattttcctcgagcaccatcaatacgagatgatatgctccacaagctgtcaccaggttgcccctttgtggtaactggagcattagatttagacgcagcctttgacttcatcagtgaaagcttattattgctcttccccattccattggcgagcaaccagcgagaaccagactgttgctggcttgaagtgccccaaagcttctttttctgaggctcaggcttcagacctgccacatggacttcagtgattctgaactgaggaatgcccccttcctnntcagnncnnnnctnntnnnnctc

SEQ ID NO: 136356 - DNA, 302 bp, Glycine max
  unsure (1)..(302): unsure at all n locations
  Clone ID: PAT_MRT3847_94138C.1
ggccgggggttgttcagttacnggtcacaaatgcgactggaaatgtgaaaatgaacatgtttgtggaataatgtattggtggaagctaagtgggctgactcacatgtgtgataaaaagtgtaatcagagaattgtgtatgacaacgataggtgcttttggggagctaggggtgaaatttataaattttgagctgtagaggaacattttttgataggtgtantaaggaagtttgatggttagaattggggttgggaaagttggggttttaagggttgagggggggatgggggagtggatggtt

SEQ ID NO: 136357 - DNA, 274 bp, Glycine max
  Clone ID: PAT_MRT3847_94139C.1
cgtatctcgggattctgcatcattatttccggacatctccattggatcaatcacccctattactggtgtaaatgcattactagcaattgtgtacgtggtttcacagtttgatggtcttggtgagcttagtataaaacgtgttgatgtaattgtcactgtagaggaatggggttactttctgatgtaggaaagatttggtataacatgatatctaatcagaatctgtacaaggccttactcagccatcaactgagtcggtcactgaactgggttc

SEQ ID NO: 136358 - DNA, 128 bp, Glycine max
  Clone ID: PAT_MRT3847_9413C.1
tagagattctgacgatgcaagtagaagtatacattgcccagtggatatcacccatgtgagtactggaccgtcttatttagacggaattcgaatttgatcttgtccgtatatgtgtcactacaggggca

SEQ ID NO: 136359 - DNA, 248 bp, Glycine max
  Clone ID: PAT_MRT3847_94140C.1
acgtgtgcgtacaggtgcgagaggaccacatacgggagtatttgattttggagcagatgaggccataggtcgtatggtggcagctggacctatacaacagacgggtatacctcaagcccagcggtgctatttgttgggttttagcgaatccccttcttccccgttgcgcttatggttgtgggagtaaccgatatatcctcacaacccaaccctattgaattgatatgtttgaagtagagcatcctaag

SEQ ID NO: 136360 - DNA, 520 bp, Glycine max
  Clone ID: PAT_MRT3847_94141C.1
aaacgaaaaaacctgtcatacttgcaatcaaggtaggacaaggcacgtccactaacaccgtttatctgtgttcgatgttccaacgtctaaatgaactgagctgtgcttgcgcttgtcactggttgctagcacacactacattgtgctacgaatcacacgccgttgatagccactcgatagacaccgaactcaccttatgccttcccggatccaaaactactgccacaaatcgtgtcctcttatgatacccttactgcttttcaaaataaaaatttgctccccacctccaaattcctaacacccaacagggaacaactgccgggatggtcttctttgagagcaaacatgaagaatgctatgaagagctactgaaagtatcagaacgaagcatacgatggagctacttatctaataaaagtggatcttgacatgtacaatagttatcagcatttgatgaaggaatcaaagacaaagtcttgaggcttaacccttagtacacatttgatgaatgagaggaaac

SEQ ID NO: 136361 - DNA, 165 bp, Glycine max
  unsure (1)..(165): unsure at all n locations
  Clone ID: PAT_MRT3847_94142C.1
cagttaaatgcaaattccactaagaaaaatgtatttcctccaaccttagtgccagaaaaagcctgnaggaaagaattatgtnctcttgctatgtgttttctccacaacatcttattatggcacaaatagaacaagggaaaacacatagtacttggggaataaatt

SEQ ID NO: 136362 - DNA, 483 bp, Glycine max
  Clone ID: PAT_MRT3847_94143C.1
aatcgaatagaaaacacctggtattacagtgataaatagtgaagagtacatcatacatcgttttggcttctaggcctgccaggccctaactaggggtttagctactcatggtcatggagctttacaatgagagggggtgaaagaaagaaaaagagtaaatgatttcccctaaaggggatgtgtctttttcccttggtctagctctctatttatagctgttgaagtggacttgagccttcgtaggctcgcttaacgtgacatccctcgcttagcgcgcgcttagcaagtgcttagtacgtgctactcgttaagcgcgactgctgattctcgtgctcactgcctcgcttagcgcttgttgcccacttagtgcgggtgtctctggtcacgttcagcgcatagctcgcgttgagcgggacgttgggctgggccttgttgctggtttattcttttcttcgttatttttccaggtttttgcttttaaca

SEQ ID NO: 136363 - DNA, 584 bp, Glycine max
  Clone ID: PAT_MRT3847_94144C.1
ttgccgtgctacactgttggagtgccgcctgcttgggggggggggggggcaaacaccaaatccgtttagaagaacgaggaacggagagggggggcgtttccaattataaagtagttggcttattgttgaaaagataagtgataataaagttgaactcatagatataagcagacaaaagtaaaagtgccacgacagaagctgagtagtgagaggagcgcatcagtggggggttagtatagggcgttgtgcaagacaaggcagataacgataatagagctgatagctggtgtagaaggggtgtaacattggatttacgcaacgacccttgcgaagtatacagcataaactcactaagggtttaacagagtttaccggggcaccgagggactataacacaagcacaacaggagtgctggggaaactggaagagcaagcagaagcaacaatgcaaagaaaaatgacaagcacctacaaaagcgctagtgaggtagcattttgtagtatgtgaactacagggggttagaaactactagagggcgatttgtataagtgaaaagcaatgctggggtagtaagtagggagta

SEQ ID NO: 136364 - DNA, 285 bp, Glycine max
  Clone ID: PAT_MRT3847_94145C.1
gcgaaccagccctcccttttgtgagtaaaaccccaacatggccaagggaggaaaaaacaggcccgtgacccaaaaaaaaaggggggaacaaaagcgcccacaaaccgagcaggaagcaaaaactaaacctccaggaccgaaaaacaaaccggcaaacacacccggggtgcaacccacaaaatgaacccccgggggtaaggaccccccccaaaacaaataccaaaaaaaccccccccaacccgcggggagaggttgccagcgggggaaacccaaaaggagcccccc

SEQ ID NO: 136365 - DNA, 560 bp, Glycine max
  Clone ID: PAT_MRT3847_94146C.1
aacagatcatagatgagactgaagagatgatcgatttgatgacgcaaaaagctgagagactccgcgagtacattgtagagaagcaacaacagaatggcaaggccaaaatgccaatggaggaataggccaaaatgctgattttattagtctcttatcacttgctttgtttgtaagtatgctgacatagggcatggtcttcataaatttagttcctactcgcagggaatgatatatcagtttgctaggtggttaatgttttttctattcttagatgagggttgaggacttgtactgcataatctgcattaggcagaaggtcttacttgtgacttgtgtagtgtagggttttaggaagctgctttccttgaaccagcttctataaaaaggattatagggttgaaatgctattttatagcaagagtgagatccttatattcagtatgtgttcagcagtcatgtatactatgctatgagaagtatgcaaattgcatttctcatttgtgcctcacagctcagtctatggttatgttgagaaatgcaattgagatatgttgtagagg

SEQ ID NO: 136366 - DNA, 166 bp, Glycine max
  Clone ID: PAT_MRT3847_94147C.1
aaggttaggaattaaactggcacaaattgtgaataaactgtcagagagaaacatcgatgagatactgataaaccgatgtggaccaagtcaaatgccttatactctgctattgccttctagcaacgaaggattaactttcagaggaatgcccaacagaatctctatc

SEQ ID NO: 136367 - DNA, 534 bp, Glycine max
  Clone ID: PAT_MRT3847_94148C.1
gccttgtacaggttagtaattctgttcaaaatgcataagcttttttgcatataaattttattctgtataatctacaattctcaaattaaaagaggctcatttttggtgatatatacttaaaatttggaatcaatgtcaagaagtatcatttgtcgggtgagaaattttacagtggtaggtttcccttgtcgaggaataaaatctgcaagggggtggggatgaaagataaccacggggttccatagtgccgtactgccatgctgatagcaatcacgatatgcaagcacaagccagagcaaggcctaagaggcagatcactacccctgcataccttagagattttgtctaacggaatggttgctgagctggcaatcctttctgcctcaacttcatcttgtctgccatttagtttttcccatttcatttctgttaagatcttgtcaccacagaattacaaattctgttattacaataccattataaatatcagtcacatgtaataaggcagaaatcaatgaaattaccttcagcttc

SEQ ID NO: 136368 - DNA, 112 bp, Glycine max
  Clone ID: PAT_MRT3847_94149C.1
ggaccggtaccggggggcctcccacttttgcctatagtgagccgtattataacttggggcggtcccgggcagagctgccacctgtgcgaaattgggatccgttcacacttgc

SEQ ID NO: 136369 - DNA, 500 bp, Glycine max
  Clone ID: PAT_MRT3847_9414C.1
gctatttttctttggagacaacaggtccactgagacaacactgtttaattgcagagatttggacatcttggctgcttattatacaatagcaactctacttagaaaattggtaccacatcacatcaggtggcaatcgtataccttgctgatctacattgtcccatcttttgtgactgctgaaagtaactataagcggcaccagagctatattcaaatttccggctgattttacgacggcagatacatattctggactaagcacgagaaaaatcttgctttgacagaagaagaaaagatggcagtgattagaaatagaggcattcctgctgatgttcttgcaaagcgagctcatgaatttgaaaaacatgttgctcatgaaaggctcaaggatcaaattcctgctgttgacaagttgtattctactaaggctaataagagttgcagaaattatgaacctgacacacagtgttggtggtgatctgaaacgtcttactgatggg

SEQ ID NO: 136370 - DNA, 1870 bp, Glycine max
  Clone ID: PAT_MRT3847_94150C.1
accggatgacgtgccacgtgtcactcttttaaccacttttgtcttggtcacaacgtcatcactgggattttattattattggaataaaaaaagcttgaaaaaagaggtgacagttgcaaataggaacggagagaggttctgcgccgttgcttatcctctgagctgagagcagtagagaacaagaaacgtcgtcgttctgcactttgaactttgaagttctaacaccttcttatcttatctttctctctacctacagcttcaccaatgactatgactggtttaatttcaaaccgcaacttcgcttccttctttgcctcaggaaatgtatatagatcgggaaaggatatatccgttcaaagagggggaatttctatttctggtgtatctgttgctaaggatccctttccaagatggcagcataagatgtatttgccattggaagagagagtttcaaaacaaatgcaaacatccaacaacaaaggggagcatcgttctcttgtatcccagcagtccagtcagtgcaactttaaactaaaggctagtggaagaagtcgttgttccttcctttgctcagctccttatggcaccaacaatgttggacatggggaagtatatcgacttggtttgagcaaaagaaagcatgcacaaactgaagttggtaaaacaaataagttccgtgtttgttacaagtctgaggagtatgacatttcagaaacaaagatggatccactgcaatcaactgaaggaactggggaagccattcttttggaaggaagagcattaccttggtggcagcagtttcctaagcgctgggttattgtactgctgtgttttacagcatttcttctgtgtaacatggatcgtgtaaatatgagcatagcaatacttccaatgtcacaggaattcaactggaacagtgcaacagttggcctaattcagtcatcttttttctggggttatctacttactcagatcgttggtggcatatgggcagacaaacttggtgggaagctagtactaggttttggagttgtatggtggtcaattgcaacagttttaacacccattgctgcaaaatttgggttgccatgtcttcttattatgcgtgccttcatgggaattggtgagggtgttgcgatgcctgcaatgaataatatactttccaaatggattccagtgtcagagagaagcagatcacttgcactagtatatagtggcatgtaccttggttcagtcactggcttggcattctcacctatgctaatccagaaatttgggtggccatcggtgttttactcatttggatcccttggaagtatctggtttgttttatggttgagtaaagcatacagctcaccagacgaagacccggatcttggggccgaagagaagaagctcatacttggaggcaatgtatcaaaagaacctgtatcagttattccttggaaattaattttatcaaaagcacctgtttgggctttaataatctctcacttctgccataattgggggacatttattctattaacctggatgcctacctactacaatcaggtgcttgctgtttataagtcttctttttttttttttgcagaattcataaatgatttctaaccttttagaatatacatgtccttgacaatgtatctataatatgtcaaatctttgtgagcaagagtggaaccacaatgctgatatccataatttataaattgtagtttatttttatctgtagatcaattacatcatataattttttcacctatttatatttcttgggaattactctaaagacacgtgaattaaattttgcttcactctaactgctgatattatcatattacatctaaaatgtgattgtcttgatcta

SEQ ID NO: 136371 - DNA, 365 bp, Glycine max
  Clone ID: PAT_MRT3847_94151C.1
aacagagcaaatgcaaatctttgtgaagaccctcaccggaaagaccatcaccttggaggtcgaatccagcgacaccatcgagaatgtgaagcagaagatccaagataaggagggaatcccacccgaccagcagcgattgatcttcgctggaaagcaacttgaggatggccgaaccctctctgactacaacattcagaaggaatccaccctccacctcgtccttcgactccgaggaggaatgcagatttttgtgaagaccctcactggcaagacgattaccctggaagtcgaatccagcgacaccatcgagaacgtcaagcagaagattcaggacaaggagggaattcctcctgaccagcagagac

SEQ ID NO: 136372 - DNA, 1495 bp, Glycine max
  Clone ID: PAT_MRT3847_94152C.1
cagaagaagaaaagaccgtcaaaagtcgaacggagacactcctctttgtttcaccctaacacaacaccggcaatgcagacgctacttctgccggcaacacgcgccggcagcttcacggcagttcctctgtcagcctccgccgtcgcctcccctccactccctcaaccatttctcagcccgaattccttcccctcactccttctcaatcgggctcgttcatcttcctcttttagttcctccatcgctcgtcaaccatggaagaagcttcccttcaccgcaagcgcttcttcgcaagtgtctccggcattcactccctccaacgacgaatcagataaggccaaactcgagcaggtggcgaagagattggagaagacggcgagatacttcaaacgtttgggtaacttagggttttggggtcagctagtgtgcaccgtcgtggctgccgtcatactctcattctccgtcgtggtcaccggaaaagtgacatcgccggccacattttatgccacggcgggtggaatagttgctgccttcatttcagtgttttggtcctttggctatattcgtctctctgagaagcttcgaaaaacttcaaatgaccctaccaaggctcctcctcgtgctgatgtagtgaaaggcttgaaaaatggtataatgttgaacctgttggggatgggtgctgctattcttgggatgcaagccacggttggattgttagttgctaaggctctcacttcctcggcaaacccgtattatcagggaatttctcccggtagcaccccagtgctcgcattggatgtatttttggtgcaggcttcagcgaacactattctttctcatttccttgggcttgttttctcactggagttgctgcgatcagtcacattaccaccttcagatgcaactccatttcccaaatttgcgtaatatgtgcctcgagactagataatgaaatcacacacccaaaaattgtccctcgtctcttgtggttatttgcttaattaattgtgttcagctttttgatacagcgttttgaggccctcttcctaggcaattgacctcatcgtgtatttccaattttaaaagatcctgtgcaatattgctaataagcatgataactcctccgcaaatgaagatccttggacattggagttttcacttactttcatagcttgtctacggttagtgtcaatcagagaaatttcaaataattgtatattagacctgtcatgcaatctgcgggtttttgtttcttttcaaaatacttgccaacttgtttgacagtatgatgtggagtccttgtctgaggaaacagaattttttttgttagaattgtattttggccataattttgtatgtggagtccttgtctgaggaaacagattttttttgttagggctgctttctccccatggtggggtttgtgcgccgctctttgttcggcacttgcaagtcaggactaagaattaagaagccttaaggacacaaaaaaaaa

SEQ ID NO: 136373 - DNA, 942 bp, Glycine max
  Clone ID: PAT_MRT3847_94153C.1
gctgccttcatttcagtgttttggtcctttggctatattcgcctctctgagaagcttcgaaaaacttcaaatgaccctaccaaggcacctcctcgtgctgatgtagtgaaaggcttgaaaaatggtatagtattgaacctgttggggatgggtgctgctattcttgggatgcaagccacggttggattgttagttgctaaggctctcacttcctcggcaaacccgtactatcagggaatttctcctggtagcaccccagtgctcgcattggatgtatttttggtgcaggcttcagcgaacactattctttctcatttccttgggcttgttttctcactggagttgttgcgatcagtcacattaccaccttcagaagcaactccatttcccaagtttgcataatatatgcctcgagactagtataatgaaatcacacccaaaaattgtccctcgtttcctgtggttgtttgcttaattaattgtgttcagcgttttgatacaacgttttgaggccctcttcctaggcaattggcctcatcgtgtatttccaattttaaaagaacctgtacaatattgctaataagaatgataactgctcaacaaatgaagatccttgggcagatgattacaatggcaggggtagatcgcattgtcttcactcagctttggagttttcacttactttcatagcttgtctacggtaagtgtcaacaggagaaatttcaaaacgcaactttgaaataattgtatattatacctgtcatgcaatctgcgggtttttgtttcttttcaaaatacatgccggcttgtttgacagtatgatgtggagtccttgtctgaggaaacagattttttttgttagggttactttttgcccatgattttgtatttgcatcactctttattatgcatcagaatctcgtacagtattggtttgggttc

SEQ ID NO: 136374 - DNA, 468 bp, Glycine max
  Clone ID: PAT_MRT3847_94154C.1
cttgtatcaaactcttttttgtattgactcaagcctacgatctggcacacagctctgttgtgctttttccagacactacggcacttctattattaagttgaggtgacaagtacggttttaacttgtgaccctatcttatccatcgtcgatcaggtcttgacgaatcttattacctttttcatttttcagagttgcggtttcttcgtcacccttggagatttcttccttcttcatattgagaggcagtggcaatattttgttcaccagctctactatttcagttacaccttcatctccaaaacgctcatcagattcctctaagatctgtgtaatgaaagtgaacaaactgattacagtttcgtaagggtagtagctattgaaatagacaaaatatttaaaagcatattagtagtctcctagatcaaagtcttactaaaatgggagaaatacataacaagactctttgga

SEQ ID NO: 136375 - DNA, 1851 bp, Glycine max
  Clone ID: PAT_MRT3847_94155C.1
atcgcttctgtctactgggatgcagcagtcatttaatgattttttgaatgatagatcatggcattatcaggatccaactgggaagattcaaggacctttttctatgttgcagctgtacaagtggaatgcaagtggatgtttccctccagatctcagaatatggagggtaggtgagaaacaagataactctatactgttaaccaatgcactaagtgagaagtgttccaaaaatgtgtcattgccattcaacagccaattgctctctctaggggtcagtgttacattggatgataaaggtaatagtcaggatgctgggaagaatgcaaagaatgaaatttctacagatggccaaattattgaacagacaaaggaacaaaagccacaggtggataatacctctacccagtctgatggcaaagatgaaccggttaggagcaatggatgttccagccagctgcctgtataccctttgctactgtcaactgccattcctgagaaattgaatgaggatccttctgataaattaaggaaaggccatgggattgtgggaaattccgaaaatagaaataatggctcgatcaggacatctgatgggcagagtaatagtgggcatagttatcagaagcaatcagatagtgaagagaattcagggaaatcttctggacagacctggagacaccctaatgtaaatagttcttccaattgcttggttaacacatcaacccatgtttctgatacaaaaacatcaccacataagcttgggtttgatttgcaaaatcctccaggtctgtccagaagatgtattacaagcaggaggggaaggagacaccctgatataaatagttcttccaattgcttagttaccacatcaactcatgtttcttctacaaaaacatcaccgcataagctgggatttgatttgcataatcctccttcccctccagcatgtaatacatcttctggacagacctggagacaccctgatataaatagttcttccaattgcttagttaccacaccagctcatgtttcagctacaaaaacatcaccacataagctgggatttgatttgcataatcctccttcccctccagcatgtaatacatctacatggcaggcaatcattggtgagcccaatgattttgatgaatccgtttcagatctgttggcagaagtggaagcaatggagtcacttggtggcttggaatctcccacttcaatcatgaaatgtggcgaggatttaactgaaggttctaaaaatgattgtctcagttttgttgcagagcttagcccaattcttgatgcgggtaaaggtgatgccctgagctccactggtgatttaaacttaccatctcacccgacagcagctgaggaaccattacgacaagcagatgtgcatcaccatcatcatcaaagaatttctgcggaggattcttcaagaagttctaaagttgaggtgggtacaaagaacggtgtttcaggtaatcaatgggattcaggctcagaaaattcacccattgttccatcccctggaacattgggcctggctatagacaccacttggagacttggcttagagaatacacacttgggatggagtggaatagatcaaggaaatgcaaatgtgggttggggagtaggacagactgcagtgcaggaaaacagaagttcaagttcgtacacttctacagtaactccaggccttggggatagtcaaacaagatatggcagtgatcgattttctgtgtccagagatcggcgttttcaaggtcatggtagggaatcaggtttagtagaagcagaattcttataacaggcaaccgtcatatggtgttggaaatgaggatcata

SEQ ID NO: 136376 - DNA, 673 bp, Glycine max
  Clone ID: PAT_MRT3847_94156C.1
atcaaaacttttatcatgtgactcatcgatggatttatctcggtcacattccaatcagaggtttggcactggagcgtcagtggactcaccgaatcagctgaacatctaggagtagattcgtggtcctttgcagatctgtgggctgattttcttctcatggaaacagaagaaagagagaagaaggagtcagaaggaagagataaatccatcgatgagtcacatgataaaagttttgatattaattcttctccaccacattccaatcagaggtttagcactggagcatcaattaactcacccactaatcaaaacatcagttctcaccctcgtggatactttcagcattccgaacaaattggttcagagttctcaacagttccccttacatcatcagatagtaaaactactagttcaagacttcctagatactaaatatacatttttttccatgtaattaaacaaaaggtatagatcaatgataaactgtagacatgtaatattgttcaattaattctttcatttcattgcgttcgtcatcttgtgtggctattcttgcataatttaaaacactggaacagtggaaaattatcctgctgtatgtcatgtaataccacactcttatctctttgatacatagagtatataatatatgatgcactatgtttcactaaaa

SEQ ID NO: 136377 - DNA, 387 bp, Glycine max
  Clone ID: PAT_MRT3847_94157C.1
gtccttctccttcctcctcgtcttctctcttctccttcctctcaagtattgcaacctaaaagaatcactttctttaccacagcctttttcacacccatgacatttcctctttgccaccgcattcccttccccaaccttgcctgggtttgtatcccagacggaagttctgaaccaaatgcggtttcttggtcttttttgccatctggttatgggaaaaatgggtttgtggaggaggtatttttggtgtttaatgtgatttgcttgttgtgttgttaagtgcaatgagtttacctcccccaatacgcttacgacatgttcaatgaagaagggggatttgaacttacgatggctgtggttagaaggttcgagtatggagaatttgttgtg

SEQ ID NO: 136378 - DNA, 305 bp, Glycine max
  Clone ID: PAT_MRT3847_94158C.1
gcggttgagtgcaacgccattgatgaagtctggattttccctttatccagcaatttatgatattgacgtctttgtcactttctaattcaaccccatacttgggaggagtgcttctgctgattgtttctgcctggctagcatctgcaaaatccttgtatacccaatttacttcattgcgtaaagagtaagaactctataaagagattgaacgagcatcctccgtcaagataccaattatttcttatactgatagtgtaaactgtttctttgcaactgtttcaccactgaatccattctcatgttac

SEQ ID NO: 136379 - DNA, 263 bp, Glycine max
  Clone ID: PAT_MRT3847_94159C.1
aaagcatttgttcactcacaaagtgagcatgtgatttcactgacacttgtcaactctgcgttgtatatatatataaagacaacgggcatttcagttcaatagtattgaatcatgcatcaatcaatgaaaatgaagaaggtgttgaggagcttgttccaaattgcggtttttcatgtgttgttaaaaccaaaagcgggattggggagcagccacgactaaggagacgcgttgtcgaaggcgattattttcttcgagggacagcg

SEQ ID NO: 136380 - DNA, 402 bp, Glycine max
  Clone ID: PAT_MRT3847_9415C.1
tgtggtcaattgaatggccatgagttttttcatcacagattgttgccaatactgctcttgagtcacccagattagcaatgacaagaccttcaccctatgtattgttattgttacattatgttctttttccctatattgaacatgaaaactatgggaaggtccatttacctgtgttttatgataactacagcagtggttccactgctagagcaatctaaattcttttgaagcttcacctacttgtccatcaccttgaaagcacttaaaattgcttctttccatttcttgcagtcgattcctctcttactgtgtcaacataggtctttgtggtgtactaaccattctttattgcatcaatcttttcaagaacattcttttggtccagtatgagggaagataaac

SEQ ID NO: 136381 - DNA, 245 bp, Glycine max
  Clone ID: PAT_MRT3847_94160C.1
tgcatggctaaccagtagggattatttaaatcgaaccttagagcgttatgataacttgggggtaatatataccttcgagcgaacttggatctttagttatagcgtccgccccctgcaagatgaaaaggggcgtgttataataatataataactaaaggtaaagcagaagaaaagcagaaaaatgaaccccaaaaacaaggggagggggattcatttgttaattaaatcggttgatatggtttcta

SEQ ID NO: 136382 - DNA, 189 bp, Glycine max
  Clone ID: PAT_MRT3847_94161C.1
gttagattttttcttgatcacttcagaggtgaatgttttttacattgtctttgagcttcatttgggccagccgaaatgaaaaccccgccgcggggggcacgaattcccaacacgcgactttttttaattcttgacaattaaggaatctttatgtctgggataaacgtaaaaacctcggaacctaggaat

SEQ ID NO: 136383 - DNA, 1150 bp, Glycine max
  Clone ID: PAT_MRT3847_94162C.1
gtacggctgcgagaagacgacaggtaggggaatctgaaattgcaatgcttcacccggcggcactgatagcatcgtgtccttatccttatccttatcctgggcggcatgagttaccctcagcctcagcgtcagcgacagccagagtcgctgttccaatgccaaatctgagaggcaaagcggttgttggtgttggttccagaatgataaggtgcatggctaaccccagaagagttcaaatggtggccaagcaaattaggagagagctttctcatatgcttctcaccgataaagtcttgcagtatgctgttcttcccgaagcctccttaggagccgaccgttacctctcttctctcaccaccatcaccgacgtccaagtctccgccgacttgcaggttgttaaggtgtatgtttctgtttttggagatgaaagaggtaaagaagtcgccattgccggcttgaaatctaaggctaaatatgttcgcagcgagttgggcaagcgtatcaagttgcgcttaactcctgagatacgctttcttgaggatgattcttttgagagaggaagcagggtcattgcaatactagataaaataaagaatgacaaaagccaatacaaggcggagttggattcgtcaccaaatgaggatcacgacgatgattgggatggtgaagatcctgatgaaggcatcatttatgtggaatagatgtctccctatgtaactctatcactactgtgcatctttcatatggacaaacctttcactgttgataggtatgttttaatcaagcattgcattacttttggataatcatacttgctacttcagtatacttttattttaagataaatatatatttggtacttatatcccaagtttggttagcttcattcagttaactaatcaattacttatgtgcagtgatcggaaacacttcactaaaatgcttgctggacagacgctgttctagatttgtagttgtgacaagtcacaattgacaacattatctcaacacaaagaccttcttgcgttgtctatccccaagtgatgtgatgtagaccaatttttgggttttctctccttttatatgccttaacccaggatcttactatacaagagggtttgctgtataaagttcttttcctgctttactt

SEQ ID NO: 136384 - DNA, 637 bp, Glycine max
  Clone ID: PAT_MRT3847_94163C.1
actcgtttgaagtgacatgtttcaatttttaaaggagagaaagaatattatgaaagacagtttgctactctaaaatcatttgaagaagttgactccatagtaatatcggactgcactgatgtagaagacattggaaaacaagctgaacatgaacgggcaatgaagatttctaattatgcaaatgcagttttattggcattgaagatttatgtgactataaggagtggatcaatagctgttgcagcatcaacattggattctcttcttgacttcatggctggtggcatactttgctttacccaccttgcaatgaaggatataaatatgtacaaatacccaattggaaagttgagggggcagccagtgggcataattatctttgcagctgtcatagcaacacttggctttcaagtattgatcacggctgtacaacaactaatagaaaacaatcctcctgagaagatgtcttttgatcagctagtatggttgtactctgttatgatatttgcaacagtggtgaagcttgcactctggctttaatgtagaagctcaggaaacaaaattgtccgtgcctatgcggatgatcactactttgatgttgtaacaaatgtgattggattaattgcggctgttcttg

SEQ ID NO: 136385 - DNA, 296 bp, Glycine max
  Clone ID: PAT_MRT3847_94164C.1
taatgcacaatttgataataaagacttggtggttgaatatgctgatataaagcactctataatatatatatatatgcaaaaaacttgacatgaaatatcaagcaatgccaacactataactatggacaaatgcacaaatattctatttctatttaaatatggaataacagcacgttagatttacaacagatatggggttgaggtcaaattccccactgcagttcctactatttcagctgacaacattaatagctgccatctatttatgagtcttgactccttctaaccatccataa

SEQ ID NO: 136386 - DNA, 419 bp, Glycine max
  Clone ID: PAT_MRT3847_94165C.1
ggtaaatcaacaatggtgccttcttatactgcttctaggaacagagagaagagactgaaatcaagaagaggaatgagtttcttgagagtttggagagcaaggagttgtgacgtaggagttatggcaacgaagtcactacaacgaagatctggtgaggggagtgctagatctgggtttgaaatttgataatttttatattttatctttcatatatgttttcttttatcattgtgttcttgaagtttgaatttacattttctcgtttattttttcaaatatgttttgttttgtaattgctttcttaaaatcatttatagatctgtaatgtttagtatgcaacaacaatgggttttggcgattggtagtgtctttgatgagggtggcgaacctaatgccgaaagcacttcgggatgctccct

SEQ ID NO: 136387 - DNA, 234 bp, Glycine max
  Clone ID: PAT_MRT3847_94166C.1
ttcaagttccgacccagccatccgagtagccatgggggaggactgggtggatttaggggctgacgaagtgaccacggatggcaaacatgcctcaactcgtggccgtcggaggataaaccgtattggctatgatcctaatgaacataactaggtagcacctgttactgatcctccttacggcaacagcaacaccatcaagctcactaatccgactaagttatcaactaaatacaa

SEQ ID NO: 136388 - DNA, 148 bp, Glycine max
  Clone ID: PAT_MRT3847_94167C.1
gaaaaataaaagaaatggcaatggcaactcagctgctgccgaaggtggagttgtggctgcaggaactgaaaaagagcatgtgatatctggagaagatgcggtaagcaccatcagatctttagatataaattcagcatacttcattaaa

SEQ ID NO: 136389 - DNA, 559 bp, Glycine max
  Clone ID: PAT_MRT3847_94168C.1
ttgccgtgctgcatgtgtgcacgtcctccttcttgggggggggggggggaagacaaaaaacagttaaaggggagggaacaaaagcttaaagtaagtgactagactagcaaaataggtaggctaaacgtaggagaaggtaatactgaatagcgcgcaaagtgaaagtgtaagccttagagttaagccgaggagggattacagttgctacgcattgcaaaattatcagtactgcttgttaaagtgcgtcaggtgttcctcatctaatgtagttaaaccaactttagtacaatcccaacgttgtgcaaaacaacatattttatgtatattttgaggccgtttatatagtgtatatatgtgtacccacttaggcggcggcgtagaccgatatcgtgcctagtgttatctttgcggatggttaatccggttttggttccgcagttcgttttcttctcctaacaatggaaaaccttatggcatactagtaataagtttgcaagcataatggggagacccggacaatttcaagaacgatgttgtactggtacagaaacaacttttc

SEQ ID NO: 136390 - DNA, 474 bp, Glycine max
  Clone ID: PAT_MRT3847_94169C.1
atttattcgatttagctttcccccaaatcccaaaccctttctttcgcttagatcccaatccaattgggttatggacatggcttccagtccccgcaccgttgaagagatcttcaaggattacggcgccagaagaactgccgttattcgcgctctcactcacgacgttgatgaattttacggcctctgtgatccaggtaaaagggtggtaaattggatctggttttatttctcggctcaattttctagtttcgctttgttttgcaacatttgattgtttttttctttctctggtgcgagagtgaattgtgcatggatgttggagtaaacaaggtagattttttttttagcacaaatgggtgcgtgcggtcatgagaaaaaacgtgagtttactacggcgtgtgtttgtgtgagcatgttcagaatttatttttaattaacattgattttggagtgaataagtcatgcttgaatgta

SEQ ID NO: 136391 - DNA, 608 bp, Glycine max
  Clone ID: PAT_MRT3847_9416C.1
cgataaaccgcgctcacaggttgccggacggtaaatcctgaaacaaaagcggtctttacttgatttcaagaatcttccaatttcttcctacttcttggtgtacgatttcttaagggaaagaaaatcactctctgcgctggccacagacttcgtgaatcattttcttttccactcttagtttatttgctgaacactctcctatttgatataggacttcgtgtcagatttaaactttttctgtttctttctcaggtctctgcttaatttcaagttcaagctggtgaaatcttggattagtgctcccactctcctatctggtataggacttcgcgggtagacttttctatttttgtgctttctttcactctctttttctcactgatccgcattgccgttcaaagtggtcttatttgaaaaacacttgggcgttggtgcacatgtttgcttcgttaattttctctggggacaacaggctcacttgaaaaacaattttacttgcagagatctgacatcttgttggtattatacaatgcactcaattaaaaatcctaccgattacataggggctctgttaccttgtgattactttcccatttttcttctgtgaa

SEQ ID NO: 136392 - DNA, 247 bp, Glycine max
  Clone ID: PAT_MRT3847_94170C.1
gggcggggagaaataacccttttctccctgaaacaaaatacagttaatccacatgcactgcaacaaaattttttgtatgcaagcaaccccctctcaaaaacagtcccttactcaactctataaggctaacctgtaacgtgggaaatcgaaaaagcctactttatatgctgattactactactttgagtgactaaactgtttcttggacatctcattattctcatcccatatgtaaaaagtgctggca

SEQ ID NO: 136393 - DNA, 215 bp, Glycine max
  Clone ID: PAT_MRT3847_94171C.1
tatatggaaaggtggagcgcgtgcaggtgctggtctggaatttgagggttgagttaggcgtatttttttgtttttgagaaagtttatattatagatacggtaagaaagatttgagtcaaagaaatatataagttagttaaattggttatttgagaatatacttgtaaaagacagtggctttttgagtttgtattgaattattttgaaaaactagt

SEQ ID NO: 136394 - DNA, 284 bp, Glycine max
  Clone ID: PAT_MRT3847_94172C.1
aaccccaagccagatcatacagcaaatcaaatttcatgataccagatcaattccgagcctaaagaaaaaaaccaaacgcgagcctcggggccttaaactttgtgctttcgaaagttaaaattcgaactttgccttttggacgcaacgaatataatcaaccgacgaaggcctttggtggttgccaaggatggccaaaagtgtaatggcggcacgggattgacagaggggtgatggcggcaagggatagagggaggggcacccacgctttcgaagacgcgtgggtc

SEQ ID NO: 136395 - DNA, 367 bp, Glycine max
  Clone ID: PAT_MRT3847_94173C.1
cctacacgtatgtctaaccctttttcatatactacaattttaacgttaagactgtacatagtgaatcgtataattactggatcaatacagacctagtgacgtctgtccacacttcatttgcaaagatgcactatggaacgctagaagacgatctgatcagcgccaaacgaatccatgacaatgattttctatccagcatcgatcctcatgtgattctgacatacaaggcacaggagaaaaagagcactgcgcatgaagatcctggatccaagccagattggactgagagctatcttttcactgtctcagacagtgcatataaacttaatctatagatattggataaagacaactttattctagatga

SEQ ID NO: 136396 - DNA, 172 bp, Glycine max
  unsure (1)..(172): unsure at all n locations
  Clone ID: PAT_MRT3847_94174C.1
gtcgcatgcacgcgtacgtaagctcggaattcggctcgagnncatntnaaancncgcgtnntaaaaatccaaanatgttcctgttccaaaanggntctcatctncatgcgnctccttctntncanggaagtactactaccattttccgcntccacacnacatacnanantcg

SEQ ID NO: 136397 - DNA, 504 bp, Glycine max
  Clone ID: PAT_MRT3847_94175C.1
aattcggcaccagagcaaaaaatgcaaaggaggcatgagagactctgaaaaatgaatttaaaggcacaaacaaggtgtttgtcatgaaaagacttcaacacccaaatattcttctctacatggggtcgtgacatcacctcaacgtctatgcattgtgacagagtttctcctacggttttgagcactccatatatgaaaaacaacagagctcctattcaacaccaggtactccataatattcgtgtctgaagactcttgttacacacatgtactaggcatcttgattaattcattgcagcggtcaaagtcaccgtagtgaaaatctcatgtgagcagtacaataagtcatatgagaagcaagatagaactgaattttatatatatatatatatatatatatatatatatatatatatacagctattctgtttctttacatatatgttaaggcattggattgaaaactcagactggcacatagttagattcttcttatggtggtct

SEQ ID NO: 136398 - DNA, 427 bp, Glycine max
  Clone ID: PAT_MRT3847_94176C.1
ttttctcgagattgctggggggtttcaaggagaacttatttgcaaggtacttcaattattatgggggttgtactttttatttttattccctataatgattagtattttttactttgttattgtttattggatgtgctattgctgcccaccatgatacttagtcactgtcatttattgtgctcaatattttatttctgctttggatgctcaaattagattgtgtattattttgtattcattatatatgttagatgttttacattgtttttaaatggtatagagattattttgcctttatatggatataaataatggaataattattgatcagccaaactgaataatatgaattcattctcaattatgtcaacttggtttatccaatccatataatttggcattcttgtctgattaaatgacacatctt

SEQ ID NO: 136399 - DNA, 754 bp, Glycine max
  Clone ID: PAT_MRT3847_94177C.1
atcgtacacaccacatcgttggtcaaccaataaccactgttgttccctttccaacgttttctcttttgcatcctcaatttcctcctccaacctttttcagcgacataacatcatatttctacgtgcacttatctctctgtttgtcaactctctataaatactgtcttgtgcttgttctcccactttcacattaatatgaactcaacttttacgatgttttcttggggcagaagattccaactctctctacggcatagcataaggccgtttggcagccaatcacaaggctccacgtcatcatcatcttcttcttctttcagctcctttggtgggtccaggcatggtgacaatagggtcagagactttgaggcctttcttagatcaatcacttctggggttgtggttgttagctccaccttaggctattggtattggtcatctttgtcttctcctggtgccaattctcttcagtcatttgctgatggttatgctaatgaagaggatcagtttcaacaaaacgatgaaaacaaacccaagttcctctttaatgatggctatagaagaagagtattcttcaattatgaaaaacgaattcgcttgcagagccccccagaaaaggttttcgagtactttgcatctgttcgaagccctagtggggagatttttatgacacctgccgatttgatgcgtgccattggtcctgtctttcctccttctgagtcaaaccgtgttaaagagggttttctaagagggg

SEQ ID NO: 136400 - DNA, 303 bp, Glycine max
  Clone ID: PAT_MRT3847_94178C.1
gactcttggttttttttttttattttgtatttgtacccgggggcgtacctgcgaaccccagagggggacccggaaaccttggacctttcactttcataggtgccgtctgtgcgaaaaggtgataaggtcaaaacttgacacaagatacgaactggattctttcattggaaaaaccgtagtccctaacgaggggacaaagccccaattcttgcgttcctaaaaaaaaacccttttcaacttaaaaaccggggggggcccccccaaattaaaattaaaaaaccggcccgtgggaggggccaaaaa

SEQ ID NO: 136401 - DNA, 266 bp, Glycine max
  unsure (1)..(266): unsure at all n locations
  Clone ID: PAT_MRT3847_94179C.1
gtnatgtggggattctcgcnatcgacanctacnnccctcccaccngtattcagcaggaattgctggaggcncangatggtgccagtaaagggaaanatacnattggacttggncnagattgcanggcgtttngtacagaagtagaagangncancncgangagttngacagtagtnnctnccctncntgaaaagnatgcgantganccnaaacaaattggtcgtctggaagtaggcagtgagactgtgattgacaaaagcaantcc

SEQ ID NO: 136402 - DNA, 379 bp, Glycine max
  Clone ID: PAT_MRT3847_9417C.1
aaccgtgatcacaggtttgccgcgccttaaatttcggaaacaaaagccgttgttacttgattccaagaatctctcaatttcttcctacttctttgtgtacgatttcttaagggaaagaaaatcactctttgtgctggccacagacttcgtgaatcattttctttttcactcttggcttatttgctgaacactctcctatttgatataggacttcgagtcagacttaaacttctcctgtctctttctcagtcctctgtttaatcttcaagttcaagctggtgaattcttggattagtgctcccactctcctatttggtattggactctatgggttgacttttctatttccctcctttccttcactctcttctttttactt

SEQ ID NO: 136403 - DNA, 1250 bp, Glycine max
  Clone ID: PAT_MRT3847_94180C.1
ctctccctcctaaagtcctccccctcttctctttatcccccagaacgataaaaatcgcacccaaacaccccccttcctctgccacccaaccaaatcctcgatctcgccgaacaaccccaccctttcaaaatccgattttccgatgccgaagaagcgaaagtctatcgccaccagtctcgacgaggtggatcgaaccctctacgcgtcgttttgcaccgccgccaactccctctcgcagctctacacgcactccatgaaccaccagaagctctccttcaacgccggggaacgacacgccctcgaaaaactttatcagtggatttttagacaacaagaaggaggatcacgggttggaacagttgatgtacttaattacattcagaatgagctggattattgtggagaagaaccatctatgtcacctagagcaccactgcaacaccagtcacaagcagcattgcatgtccctagttttccagtcacttcagcatcttctggtcaaacaatagctgcacaaggactccgctcggaccactgtgaaaatcaatcaaagaattctgtgttttcaaatgctttgtcaagtccagtacgtcgaagccttcaacattatcaaattggtgagggaggatgctacaccaatggtctctccatggggaatggaaaccggaacactgaacctggctttcttaatcagcaaagcagggattcaaatgcagtgagctccaatgattctgccatggatatgcatgcagactagttctgtctattggtttattaattgggaattcttaactcaccagcctttgcaacagctacaaaagaagctaacaaccttcggaattccgtatctgggtttgctcattggatcctgcaagaaacgacaggaggatggaaccaattctgttaaccttttactatgcttacgtcaaccgagtgattggtttggggtcttaagtggtttttgtaaagttttctattcattagctttaaagcattttattttgtaccttaaattgttttaccccttcgccccttcacccaaaagactaatttttaaaatgtaggggttaattctatctgaagtttcgtacgtaaatctgttcttctgcagattttctcgcaatttacagcttccgtcttcttttttttatgcctgcctgtattgtattcagagatctttgtgaggttacttagagaacacagttggtttttttgttttctttttcttttaatacatatattttccaatg

SEQ ID NO: 136404 - DNA, 430 bp, Glycine max
  Clone ID: PAT_MRT3847_94181C.1
ctgtatgacgtcctccttctttgggggggggggggggggctggggggaatagactggtgtgtggaaggggaggaaaagtagggggggctaatgtgaggttaaactgcaagataccaggactaacgacagaaagaacagaaagcggcagggcgagttgggtactgaaagggtgactcgcataacaaatatataaacagtgacaaaacatacgacaatagggcacaatgttattaggtatgtaattgcggggaagcaaaccaagagtgcgtaggaaaaagtgacagcaacacaaaagcagtacagcagcgtcgccgtatacccgaagtttagtatttatcccacttgctaaagtgtcagttgtcaagtggcacgttacagatggcggcacgtgttagtatagccttctcaacacgtggaagcgaagttagta

SEQ ID NO: 136405 - DNA, 714 bp, Glycine max
  unsure (1)..(714): unsure at all n locations
  Clone ID: PAT_MRT3847_94182C.1
gtttcgatgaagaagagctgctcggggattacagaacggggaattgaactttctcaatggctcagattcccaacctagacaatgctcctgtcaatctcacatccattagggagcattcgcaaaaagagctcctcaacatcctcaagaatgttcgaggaaagaagtgtttagtcattgatccgaagctcggagactctctctcgcttatcatacagacatccattctcaaggagcatggagttgaattgcggcatctttccggggacccaattcaaactgactgcagcaaagtagtttacattgtgcatgctcagcccaagttgatgagattcatatgttctaatattcataatgatgtatcgaaaggactgcaaagagaatatcatgtttattttgtccctcgccgcactgttgtttgtgagaaagttcttgaggaagagaaattacataacatggttacaataggggaatatcccttgtatagtgtaccaatggatgaggatgtattatcatttgaacttgatctctcttacaaagaatgccaagttgatggtgatacaagctcactttggcacattgctaaagccattcacaaacttgagttttcttttggagtgataccaaatgtgagggcaaaaggaaaagcatctgtgcgtgttgcagacatcctaaaccgaatgcaagctgangaaccagttaactcatctgatatgg

SEQ ID NO: 136406 - DNA, 480 bp, Glycine max
  Clone ID: PAT_MRT3847_94183C.1
gtgttttttttttttttagaaaaacagtactatgagacattctataattgatcaatacgggagatttttcaatctctttatgattctttatgatgacaactcgtccatatatgcagatccaataaaagtgtggacaactggacaaacaagcataatgcaggacgacaaatcatcaaacatgaaattcaaccgaaagaagactatgtgcaatcaagtaagatcatcctcctcaagttctttggctttcagtttttccttcaccctcaaaagaagtgttggcttccaagaatccaaaggggtcatgctatcaaattccttgataacttcaggaaactttccaacatcttcttcatcaattgcagcagcaatatctgccagaagtctatattcacgtgttccagaaaatgttggatccaagtcctgatatcgctccaatgcatgtggaatagcaataacatcatctttacaaagttggcaaat

SEQ ID NO: 136407 - DNA, 196 bp, Glycine max
  Clone ID: PAT_MRT3847_94184C.1
gaacagtactgccttctttgcgctctttgtagtgtgcgcctttaccatctcatacctgccttcagccgcctgtcggttcgggctcgacactgatgatgatcctattcagaacggtggcacatactatatgtcgccccgaatcagacgaacgggaggcggaatcgagagagagtcgactggtagagaggtatgccct

SEQ ID NO: 136408 - DNA, 194 bp, Glycine max
  unsure (1)..(194): unsure at all n locations
  Clone ID: PAT_MRT3847_94185C.1
gaatnntcggcaccagaagatgatatgtgtttgcgttggtcaataaataacactttttatattggccagacttaaantcagaacaaaccaacacctntcattccttttnntatgccagattatttgtatggcgttgcactctctttacatcagagttncttagctttcttttttctttcttnnctgttctcgtt

SEQ ID NO: 136409 - DNA, 123 bp, Glycine max
  unsure (1)..(123): unsure at all n locations
  Clone ID: PAT_MRT3847_94186C.1
cggcagaggncccagaaagccccntgcacgtcanccgagggaagctttctccaanatgcgaccaancagcaacnatcncccatggatggatngctcgggcgagngctngagggagatcagaca

SEQ ID NO: 136410 - DNA, 381 bp, Glycine max
  Clone ID: PAT_MRT3847_94187C.1
ttttattgaaacattggtgcctacaaaaaagagtattgcaagccttctttcaggctgcacttacctaataaaataaagctctccaagtgcggaggttgttacctgcgcaggaaagggcattttttttaaaaggcaaggacatttaccttccaagaaagacttagaaaatatgcacaatattatggcagatattagcatcgtacatctgatcaaatatcttgataggagtgcatcattcaagcttggaaaaagaccaacatagcgtgaccagaaaacatcactttaccactacaacccctagacagattcctgttttacctgccagactagatttcctgtacaagtatgtaactgcattctgctgcataactacttgaaaaa

SEQ ID NO: 136411 - DNA, 250 bp, Glycine max
  Clone ID: PAT_MRT3847_94188C.1
acacgaactaatgtatgccaatggttatatcgctgtaagtgaaacacccattagtcaatggttgctactacaactttagaatgatgagtgaggtactagtgtaacatcgtcgccatgatctactccaacattattgtcaaatcaacatcaacaggaaagacagtcaaaatgagatttcttcatgactaaaaagatgttcggtactcaaacagttgtattggatcattgtcaaagcgcaaaatattttcca

SEQ ID NO: 136412 - DNA, 466 bp, Glycine max
  Clone ID: PAT_MRT3847_94189C.1
gtgtacttcctaatccaaaggttgcaacttgactctcaagcattaggctctttccgcacttcccactaaacaagctttactagctgtgcccttctctttctctagtgcatgaagttccacttctagctgcctactcttcctttcaaggctatcaattgcctctggatgactatttagtagaactctcacatgggcacaagccttatgaactaagccaactgctttgcccggaagatggcgaccactgatgtaacgactatacaactgacccgctacaaccaaagcacggagcagagtccgaacaccatggcgaccttaatatctctctgtcaacccaccaagcgtactgagaggggaagcaacactcgggtctggcacatacacctgctgaaatcttctcttaagggcaaggtccttgtgcacataccccctatactactcaagcgcggtggccccactccaccta

SEQ ID NO: 136413 - DNA, 628 bp, Glycine max
  Clone ID: PAT_MRT3847_9418C.1
ctgaatccacaagagagcaacaggacatgcattcaagagaatttagaacacttgaatctggtcataaaaaatcatctatttcccaaaagcgagtcaatattgaggatgatagatcatcttgtgttgtcaatttggataagaaaactaacaaagcatatattcaaactgagtctggttgtgatgaagttgagacaattttgttatcacaaaaggaattcagtggcagggaagggaagcttgagatatcagaaacaattttgaaggaaacaactgatgaatataaaaagtttgttagttcaacttctaccacaggaaagcaaactttgacatcaaagaaggtattcagtggcagggaagggaaccttgcaatatcagaaacactttcacaagaaacaaatgataaacataaaaaaattgttggttctacttctaccactggaaagaatgtgatagatagaagttcccagaaatatactggaaatttaaaaattgaagacactgaaaggacctcaaatactaggatgaaggacatggaagtgaaaaaagattcagttttgagttctgttcagggagtggaggagcagcaataccaaaaaggagagaagatcattaaggtgaaggataaaaa

SEQ ID NO: 136414 - DNA, 300 bp, Glycine max
  Clone ID: PAT_MRT3847_94190C.1
gaatgcacaggatgatttgaatagatgactctattaacatcacagtacaagtccagtagatactgtgtctggagatttatgcgaacgatgcattcttcgacgatcaattcggtctggccgtcgatctctactctgaatccatactattggatcctagtgacgccaatctctttcgtggccatagcccaagcacagattaagctcaacgctttcactgacgccgtttccgatgccaacaattccatccacataaacccttctgtgcccaatgcctatcttcgtacatccatcgcatgtatc

SEQ ID NO: 136415 - DNA, 325 bp, Glycine max
  Clone ID: PAT_MRT3847_94191C.1
gtccgaaatcatacatttatactttaaacaatgaatttaaaacacaaaaaaaaaaaaaaaggacaggaataatttgaaaaggaacaaggcctgtcaaatctagaagacacaagcgtcattacaccctcatacgacagaaaactatagaacatactggtaccaaaactcaatgttaatttccgtcaaatacaacatgaggcacttcaaaacgcccttaccacccacaataatggctttaacgcgaataatgcttctgtcaacgatcttaatagcgaatatgccgactccaacttcaatgatgaacatttcaacaatgttgatagct

SEQ ID NO: 136416 - DNA, 520 bp, Glycine max
  Clone ID: PAT_MRT3847_94192C.1
acctgtaactcgagcgaactatttctgcaatttgggggaaaaaaaccaccaaactgttttgtttttccaatcccaacagcgaaccacatttcggaaataaaaacctcgcaccgggcacaaagggggggctctaataagcttaaggatccttggccaccagcggcaaaatgaatacactttaaatcccggtctgggcaggtgttccacagaaattaaccccattattcttacaactccttgcccagttggaatgaaaataaaccttaagaggtacaaagcttcaaaaaaccccccataggttttcatctgacatcttcccggaataggggcctacaaaccttccaaatgaccccatggcccacaagctatagaagctgctgcttccttacatgaaactggatttccgagatctccttgggttcatagggccaaattccatttttaggacactgattttgctaatcttaacaacccataattgaacaatggggccacgggaaaatggacaaactgggccaaa

SEQ ID NO: 136417 - DNA, 365 bp, Glycine max
  Clone ID: PAT_MRT3847_94193C.1
gaaaagagtgcaagtgattaaatggaatttaaatacctaaaccgtggacgagggctgcctgatccactgcttctgcggctccaaccaagtgttttacatcaaaatcatccgcaacgagctcacgggccagccctagggctacagcttcgtcgagttcgcctaccacgccacaaccgaaagggttctccaaacctacaacgccaccgaccaaacctataagctcaattgggccttcttcatcatccacaaacgcaagccccatgccgtcctggaacactacatcttcatcggctatctcaccccctacataaccgattatcttctacaacaaatgtttcgcgcccattaccctatcgttcgcggca

SEQ ID NO: 136418 - DNA, 212 bp, Glycine max
  Clone ID: PAT_MRT3847_94194C.1
gggtgcacattttgtatgggcttttagtttaatgtttctattcagcgggcgtggttattggcaagaacttattgaatccattgtttgggctcataataaattaaaagttgctcctgctactcagcctagagccttgagcattgtacaaggacgtgctgtaggagtaacacattaccttctaggtggacccttctgtcgtcttctcgcagccg

SEQ ID NO: 136419 - DNA, 187 bp, Glycine max
  unsure (1)..(187): unsure at all n locations
  Clone ID: PAT_MRT3847_94195C.1
tttcagccctagcacttttaagccaaccatttcttttnnttcatgggacaggaccgcnaaggtttggaacctgaccaacttttttttgaggaacacccttttttttgtgggtgggtatgtttttttttttgantgcttccctgatggatatttatgtgacagtggtggcaaagatggggttattctt

SEQ ID NO: 136420 - DNA, 430 bp, Glycine max
  Clone ID: PAT_MRT3847_94196C.1
gaataaaaccagaaacaattaaaaaattttggtttatttggaccaatttttggacatagaccaccaaccttgggaaccaaacaggaaaaaccccattccaaattggccattagaaattattttgggacttaaaaccaaaattttttaaaaatggaaagccttccaatattctttttggaaggggtccttgtgcttaggaatttggcacccttttcctttggctggagaatttttacaccacgctgggcttaaataatggccctttactcctatgcttcttagagaactaaggccactttgttcttcattttttcaccatatgctgctttctttttctccagtagatcctccaattttttaagctcagctacaagagctgcctttgtgctgatttcccaagcagcgatagctgagagatgttattgcggac

SEQ ID NO: 136421 - DNA, 216 bp, Glycine max
  Clone ID: PAT_MRT3847_94197C.1
acgcgtccatacgattgcaataggacaccaaaaggggacctggggtttcactggagatgcgtatgtcgtcgtctattgactaatttggtgcagtctcacacttaccgcatgagtcaccttcatggggatgctcctaaacaagatatcgtcggcatcacccctgattcgaaggtcgtttatcagaccattgtggagacgattaacgtccacatttgg

SEQ ID NO: 136422 - DNA, 205 bp, Glycine max
  Clone ID: PAT_MRT3847_94198C.1
gcggacgcgctcggatgctgctaatctggacactatcacttttttttttatcactattattaaaataagtcggcttttttataaaatctgtcctacccaccactccccatagtcattacattgtgagagacgggaaaaaaaaaaatttttttcttcttcccccacaggacccgcaaacaaaaattctctaacaagaacccacata

SEQ ID NO: 136423 - DNA, 148 bp, Glycine max
  Clone ID: PAT_MRT3847_94199C.1
gagagaaaaatatttccagcttcccctaaaagtcttgtccaacaatttactggtgctgcaaacattttccaccgccaggcagggaatgtttggcctcctccttggatgaatggcttggtaattcattcaggaaacccattgggaaaaa

SEQ ID NO: 136424 - DNA, 435 bp, Glycine max
  Clone ID: PAT_MRT3847_9419C.1
cccacgcgtccggctaaagctccccctacatgatgggataactccacacgacaagcgtggaaagcctcctcattactccagtgtggagcgtgacgcgatgaacatacaggcactcgaccatatgatggagccaattctagagcctttggttcatacagtggtataaatttcgcctatctatacataatgaattagctgtatctgtatatatggaattaaatgcatttgtatgtctatgccataatcatggagatatgatactgccatattactgtagaggtgatgctgattattagtggacatgattgtgcatcttagaataacagaattcggcatgtagaaaatataagtgttgctagtgagtaaccgtcatgctttgcacgctagagataacttgcgttgcatgcagcatatggcgcctattgcatccgccta

SEQ ID NO: 136425 - DNA, 344 bp, Glycine max
  Clone ID: PAT_MRT3847_941C.1
gctagatctccgtaataatggataattttccgaacacaaagaagacctactgggagagcagggaatgcatgaagaacacgctccacagggtcatccaatacaagacgggcatggacagcatcgccggtcacggaaaacgccgatatgaccgcaaacattgcggatacggataacagactaatcctgtatttgacatataggccgaaaccacctagaaaattgtgtaagaggctccagcgtcagggatgcaagcatgtcctagagcacgctatcaagaggtgcatgcattttgagatcggttgtgacatgaagggtaaaggtaccattctgttctagatggaata

SEQ ID NO: 136426 - DNA, 427 bp, Glycine max
  unsure (1)..(427): unsure at all n locations
  Clone ID: PAT_MRT3847_94200C.1
cccgcgtccgcttcttaccatgtatatgtaataggattcgctaatggagagtaaatataacttgggatgggaattttttcaagcgtaaattcctctaattttgggttgcatttattgttgctgagtgttgacttgcacagcgttgaacaaactgactgtcgtcaagcttatgactctgctgccgaganttatatgtcctcttttgactgtgctaagcctcctgaggagggtagttattcaaattgaaactgaatggggacgatatatttattttcctttccttttctaattacaaagcttgtacgctgctttgtgggaagcacacgaaaaggcagttcgaatttcaatggcagcctttactgctagtgctgtanggggtgggtcactaagaacaaaatatgaaagcgtgctgcacaaattcctcaaa

SEQ ID NO: 136427 - DNA, 710 bp, Glycine max
  Clone ID: PAT_MRT3847_94201C.1
gtccggggatattgtcggcgaaggtggttgccgaggcggcggagctggcggcgcggaacatgccgttcgaggttgtttattatccgaaggaaaggtggtcggagtttgtggtgaagactgaagcggttaatgaagcaatgaaggtcgcgtggagtcccggattttgagtgaagatcgctgcggagacagatgattcgtccagggtgtcgtggtgtcagggtacggtctcttctgtcgctcttcacggtaatggccaatggcgcggttctctttggcgtatgcttcaggttacatgggatgaacctgaaggtttgcagatagcaaaatgggtcagcccttggcaggtggaacttgtttcaaccacacctgcacttcattcagcattccccccaataaaaaggattaaagctgctcatgattctggggtgtttactaatggagagagagacccctttcctatgacaggattcactaattcgacaatgggacaactgaatcaggcattgttgagttatggtacttttcctgctggcatgcagggagccaggcatgatgcattttctgcatcaagattttgcaattatccaactgacatgtctcgtctgtgtatgggtaattcctttgggaagagcacatttccatggctgaaaacattggaaacagaggtaaatgttggcagctctcaatctgatgaattgtcacctgatagt

SEQ ID NO: 136428 - DNA, 404 bp, Glycine max
  Clone ID: PAT_MRT3847_94202C.1
gtgacaagacaaaatatattaatcattctctatctcttcatttaaagggtgctagtgctgcaaaattattgaggaggaccaaacccagggcgatgaagccaaagatttgggaccaaagaagaagaagaagaagaactccctttgacgacattgttctgatcagagtttccaccgatggaagtggcgttgatagtagcagcactccacaaagaagcatcagaagtagtaatagccctatggatgcatagattgttgctgctgctggtggtggaatcgcggtggaagcgaataactagcagcgttattgaagccagacacaagaggagaaatattagaagaaccagcaacatgatcaccaccaccaactttcagatactgatcggaaggctgtgatggtgtgttgt

SEQ ID NO: 136429 - DNA, 629 bp, Glycine max
  Clone ID: PAT_MRT3847_94203C.1
gggagcttggacctatcacctcaatgaattgtttttaccattaataaataagattaccgagctgtttttttacactacgaggaacccccgttccccccccccaaaaaaaaaatttttttattttacagaacttttgaatcttcattcggcatttactactattccctccccaatactataacggggaaaattcctcaaaaaatcaaagcataagacaacaatgaatgtaaaattacaagcaacaatgtacatgttaggtaagctctatattatctcacttctcgatgccttgctgcagatactgtatcaagtcatagccagcagtggtccacttattataagcatctttacaaacatgggtcatgaaattggctgcttcacgctcactcatctccggatgaaatctcttccgaagattgccaatcgggtcacccctgctgaagcaaggtaacccactgtctagcattaatgacacagtagtgatgatcccatccattcgtcgacgggcagcaaggtaccccttcacgcacaaactacatgtacaattaacagcttcactcttaataacaccaaatggatctagaaattggggcatttcatgggtcaacttaaaatgagcacttttaaaa

SEQ ID NO: 136430 - DNA, 655 bp, Glycine max
  Clone ID: PAT_MRT3847_94204C.1
accaatgaatgtaaaattacaagcaacaatgtacatgataggtaagctctatattatctaacttctcgatgccttgctgcagattctgtatcaagtcatagccagcagtggtccacttattataagcatctttacaaacatgtgtcatgaaattggctgcttcacgctcactcatctccggatgaaatctcttccgaagattgccaatcgggtcacccctgctgaagcaaggtaacccgctgtctagcattaatgccacagtagtgatgatcccatccattcgtcgacgggcagcaaggtaccccttcacgcacaaacttaaaaattgattccatgtatcactcttcataacaccagatggatctagtaattgtgtcatctcatggctcagcttaaaatgagcactttcaaaacgcatattcccacccggagaagtttctaggatgaaaccgaagtcaatatgaacaagcctcccaacattatcaaagagaaggttcccattgtgcctatcctttggttgaagcaaaagactagcaacagcataaccagcactgctaatgataaagttctggcgtgcagcctcaaaactggcagacccaacaggcccataatcttgctgaaatatctcaaacaaacctccatcagttgtttcccc

SEQ ID NO: 136431 - DNA, 270 bp, Glycine max
  Clone ID: PAT_MRT3847_94205C.1
ccacgcgtccgtccgattccgaggaagaagaggagcaacaacaacaacaaccagtcctctcagcaacacgaagaagaggaagaagaagtttcctccggagaagaagaggaagcttcctccgaagaagaggaagacgaaaatctccccccaccacccatctgcaaaaaccctccaccccctcctccctgaaaccctgagccccgacccgcttgctgcgaatccgaaaccgagtcgggttcgcgaaccgaatgagaacccgaccccactggg

SEQ ID NO: 136432 - DNA, 294 bp, Glycine max
  Clone ID: PAT_MRT3847_94206C.1
aggatgggcagcgcttgatttgggggatgggaagccccagtcaaccaccagaggtttcctcgtgcacgctggccctttctgcacgtcttcgagctttcaggttttatgagtttgaggatgggagtgagattcggacttagctcagagtcagtgtaggatggaaatcctgacatgcggtgctgccagatctcgtatggtgtcctcgacgcttggctggagcaggacccaggcagcaaagttgactgcgagatatggaccaatgccgacttggacatggtcttcgggaagatcacg

SEQ ID NO: 136433 - DNA, 443 bp, Glycine max
  unsure (1)..(443): unsure at all n locations
  Clone ID: PAT_MRT3847_94207C.1
gacaattcaattgtggactgtggaaaccgaggatacccgtataaacgtaaactgggctttctcatatataattctacctgtcccccttatcttatatcagagnaccaccaacaattgcatcggttcagagaacccactaatatatctcatgatactcacgaagtcgcccttacatatggccgttatacatatccatcatacgtatacatctatctatgagtcgacgcgccacattcaccaacatctaacctcttactgctctgctcactgtaaccaccatgactctgatccttccatgacagtatatagcacctgactggaaactctcttgagaggatctggcatcaccaaaacagagcatcatgaattgtaactgccgacattctcaattacattcataatgagctgcatgactggagagatgagccatgcctgttccctag

SEQ ID NO: 136434 - DNA, 414 bp, Glycine max
  Clone ID: PAT_MRT3847_94208C.1
atgaaaacgtaagtaatttcttacctgagataaattctgaattcatctttccctatggtgatgaagcagaatattgcaatagttcctcttttcccaactccgcgttgaatatatcagacaaagggaaaagcaagatggtttgacgtaagattcaaatgggtcaccctcacactgcatgcagctaaaggcaaaactttttcgccgtcagtattgacttgaactctcaattatttctgttcttaattagtttcaacgtgtaaggccacaatcaagagactcagcaaggatgaaggccgctatatgtaatttcttaatttctaattatgttgtcaatttgttaataaacttgaggaacttataacacagatttattattcgagtatatatataatgctactgttgtcatgcccatat

SEQ ID NO: 136435 - DNA, 101 bp, Glycine max
  Clone ID: PAT_MRT3847_94209C.1
acgctatgttcgcgaggtcgtatgatcaaactcccaaagactttgactggactgtccatcacctcgtatgctgcaagatctgatactacctataacgctaa

SEQ ID NO: 136436 - DNA, 424 bp, Glycine max
  Clone ID: PAT_MRT3847_9420C.1
gagactgcaagactgatgtccgtcatgtgcactaatccgaacatgcatactctgtgatgaggcatggagcaatgtccattagtcatacagcttgcgcaaataaacctcgtaatcagaggtcaataatagacagcgaactacatcgctgtaagacaggagcggtaactggcgaccgaatccattcaatcacaccagcatattacgagcagtctccaatagcatacaagaaactggaccaaatatatctatggaagatcctgatccgcgccaagctcagatactccaacatgatcgtaacactaagctaactgatcgtcaatggcccgtacgaccttgtggaactacacggaatcgccgcaatgttgctatctacaggtgcagtagacaccattcacccgatcataatgctggatacatactacat

SEQ ID NO: 136437 - DNA, 296 bp, Glycine max
  Clone ID: PAT_MRT3847_94210C.1
tgataaataccgtggcacatggaattcgcagttttgtcagccgagagttgtgctgcgaaaacagcgtatatagattagccaaaatcgcagtggattgtccgagtcactataaccttgcacatgggtccccactcccacaaaaaagttgagtggctcaaaacagtggatcagtactacgtcggagccaacaacgccattccgggtgcatgtgtgcacaatgtgctggattctgtgacatcagctctcttgaaggacaacaatcccaagtttatctaggttgagatggcatttttcca

SEQ ID NO: 136438 - DNA, 421 bp, Glycine max
  Clone ID: PAT_MRT3847_94211C.1
attgcatttgagtatatctgttgtagactttgtagtatactactgaaagatggattcgaagacgaaggtagcaatacttattcctggcatgttagccatactccttttcatctcctcagaggtggcagccagggacttgaaagaggagggggttcttaaagagacaagtaaagttggtgatgccaaattagttggtggagggttgcaaggctctggtcgtggctcacctactcctgtcttccctggtcgtggcattcctggtcgtggctttcctggtcagggctttcacggtcagggcttccctggtcagggcttccctgttcaaggctttccctttcccggtcagggctaccctttggtccctggtcaaggcttttcccgtcaaggctttcccggtcaaggctttccctggtcagggctt

SEQ ID NO: 136439 - DNA, 166 bp, Glycine max
  unsure (1)..(166): unsure at all n locations
  Clone ID: PAT_MRT3847_94212C.1
acctttgtttctctattcgngaaactaacaacaacacagggggatcattaaaacagctgggggctcaaaaacaagccaactcaagtccaccttcactaggactcttgtcgctcccaagggcccttctgccaattcaccactctacctggagccaattagaaggcaa

SEQ ID NO: 136440 - DNA, 1386 bp, Glycine max
  Clone ID: PAT_MRT3847_94213C.1
ttctccggctcttcggctgatgaaaaaaaaaataactagtcccatcttctttctccaatttcctctctcacatcacgtcacatcacatataaccatcttcttctttgaaaccttaaattgtgctcaaaaatactatatagttaattaacaattaaccttctctctcactactcgattttcttaatttcttattttctcctccttcaaaatcgttgtcaatttcgcctctttctttctcaactcccttagattctctcaatcgggtcttcaaaaatgcggatgagctgcaatggatgtcgagttctgagaaaaggttgcagtgaaaattgcagcatcagaccctgtttacaatggatcaaaagcccagaatctcaagccaatgctactgtgtttcttgccaagttctatggtcgtgctggtctcatgaacctggttaacgcaggccccgaacatcttcgtccagcgatctttcgatccttgttgtacgaggcatgcggtcggatagtgaacccgatttacgggtctgtgggtttgttatggtccgggagctggcagctatgtcaagccgccgtggaaaacgttttgaaaggcgcgccgatcacgccgatcacatccgaagccgcggctaacgggcgggccccaccactcaaggcctacgacatacgccacgtgtcaaaagacgagaactcggcaaacgaaactccccaccaaagactcaagacccggtcccggttcaagcgaaccagtagcacactcattaaaccaaaggccagcaagggaaccccactgggttcgttccgtttcaaccggttgaaccggagacagcaaaccggactgcgagtcatgagtcggggctgagccacttgtcggaagcagcgatggtggagggggaaagcaaagagagcgaaagcgtggtgtcaatggaaacctctaatctagttcacgaagaaccggagtgggtcgcgaagcgagtgagcgacgaagtaggtttggaactgacgctagggttcgaaccggtatcaggtgtgcatcacttggttcctctgaagaagagaaagattgagtagaagagttttggtgactcggctgagaaagactcgtgtaagatggagctggggcttgagtacccggcttgaataaagtatggttcggcttggttttggcttaaccggctttattctctagaaacttgtaggtgagatgagaagtttagaagcacttgtttttattatgcttctttattattttttaaaacttttttcttcttttttggttaatctttgtgaattcgatgttgtacaaacatggttgatatcaaagatacgtagagataaaaagaaattagagaattacaagtatttgttgcaaatgaaatgattctggctg

SEQ ID NO: 136441 - DNA, 608 bp, Glycine max
  Clone ID: PAT_MRT3847_94214C.1
gagcataataataatgtcactacctcaacaacacaactctaatttgatcctttgacacttgacacgagtttacatggtattttgatagctagagggttggcttttcaagccactggtcaacctaacatatgattgctgaattaaagtcactaacactagctaattgcattactacaaaagcccattcatatatccacaaaaattcagcataaattacagcagtcagcagcaaaatattcacctagaagcagtataagaaggcaccattgttgatttacgacagacgagcagaacttcgagttactcgtctcgcatcaaaaatagctgtcaaagattgagatgcatcagatcctcctatatctgcatcatcagatctacgtggtctgcctcttttctgtactaaaccattaccatgttggctttctctactttcattcacctcatcctgattgttgcttccaacttcatcgtcaacaaccctattggctcttcgcctctttcgttcagatttaatcacctgtttgcttcctctaggttcattgtcatcttgagtctgctcggcctctgccttgggtactgcatatggccatgaagtgccacaacttggg

SEQ ID NO: 136442 - DNA, 266 bp, Glycine max
  Clone ID: PAT_MRT3847_94215C.1
catctatccgcatttgcagaggatggttctgttgctgataaatttcacaagtggcataatggaggtggcactctccacgagtcagcttccattgactccacagcactcgtagaggttggcgctgtagttcattcagagtctattgttggtccaaatgttcgtataggttctggaactattgttggcccttctgttacaattgctcattcaacaaacataaggtacacttcctaacaaagttattcaactttctcccaccaatatca

SEQ ID NO: 136443 - DNA, 403 bp, Glycine max
  Clone ID: PAT_MRT3847_94216C.1
cactcttttattattattattattattattattattattattattattattattattttgggtttgactactttcatgatgccagtttcaaccatgtgaagttgttgtgcgtgctgtgtttgttgttgtgtactgttttggacctttataaccaaccatgaatctcagcaacggcaagggatccacttttagttctcctctgaaagccggagattctgtctctgaccagtttccggcgggtctccgtgtgctcgtggtggatgatgactccactcgcctcatgatccttgagaggatgctccgtgcttgtgtctattaagtgactcaatgccagctagctgaggttgcattgtctctctagagagagaacaataacgggtttgatatcgttttaagcgatgtg

SEQ ID NO: 136444 - DNA, 728 bp, Glycine max
  unsure (1)..(728): unsure at all n locations
  Clone ID: PAT_MRT3847_94217C.1
gggggcgagtacggctgcgagaagacgacagaagggtaaagaacataaaatctcagggaaccagtgggaaaaaggtgaaaaggaataagtctgtgccagctgaaacaaaaaagactggaaatgattttgacatcttaaatatggtcagagaaattaatgtggataacttggggacccccactaattttgaaccaagtagcggtcatgaccattctctgattaaaaaggaactgaaggatccagaatatgcaacaggtaaaaagagaaaagctagcaaaacaacacctgttccggtgcctaaacgtaggcggtcttcctctgctcatggaaaattgagattatcaactagtatatcaaaggcatctcgaagagtttcaggagtagactcccctcaacccaaattaccgcttgatgaagaagttaaccctgatgcagatagcaaaaccatgcagagaaaaatggtcaaaggaagtgagaaagatttgttattgtcctcattaaaacgaaaagttaagggttctgacagttaccataatgatgagttgaacaaacctgatgagcatgacatgatgagtcctgatagtacacaacanagtgataagactgtaggaaaaataacaagtcttccacaggatctactaaaaaggggaaaagaaaaagtatttcaggattggctaagtgcacgacaaaggaaggtgaaattgataccgaagatctaattggctgca

SEQ ID NO: 136445 - DNA, 668 bp, Glycine max
  Clone ID: PAT_MRT3847_94218C.1
gcacgagggggagctacctgcgcgacggcgtgcgcggtgacggcacagcaacgacggatgcatccgacattgggtcacgtccgtgcttcttaggttagacccctcccccacttttttctctttctccaagctggttatggttttgtacaaggaacatgaggtacacaaatttaaacacaacaaagaaatatcatgaaatatgttttggttacatcatgagagttcttcgtttattgattggaaaagtagaggtttggttaaaaacccttgtgaccatttcttttgtataaaagaaaggaaagcaaaaaattggtttgatctatggcattttgaagtagcttattcagcgcgatggtattgcgaagaatttcggcagttgcttcctctatcccatgaattgcttcctgcactgcaccaattcggaacctttatggaatgtaaccttttatattccataatgtaatttttttacattttggattagcctttctataaggtaaaaaagatgcaagaagcaactacaaagaatttgcatatgggttctggtttagtttaagtctaggaaatgggtattttagtaatatgcaacatggtataacaaactcttttttggcttcaaatgcaaggcttgcatacttaaaaaggttaaaaaatttttaattcccttt

SEQ ID NO: 136446 - DNA, 141 bp, Glycine max
  unsure (1)..(141): unsure at all n locations
  Clone ID: PAT_MRT3847_94219C.1
cnanaataaaagancnactncatttnaagattcatgctggcttccaggcaccanaactcatncagattcgggagannnatcnccagatctgangagttntggtgcctgggaagcagaatgatctcgaaatgtagtgtntgt

SEQ ID NO: 136447 - DNA, 157 bp, Glycine max
  Clone ID: PAT_MRT3847_9421C.1
cccgggaccaactagctagttagcggccttgcttctcttttttttttgtttttataatgggccatttcaagatgacttgtgatgatttttcaaaactcgattatacctatgcgatgaattctcttttttggccggacttttgatctagtagaagcac

SEQ ID NO: 136448 - DNA, 289 bp, Glycine max
  Clone ID: PAT_MRT3847_94220C.1
ggctcgagagaaccctgatcaccccagacatacggaccgttccagccgtgcatggcaatcagtgggcacagaggcgtctgtcctctccaagagctgtttggtaaggaagtgcatgatagaacccctcgttcagtcgaagccgtggcactggacgtgcctactgccgaagaagcaagaaaggttgccgctcagaacctgagcggtcctgtcccgcccaaaccatgagatcaagcgccccatgctcattcccagatggctaaggctgattacgctctgggtcttacagacg

SEQ ID NO: 136449 - DNA, 347 bp, Glycine max
  Clone ID: PAT_MRT3847_94221C.1
aatgcctctgctgctaaggacagacttgaacgcgagagcctcacagacaccagccagcttcattctcacgaccagtacataattcacattattactatcaagaccaacaacacatgcgctataaacgacagggctatcggcattactaaagaacgagtggataataacactctaactattgcaaggtctgtgaccaaggaatacatggaagccctggctgctggtgctgatgtgagcatgattggacagtttgctgatggatcctactatgcttatcttgtaactgacaaggctattgctaccacaaagcacaatgatgatgagcagtatgtctgtgagtcccatgc

SEQ ID NO: 136450 - DNA, 237 bp, Glycine max
  Clone ID: PAT_MRT3847_94222C.1
ggcccattcaagggttcactggcgttggctccaaatttgacaaagtatttttaaaaatgataacagctttgaaatcatggtagactaaattaccccaatattcaagggtggccgatccaaattaacaattgaaaatccctccaacatcataaaactacaatgaatcgcctcacccaccgaaggaaattttcacaaacaaccgatccctccccccccccctttggggaaaaaaaataa

SEQ ID NO: 136451 - DNA, 391 bp, Glycine max
  unsure (1)..(391): unsure at all n locations
  Clone ID: PAT_MRT3847_94223C.1
tcgcgactagaactagcccagttagaacagctngagcaattgagaaaattctaacatacaatacttgatgcccttgctattagtcttgtntgnttggnttctttgttttgtgctttgttggtcttgctgggctcgtcttttttttttttcgggctgcncnnnttttgggggggggggggtcttttttttttgggggggggctttttgtttgnctggtgttgggggtgtttttttgcgggggggggnttcctttttgtttgttttgggggtgggttttctgggctttccttttggtttcgggccttggggtctgtgtggtgtcgggccggggttggngttttttgttcgtggcctgccctttggggttggcgtttgtgcttgggggtgtgtt

SEQ ID NO: 136452 - DNA, 299 bp, Glycine max
  unsure (1)..(299): unsure at all n locations
  Clone ID: PAT_MRT3847_94224C.1
gcgaggggaagcaaaaattctatacttcattctcatactcagaagctcataaagcaccaccaccaccgctacctgttcgtccaccanaagcgagagagtggctgatattgaaaatgaaatcagtcatgatcacgactatgttgttgaatttccaactgccatgaatcccaaggaacctgttcctgttgttaaaataaaacctgttagggttaaacctgccccaattgttaattatcctggtaaacaaaagaataaattgccacttttaaaaattaaaccagtttttcttgattccttgc

SEQ ID NO: 136453 - DNA, 338 bp, Glycine max
  unsure (1)..(338): unsure at all n locations
  Clone ID: PAT_MRT3847_94225C.1
tgcctctcctacgcccgcggcacggggtccgccccctccgcgtcctgctgtagcggcgtcaggaacctcaagagcgccgccagcaccgccgccgacaggcgcgccgcctgcaactgcctcaagaacgccgccaggggcgtcagcggcctcaacgccggcaacgccgccagcatcccctccaagtgcggcgtcagcatcccctacaccatcagcacctncaccgactgctccagggtgaactaaaacctagaccacgcgcgacgacggccgcctgatcgatcgaccaaccattccgccgtcgccgncggccggatcatcgatcgtcgtcatgatgatat

SEQ ID NO: 136454 - DNA, 331 bp, Glycine max
  Clone ID: PAT_MRT3847_94226C.1
gacacaggagggatcggacatcaaagtctaccccaaaagcaacaaccttattctcttaatgcacaccattcctaaccctagtcaaactgcttataaagggggcatttgccagattaatatcacattaccagatagatacccatttaaaccccccaagatgaagtttaaaaccaaagtttgggatcctaatatcagcagccaaagtaaagctatgtacctaaatatcttaaaagaccagtagagcccagcactcactctaaagactacacttctttctatgcaagcacttctctctactccacacgctaatgatcctcaagataccatagta

SEQ ID NO: 136455 - DNA, 460 bp, Glycine max
  Clone ID: PAT_MRT3847_94227C.1
atcgattccgattgcagggaagccttgtcatcacatgaatgaatgactctcctccttggttgggggggggggggaaaacaacgtaagtaacaaatgacgaggcgagccaaaaatcggataggcgcaataaccaaaacgtgcagagaccgtcataagaaagaaggcagtataacaaccatgcaaaggcacaaattataagtgtagttgtcagtgatccaatctaagcgtagtgcggtggaaacctagattaacttatggacagtagattcaaaaggtttgccacggggttagcaactgatgtaggaggacggagatgtttgcgaattatggatagttccagcaagggggtatgagcagagaacttatattgggtttagtgctcgaggtaatataagcgtatattaggagtgacagtatggttggaaccctttacagaatatttctagctaaaaaccaaagt

SEQ ID NO: 136456 - DNA, 2456 bp, Glycine max
  Clone ID: PAT_MRT3847_94228C.1
ggctagagaaaagattccacaccttctatagcttggtatcaatgcagtagacacgctgcctgtctttgagattgataagttagaattccagaggcgtccaaatcccagagatcacttgattaaaagatggggggatccgacaagaaatagtattgctcctatatgtcgccatgctcggactggaggatgggcatttagtgcttccccagagtacaagaaactggttatatcctttcatgctaatcgtctcgaggttattttggatgttgtcgaaaattttactagagtgtaataaatgccatttcctttgactatttcattgggattgtttactttgtaaacttttgacatgctggaatataatgggcaattgttgaacttctctggctgtggaaatacattgaattgtaaccatcctgtggtcatggaactaattcttgacagcctaagacactgggtcaccgaatatcatgtggatggatttcgatttgatcttgcaagtgtcctttgtcgaggaattgatggctcccccattaatgcccccccgcttattagggcaattgctaaagatgcagtattatcaagatgtaaaattattgcagagccttgggactgtggaggtctctatcttgttgggagttttccaaattgggatcggtgggctgaatggaatgggaaatatcgtgatgatgtacggaaattttgaacaaccgtaggccatatcatagtattaactttgttattgcacatgacggatttaccttgcgtgatcttgtttcatacaatttcaagcacaataaagacaatggggaaggtggaaaagacggaagcaatgataatttcagttggaattgtggtttcgaaggggaaactgatgatgctagtataagagctttgcgatcacggcaaatgaaaaacttccatttggcattaatgatatctcagggtacaccaatttttcccttcttttgttgtttgcttttaaaaaggtagctggcacgctagtaaaatgaaatggtattaaactgtctcctgtcaaaattatgttgtttggggagtaagaaattcagatggaaaaactgacgggctttgtgatatgctatgatttgatttgtgacttatttgattttttccttctgtgttgtttcattttgaaaacatgtcctagggtgattctggtgtgaaggggagctttgcaactcgtgttgctgggtcttctgatctttacagagtgaacaaccgtaggccatatcatagtattaactttgttattgcacatgacggatttaccttgcgtgatcttgtttcatacaatttcaaggtacctcttcttaattcgtttcttcaatttgttattgctcatcaaaacctagtatctttgttggttcttggttttgtagcacaataaagccaatggggaaggtggaaaagacggaagcaatgataatttcagttggaattgtggtttcgaaggggaaactgatgatgctagtataagagctttgcgatcacggcaaatgaaaaacttccatttggcattaatgatatctcagggtacaccaatgatgctaatgggggatgaatatggccatactcgctatggaaataacaatagttatgggcatgatactgccattaataattttttgtgggatcagttggatgcacggaagagcgatcacttcaggtttttctcaaaggtgataaagtaccggcatgcacatgaagtattcagtcgtgaaaattttctcaacacgaacgacataacatggcatgaggacaattgggagaatcctgacagcaaatttcttgcattcacgcttcatgacaggagcgggggagatatctatgtggcatttaattctcacgattactttgtcaaagttctgctgcccacacctccaaaaaagagaaactggttccgtgtggcggacactaatctcaaatcaccggatgactttgtccttgatggtgtccctagcgtaggaaacacgtacaatatagctccatactcctccattcttcttgaggcgaagttttgattgcagaagctgttgtataaaaacgtaaaagagaaaatactagaagacgcatacgcatatatacaaaacaaaagataactgcatctgcatgggaagtgtatttcagctacaggtcaaagggaacaaaagcggaagaggaaaaatctgaaatcttgttatttccagaatggagcatggcatggagttgggttacaagctactagaggccggtcttatgaatttggataatcatcaccactttatctatacatatatttgtaaatttgatttgagtgtaataaatgcattatctatctatattttatatattgtttacattgtaaatttggcttgaatggaatatatgttattaatttatattgaatcgtctaaatgtaatcattccctgtcatggttctaataataaaaaaaatt

SEQ ID NO: 136457 - DNA, 243 bp, Glycine max
  Clone ID: PAT_MRT3847_94229C.1
aaaaaatcaaagggggggattagttactagttcaaatttgaaacaaatttatgttttttgggaatggggtggaatttcgggatttgtttcaaaaaaaaaaaaactggatttaaaaaaaggaaggaaaaattttttttcttacttggggggccctcttgctattttggggctcagccgctaaacccgcccaatttccttttcatggagggctaccaaatgctatggaagggcccggacccgggg

SEQ ID NO: 136458 - DNA, 777 bp, Glycine max
  Clone ID: PAT_MRT3847_9422C.1
aaaaaagaataattcattatgatataaaaccagagaatgttcttcttgacatcaacttggaaccaaaggtagcagactttggcatggcaaagctttgcagcagggaaaacaatgtttcagtcaatacacactttaaaggaacaaggggatatgctgcaccggaaatgtggaagccttatccggtgactgagaagtgcgatgtttatagttttggtattcttctctttgaaatagtagggaggagaaggcattttgatgatgcctacagtgaatcacaagaatggtttccaaaatggacatggaatatgtttgagaataatgaattatttgtaatgctttcacattgtggaattgaaaacaaggacagggagatagctgagagaatgtcaaaggtggctctgtggtgtgttcagtattcaccagatgatagacctctcatgagtaatgtggtgaagatgttagagggtgaaattgaaatttctccccctccatttcccttccaaaacctgatgaatgataagccaaaatcgcctccaaatggaggccctgtagattcaggtagtggtactactacatcatgggagacggaatctttactagaatctggctctaaaatcaagaacaatgcttttcagatcgaaaaacccccttagttgtatcatatcagcacagagattgctgcaaaataaaaattccatcaaattgggtatttaaaataaaccaagagtgattttgagctttcttgaatattccaaaacaggcatattctgccccccc

SEQ ID NO: 136459 - DNA, 438 bp, Glycine max
  Clone ID: PAT_MRT3847_94230C.1
ctcgagccgaatcggctcgagggctagaagacgacagaaggggatgacaagagtagtagacacattaccagtattctactatgaaaaaatggtgggctatgcaccttctgagctttgcggatttggtctttgccagtgaaaggatcgatgtgggtcctgaaaagaggcaaatttagtcatccagcttggacaaatgagaaaactggggcaaatgaagagggtgaggatgaaggagaagcccgtgctgtgactgccattccaatacagccaagtttcccaccaacccaacaatgtcattactcagtctataacaaaccttctccttacccacccgccaattatcctcaaaaggccattcctataaaccaaccacaaagcctacctattggactttccaatgtacaaacaccaccttttaccgtaaaccaaaacaccaac

SEQ ID NO: 136460 - DNA, 585 bp, Glycine max
  Clone ID: PAT_MRT3847_94231C.1
acatcgttaaaacaagcttggttgtgtacatactgaaaaaacaaaatcttaaaacatgttcacagtccttccagggtattatggttggtattaccgttgccgggctgatctatacaaattatttggaccctggacccatgcactgtccaaatttgaattgatctgttaacaagctcgactctctatacaaatgcaaaaccgtccattgtattttggattttctcctcgcctcaataaattcccacttgctccatcacgataggtttttacaaaacatccctttccatcaaatttcctatgtataacacatgaacgaataccctacctttagaagaatccaaggactgctgtcaggactttatatgaaaagctttcttgaggacaaacaaacccctgctgatcaacgtggtcgcatttattaacttttgttcatacccaacccttccacgcttagtttggtaacaccaaaccccattattttatggcgcccctaaatgctgaaagttgttattgatactaaacactggtgatctttagcagcgtggtaggctcgggctccaattctttctggatcaatgataaact

SEQ ID NO: 136461 - DNA, 372 bp, Glycine max
  Clone ID: PAT_MRT3847_94232C.1
ccacccggccgacttacgcgacccttttcagcaagggacacgccagcgccattgatggaatctgggccgcaaaaagacagagggtcaattgtggcggattatggaaggagagtcggacgtggctcataacacaaaccagccccaagagaaagatgtgggggagggaaatttacacttggatggtaaatctcgctctacagagggaaaagttgacgcgacaaaagcacaaggtgacactggaaagaccttcacagatgacacaattggtgctggttcacattcttcagaacacggtcctgagaacgaggaacaagaacaacccacgaagaccgatgccagattgagacaaagaataaatccacagtacaatga

SEQ ID NO: 136462 - DNA, 161 bp, Glycine max
  Clone ID: PAT_MRT3847_94233C.1
agcccggaattcggctcgggttgaatagatctcggttcatatgtttctcatttttctctggtttttggcaaaattggtcggatggattcaatttctctctgtgtaaatacttcaacttttccaattctcaccttcgcatgttgattcgtagtcagattttt

SEQ ID NO: 136463 - DNA, 595 bp, Glycine max
  Clone ID: PAT_MRT3847_94234C.1
agggagaatgaattatcctttgaaaattgatttatagttaagctttagtgtagcacaatggtgacaaacatatggattgtcaactccaaatttgcaacagttggcaataaagattttgagtttgagatgtagtatttcgggatgtaaacacaattggagtgtctttaagcaaattcattccaagaaaaggaataggcctgaacacaaaagattacacaactttgtgtatgccaaatatattcaagcattggttaaaagatacaattataaagatgaaaatgatccaatttcacttagtgacattgatgaatgcaacgagtggcttgtggggtaagtggatgatgatgatgatgctgggaatgagagggtgtttgaggatgaaaatgatgatggccttccttgggatgtagtttttgaggcttcgggaatcggacaaccaatggcatatactaggcaaaggactcaaaagagaaagaaaccccttagtgttgaagatgttgcacctaagacaaaaagaggtcaagtgagaggatgtcatcccttagaggaaaaaagcaaatgatagaagatgaagataatacagtcttggaagaat

SEQ ID NO: 136464 - DNA, 511 bp, Glycine max
  Clone ID: PAT_MRT3847_94235C.1
caaaatactgtgcgggagagaacgagagaggcggagatgttttcattgaaattcctatggatcctgatggtgtatatgacggaatcatacagcgttaagccaaccggaaaagctatgggcgtacgatgttctgattgttgtctttttccccgagggtacttacttcgccaagggagctctaaggtattcgctcaacagagacagcgtacaggttgcagcgtattgtccaaggagcgtgcaccttattacatacagtcctacactctctagctcaaatccaccatcacggttgttatctacaagggcaggttctataatctcaaacgtgaccatcgtccataatgcttgctggctttggctcagcatgcatgaggtctatcggcaagggaacgatatttacttctctgtacgaattgtttccgttgattttggagtctgacaagttcctctagagcccccagtgtggcagtggattcgattgcaaaacactacccttatacggagactaccc

SEQ ID NO: 136465 - DNA, 296 bp, Glycine max
  Clone ID: PAT_MRT3847_94236C.1
ttttcttggaaagaccaaacactaggccaaagctgtcgtgacaaccacttcgttccaaggcgcatcggaatatcggggacgccacacaaggtaacgctgatccgaaggacctgtgacgctccactaacgttagaggcccttgtgctaagttgcacagctctaacagccgagcaaactccaggtggccgatcattaatcataggagagcagcccacacagatgctatgagcaaccattgtgggactggactcccaactggcgggtccatgaacaaaccaacaattacatctgctaaa

SEQ ID NO: 136466 - DNA, 425 bp, Glycine max
  Clone ID: PAT_MRT3847_94237C.1
ctgggaccctctagggcggccgctttttttttttttttttttttttttttttggaaaatttggctggatttcggagaaggctttggaaaaatttttttttaaaatttaggcgtccccaaacatgaactcaaattcaaaggggggatggccaggcaaacaagattaataactaataagagtggatgcatctattacactggttgtgaatgcagcataggagacttctccatgagaataaagataaatatatgctgtcatactggttggaacaataattgtcatccatgtagcacacttccatatttctctatgagtcagatgactttgatcaagatcaaatatttttgcataattgactccaccttgagcaaaaaaccataagttgattccccacagccaaaccatcaaagcctgaaatataaaaa

SEQ ID NO: 136467 - DNA, 235 bp, Glycine max
  Clone ID: PAT_MRT3847_94238C.1
atattatagctgaagtgatgtcgtgagaccagcccaaacggaagatacgtcaattattagttcctgcgaatgacaaatgtgtgaagcattcagcatggtaccaagcttgatcagtaccatgtggctaacacgcatcctcatggaagagttcatgatctcatagagcatggaagttctgggctgctttaagttgaagggcacttgatctttgccattctcgtcttgctagtgaagt

SEQ ID NO: 136468 - DNA, 1623 bp, Glycine max
  Clone ID: PAT_MRT3847_94239C.1
ccacgcgttcgcccacgcgtgcgcccacgcgttcgtacggctgcgagaccacatcttaacccttttccgccatgcgagcgacacaaccacacgccaataatcgcacaacacaaatcaattcagcctccaattaacgcctccttttgattcggctcggttcgattctgttgttagagtaattggaggagggggtacaaatacaagagcgtaattgtttgtgctttcatctatgtttgggggtgttaacgctcctgctaatagtccacacttacgcaagtctgggagtagacctgttgtttatgatcttgatgaacatgaggtggaaaatggcatcgaggagggtttattgcatcccgtagaggcagatgattcaaagggtggtacgcccgtgagtgctgctgcaatgatgccaacgcccattttgttgtggagattcaaggtactattgttcttcatttggggcttcatctgttgcaaggttggatgggattctgtcatgagaatgagtgcagacaagcgggatttgttcctttatgaagcatttttgtattttaatcctcttcttctagcggctttgatggtttggctgtggggaatcaacttatggttttttgctcaaggtggagtcaattatgcaaaaatatttgatcttgatcaaagtcatctgactcatagagaaatatggaagtgtgctacatggatgacaattattgttccaaccagtatgacagcatatatttatctttattctcatggagaagtctcatatgctgcatcacaaccagtgctcttatatgctgctgctgtaatggttttgatattcccctttgatatcttttatttttcatctagatatttcttcttaaggacactctggcgaatagtttttccattacaggcaatatcattcgcagattttttcttggctgatatcttaacttccatggcaaaggtcttttctgacttggagcgttcagtgtgtagaatggtccatcgacaggttgccacaattgcttggttggaagctgattctgtttgtggcagccactctgttgcaatccctttggttcttgttttgccttatcttttccgcttaaaccaatgtctccggcagtacaaagatactggagagaaaactactcttctgaatgctttgaaatattcgactgcagtgcctgtgatttttctttctgcccttaaatatcacgtcttccctgagaggtggacaaacttttataggcctctctggcttctgtcaggtgttgtgaactcatcatactccttctactgggatgtgaatcgagattgggacctaagtggcttcactcgaatattcaagtttaacaagccacatctgttctcacatatgttacatggaaggagatgggtttacttttgggtgattggaagcaatctggttttgcgttgcacgtggacatataagctgtctgcccatcttcgtcataattacctcaccttcattgctgcttggagattttctgttactacatagattaatagatgcatccactcttattagttattattcttgattgcttggctatcactctcttgaatttgagttcatgtttggtgacgcttatattttaagaaataattttt

SEQ ID NO: 136469 - DNA, 349 bp, Glycine max
  Clone ID: PAT_MRT3847_9423C.1
cgaatttctgaacgactatttaaaaaaaaatattcgaagtctccgggggatgcattcattgtcttcaattttttttttcgtgtcgttactttcatctctaactactcttcttctgcatcatttctctgttgcagcaccggttacgaaaattcgtggaaccgatttctggtgtcgagctgcgattgcatgtggaaatcgatttctggatcaatgcattggacaaacgattggagtaagacatgagtttggaggattatatcagcttacacctatgattgcctgtgtctcatctgcatatccagctctcacacatatatgccttggggacccgagtctggagagattgcgt

SEQ ID NO: 136470 - DNA, 1595 bp, Glycine max
  unsure (1)..(1595): unsure at all n locations
  Clone ID: PAT_MRT3847_94240C.1
ccccctcgccggcggcgaagcagcacagacaaacaacttttctttctttctaatattattatgccacaggtggatttggaaacgttggtttccgcctgcgccggcggttgctccgcccagaatgtagcctaaaagaatcctccaaacaaacaatatttctttctctttctctctaatattattatgccacagatggatttggaaacgctggtttccgcctgcgcccggcggttgctccgaccagaaaatcgcctgcgagcctcacgccgacgagggagaccacggcggccgccttccggactcgccgccggagtcgttttggctctccggcgacgccgagtacgactggtgggaccgcaacgccgtttacgagcgaaacgaatcgacgaaaggaaactcaattatttcctcaacgaaccttaactcaaactccaacaacaattctcagcgattctcgaagaacttgaagtccaaagccgcgattatcggcttgccgaagccgcagaaggctaccttcgccgacgccaagagccgccgcaaccatcggccgccgggaaacgccaggctattcccgaagcggagcgcgtcggtcggcggaaaattggaaggctccgtcgtcgaaccgtcgtcgccgaaggtctcgtgcatagggagagtgagatccaagcgtgacagaaatcggagattaagaacacgccagagatcaatctcctcctccacggccactgccgccaccaccggttcaatctcctccgccgtcacgaggcaaaaatcgacgcggagccagaggaagaaaaccggtttcttcgaaagcgttcgcgcgattttccggcacggtcgcagaggcaaaccggttcagaaaccggatcttccgcaggaagattcgtcgtcgtcgaagatgaagaagaagagaagttacggtaagaaagcacggggaagcaccactagcagcacaacgaatcgaaacgacgcgtcgtttgaagaatcgttttcgagtgcagcaccacctcccggtttgggttcggtgaaccggttcgcgtctgggagaaggtctgagtcgtggggagtgggtgactcggaaatccgcgtgttgcattaggatttgtttttttaccgcgccttgcaattttggtgacggctatggtgggccccactttgaatagtggttagacggtgtgacttgaacaacggtctccaaaaaaaaaaaaaatggatatagtagtgacagtactatggctttttgtgtgtgtatgaaaggttggtaaagtggtagtttcttttggaaacgtgatgaatttgctgttaaaaaaaaaaaataacaaaatatataaaatatatttctatttntcttctttctctttctgttctctctctctctttcctctttatatatataaactcttgggggggccgggtctcccattctcctatattgggtgtgatatactcccgcccatgtgcccttgtttttacactgtggtagggtagaaaacctcggtgttacccatatttatgctgtcgatcaactctcccctttttccgcgtggttgttataaaagaaggggtgcgcccctcgccttcttctctcatattgg

SEQ ID NO: 136471 - DNA, 604 bp, Glycine max
  Clone ID: PAT_MRT3847_94241C.1
ggtggacaaacttttataggcctctctggcttctggcaggtgttgtgaactcatcatactccttctactgggatgtgaatcaagattgggacctaagtggcttcactcgaatattcaagtttaacaagccacatctgttctcacatatgttacacggaaggagatgggtttacttttgggtgattggaagcaatttggttttgcgttgcacgtggacatataagctgtctgcccatcttcgtcataattacctcacggtgttcttcattgctgctttggagattttccgccgcttccagtggatatttttccgtgttgaaaatgagtggaacaagatgaattccaaatcacactctcatctttcagtcaatgagatcccagatgatgaagagaaattacttcattccattaactacagtgtataggctagataacagtatgatgcctaatgctttggcagtatcatacaaggtatatttcaaatattttgacgataggggatttccattcctttttatgattccattggcttggctacccctcggtattaaatgtcattctttattcccactaaaaaaagtttattgttaccgtgctcttaagc

SEQ ID NO: 136472 - DNA, 269 bp, Glycine max
  Clone ID: PAT_MRT3847_94242C.1
tctagatgatcaactcggggaattccaattcgacattttcaggaaattaaggaggcaaaatgttcaaaatataaattggaataattggtttcctaataaggcctacccgaaacccaacggaagtaagatccgaatccctcggggaattccaattcaacattttcattaaattccgacgcacaaatgttcatgacatgaattcgaattatttgtcttcttaataagcctatcctgaaaccatatgaaatgagatcggaattcctcggggg

SEQ ID NO: 136473 - DNA, 357 bp, Glycine max
  unsure (1)..(357): unsure at all n locations
  Clone ID: PAT_MRT3847_94243C.1
gggaagaagaaaaaagaaagaagccttttgaaaaacctttttttttttgttggggaaagctaaggaaacttttgaaaaacaaaatttggtaattttccgacttgaagctgaaaaagctcatttttaaaagaagaaatgcaaagttttttttttttgctttaaatgaccattgagagatcttaaagaaaaaaaaagattttaccattttttttttccaacaaacccgccaaacgactgcttattggacagaagaatcacctnctgagacagatcacaaaaggagcaagagattttttatggattaagacacttgagcacccatatgtagagggagcagagggattttttttttctaaa

SEQ ID NO: 136474 - DNA, 466 bp, Glycine max
  Clone ID: PAT_MRT3847_94244C.1
tttttttttttttttttttttttttttttttgtttttttttttttttttttttttttacccccaaaccccccaaattttattttgttttcaaaatccaaattactgcatggtttttgggggagcttaagggaaaatttcggggggaaaaaaaaaggggaaccgggtttgggcctttggtttttttatcccactccaacatcctatttacaagggtcctcttttgaaaaccgaaagggaaaaaaaaggggggggggggggtttttttaccggaaccctaaaacaacctggaaaaacccaagtttaccttgggaaaaaatttttaaaaaaaaaaacctgttaagccttctaaaggaaaacttctccctctcaaaaaaacaaaaggaacttaataattaaaccctgccctttggaaagaattaaaaacccccccggcaaaaacaggaaaagcaataggggcaccccccc

SEQ ID NO: 136475 - DNA, 450 bp, Glycine max
  Clone ID: PAT_MRT3847_94245C.1
tatgcctgcaatatatagcttggaggaataaattctctgttggcaatagagcattctgggcatcttcccctgattaaagataccccaacgatgattttggggatggatgtctctcacaattcacttggtcgattagatagtccatcaatagcagctgtaagactagtttggttttgtatttcttgtacctctatatttttggatttttggttatctctgcagcatatcgttctgttgtataatgttggattgtaggttgttggatctcgacattggccactgatttcaaggtatagagcgtctgtgagaatgcaggcatccaaggtggagatgattgatgctctatacaagccattggaaaatgggagtgatgatggtattatcagagaattgcttttagatttctatgattctagtaatggacgcaagccaactcaatttattgtattc

SEQ ID NO: 136476 - DNA, 523 bp, Glycine max
  Clone ID: PAT_MRT3847_94246C.1
gggtaaggaaaaggttcacatccctattgaggactttggccatgtcaactctgggaaatccactaccactggtcccctgatttacaagcttggaggcattgacaagcgtgtaattgagaggtttgagaaggaagctcctgagatgaacaagaggtctttcaagtatgcctgggtgctggacagactccaggctgaacgtgaaagaggaatcaccatcgatatcgctttgaggaagatccaaacaaccacgtattattgcacagttattgatgctcctggacctatggatttgatcaacaatgtgatcactgggacataccatgctgactgtgctgtgctgatgattgattccaccactgacgggttgtgagcctgtatttacaatgatggactgactctggaacatgctctgctgtcattcacgctttgtgtatgacagaatgatgtctgggtgaccaaattggatgctactacacctcagtatttcgaagcgcaggattatgcaaatgcaaaaggagtgacc

SEQ ID NO: 136477 - DNA, 471 bp, Glycine max
  Clone ID: PAT_MRT3847_94247C.1
ggctcgagccacaaaaacaaaaaaaaataaaaaataataaaaaaaaaaaaaattcacccgcaaagagggaaataaaataaaacaaaataaaatagcccaggactgaaaaaaaaaacagagctaaacccaaagggggggcccccccgttattgggtcccccccccccggggatatttcgggggcgggtcccgggggggggccccccttcccctttggggggccctgttgaagttggggaaaacatgggcatatactgttccttgggggaaggggtgttccgtgccaaattcccccccctattgggcggggggccaaagtacggatggcccgggggccccattgggggtgatacctacttttatttggccgggggtcctgccccctttccagggggggaaacgggcaggggctttttttttaattatccccccaccgccccgggagggggcgctggtgttttggccccccggg

SEQ ID NO: 136478 - DNA, 448 bp, Glycine max
  Clone ID: PAT_MRT3847_94248C.1
ttttccccaattttattaattgcccactaattcatccctggagcactaaaaatggcaaagttcgagtattggccccgttacggcttcgagaatcatacgctcgtcctccccgccgagcgggcgttcaatatgaccgattcgactctttggatgcaggagaattggctgagctcttttgcctttcccgcgctttatgtcgtcgctatttttggtggccaaaagttgatgagctcacaaaagccttttgcacttgaccaggcgctgttctggtggaatttgggcttggccacctttttcataatgggcgctgttcgaatgattcccgaactgttttggtcactcaacttcaactctttcatctactcaatttgcaccgctttcaatgcccaaggggtcaaccggtttttggacagagaaattcgcactgtcaaaggtttttgaactcgtc

SEQ ID NO: 136479 - DNA, 160 bp, Glycine max
  Clone ID: PAT_MRT3847_94249C.1
aacgggccgaccgacgcgtacgcccactcctccgtacaattactagaacacttcttaaaattccacattacattaaaaactagatgcaattttatagactaacacaacactctaactctccaaaacatatcaaaccaacaaaccaattacttctcattca

SEQ ID NO: 136480 - DNA, 447 bp, Glycine max
  Clone ID: PAT_MRT3847_9424C.1
gaatgaagcgcaaaactagatcatgtttgttagcggaagccacatatgccttgatactatcatgctttatttttacattattacatacactgtgcaattgcataagctatgatttaacttaacatgattatccactaagtatatatacccgcttaatatcctactacccaccctttaacattgtttaggaattcataaagaaaagcacagtaaaacattgatcagcccactgtgaatactccaaattaaaagcaaagtgaactattgactttgacaaaatcatgattgcagttaagggtcagaagtactgttggttattattcaaactcctcctggatttgggaacgttccatggaggtcacatttgatgatgacaaagcatcctttgttgttggaccaattatctgaggtaactgctctggttgagccaccatattgagttggatg

SEQ ID NO: 136481 - DNA, 270 bp, Glycine max
  Clone ID: PAT_MRT3847_94250C.1
acaggcgttggccgatgcgctcgacagcggccggctggccggttgcgcgcttgacgtcggccgtgccgcggaccagatgccgacgcccgcgctcgccgcgcatcctcgggtgatcgcgaccccgcatatcggcgggctgacgctgccggcggtcgagcatcaggcgcgggagacggttgaccagctcgccgcgttgctggccggaagggtgcccgcgggcgccgtcaacgcggcgcacgcgacgcggctcgcgcgctggcgcccggcgaa

SEQ ID NO: 136482 - DNA, 279 bp, Glycine max
  Clone ID: PAT_MRT3847_94251C.1
gaagacactaggatttacaagttggagcggggtatcctagatttcttttagaatatgaatcgaacccagcagtgctgctgaacatcctgcagggcacaggacacctcctcacatctaagcatctaaccggaactgtcaaaggtgctgaggttcacaacaggctcctgcgcaatgaggacattaaaaagaaattaaaatgtcgataacgttatacctgcgcctttgatatgtgaccttagggcggaacttcttatgtcattaaccgaactaatctttctg

SEQ ID NO: 136483 - DNA, 347 bp, Glycine max
  Clone ID: PAT_MRT3847_94252C.1
tatactgaagccaacggaaatgaaatcgtacttcactcgcgaactccaataccatattttcaagaactatcgagagcacaactgttcatatatgacttgccattatgagaacacctattacgcctattctaaatccaaacgcaatgagatcggaattactaaggaaattgcaattccacatttacaagcaatatggatgcaaaacttttcatatatgaattgatcacatatatgctcttattaatcctatactgaatccaaatgatatgagatcagaattactcgtagataccgagctcaaataatctatgtgagacatattaaattcgtaatcatatcatatctga

SEQ ID NO: 136484 - DNA, 1182 bp, Glycine max
  Clone ID: PAT_MRT3847_94253C.1
ggctcgagctcgagccgctcgagccgctcgagcggctcgagcgcctcagtagaccatggcctcattgggtgggttacaaaatctaagcggcatcaattttcttatcaaaaaagagggtccaaaagtcaatgcgaagttcgagctgaagccgccaccatatccactgaatggtttggagccggtgatgagccagcagacacttgagtttcattgggggaaacaccacaagacatatgtggaaaatctgaaaaaacaaattgttgggacagagcttgatgggaaatcactagaagagattatagtgacatcatataataagggtgacattcttccagctttcaacaatgcagcacaggtatggaaccatgacttcttctgggagtgcatgaaacctggtggtggtggaaggccatctggggatcttctaaatctgattgaaagagactttggttcattcgaaaaattccttgatgagttcaagactgctgcttcaacacagtttggttcaggatgggcatggcttgcatataaagaaagcagacttgacgtggaaaatgctgtgaaccctcttcaatctgatgaggacaagaagctagttgtggtgaagactcccaatgctgtaaacccccttgtttggaactactatcatccactccttaccattgatgtttgggagcatgcttacttcattgactttcagaaccagcgccgtgattatatatcagttttcatggataagcttgtgtcttgggatgcagtcagctcaagacttgagcaagccaaggctctaatcaaggagagagagagagaggctgagaggaaaagaagagaggaagaagagaaacggacaagcagtgaagccattcctgagatatattctgatggtgatgctgacttggatgcagaatgagtaattttatttgcaaatagatgtagtttaaaattatgtatcctttgcactagctaggtgtggtatagaggctcaatcacttcaagctgcaaattttgttttatgataaatgttgtaatttagtgtttcttagttcattcatgcattgatggcataaagtctgattttatagattgtgtttcaaaaaccaattagactttgaggttgtcagaaaaaaatttgtatttctttctgaaaggaaaaaaaaaaatcttactcagttgagcattgat

SEQ ID NO: 136485 - DNA, 356 bp, Glycine max
  Clone ID: PAT_MRT3847_94254C.1
taatgtgtttatattttctgtttgcatcttttatattatttagaatttattggctattattcagggtttacagttacacgcattttatgtgtgaagacaaaaaaacccccaagcgagaaaaaattggcgctatctgacttggaagggtcctccaacatatgctcttaaacaggattgacaacccttgacccctgggatgggaaaatggtccagatgaaaagtgtcttacacagcgactggttcggttggatcaacagcaaggactccctggaggctctttgcctaccaataacggcggggagacaccagggccagtccaataatgatgggtcatgacactagcaactcctactttc

SEQ ID NO: 136486 - DNA, 283 bp, Glycine max
  Clone ID: PAT_MRT3847_94255C.1
gaataatgatggggtatatgagtattattttatttttggaatgagggagaatttatgcaaaagagacaacaaaaaagagacaccattttgtataaggtggctaacttggaccttatacgtagggggcggatgcaaagtgatctggcgaggcaaaagggcgttttccccgtggaagataaaatgctgggcaagatagaggctggggccgagattgtgggcctggcattaacaggttcaggggatgctgcagctgggctgaacgagaaatcaataacagtaaggg

SEQ ID NO: 136487 - DNA, 248 bp, Glycine max
  Clone ID: PAT_MRT3847_94256C.1
gtctgattaatcatttttttatcgcggcaggcgcccacaaggacacaaaacccccaaacttgggtattctttaaaaacagttactaccaaaagccccggtgcagaatacggacgggcggaatgcgtctggttcacttgagaataagtggattggtgagaacctcgcttgcataaaagacacaggggatcacagctttgacagccgcaaggatactaattgactgaatacaaatgtggtgcctggaaat

SEQ ID NO: 136488 - DNA, 391 bp, Glycine max
  Clone ID: PAT_MRT3847_94257C.1
acggctgcgagagacgacagaaggggggctcagcacaaacattgtcagttgcagtaaaaaggacacgggagagacgtaaggttttcaatgctggcaactgcagggattttggaagttccaaaggaggccaacaagatatattgtgaagctcaagatatgtcaaagactgacaggaaaaaatgatagggtcaagataagtggatatttttccataatagaaaggaatatacatagtcaactgtgggacattgtgccacacagcatatttcatgatcctattcagcagttgagaccctattgattcaaagatgtctaaacgaacgttaataagtgaaatggaaccatcccgacaagacagaacctgagatacaaacttgttaaaattgacaac

SEQ ID NO: 136489 - DNA, 798 bp, Glycine max
  Clone ID: PAT_MRT3847_94258C.1
ggctcgagtggggcttaggattgacccaagtgctgtttttctgcatctatggccattcacagaatgaggagcaatttgagttttggtgttgatgtttagttaactagttgtgctaggagaaaactggtttttagcatccggctgtgtggttttcaatctttatcatctctagagtggtctaagttcgaatcttttgtgcttgaggggctgaaagcaagatgagtttatagtggagggttttaaagatctcagtggaggagcaatggaacctccaacaggattttgggcatcaatatggaactttgtttgctttctgccgtttttcgttggtctttggcttcttggcaacatcaaaggtgtcattttttgcccgttggtatgcttagtaatgacaataggcaactcagctatcatacatggtctttggcccatacattgtatttggacatattactgtgtagtgagatctaaaaaattaggacctgcactgaagtttgttacatgcacatgtatactacccttggtgttgattttatggccagtggctggcattgttgggagtgttataggtggagctgcctatggattttttgcaccaatatttgctacttttgaagctgtagagggaggaaaagagaacaaacttttccactgttttattgatggaacatggagcaccattagaaagaccttcgatattgtcaaggatgtgaaaaatgaatgctatgattcttatttctcgtttatggatgatctactacaactgaacgggaaatattatgagatcaggctgcgata

SEQ ID NO: 136490 - DNA, 506 bp, Glycine max
  Clone ID: PAT_MRT3847_94259C.1
atcaaaaccaattctaacaaacattaaatacttcgatctagtttaacggggtatcaagctattaacgaacgtagcctaatctaccactatttttacaagacatttcaagactaacattaacagactgaatcatgctacagccaacaccttatcagcttacaaggcactcctcacagtcacaaacaaatacctatgccgcaaactaccagccgttacagaataataaaaaccatccaagttcattccttgaacacacaaaagaacacgagtgtgctcgcagaggcagctaagcatacatgcaatatcatgggcacagaagcgcacaggtactataaatctctcttccggaaagccgcatcacgtctttcccatgatgactgtctatcatttgccaggtgcttctaactcagcccatttattgtcttcatgataaagaagtatgggctagcacccacaagaggagtccataattctcttctttgagtcggagttggaccttctatcaa

SEQ ID NO: 136491 - DNA, 2405 bp, Glycine max
  Clone ID: PAT_MRT3847_9425C.1
acgacagaagggggagtttttggttatctgagttctgaattctgaatcctttccccaaatcacacttgcgagcccactctagtgccccatttcatgtcatgcttgctagattcagctacacagctaagctaagatatatagatatagctcatcacacgctttcaagtttccaaggcacatagacacagacaccctcagaacctgaccaaaatacttactactatatcctactcacattttacattcccacctctttcctttcccccttaccattctcgagattctcgcttttactacattactctctccttcatactgggtttaaggtagggtttatttaactaggaagaaatttttaacaaaataatagagagataggcaaaaacgaaaagacgtggtctttctcattgatatatacatacacagatccctatggaatgaagtgggtgctccccaatcttcgcttgcgataattcattctttttgcttagtttaaagagaccagttttgtggtgttcggagggagacagatttgtgtgttgagcgcatagaacgatgagtttggttggtagaggagcaagttttgcattgtagtagttgtagcaatagccacacaacaaaagaaaacaaaaaaccaagtcttcgtcatcttcgtatgcagagatttttcttcaacatgatgatgatgattagtttatttaccaaacaatgattgccttgccttccttcgtgagatactggtagcaatttcaaaccttttcgagtaaccaaaaagaaaagaaaagaaaaaacaaaagctagaagatgaagcgcatgaatgagagtaacaacaccgatgatggaaacaatcataactggttggggttctctctctcgccccacatgaaaatggaggttacttcggcagccactgtttccgacaacaatgttccgacaaccttctacatgtccccttctcacatgtccaactccggaatgtgttacagtgtcggggaaaatggtaacttccattctcctcttaccgttatgcctctcaagtctgatgggtcacttggtatcttggaagctctcaatagatcacaaacgcaagtgatggtgccaacttcgtctccgaaattggaggacttcttaggtggtgcaactatgggaactcacgaatatgggaaccacgagagaggtttgagcctagacagcatctattataactcacaaaacgcagaggctcaacccaacagaaaccttctttcacatcccttcaggcaacaagggcatgtgaatgtcgaaacacacccttattactctgtatttgcttgtcgaggtttgtatcaggcaccgtcggaggaagaagcaacaaaggaaacgcacgtttcagtaatgcctcaaatgacaggaggaggtttgcaaaactgggtagctccaacaagggagtattcaactcatcagcagattctggagcagcaaatgaactgtggcatttggaatgagagaagtggggtatctgttggaactgtggggtgtggagagttgcaatctctaagcttatctatgagtcctggttctcagtctagttgtgtcactgctccttctggaacagattctgtggctgtggatgcaaagaagagagggcatgctaaacttggtcagaagcagcctgtgcatagaaaatctattgacacatttgggcaaagaacgtcgcagtatagaggcgtcacaaggcatagatggactggtaggtatgaagcgcatttgtgggataatagttgcaagaaggaagggcagactaggaaaggaagacaagtatatttgggaggttatgatatggaagaaaaagctgcaagagcctatgatctcgcggctcttaagtactggggaccttcaacgcacataaacttttcgatagaaaattaccaagttcaaaaaaaaaaaaaaaaaaaaaaaaaaaaaagcggctgcgttgcacacttgagaagaaaaagcagcgggttttctagaggtgcttcaatatacagaggggtcacaaggcatcaccaacatggaagatggcaagcgaggataggcagagttgctgggaacaaagacctttaccttgggacgttcagcacccaagaggaagcagcagaagcatacgatgtagcgccgatcaaatttcgcggcccaatgtcgtcaccaactttcacactttcagcaacgatggtggagagagccagggcagttgcaatctcctcgctggggtgcgggcagggcgtatgttggagatcgagcctagctccacgggcctatggcacccaagaggaagcagcagaagcatacgatgtagcggcgatcaaatttcgcggcgcaaatgcagtcacaaactttgacatttcaagatacgatgtggagagaatcatggccagtagcaatct

SEQ ID NO: 136492 - DNA, 246 bp, Glycine max
  Clone ID: PAT_MRT3847_94260C.1
cacgaacctggttgataccgaacaaaacatcagccaatatggacttaatcaagagcgcaatggacacgtaccagaagagccagggacaaggacacactggtcagcagaatccagggaacaaccaggctggaggtgactttggcgtcaccggaggcagtcgctttaatgcgcccaacagcgtcagctatggtcagttcgcatgtgacctggacggtgatggtatcatagacactgccaataacgaca

SEQ ID NO: 136493 - DNA, 252 bp, Glycine max
  unsure (1)..(252): unsure at all n locations
  Clone ID: PAT_MRT3847_94261C.1
ganccgagatgcctaangganctagagagngaggccataaaggccgngtgaggcagtatacaagccctgaggagatcgatgcccagctacaggctgagaagcagaaggccaacgaagaagatgaacaagaagaaggtggagatngggcttcgggtnaccccaaaaaggagaagaaatctctagactcagatgagagtnnagatgaagatgatggctaccagcaanagcgnaaaggtgtggaagggtcattga

SEQ ID NO: 136494 - DNA, 327 bp, Glycine max
  Clone ID: PAT_MRT3847_94262C.1
cacttaccttgcttgcttgacaaagtacacagtgctgatgctcatcaaagttcagagttggcaacagaaggcaaaggtatgaagttttgtgtgttttgtttcatctgctactgcacctttattttttattttttatttatctgtctctagattaagtttcaatagtttttttttaaaagaaattatatatgaatactttaaaataatcttgtatcaaaatttcaattattttattataaatctaaaaactattttttatatgtaaatatgtttgttttattataattttgataataacataacttcattatctaatagaatacacac

SEQ ID NO: 136495 - DNA, 467 bp, Glycine max
  Clone ID: PAT_MRT3847_94263C.1
tcgcccccgcgtccggttgaagatgcttgtcgcgctagcgaactgaagccacgccacgacatgccggagaccattgctctttgccaagagcctgcaacggagggagaaaggaaacactgcgcgagtacgttggagtccatgggtgacatcgtcgtatccgcgctcgggaagaacgtcgatgctttctcaacagagaaagaaagggaaactgactctgcaaagcttgtaccagccgaaaaatggcgcgaggaagctgcgagatgataaggctattgcctgtcatgcaacgagccacccttatgttgtgagtggctgtcatctactgccaaggagtagcgggtattcgccgccctcgaagggagaagatgggcttccgagtgaaagcagttgctgcgtgccacagaccacacgaaaagagcggaccataatcatgcggcattcaaagcgctgaatcttaagcctgggaa

SEQ ID NO: 136496 - DNA, 391 bp, Glycine max
  Clone ID: PAT_MRT3847_94264C.1
tttcgtcctttttttttttttttttttttttttttgtttttatttgttttttcttgtttgcgcttacattttttcattctattcttgttttttacttatgaaatttttcacctggacggggccctacaccgaatgaaaaggacttcgaactgcccaacgtactttgaaaaataaagcgagactttattttttagaatgttgtcaaatctaaaagattggaggttgtatgagaaaccgattgctgaattcgtcctaaacagtatttgtcaaaaaattgtcaccctctattgcaaaagaggacgcttcctacagcaaaaataatcatttcaaaatggaagctaggcggaatgacaaacagataactctctcacttgtaccaactcaacccgaa

SEQ ID NO: 136497 - DNA, 102 bp, Glycine max
  Clone ID: PAT_MRT3847_94265C.1
tctacgacgtcgcatacatctccctcgtaaggtacgtaatctcggtcttcggactgagatgaatgctcacttatagaatttacgtatctaatccatttcttt

SEQ ID NO: 136498 - DNA, 137 bp, Glycine max
  Clone ID: PAT_MRT3847_94266C.1
ggctcgagctctatggaagcacgtgcagaagacgggcttgctacagacctggcggctgcaagatgcaacatcaatgaggatcccacacgagtggcgcacttcctggcggtcactgttccgggcacaagatcagatat

SEQ ID NO: 136499 - DNA, 510 bp, Glycine max
  Clone ID: PAT_MRT3847_94267C.1
cccacgcgtccgcccacgcgtccgcccacgagaaggcccatgcaaaacagagaaaaggaaaccatgtctctcaaggttgtaacagtggtgtttttgctggcaacaatagtagtagccagtgatgacactagtttcacctataatgggttccaatcttcttatttgtaccttgatggaagtgctgagttcaccaccaatggcatgcttaagctcaccaatcacaccaagcaacaaaagggtcatgctttcttcccaagtccaatagtcttcaagaacaccacaagtggaagtgtgttttctttctccaccacttttgtgtttgccataaggtctgagtttcccaatttgagtggtcatgggattgtgttcgtggtttctccaacaaaaggggttccacattctcttccaagccagtaccttggcctctttgatgacacaaacaacggcaacaacagcaaccatatttttggggtggacttgatacaattctgaacaccgagtttggtgata

SEQ ID NO: 136500 - DNA, 305 bp, Glycine max
  Clone ID: PAT_MRT3847_94268C.1
ccggaccggaacacccgggacgacccacgcgcccggataagaacaggcgaaacaccaacgccgagaggggacaaaacagaaagggagggggggcacacaacccccaaagaaggcaggaagcccaaccaagcgaaggagagggacctcgcggccaaccgagaagcaaaaggccaaccggacccgaacaacccgaggcgcaccacaccacgccaggcccacaacccagacgcagcacgagcccaagcgcgagggaaagccggcaacgcggaagaaggcacaaagacaagcacgccagagaaggcagg

SEQ ID NO: 136501 - DNA, 670 bp, Glycine max
  Clone ID: PAT_MRT3847_94269C.1
aattggagggttcttgactcattgtggatggaattcaactatagaaagtgtttgctctggggtgccaatgataacatggcctttgtttgctgagcaatttttgaatgaaaaatgcattgttgaagttttgaagattggagtcaggataggggtcgaggtaccagtaaggtttggtgatgaaagaaaggtggggttttggtgaagaaaatacaaatcatggaagctatagagatgattatggaaggaggtgaagagggagacaagaggaggagtggagtaacagaacttggaaacattgctagaagggctctagaggaggaaggttcatctcgtttcaacatttcatgcttgattcaagatgtaatgaaacattaatcgactaaaggttagagtcatgaatacgattagtttttttcttctttctttgttacttatggtgaggtgagttaagatattggttggtgaagtaaatagattttgttgtagctagtgatttacttcatgaaatctttgttttttcctgtttgtcacagaggatttgtaacaaaaataaaaagataaccgtaccctggttaagaaaaagtaatttatattgtcacgataaggtacatgaattggaaactatcttcttcctatgtaagtactattttataaacgagaaattataatt

SEQ ID NO: 136502 - DNA, 315 bp, Glycine max
  Clone ID: PAT_MRT3847_9426C.1
ggcccggggaagtttttgggggtattaatatttgattacattggaaatttacaacgttttttgtatataccctaacttttttcaacaacatgggcaaaaaaaaaaaaaaaaaacctttttttaagtggggcctttgggtatcaaacccttttgggcaaaagggggggtaatttaacatcacaattttattttgggatcctatttaccatgtcctccaagctcataggatagcacatttaagggggcccgccattccatattttggctgtcaaaagggcattcactggataagtgggaggaaaccgatcccacctt

SEQ ID NO: 136503 - DNA, 360 bp, Glycine max
  Clone ID: PAT_MRT3847_94270C.1
gggggcaccagaaaacaattcttctttttgggtatccaaaaattgaaaaaatatgggcatgctctgttaacgggttttgcccaaaaaaaaatctgatatttgaaaccaacctgggggcatcaagagagagattattccggataacaggactcattttgcctgggatgcacgggagaacctctacatttgctgtcaatgggtattattccgggctcctcatgttttgtggaaaaggggcactccatttccagtttcccttggggagcttcccaaaatttttaaaaggtctcacccatttgtaaagtccatttgaagtttttcccccttagtacaaagttgcccttgccacaaaatcatggg

SEQ ID NO: 136504 - DNA, 439 bp, Glycine max
  Clone ID: PAT_MRT3847_94271C.1
gggcccgaattacctcaaattttcagatgttcccggaaaaattttttcaaatctaaacattttcaaatcatggcctgggataatactatcagggccctaaaaaacaaaaaggaagggaaattccccctttttccatcaaaggggggcccaattaactttttaagggaaaattaatcttccaaaaaaaaaaaggggggaaaaaaactcccctaagccctttttttcggcaatttttttttttgaaaaaattaggggataaaaaaaggggtttattttctttgggggggcccaagttaaaaccgaaattggcctttttttggggcggccaatccaccaccacggggggggggttggattcgttttggaccggcccgggttcaaaccggaggggaaaaaactgggttatgaaggggccccggtcgaaaaaaaaaacccggcc

SEQ ID NO: 136505 - DNA, 1222 bp, Glycine max
  Clone ID: PAT_MRT3847_94272C.1
tacggatgccagacaagggcagcaactgctctcgtacaatggcaggaactggtttctccacctcctgtctttcctcttctagcaacttagggacatgttggttggtattaaaaactcacaatgcaagggccgtgccagggaaactacctggaactgtaaggagaagattgtcattaataaaagcagaagtgaagtatgtgaacgctgaaaaggctaaggaacttgtggaagctgatggatatactgttcttgatgtgcgggacaaaactcagtttgtgcgagctcacataaaatcttgttctcatgtgcctctttttgttgaaaacaaagacaatgatcccggtactattataaaaaggcagctgcacaataatttttctgggttgttctttgggttaccattcactaagccaaatcctgagtttgtgcaatctgttaagagccagtttccgcctgaaagtaaactcttggttgtatgtcaggaaggactgaggtctgctgcagcagcaagtaagttagaagaagctggtttcgaaaatatagcatgcataacatctggccttcaaactgtaaaaccagggacttttgattctgtagggtctacagagttggagaatgccggcaaagctggcttggtgacaatccaaggaaaaatctcaactgtgctgggaactattcttgtttgtgcatatatattcgttaccttcttccctgaccaagcagagaagctattccaattggcccctacaggctaagcctaataaatccattgtagtctttcttgattttgttcttcctcactcattatgcatttatgcatgtagcataattaaggaacgtgtgattagaattgaggggaaaaaacatgaaatgtgaataaagtaatgtaagaattagtaatgtgagtatatggctatgatgctcaagaaaccaaatggtttatatcactggtagtattctccattaagcaagaagtatacccatttccattgtttaagataccagttatttcgaatttacgttcctagggaagtatgttgccttgtactggatggcataaccctctagattgccttcatctgtacttacaaatgactttgttgacacatttgaattttgaatcctctaatgagattgtattaaatgtataaccactccgttgtaaaaaaaaaaaaaaaaaaaaaaaaaaaaaaaaaaaaaaaaaaaaaaaaaaaaaaaaaaa

SEQ ID NO: 136506 - DNA, 416 bp, Glycine max
  Clone ID: PAT_MRT3847_94273C.1
acgaggtaaagggcttctttttccgttttcacgaaaatgttagaaaatatttgggctattggtttgcgaaaacattttttatttttgtctttatttttaaaaatgttactctgttttcactttatttcctgtatctgtttcctgtgcaagcttttgaaaacaagaaatattacaaaatttctgtaattgaaagtgaaaacaaaaacgtcctctcaaaccagatggttctaactttttttttttataattgtcaggaagtttgtttttgtgtcttgctgtattttaagcacgttccacctcagctcctcaagcaatatagcttctgcaaagttggagacatttgatttgattttattggtataagtgcgtattgaatgggtgtccaaacacactgttttggaaaataggaaatgaaa

SEQ ID NO: 136507 - DNA, 144 bp, Glycine max
  Clone ID: PAT_MRT3847_94274C.1
tttccgggcggggaaatcaaggtcaacacagagttgtggatatataggttggtttctcaacaatcaaaacgcataataagactcagtatgtacatgagataggattctgagtactataataagctactagcgaatgcatcaaag

SEQ ID NO: 136508 - DNA, 437 bp, Glycine max
  unsure (1)..(437): unsure at all n locations
  Clone ID: PAT_MRT3847_94275C.1
ggctcgagagacaacccgcacgtgacaagaaaacaagcaccaaaaaagtgttatgttaattttgancccagacaaagctttgacaatattggggaggtgagcgagcaaaaagaaaaaccacttaataccgataacactaattgtataaaattggcacacacgcgcacacacacactcgagtgcgtgcgactaatatcttgaagagattcaacatgaccaattgtaatctaaccactactctaggtgaaaataggtctcaaacttaaaaacaaaatgaccagagcaactagatggtgctccattccataaacagagtatgggaacattaagatacctatgccacactagacgcgacttggcccatagcgctggcccattcactagagttatacaggagccaggaacacctcacctcttggccgtcaaaacaattatga

SEQ ID NO: 136509 - DNA, 167 bp, Glycine max
  Clone ID: PAT_MRT3847_94276C.1
ttccacgactcgagagtggaaagtcatgtgataaagacagaagagataaagaaaattttcagagaatctatctcatctcatattctctgaaaatttgctatgtacttatgccctatttgcccctctcgtgggttaatgaatctagcaggggaagctagctaggatga

SEQ ID NO: 136510 - DNA, 744 bp, Glycine max
  Clone ID: PAT_MRT3847_94277C.1
catttttcttcgacttatccatccacctcactaccttgtcttggtagccgcacgtttcaaacacatcaacacaaacacacgaaggaccgaaaataatcaccatctcggaaaaaacacacaatacagtttgaagtttgaacaagctccaccgaacaacaaaatctttttctttctttctttgttcatgttttccaaccaggttcacgtgttccgctctccatttcgcgttctgaaatatccacgcacgaaaaccccacccaacacgcgtctcttccttcttctgcttcatgccaacaacaacaacaacacaaacgctggcacatcaccaaccttcctctgttcatcactcagtgatgactccttttccaccccaaaaccaaaccagttgggttacaatccttcagaggaactgtttggtctggaggaactcaagccaagcacggctaattctcatacaccagaaccaaggtcctggtttggtccaaatggacagtatatcagagagctaccttgtccaagttgccggggaaggggttataccccttgtacaggtacagagtgtggaatagaaagatcaaggccagactgtccaaaatgttatggaaagtgctctggtgattggcacctatgggaggaatcaattgatgaacaaccatgggaggttctatctccacttaaagtacggaagatgatgaagttgacgcgaaattcggcaaaaagaatgctgcggcaccgtcaccgaag

SEQ ID NO: 136511 - DNA, 234 bp, Glycine max
  unsure (1)..(234): unsure at all n locations
  Clone ID: PAT_MRT3847_94278C.1
acgcccgcaggaactcgtccgnattcccgcgtcgacccacgcgtccgcacacaagctgttgcaccttctctaaatcggaccagttttccgccaggtttcatctttggcaccgcctcctccgcctaccagtacgaaggtgctgcaaatgaaggaggcagaggaccaagtacatgggatgcctattctcataaatatccagaaaaaatatcggatagaagcaatggagatgtaggg

SEQ ID NO: 136512 - DNA, 300 bp, Glycine max
  Clone ID: PAT_MRT3847_94279C.1
tttgacactgcctgtgccaattatgctgagtattgcaggcactatgtctggtgtgtggaagccaccggaagcatggaacttgcacctaatgttttggctccgacaacccaaggctatgacaagagccatccggagatacctcttacttgtgctcgcatcatggtgcccactgcagatgtatatggtgctcaatctccttatcaacttgtgcatgctggtactactcaagctcttcttgaagcaattatcaaacacgccgatatggaaagccgactgcaaaaaacgcaggaggccttgcct

SEQ ID NO: 136513 - DNA, 459 bp, Glycine max
  Clone ID: PAT_MRT3847_9427C.1
acggctgcgagaagacgacagaagggggcctattcacttacgccatagagatagagaaatcgagataaccagatatctatttgattcattaatggataaagggaagacggtaagagatggaacgatgcaccatctcacgatggcttatgcgcttatgcttacgagctcaagcgtgacggagctatctaactggatgaatgtaccgatatcggaaaaacataaagagttagggacatatgatcatgacagcctctatgtgtactactgtctggctggctaaaaggaactatataacaagtggacaggtggtcttggcgttgcagatgatctaaggatctatcaagaaagctgaagacatggccccacatctctacattagtacaggagcagttgcgaaacacatacagacatagtggcacaacatcagcataggagcgatggatacatagagacgtaagg

SEQ ID NO: 136514 - DNA, 360 bp, Glycine max
  Clone ID: PAT_MRT3847_94280C.1
tttctatatatcatcataattatttaaacaaatatgttaaacaaataattattttttatttcttagaataaataatttgtcatttttttatcaataaatatattagttgttaatttgttaaattttgttagtgagataaatttaaattcatgatctttccatttaatccatttaaccattaagtcaattttatatataacttcaaataatcaatcaattaactatacacaaaaagttttacattaacatctaattactaaaactgtcatgtgtaatatactttttttttcttatacaattatcttaaaaatcatatatccttataatctctaattagttgttactgtaaattcttaaact

SEQ ID NO: 136515 - DNA, 293 bp, Glycine max
  Clone ID: PAT_MRT3847_94281C.1
ctcttactcttcttcttgccgcagatattcatacgggagacgaagatttttaccatgctgtttggccaaacactcccattccacttcattgccaaatcttttaaaacctctccctacaactgttcatatcaatgatcaccctatgcaaaaccataaaacacagcacccaaaaaccttcttctataaataatacctttatccagacctaactttcaacgtacaattcaacaagccttcctttcaacatccatttcgacatcctacatggtttaaggcaatttaaaacactacta

SEQ ID NO: 136516 - DNA, 250 bp, Glycine max
  Clone ID: PAT_MRT3847_94282C.1
cttcgaggccaaatttctgctttgtcctttattttgggatcttgagatttagaaagactgatactgaaaagattaaacattcaacagggcatgagggaggactgggacaatagaggccccatagatgaaaaaactgaaagagggtttgcttctttgtttcttacaaaagtccacatcgagtagtgtatttagtgaaactgaactacttatgctataaaatgaaagaatttttctgatactaaaaaaaaaa

SEQ ID NO: 136517 - DNA, 304 bp, Glycine max
  Clone ID: PAT_MRT3847_94283C.1
attttcattgggttaccactttcaatggcgaaggccctctcagaaattagaatggctagccaagcaaacactaaatcaggtcacgattgcacagctaaagatgccaggggaaatgaagttaatctcgccgattacaaaggagagggacttctttttgtcaatggtggctgacaaagcgggttggctaattcctactacacagagcttaatcaattggatcagagacacaaagggaaaggacttgagattttgggattcccggggcaaacgtttgggggctgaggagccaccaactaatgaagat

SEQ ID NO: 136518 - DNA, 563 bp, Glycine max
  unsure (1)..(563): unsure at all n locations
  Clone ID: PAT_MRT3847_94284C.1
tcgagccgtcgagtccgaatcggcttcgagtgccgtnntctccagcctagnntcattttatagcttgtnnatggattggataacgcttgaaggagagtgtttaatgggacccggctcttggcgagatgttctcttcnnaaaagttnntagaagagccttaaccnnatagagaggggtgtagacccaactgtaccaatatntnntcctttcctcaagaaccctcaaagcnntatgccatctnncaagtccttgacccaataagagaattggcccgatgccttaacttnngtatcttcaagccanntccactgnntccaaactcnntagagctgctaagaacaaagtgaagaaatatcntnngaatgctatgannattgaagnncagataatagananngaagtggaaagaaggggaagttgtttgattattgtnntagcaagtcaaaggtcaataccnnttcttttgatgctcnnccaaaattaaaggaccacnnntactattcgtggggatgtcgcagcgttggaaatataatattcccctatgttgttatgctcatggggct

SEQ ID NO: 136519 - DNA, 715 bp, Glycine max
  unsure (1)..(715): unsure at all n locations
  Clone ID: PAT_MRT3847_94285C.1
ttcccgggtcgacccacgcgtccgncggctgtgagaagagacagagggggaatgaaagctgtagtagctatgtacaccaatttcaaattgggagaatagaaagaagaagcttcttgttcatctcctgctctgtcattttgtacgcctattgataattggcatatgatgcataaatcatctcagaaagtttcaatgtcattctttggtcccttgtataggaacataaacaaagggtacaacttggttttctttataattggcgtatcactaggaatagctgcagttttatgccttaaactatctttcagtttacaggcctttctgtatcctgtgattaccccaatcacaacaattcttccaccaccattatcatcatcacgactattatctgtgactgaacaaccacctagtactgaattaaagacatctctgatgcacagcatgaccgaccaagagttgttcctgaaagcatcatccatggtttcaggtactcaagattttactcagcaagccgttccaaaagtggccttcatgttcttggctagaggtccactacccctggcacccttgtgggagaaattcttcaaagaccatgatggattntactccatttacctgcaccaacatccttgttacagtgaaaccatgcctgaagattctgtattttatggaagaaaattcctagcgagctagtggtctggggccaccatcattg

SEQ ID NO: 136520 - DNA, 292 bp, Glycine max
  unsure (1)..(292): unsure at all n locations
  Clone ID: PAT_MRT3847_94286C.1
ccacgccgtccgaaaaaaaaaaaaaaaaaggaaaaaacgatataaaagagaaaacaaaataaaaaaacaaaaaacaagcaaaaaaaataaaaaaaaataaaaagacacgtaaatacaattaactggcacgtcgtttttacggcgctcccccggcgcgcgncgcgggaacgagagagactcgcggaataaccactgcctgttacctcagcgttccctcgcctttggagttacactcccccttttgctcggctcggcgctattagctgaaaaggcctcggactcgatccgccct

SEQ ID NO: 136521 - DNA, 498 bp, Glycine max
  Clone ID: PAT_MRT3847_94287C.1
aaaaaaggcaaaaaggggggccaaaaatttggcccaaaaaaggggggggaccccttcattaccccaaccaaagggaagggggaaggcccccatccttttttaggggggaaacgaaaaaaaaaaaagacggcccttaaaaagggtgaggaatttaaaaaaaaaaaaaaaaaaaaggggtaaaaaccgggggccgaaccaggggggcaatcaaaggaaactggtttgggggggcaaacccccccccgggaccaaccccgggagggggcccccccctaggggacccccctggggaaaaaccccttaagggaaaaaaatctttatccggaaaaccagctacaacggaacgggtacttttgggcccgggcctgggggggccatccacaagggggcggccaaaaaaaaaaaaacggcccgggaacaaaaatttgggtccggaccccttggagggggacaaaacaaagcgcccagttgtttgaccccaaaacccgggcgattttt

SEQ ID NO: 136522 - DNA, 380 bp, Glycine max
  Clone ID: PAT_MRT3847_94288C.1
agctgttggtttaagcaaaggggggacaaatgcgtagggcataaaaaactaaactctggaaatcatgccggggaaaaaaaaaacaaaaaaaaagatcgaaaaaattggcgggaagaaaatccaagctaaaaggacaaataacacgcaccaaaatctaacgccagggaataaagggggggacttgaggcccttcttaccacccgtttctgcccggggctcccggaagggcgccccccgggggcgggaacatgcccgggggaacccccacgagcccttaagaacacccccgaggcaaacaaccccccccacggaccccaaaaaagggggggggaaaacaatggggccggccgttcactccgccggttacaaacagccgggct

SEQ ID NO: 136523 - DNA, 747 bp, Glycine max
  Clone ID: PAT_MRT3847_94289C.1
cccggctaaaaacggggctcgggtttggctgggaacgttcgaaacggctgagaacgccgcgctggcttacgaccgagccgcgtaccgaatgcgcggctcgcgcgctttgttgaatttcccgctccggattaattcaggcgagcccgaaccggttcgggtcacggcaaagaggtattcgccggagccgtcgtcttcttcgtcggatagtgcgtcgtcgacgaagaggcggaaaaaggtggtggggtccacggtgacggctcaaagtggattgagaaaggagcaagtgggaagtcaagtggcacacagtgcacacgtggagagcagttgttggtcaactaatgcgtgatgctgacgtgggatgcattgcggttttgctctttttttttaaaaaaacactctgtgtggcagtggctagaagttattataaaaattagaaataataacccaaaaaggggtggacagtgccacagtgtaaaaaatggatagggattctgactcattactcaagtgggggagtgataaaatttaaagaaaaaaaaaaaaaaaagagaccagttggaaaaagttattagggtggaggttttgtttggatttgtgaatacaattacatgatttgttattttttggttcaatatttatgaaatttgtgaattgtgttgcatgaattgaagcctccactctttatccccccaactacacacgctgatccaaatgaaccatcaatcaactaactataaggcgataatt

SEQ ID NO: 136524 - DNA, 173 bp, Glycine max
  Clone ID: PAT_MRT3847_9428C.1
ttcactactcataaccattcgaatcatttagacaattttcaaaattggccatcctaacccaatctactttttacactacttgatctcatcaataaacatatattcaagttcttgctatcacttcatattaactatcaaaaatgatcatttatataactctatcacatttcata

SEQ ID NO: 136525 - DNA, 449 bp, Glycine max
  Clone ID: PAT_MRT3847_94290C.1
aaggacccaaaagatttcaataataacctgccgcccctcaaaaaagggggggaatcccacctcaaaagggtggggggggaataatttctggtcatttatatgaaggcgagttttaccaaaataacaaaaaaaaccccgcaatttttttactagggtcatttatgcaatttccaggcttttaaaaagcccctaaaaatatttttttgccatgaattccactaccaaatcctaacttggtaatgttccaaaaacaattcccttccactaatggaaaaaaaccaaaacaaccttagtttttatggggaaaaaggggggggataaccaaaatcctaatccacatttacagggtcttttggacctattattcctttttcctggggaatcatcccttcctccacttctccattggaagaggaaggagaacccccctgttttccatcacccggggg

SEQ ID NO: 136526 - DNA, 622 bp, Glycine max
  Clone ID: PAT_MRT3847_94291C.1
agacgaaacttaaaacattctcattataaaagaccgctttgaacagacccaacaccgggatgactaaaccctgtagttacatctgtgacctctggtggccgtcgcatatacataaacgagcacaataaatatttgcattgcaccaatacctaattgaaaccccgggccgaatagtttttgccaaataggcctccggagagtatgccttggctatacatcaagggcaatttgatgcgggactgatctacttgtaaaaacagtgttctggacagtggccttgttgcaaaatccaactagaacagcctacttataacctggtccaacacacactggggaatgatgattggcccccaaagctaggactgccctccgctctacctaataatggctgagagaacactggtcctggccaataggaaaatctgcctttataaaccttacttgacgctggcaccctgagcagagtgaaacggaggcttaaaaccccctgtgcttcccagtaatacctagcgtgtccaaaaggtattactatcctgagcttgaaaccgagcacacacatttttaccctaatctgctacagacaccccagcgcactttctgtttcttgggaaaggcaaaaatt

SEQ ID NO: 136527 - DNA, 593 bp, Glycine max
  Clone ID: PAT_MRT3847_94292C.1
aaccgcgcacgcgtcgtagactcgttctggggatcaagaaaccatagacaccgtctggtccaccagcttatgctggacaacctccccccccaccggctacttttgtcagctgcagggtggggatctggaaacaaacaattcaggcggcgaatactattgctgctccttgtccaggcatttttttggggtagatctaacagcacattcacggatgaagagaaggcacgcgcaactcatggcttttctaatgccaacctacttgtacaaggaggactctggatatgtgcacagaggaatgcttcccaacggcgaggaggtggcagtaaagcaagagaaggctgcaagcgggcaaggcgagcgcgaattccaagctgaaggtgaaataaccatcacgcgtccatcacaagcatcatgtttctttgaccggatactgcatgactgggacccagaggctgatcgttcatgaatttgttgccagcaacacatcggagttccattagcatggaaaagggagacctaccgtggattgtcccaccagactaacaagcgcttgacgatctgctaagggactggcacatcttcgtgaagactga

SEQ ID NO: 136528 - DNA, 828 bp, Glycine max
  Clone ID: PAT_MRT3847_94293C.1
cctgcacggcgatctagaccgttctctggaacaactccattaggcaaacttgattgctcactatttgactgaggccaataattatcaagggaaccatttgctgggggtgtaagcacaccatccagactactttgggatccattctcctttaccagttggtcctgcacagggactccaacatgttcatgtgcatctggtggataagcatccccctttgtttcaaaatcttgaaggttgggtaccactccttccaagtataacccaaatgattttttttgttgctctgcaagttgcttctgtttggcttcattttctatccttcgttgaaattccaaagtttcttcaagctttttctcctcctcttctaactcaatcttacgtctaaattcctcttcaagttgttccaagtcatcatcattcatagaaacaacctcattatctgggaagtcactttcaggtgcaactagattggaatcaggagttgttgatcctagtgagaagtgtgcatgaccacttgtgaccttaaaatctcttgcttttctgagatctttattcttcttcttatcttttgtttgctcgacatgtcttgcactctcacttccccccttaacagccttcttggaatcaagagcaagttcagccaaaagtgcttcacttacagcatcagacttctctctcgcatccttctcaggcaaatcttccaaaagagcccttaggtacaacttcactagaggcactaatattgctcgataatcattagcagaaataggcccaagcttgaattccagttgctgcatctctgtaacacttcttattattggggcatca

SEQ ID NO: 136529 - DNA, 483 bp, Glycine max
  Clone ID: PAT_MRT3847_94294C.1
gctgtcccagcactctggccaccaggagggccagattccccagaaactaccttttgcccaaagaacatgctcagggtttggggcatttcctcccacagaccctgactgcttctgttacctcagggccttggtacctggatactgccacagaattggggcgggtgggggaggggcctatttttaaataaaataactgttcaaagttgggggttttttaaaaaattaagaaaaaggaaagctattctgtattgcaccttttcacaatttaatacattttcttacattttcctgtgattttcgaaactaaaccattgtgtgtcctgtagtgtcctggttgagctgccgctcagcagcttcctcggggggatttggaacacctgtgtctgtcgccgcactgcctgtgggaggggcccagagggctgctgggactggcgtctgtacacacttgtttggccttttctgtagttgatgctgtaaactcta

SEQ ID NO: 136530 - DNA, 251 bp, Glycine max
  Clone ID: PAT_MRT3847_94295C.1
cttaattaacttgcatctgaaaattcatgctatatatgttcatatatgacatggtcttctcatccatgtattctagatttccaaaattcagaatttcagacttattggtgattcaataatattcatattttaggcatattttaggttacaagatcctgttcaagaaacaatgatgtagtggagcccatgataaagccccagtggtatgtcaattgcaatgatttggcaaaacaaaatctagtaattgatcg

SEQ ID NO: 136531 - DNA, 782 bp, Glycine max
  Clone ID: PAT_MRT3847_94296C.1
tctctatacttctttgaaaagcagaagagcaaggtcatggttatatgggacagggtggttcagaagtttcattgcagactatggagtgcctttcatggtggtcgtgtggacagctctatcattcatagtaccaagtaaagtgccttctggagttccaagaaggctcacttctcctcttgcttgggaatctacatctttacatcattggacagtaatcaaagatatgggggaggtttctctggcatatatttttgctgcttttattcccgccttaatgatagcggggctttacttctttgaccatagtgttgcttcccagatggcacagcagaaggaattcaatctcaggaaaccttctgcataccactatgacatattgttgctaggattaacgacattgctttgcggattaattggcttacccccttcaaatggagttctgcctcaatcctacatgcacaacaagagcctggctgctctcaagaaacagttgatccgaagaaagatggttaaaagtgccaaggaaagcataaggcagaaagctagcaagtctgaaatatatgggaagatgcaagcagtgtttatagaaatggatagctgtccagataatcatttagtggtcaaagagttagaggatttgaaagaggttgtcctaaacggtgaagacaaagggctcaacaataagagtacctttgatcctgagaaacacattgatgcatatttgcctgtcagagtcaaggagcagagagtgagcaatctttacaatcactgctagtggagca

SEQ ID NO: 136532 - DNA, 437 bp, Glycine max
  Clone ID: PAT_MRT3847_94297C.1
ggctcgaggaaccctatcgccgagtgctcactagccctccatgcccacatattcgacgggcgctagtgtcagcaccgtacaagagctctctgagtcctccgctgctctctccgtcgcctgaacgagctgcgctgcctgcaccggatgcgcggtgaaggccgtcacacgcctccccggcatccgtgtagccatcgactgcgtcctgaacatcctagctcacgtcctgttcgacccttccttcgttgacgtggggactattcgcgaggcagttgaggactctaggttcgatgccgagtgactcacagacgacgtcgaatacgatcaagtatgcctgatccagatcataggaatgagctgcagatcctgctcctacagtctggaatccgtagtgcaagcccttgacggagtacttgaaacccgcgtgggccttgccaccg

SEQ ID NO: 136533 - DNA, 212 bp, Glycine max
  Clone ID: PAT_MRT3847_94298C.1
ggatggccatcttccaagatttcatgcccacgatcactctcctacatagtggctatacctgttaactcatacgcttgccgaccggggaggttcatatcaaggtttctacaatttccgagaccggatctgacgataatctaaccttagcgtttatggtgacgaagaggctccatcttcatttcgcagacaccttaggatcggttggaacctat

SEQ ID NO: 136534 - DNA, 454 bp, Glycine max
  Clone ID: PAT_MRT3847_94299C.1
ctcgagccgttccaaggtaaaatcctgataatggtttaaagaactattggggtttctttgcacaagtaattagtaagagaatatgaagaatttgctgatattaaatggtttataatttccacgcaaaatacatactagtgttctcttgatttcattgtgcacattgatgattgattgtaacatttttcagtgtacggtttctatcaatatttaattgaaaccatgacaagtaaccgtttttacctattctggtgttataaatggtttgtgattagtgtacaattactaagaggattgtggttgggagaaggtggcttggaacagaaaataagcttctgtggaatttcttttcattgcaggatgttggacagtctattcttgaaagttattcaagagtgatggagagcttggcctttaacataatggccaggatagatgatgtcctatatgtaga

SEQ ID NO: 136535 - DNA, 1238 bp, Glycine max
  Clone ID: PAT_MRT3847_9429C.1
agaagacgacagaagggggagtggcaatggaatccagaaacttgggcagactgggcatagcatccacgctttaatcgaccactgcttcttctacttttctttcctcaaggttttggcgggagtcgtcgtcgtcattgaatcagccatgcctcggtactactgtgactactgcgacacctatttgacccacgattctccatctgttagaaagcagcacaatgcaggttacaaacacaaggcaaatgtgaggacttactaccagcaatttgaagaacaacaaacacaaagtttaattgatcaaaggatcaaagaacatcttgggcaagctgctgcatttcagcaagttggtgtggcttataatcatctaatggttcagaggcctaaccttcctcctgtattgccaccaccaagattgcctattcctggaaatgcacaaatacctggaggccaaccactaatgcaagggatgagaccacctgtctttcctagacctcctggtgcaccaggatatgtttctgcacataccatgcctccgatgttacctccacctggtgctccccaggttccaggtcaactaaataccataccaaggcccccttcattagctccccctccaacggcttcctggaagcactgctacaccagcttccaatggtgctccctctatggtatcatcagcaatgtatcaagccaatcctccggcaccttcatctggaagttatgataactacaatacgagtgctcaagcacctgagggtaatcactgacctggttgaactgttcactctgcataattctatctccattggagtcttatgactagagctatttgtgctctccctaccagctgttcatcaaatgaggactctccatttgtgatcatatatagagtaatcattggtatgtagcatgtccagcacttgaatgcaagaaattttttattagttatgtttttggtcctagatgaaagatttatattgaagtgccaattactagaactttttttacatgacttgttcatgataggttctattatgcaattaatttgtttttaatctgagttttattagtgataaatgtagttgtattgtagatttggggaaaaaatcataatttcatatcatgtattattggatctgaattccctaaaagcattgcatgttgaatcaacaacataaagtgcattgatgccttgatttcaaattatgtattttgatattgttgtaacttttttatta

SEQ ID NO: 136536 - DNA, 136 bp, Glycine max
  unsure (1)..(136): unsure at all n locations
  Clone ID: PAT_MRT3847_942C.1
atgacggggttgagtcgccgctgtggtagcctcactggcttagctccatcctctaanaaactagcaacaacttctcctcttgctcagcagcaagggagggcagagatgatcacttggaattnttccttgtcctcca

SEQ ID NO: 136537 - DNA, 131 bp, Glycine max
  Clone ID: PAT_MRT3847_94300C.1
ttacagcttccatttgaactcttgttatgttgaggttattgtattttagaattggagctaagaaccagtgcaggaaagaatgtacaccatgacgttatgttctcctctatcattttgtttttaaaagtagt

SEQ ID NO: 136538 - DNA, 631 bp, Glycine max
  unsure (1)..(631): unsure at all n locations
  Clone ID: PAT_MRT3847_94301C.1
ggaatagaaatattaatagttctcattcctcaaactagctatagctgtcggggctcgccaaattctaagttctttcaaatatacacaatcaatttatatgctatattaaagatagccagcatcaaccaaaaaacaaaaatacaaaaaagagggggtacacttcttattatgggaatcaatgaattaaaactgatcaaaatccaaagaaggtacctgctgttgctgaacactgaaaccactaccagaccccacctgcgaagaagactcatgagcttgggttgtttgatctggttttacttgctcgggattctgatcaggtggagtattattcaagtggctttcagattgtagaacgagttttccttgattgtagagactgctcaactgatgaaagtagggacaagttcttgagtcaagggacctcttcttagtaatatccttggttttcctgaagtacttgtttatgttctcccacttctctttgcacctctttgcactcctcttgtatctcaactccgacatcccttgtgagattctctcccacagagggaccttgttgttcccttccttctcctcattgnntgtgttgttgttcacactggtgcacctcaggtttatgagtgccaacact

SEQ ID NO: 136539 - DNA, 253 bp, Glycine max
  Clone ID: PAT_MRT3847_94302C.1
gcggacttatgtgtggcaccgtctgcgaagtaggaaagggcgtcgtgggctgcatctacgggcactgtgaacaggagtcggaggacaatcgctgctttttcagggatacctaaaaggaaaacgtttggtcaagatattgcagcagggatggggatgacgaaggttggcttgattttcacgcagactatgactcaagataagaaggatcacactcagacgatcagcgaggcgacttaagctggggagtaccatg

SEQ ID NO: 136540 - DNA, 409 bp, Glycine max
  Clone ID: PAT_MRT3847_94303C.1
tacggctgcgagaagacgacagaaggggactgcaaacagagtcaacaacaacacacacaaacacaacgtcatgaaatcgccgcagcacaaaaacaaaacaccaaaatcccgatcagatcctcaacaacaacaaaaatccaattccctggccgtcaccgttttccgaaatgcacccgattattattcctgcgacccccttattccgttaagcacgtgcctccccgcctcgggcacgtgcgccgccagaatgcgcctactgccgcatgcagatcaggctctcagtctccgccgctccccccgcttcaattctgctccggccgccgtggatggcggcaatgcgggctccagaaagcggaagcggtcgccggaaacggcggcgacggcagcggaggaggagacatctcggaga

SEQ ID NO: 136541 - DNA, 259 bp, Glycine max
  Clone ID: PAT_MRT3847_94304C.1
cttaaatggacttgtcgatccaaggttgcagacaaattacaatcttcacgagatgatccgaatgactacttgtgctgcaacttgtgtgcgctattcagccaggctccggcctcgaatgagccaggtttgcttgagaattactgaatctgaagatttgtgtgagaataaaccttgtgtttcattttatatttgaattgctttggctgtttgtctctgacaagggtatgcagtaaaatgcctccctgaaagacatttgcct

SEQ ID NO: 136542 - DNA, 733 bp, Glycine max
  unsure (1)..(733): unsure at all n locations
  Clone ID: PAT_MRT3847_94305C.1
cggtccgnattcccggtcgaccccgcgtccgcctatctctttcaacattattatcaagttgttatttagtattgtgaccaatggtcatcattttaacaggagacagctgtcccgcaacacttccattgcccttggctgccttcacaagccttaccataacctacaaagttgataaggcatcagagcgttttcttaatttggctggccaaacattggagagcctcgctgcaggttgtccatggccttgcatgccaattgtagcttccttgtggaccctaaaggcaaaacgttggagtgacttccttatcttctcagcatctagaactgtcttcctccacaacagtgatgcagcagttcaacttctaaagagctgcttcacagctacccttggcatgaatagctctcctatctcaagcagtggtggtgttggagccctacttggacatggatttaagtaccacttatgtggagggctttgccctgttgctccaggaattctctatttacgtgcgtatgggtcaatcagagatgttgttttcttgacggaagaaattgtttccatcttgatgcactctgtgagggaaattgtatgcagtggcctgccaagggatcgattggataagttgaaagcanacatagatggcataaaatatggacagggtttccctcgctgcttcaatgactcgggtgaagcttgctgctgccctcgggcccttttatatggatatcagga

SEQ ID NO: 136543 - DNA, 297 bp, Glycine max
  unsure (1)..(297): unsure at all n locations
  Clone ID: PAT_MRT3847_94306C.1
gaanacccgggccgaccgacgcgtaccgcaaaaccttaagtatcggatcaggttttagtaattttgttggtagaacctttcgtcgtagggtgtcaattattatggctgaatcacaccatcaaattcctactgccttcgatccttttgctgatgcaaatgctaatgactcgtttgctgtgtcaaaggagtatgtgcatattcgcgtacagcaacaaaatttaatgaaaagcctgacaactcttcagggattgaaaaaagaattcaactataacaagatacttaaatattttaacaaag

SEQ ID NO: 136544 - DNA, 2534 bp, Glycine max
  Clone ID: PAT_MRT3847_94307C.1
cctatctctttcaacattattatcaagttgttatttagtattgtgaccaatggtcatcattttaagtttttgggtcatgtgtaccgaatatctcatggacactaacatcaggggaagaaatatctgcccatgctgtgttttcaaatgcatttattcttcttttaaagctatggagatttaaccggcctccacttgaatatggaattggagatgtacccacagttggttctcaattaactcctgaatacttactattagtacgtaattcccacttaatgtcagctggtaacatccacaaagatcgcaacaggaggagactctcagaaatagcaagtttatcatcgcctaattctgtatttgttgactcctttccaaaattacggctgcggtaggtgaagtttttgggtcatgtgtaccgaatatctcatggacactaacatcaggggaagaaatatctgcccatgctgtgttttcaaatgcatttattcttcttttaaagctatggagatttaaccgacctcctcttgaatatggaattggagatgtacccactgttggttctcaattaactcccgaatacttactattagtacgtaattcccacttaatgtcagctggtaacatccacaaagatcgcaacaggaggagactctcagaaatagcaagtttatcatcgccaaattctgtatttgttgactcctttccaaaattaaaagtgtggtatcggcagcatcaagcatgtatagcttcaacactctccggtcttgtccatggaaccccatttcatcagattgttgaggggcttcttaacatgatgttcacaaagattaatagaggaagccagacaactattacatctggaagcagtagctcttctggacctgcaaatgaagatacctctatagggccaaagttgcctgcttgggatattcttgaagctattccctttgtagttgatgctgctcttacagcctgtgctcatggaagactgtctccacgtgagttggcaacagggcttaaagatttagctgattttcttcctgcatctctggcaaccataataagttacttctctgctgaagtaactaggggagtttggaaacctgtatttatgaatggaacagattggcctagccccggtgcaaatctactgaacgttgagggacagatcaggaaaattttggctgcaactggtgtagatgtgccaagccttgcttcaggagacagctgtcccgcgatacttccattgcccttggctgccttcacaagccttaccataacctacaaagttgataagacatcagagcgttttcttaatttggctggccaaacattggagagccttgctgcaggttgtccatggccttgcatgccaattgtagcttccttgtggaccctaaaggcaaaacgttggagtgacttattcggctcgagtgagaagataaggaagtcactccacaacagtgatgcagtagttcaacttataaaaagctgcttcacggctacccttggcatgaatagctctcctatctcaagcagtggtggtgttggagcccttcttggacaaggatttaagtatcatttatgtggagggctttgccctgttgctccaggaattctctatttacgtgcgtatcggtcaatcagagatattgttttcttgacagaagaaattgtttccatcttgatgcactctgtgagggaaatagtatgcagtggcctgccaagggagcgattggaaaagttgaaagcaaccaaagacggcataaaatatggacaggcttcacttgctgcatcaatgactcgggtgaagcttgccgctgccctcggggcctctttagtatggatatcaggaggcttgatgttggttcaattattaataaaagaaactttgccatcctggtttatatctgttcacagattagaccaggaagaaaagtctggtggaatggttgcaatgcttggtggatatgcacttgcttactttgcagttctttgtggtgcttttgcttggggggttgattcatcatcatcagcttcaaagcgacgtccgaaggttttaggtacccacatggagtttctggcaagtgcacttgatggtaagatatcactaggatgtgattcagctacttggcgtgcctatgtgtcaggttttgtgagcttgatggtaggttgcacacctaactgggtgctggaagttgatgtgcacgtgttgaagagactgagcaatgggttgaggcagttgaacgaagaggagcttgctcttgctttgttgggtgttggtggagtaggtacaatggatgctgcagctgagctcatcatagacactgaaatataaacattttcactattctgagggcacctttgccttttaggatgagttgtacattagttaattttcatgtttataaagttgtgcagcatgttgaattaacagttttgttaaaagtaccacgtattagaatggaaaattttgtatctataacgttcatctaatgttagtaacttggtatatccatccccaaatcgatgca

SEQ ID NO: 136545 - DNA, 512 bp, Glycine max
  Clone ID: PAT_MRT3847_94308C.1
cggtcgcgtgggtttgataactaaaaggaaaataagattactctgtttttatataagctataaattgttttcataaactatcatgaacttattaaaatgagctaaaaaccacttatggacatggttaaattattttcgtaacttctctcaaacacatatataaaggtttatatgccataagataaatccaaataaattgtttatgaactcccaaactggccgtttattttagaagagtcaaatcaataattgataatatgttcatataatgtgatattcttaaaaagaataatattgatgatataagatacaaaaattagttgtgcgaaagtgaaataacctgactattctatttatattagaggataattttatttcaacatctcctttgaatagtcagattggtctctatacgtaacctttaatgggtaaacttaagttttgtaccaaaatagcatttaaaatttggcaattttttttttttgtatttcaggctaattatatggcatgat

SEQ ID NO: 136546 - DNA, 469 bp, Glycine max
  Clone ID: PAT_MRT3847_94309C.1
aaaaaatcaaacagttggtagctaaagagaaaaagtcaaatccaaaaacttgtgcgtctagtaagaagaaggaacttgatgttgttgagaaggctcgtttgttcaagaaatccaaaactaggttgaagcttccacaaccaaagacaaccttgaagttgcattttaattctatcttagaatgaggaaactgaagaacctcttaagaggaaaagagtggacgaagtggaagccactactgaatctgatgaacctaaagctccattagctcaagtggtgcaacaaccaaagaggatcaaaaccttggagtcattgaacatctcattcccttaactcaaatttgaaaaaaaaatcatcccaatgttgttcgagaacctataaagtggaaggaataccttggaatcattcaacgtctcattccattaacttcggtggaagccatcaaggagaaagagcttaataaggagactac

SEQ ID NO: 136547 - DNA, 440 bp, Glycine max
  Clone ID: PAT_MRT3847_9430C.1
caagatttgaaattttgataaaccgcgatcataggtggccgcaccttaaagccggaaacagaagctatcgtcactcgattccaagaatctctcaatttcttcctacttttatgtgtacgatttcttaagggaaagaaaatcactctctgtgctggccacagacttggagaatcattttcttttgcattgttagtttatgtgccgaacactctcctattagatataggacttcgtgtcagatgataaacttcttctgactctttttcagctctcatgtttaatttcaagatcaagctggtgaaatcttggattagagctcccactctcctatgtggtataggacttcgtgggtagactcttctatgtctctgctttctttcactgtctacttctcactgatccgcattgccgatcaaagtgggcttatttgaaaaacactt

SEQ ID NO: 136548 - DNA, 358 bp, Glycine max
  Clone ID: PAT_MRT3847_94310C.1
gcaaatgatgagtacagtgtcaccttcacaaattgaaaaaatgctaaaaatttgtgaagtcaacattttgctcaatctaatgtgttgataatgttaagttgtccataacaacattatttacttaaaattagcattttagtaataccagaaaaattcaaaaaataaattgaaaggaaaagtgaatgccattttcatccttttaattaatctcaacgatgaaaaaataaatgatccatgtcagttttcaaacagatagaaacttgtgatgatgactttctctaattccatgtcagtttgtttactcatggattttttttttttctcttttcactgtattctttgtgcagttttaacttgc

SEQ ID NO: 136549 - DNA, 325 bp, Glycine max
  Clone ID: PAT_MRT3847_94311C.1
aaaagggattttgggaaaattataaacccccatcaaaagggttttttttgagtatccctcggctcaaaaaatttccaaacaagggatattccccattatttcctctcaactttggggattacccaaaaatttcaagctgggaattaccccccccgccatatttgcaagccttttcccacttatttgaagtttttatttccctatgtccaatgggctctaatttccccgcaaaattgattcccaaagcctttggttatcaattttcacctttggcctggaatctaaactaaggggcccccaacaccagaatccccccaattttcag

SEQ ID NO: 136550 - DNA, 214 bp, Glycine max
  Clone ID: PAT_MRT3847_94312C.1
cagcaatcaaatctgtaacctttcagaactccggaccccctttgaaatttcaacatgaccggctatcccagccagcctccgagctacagctacagcgcgccatggctgaagcaagtctaaagtgtccctacggcatcgcaatcatatggggactatccgccatcgtaataatacgtggctcatccgacaccacgacgctacggagcggtgacta

SEQ ID NO: 136551 - DNA, 725 bp, Glycine max
  Clone ID: PAT_MRT3847_94313C.1
cagatggtggatctgctgcatggaattgctttcgcggaaagtgtgggtggaaaggcagtacacaggcctttgctggtagcaattctgcaagaactcaactagccccggttaaaaagataagaaaaatcacagaggaggaattggaactagaaccactttgtgatgagctggtcacgtacttttctgagcgcttgatttcaaaacagactctggagagaaatggtgtgaagcagagaaaatatgatgatcagattgtgattgcattcccgtatcatcaaaatggagggcttattagttgcaagtatcgagacatcaacaaaatgttttggcaggaagcaaatactgaaaagatcttttatggattagatgacattgtgggacataatgacatcatcattgtcgaaggtgaaatggacaagctggcaatggaagaagctggcttcttcaattgtgtcagtgttcctgatggtgcacctccatcagtctcctcaaaggaggagttgccacctcatgataagaaagaaacagcttccataaactctcctcattatgtttctcaatgtttatattgataggcaactcgggttatacttgccactgatggggatccacctggtcaagccttggctgaggagcttgcacgccgcattggaaaagaaaaagctggcgggtcaggtggcctagaaaaataaggtcagaccattgcaaagatgcaaatgaggttc

SEQ ID NO: 136552 - DNA, 740 bp, Glycine max
  Clone ID: PAT_MRT3847_94314C.1
ccggggatcctctacagtcgacctgcaggcatgccctctgtgcatccttgcacctcagtgataactacgactgtgaagtcccacatcaatgtgactacgaagttcagtatgcagatcattactcatcccttggtgtacttctccatgatgtctacactctcaactttacaaatggagtccaactcaaattttgtatggcacttgggttagtatcatcatatctcaaaccattttttactttcttacttttatgctttatattttcagacttcagaaatatcatttgatcatgacaacaaccttgcatactcattatgagtgtaccacatgtattttgttgagaagtaaaagttctttagtttatcttatttctttttttaattcctttttgcaggtgtggatatgatcagatttttccagatccttctcaccacccattagatggaatgcttggccttggcaggggaaaaaccagcttgacatcacagctgaatagtcagggtttggtaagaaatgtgattgggcactgtttgagtgcacaaggaggagggtatatcttctttggagatgtgtatgattcttttagactaacttggactccaatgtcatccagagattagtaagtagtcattttacattttccatatgtattggcaattctttctcttgactgagatctcattttgttatctggctcagcaacattatcaatcgaggggcagctgaactccttttggagg

SEQ ID NO: 136553 - DNA, 596 bp, Glycine max
  unsure (1)..(596): unsure at all n locations
  Clone ID: PAT_MRT3847_94315C.1
ggcggccgccccgnnnnnnnnnnnnngaaagngnaacccagccggaaaaccanancacccaaaaagcaacagcgggagggggagagctatttgttttttttccttgaatttgacaagttttattgactctactttgtgcaccactcatcgttttctttcgctcaaacttcattctgtgactcgcggggattattttgcaacatataattatgctttcccatcggtgcatatacttatgacctcttaaccattcactgcttgtttaaatattatacactctgccttcttgctaaggatttcaaagtgggttgagataccatgtgccgcccttcaatatgctctctataccaaatcccttacttactcatacactacatccgaacatgccccggtttaatactttcgctattacatctgttgacccccaaatggatttccacccagtcctccaatggcaactcgtgcaaatttttggctctttccatattatccaaccatttgacttgtcactataaaaacttgaatcaagacttttgactctcccttttccacattggactttgccattataacctcttcagttgcccttgcaccca

SEQ ID NO: 136554 - DNA, 462 bp, Glycine max
  Clone ID: PAT_MRT3847_94316C.1
tgcatgtacggctgcgagaagacgacagaaggggaaatgactgccacatactccactttcatattccctttagtcacaccaagatcaacttttcagttgagaggtttatccttgattactaagagcaccaagccaacccatatgagcaaaaacaccaagtagtgttttcactcacactgtttaacaaattcttgctccaatggagagcatattttttcagtctctctcccttgcaaagattccaaagtctcaaacttcacctctgctgaattcaccactcttgtttcactccaatgcaacctcagttgctttcagttcggtaccctatcatcaccaccatttgctcaagtgctttctgtttagatccaaagcaaacgaaaagcagaacctggtgggagttttacgtgcctctgaggctgcaacaaccccaacaaccaatgatgcagaaagatggcttcttga

SEQ ID NO: 136555 - DNA, 475 bp, Glycine max
  unsure (1)..(475): unsure at all n locations
  Clone ID: PAT_MRT3847_94317C.1
cctacgcgtccgaaccaaacatggaaaatccgagtgattttattgctggctttgaattgcccacatcaagcacagacgattatttgaagctaaaacgtttggagaataaactagcaaatttggacgttatggaggagtatctgaagatggacatgcgaaatttggagaaggaattggtgcacgcacaggaagaagtgaagcgcattcaatccgttccgctaatcatcggccaattcctcgaagccgtcgattacgaccacgccatcgttggttccactactggctcgaattactacgtgcgtgtgctgtccattttggaccgtgaactgctgaaggccggctgcagcgtgtccttgcacaagtacagcaacgcgctggtcgacgtccttccgcccgagtccgactcgtccattcaaatgctgcgagcggacgaaaagccggacgttgtctactcagacatncgcgggctcgacac

SEQ ID NO: 136556 - DNA, 310 bp, Glycine max
  unsure (1)..(310): unsure at all n locations
  Clone ID: PAT_MRT3847_94318C.1
cangcacgcgtacgtaaagctcggaattcggctcgagnagnanntacagcntccacaagagagaancattcaagcgcctaatanggctnaagtcnacngannntganccccnagtggtangngtggcatacggataaagttnggagagtgaaggcctacagtnactganancnnnactcgcnagantcncnnnannngtanacnnnngagngtngagctangaagcgccacatngaaggantcnnncnggnaaagtngaggctgctnnagcangacctatgggagccacacctctggaatctgngaggcc

SEQ ID NO: 136557 - DNA, 436 bp, Glycine max
  Clone ID: PAT_MRT3847_94319C.1
aacccccgaagtcgggagggtcagcatgatgaagaccgtctccaagcatgcctcctccggaatcccatggtacggtccaaaccgcgtcaagtacttgggcccattctctggcgagcccgcgtcctacctcactggcgagttcccatgtgactacgggtgggacactgctgtgctatcggccgacccataaaccttggccagaaaccgtgagctccaagtgatccactcctggtgggccatgctatgggccttggtctgcgtcttacccggactgttgtgcgctaaccgggtcaagtgtggagaagctgtgtgggtgaaggccggttcctagatgtttagcgatggtgggcgtgaactctttggcaacccaagcgttgttcacgcccatagctatctctgcatgtgggccactcaagttatactaatgggtgctgtg

SEQ ID NO: 136558 - DNA, 443 bp, Glycine max
  Clone ID: PAT_MRT3847_9431C.1
ctgataaaccgtgatcacaggatgccgcaccttaaaaccggtaacaaatgcaatcgttacttgatttcaagaatcttccaatttcttcctacttcttggtgtacgatttctttagggaaagaaaatgactctctgagctggccacagacttcgcgaatcattttcttttccactcttatgttatttgctgaacactctcctatttgatataggacttcgcgtcagatataaactttttttgtttctttctcagttctttgcttaatttcaagttcaagctggtgaaatctcggattagagctgccactctactatttggtataagactccgcggagagacatttttattaatgtcctttgtttcactctcttgttcttactgatcccgattgccgttcatagtggttttattttaaaaacactttggcgttgaagcaaatgtt

SEQ ID NO: 136559 - DNA, 536 bp, Glycine max
  Clone ID: PAT_MRT3847_94320C.1
ggctcgagaagaaatatctgatgatttgtgtatttgatgagctttgatattaatttgttagggaacattctataaccatttttttcttcatgtaatcattgtatagaagagccccataggagtagagcaaactaaatgaagatataaaataagaaagactagaaactgaaaatgaactttggctttgttattaaatcaaagaaatctactcaagatacctttggctagccttcttagcataattagagtaccagcccaaccctggtaacaggattaagttatttcttgaattcttgcatatttctctctactaacggaacccaattggaataatctttcatatttttccattttcttcctcttttgtttctccccattgtggcttcaatcccattctctaacattaacatatcgttccatgtcaactgtacttgaacatgctaatttgaagctaaaactgcacgtttgctgcagtttgtgctcatgtcttgaaatttctgacatgaatgggcattcttctatttaaaccgaacaaa

SEQ ID NO: 136560 - DNA, 795 bp, Glycine max
  Clone ID: PAT_MRT3847_94321C.1
ggctcgagtgagtctgctttgataaatccttcagctttagtgcccgatccatggcaagtatctagtgagacattaaccagcattgaccctgaagcagtggctgttgaacctgcactagttccatgtgttcaggcttatgttgattcagttcttgatctagcttcacactttatcacccggttgcggcgttatgcaagtttctgccgtacattggcaagtcatgctgtaactgcagggacgtgaaataaccgaaatgtggtagctagtcctgcccaatgttctgcaactcctgcaacaagtcagggaggtcaaaatgggacaaccagttctagtggaagcacacagatgcaagcttgggtacaaggggccattgccaagattagtagcactactgacggagtgtccaacccggttcctaacccccccatcagtggtccttcgtcctttatgcccataagcattaatacaggaactttccctggaacacctgcagttcgacttattggggactgtcatttcctccatagattatgccaactgttgctcttctgttttttctttcgacgagcacaacaaccccgctatgcgggaggtgtacagagaactgctgacacaaatctacaaaaacctcaacctaatgcttctgtccctggcaaggtggaggaaattgcaaaaccagtgtcaactgtggttaggccagatgatggtcaggctggtcgagttagtcaacttgtgcctgcatcaaaaggaggtgaagaaccatctccagtgcgttcaagaatcggtactggaaat

SEQ ID NO: 136561 - DNA, 2071 bp, Glycine max
  Clone ID: PAT_MRT3847_94322C.1
cctccacacgcttcggacccagcggctcgatccttaaccatcactggcacataggtgtttattgctacacactagaagaattatggaagctctcaagaccctcttcttagccatttttgttgtcttggcttccgcattgtattcagccaatgccaaaatccaggagcatgaatttgttattcaagcaacgccagtgaagaggctgtgcaacacccacagcaccatcacagtgaatggacaattccctggtccaacattggaagtcaacaatggtgacactttggtcgtcaaagtcactaacaaagctcgttacaatgtgactattcactggcatggaattcggcaaatgagaacaggatgggctgatggaccagaatttgtgactcagtgccctattcgtcctggagaaagttacacctatcgttttaccattcaaggacaagaaggaacactttggtggcatgctcatagctcatggctaagagccactgtttatggtgctttaatcattcaccccagggagggagaggcgtatcctttcactaagccaaagcgcgagactccaattcttcttggggagtggtgggacgcaaacccgatcgatgttgtgagacaagcttcacaaacaggagcagcacctaatatttctgatgcatacaccatcaatggtcaacctggcgatctttacaagtgttctagccaaggcaccaccattgttccaatagattctggcgagacaaacctcctaagagtgatcaatgcagcactgaaccaacccttgttcttcacagtggccaaccacaagctcacagtggttggtgccgatgcctcctaccttaaacccttcaccaccaacgtcatcatgctgggaccaggccaaaccaccgatgtcctcatccaaggtgaccaacctcccacacgctactacatggccgcacgtgcctaccaatccgcccaaaacgcaccgtttgacaacaccactaccaccgccattctcgaatataaatccgcaccgtgccccgccaagggttcttcgatcaaacccgttatgccgtctctcccagcctacaacgacaccaacacagtcactgctttcagcaaaagcttcagaagccccagaaaagttgaagtccccgcagaaattgatgacaatcttttcttcaccattggccttggactcaacaattgcccgaaaaatttcaatgcgaaccaatgccagggaccgaatggaacgcgtttcactgccagcatgaacaatgtctcgtttgttctcccaaacaacgtttcaatcttgcaggctcatcaccttggtgtgcaaggagtgttcaccactgattttcctacgcaacctcctgtcaagtttgattacactggtaatgtgagtcgttctctgtggcaacctgttcaagggaccaaagtgaccaagttgaagtttggatcgagggtgcagattgtgttgcaggatactagcattgtgacccctgagaaccaccccattcaccttcatgggtatgatttctacatcgtggctgaggggtttgggaattttgatccgaacaaagatacttccaagttcaaccttgttgatccacctatgaggaacactgtggctgtgccagtgaatggatgggcagttatcagatttgttgctgacaacccaggagcttggatcatgcattgtcacttggatgttcacatcggatggggtttggccgctgtgcttttggtggataatggagtaggcctgttgcaatccatagagccccctcctgaggatctgcctctatgttaggataatcaaaatcaaaattattgaatttgttaccatagttcagttccaaaattttcctagttcattgttgtttccctgtattggaggtatttctccttttgcttttattttgttgttcttttcatatagagataacccgggtttaaaagagacggtggtgtgtgatttcaacacggaatgccatcttatatggtcacaagcccgattgattaaattgatgtcggttgttttcttccccttgtggttaatgttattaagaaagatgattttgactaaaaa

SEQ ID NO: 136562 - DNA, 374 bp, Glycine max
  Clone ID: PAT_MRT3847_94323C.1
cgggaaagtactaaattcattaaaacatgattgcaaatggtacacattcatagtttttaaaggcccgttaagggacccgggatgcacacttacccaaggttcaggaacattttaaaaaaaaagaccagattataaactttcacatacttaagtccacaccaaaaaggggacctgaaaaccattctaaaactcaaaacccaccacaaaaacccaaaacaggggaaaaagaaaactttttttaaatgttttagacaaaaaaattccttccatcctccatttgtttccaagaaaaaatcaacctttgttggtttgggggaatactttcccaacgcgtccgcccacgcttccgcccaccgttccgccaactcttccgg

SEQ ID NO: 136563 - DNA, 933 bp, Glycine max
  Clone ID: PAT_MRT3847_94324C.1
accaggttgaacccagcaaattgatgaatgtcacgacagtagatcgatttttaaaatatcatgttcagggatttgagaaaatgtttaaagagaaattcccagcatgttctattgcagcgaagaggcatatagataaaacaacaacaatacttgatgtgcatggagtgaattgggtgagctttagcaaagttgcacatgatcttgttatgcgcatgcaaaaaattgatggtgataactaccctgagacattaaaccagatgttcattgttaatgctggtagtgggttcaagctactatggaatactgcaaaaggtttttcttgatccaaggaccacagccaaaatacatgttttaggcaacaagtttcagagcagactgttagagattattgactcaagccaacttccagatttcctcggcggcagttgttcgtgcccaaatgatggagggtgtcttagatctaataagggaccttggaatgatcctgacattttgaaactgttgcattctagggaagcaatgaagctaacaaagtttggaagttcttctgttgctgatggggttgatgtgaagtcatacgccagcaaggttacaagcactggaatatctgaacctctatcagcgtcagaagtaagattgaatccttcagccttcgtacaatctgttccttcaagtgaaaaaaaaaggatgagagactctgcacctaccggcaatgtacttgagcctttaaatgctgccagagaagttgttggggatgttgattcaataagtgattcaaacaacaatcatctcagaagactacaggagaagccaattccatatatcataagtattttggctcaaatcgcagtcaaattgttaacttgtatttatgtagtatttgcggcattggggaaatgttttgtggttcgctctgtaaacaaccaaccaaaa

SEQ ID NO: 136564 - DNA, 1009 bp, Glycine max
  Clone ID: PAT_MRT3847_94326C.1
ttaagaaaacagctagtgaaatagacactttggttgcagggtggctggaggaacacaaaagaaaaagagctacgagtacaaatggaaaggaagaacaggatgtcatgggtgttatgctgaatgttctgcaggatcttaaggtttctggttatgattcagacaccatcatcaaggctacttgcctgaatctgattttggcaggaggagacagcatcatggtggctctaacatgggcgctatctctgctactaaacaatgaaattgaacttaaaaaagctcaagatgaattggacactcaaattgggaaggacaggaaggtggaagaatctgacataaagaagttagcgtacctccaagccatcgtgaaggaaactatgcgcctgtatccaccaagtcctgtaatcacccttcgtgcagccatggaagagtgcacattttcatgtggctatcacattccagccggcacgcatttaatggtgaatgcttggaagatccacagggatggtcgtgtttggagtgaacctaatgatttcaagcctgagaggttcttgacaatccacaaagatgttgatgtaaagggtcagaactatgagctcgtcccttttagttctggaaggcgagcatgccctggggcctcgctcgctctgcgtgtggtgcacttgaccttggctagactcttacattctttcgatgttgcttctccttcaaatcaagttgttgacatgacagagagctttggactcacaaatttaaaagcaaccccgcttgaagttctcctaactccacgtctagacaccaaattttatgaggactatattatattaagctaggttcctcaaaatatgtgcaggaagcctctgggttctgaaatcggggttttccatcttgtaataacaataacatgtttaattaagttgcactgtattatgatagctggtgcaatttgtagtattctgataattccgaacttgtgtaaaagataaatgaatcgaatgagtaaccttcacgg

SEQ ID NO: 136565 - DNA, 391 bp, Glycine max
  Clone ID: PAT_MRT3847_94327C.1
ttcgtccgtttttaatgaatattaaacgttacggaaattgtggcctatccgaaaaacatcaaccataaaaaacgaaacttggcttattgtcatagagagagaattctttgctttgcttttccgatgcttcttcgtccgtgcccttctctttcgctcctttcaaatgcgctttctttcggtgcccatttgccttttcatcagcaaaagacaatatccacttcggtctttgccctcacagagtttgaccctcgaattatgaccgagcccatcgtttctactgaggagttgaataaaccacttccgccaaatgacaagcgcaattatatgtatctgaaaccaatgttatttgaccaaactcctgttttctacagggatgaaattgtgcacaaaa

SEQ ID NO: 136566 - DNA, 664 bp, Glycine max
  unsure (1)..(664): unsure at all n locations
  Clone ID: PAT_MRT3847_94328C.1
aaattatattttttttatttgttatatatttttaattttttataattattttttccccggcaaaaaaggaaaaaaaaaggcaaaaaccaaataaaaccaaaaaaaaaaatatttatttaaaaagctggcgaaatagaaactattgaatccccaaacgttaaatgcaaaaaaaaaacacaaaaacgaatggcggaagggtacaacaccataaatccaacgcgggaactgcggggacccccatttttactagaagagggaacaaaaaacttgccagaaacctagcgcaaacttttttcggtaaaaaaaatgtttttctaaaaaaaatccacaaaaaaaaaaggcgggaactaaataggggaatccctggggggccaaaaaggagcgcccaaccacaaataagagcccgccaaacccgcgccatataaagagaaaaaaattggccccccggttttttataaaatataccacccacccccgggaaaagggtttttttctttaagagccccaagcgttggtttttttttttaaaaaaaaaaaaaaaccgccaaaanttgggagaaaaaccctttaaaaaattttttttttttttaaaaaagagagattaaaaaaggggggggcatttcaaaccctttaggtttttcgcccccccccgggagagcgaaaa

SEQ ID NO: 136567 - DNA, 302 bp, Glycine max
  Clone ID: PAT_MRT3847_94329C.1
gcgaaaacaacgtcaacctcctcgaccgcgtctctgcctggtgggcccgcgtcggctccaacatgctcgaccgctccgacgccgtctccaaggtcgcattcgaatccgtggggcgcctcttccaggaattcagctccacacgcatgagcaagcttgccggcgataagctcgtcgattccgaaaactccctcgcgatccgctccaactgggtctcctccatggtggacttcgtgtggcggaagcgaccgcgccctcatggcgcgctccttgatcctccccgtcgagaatttccgcgccaccgt

SEQ ID NO: 136568 - DNA, 561 bp, Glycine max
  Clone ID: PAT_MRT3847_9432C.1
gggatcgtaccttaaaaccggaaacataagctatcgttacttgatttcaagaatcttccaatttctacctacttcttggagtacgatttcttaagggaaagaaaattactctctgcgctggccacagactttgtgaataattttctttaccactcttagtttatttgctgaacactctcctatttgatataggactacgctgtagattttaaactttttctgtttctttctcagttctctgcttaatttcaagttcaagctgttgaaattcttggataagtgctcccactctcctatctggtattggacttcgagggtagacttttctatatctgtcctttctttcactctctttttctcactgatccgtattgccgttctaagtggtcttatttgaataacacttgggctttggtgcaaatgtttgcttctataattttctctggtacaacaggctcactgagaaacaatttttacttgctgagattctgacatcttgtatgttatttttcaattgcacttcattttaagaaatctctacctattacatttgggggctct

SEQ ID NO: 136569 - DNA, 258 bp, Glycine max
  unsure (1)..(258): unsure at all n locations
  Clone ID: PAT_MRT3847_94330C.1
cactgagagaagaaggaaaaactaaccaacaccacagcccctaatttccttttcctcacaatagcggctaacctcganaaccgtcaatacggcacccacataaacgccgtcgttcgtgcttgcggcccagacttcaatacccctctcccgtcggatttcgatctagactcatccagcgacgacgaagagaaaacgacgacgctcgtatctcaaggtgttgatacaaaaagctaacgcggcaaacgaagcgtcgctgtt

SEQ ID NO: 136570 - DNA, 249 bp, Glycine max
  Clone ID: PAT_MRT3847_94331C.1
ctcacaggaagatgaaaaaaagaatggagaacctccctcagttaaacgctacattcttttttaaagctttaaaaatactcagggtttttataaacgaagtagaacgactattataaatccaccacttgacagacacaaacaacaatcactaactacataccccaagataatattcaaagcacaagacgcctcacattaaaataaaagatcgaaacaatcaaccatatcaaaccacatataaaccaccta

SEQ ID NO: 136571 - DNA, 1079 bp, Glycine max
  Clone ID: PAT_MRT3847_94332C.1
gatgaggttcaaactactggaaagcactcttcaggattgattgttttgcccctgtattcaggactttcacgcgctgaacaggagttagtgttctctcaagcccctcgaggaaagagaaaagtgatcatttctactaatatagcagaaacatcactgacgttggaaggaattgtctatgttgttgacagtggattctctaaacagcggttctacaatccgatttctgatattgaaaatctggttgtggcaccaatctctagagcttcggctcgagctcgagccgattgggctcgaggtaaatcttcacagtggtgtcacaagaactatgtaaactaccttgccatgagaaaggttcttgaagttagagaacaactcagaagaattgcaaagaggataggcttagtcttaaaatcttgcgaaagtaatatgcaggtggtcagaaaagcagtcactgctggctttttgctaatgcgtgccatctagaggcatacagtcataacgggatgtataagacgttaagaggataacaggaagtttatattcatccatcatcagtgctattcagagtaaatccaaagtgggttatttacaattctcttgtatcaactgatcgacaatacatgcgtaatgtcataaccatagatccctcatgtctattggaggctgctcctcacttctaccagctacagcaatctaatcatcttcttcgctgatttgccgtaggctaattaactgtgtctgaggcgaaggaaagaaattgttaatatatgacaaatttcagttcaagtagagcagattaaccagtggtgttaggactctcctgtgtgtaaattgcatactttgtcaaggctattggaagtcttttttaatcctctgtagtcctcagggctgttattgtctcaatgcctttatagttgttaattattgtttaaggataaggaacgaaaaggtttatttttttattaagaaattgcaaactctaaaatgttttcttgtttgtaatctttgaaggcaatcgtgggctatggcttttggaaagtgtaatgctttattctttaaatgtgatgggcatattttat

SEQ ID NO: 136572 - DNA, 1275 bp, Glycine max
  Clone ID: PAT_MRT3847_94333C.1
atatagcagaaacatcacggacgtaggaaagaatagtctatgtaggtgacaaattcggctctaaacagaggttctacaatccgatttctgatattgaaaatctggttgtggcaccaatctctagagcttctgctagacaaagagctggtagggctggacgagttcgaccaggaaagtgttacaggctatatacagaagaatattttcttaaccacatgtctaatgaggggattccagagatacagagatcaagtatggtctcctgcgttatccagttaaaggccttggggattgataatatcttgggctttgactggccagcgtctccatctactgaagcaatgatccgagcattagaaattctctactcacttagggttttggatgatgatgctaagctgacttcaccaactggatttcaagttgcagagattccacttgatccgatggtctcaaaaatgataattgctttcagtcaacttgggtgttcagaggagataatcaccattgctgctgttctttccgtccagtctatctggatctcagggaaagggatacaaaaggaatcagatgaagcgaaattgagatttgctgctgcggagggtgaccatgtaacgttccttaatgtatataaggggtttcatcagtctggtaaatcttcacagtggtgtcacaagaactatgtaaactaccatgccttgagtcaggtgcttgaagttagagaacaactcaaaagaattgccaagaggataggcttagtcttaaaatcttgcgaaagtgatatgcaggtggtcagaaaagcagtcactgctggctttttcgctaatgcatgccatctagaggaatacagtcataacgggatgtataagacgttaagaggatcacaggaagtttatattcatccatcatcagtgctattcagagtaaatccaaagtgggttatttacaattctcttgtatcaactgatcgacaatacatgcgtaatgtcataaccatagatccctcatgtctattggaggctgctcctcacttttaccagctccagcaatctaatcatctttttcgctgattccccgtaggctaattaactgtgtctgaggcgaaggaaagtcattgttaatatatgacaaatttcagttcaagtagagcagattaaccagtggtgttaggcctctcgtttgtttgtaaattgcatactttgtcaaggctattggaagtcttttttttaaaaaaaaaaaaaaaaaaaaaaaaaaaaaaaaaaaaaaaaagaaaac

SEQ ID NO: 136573 - DNA, 164 bp, Glycine max
  Clone ID: PAT_MRT3847_94334C.1
agtggtcatctggacggtgcaccgacacatgctgcaggagctgtacatggtgcatgctgcgtacaatgctagaacgcacgttcgctgacgcacatctccttgaaggttcagattcctacacgtctgcgtaatagcatctcctatcgcatctagagtatgcccat

SEQ ID NO: 136574 - DNA, 483 bp, Glycine max
  Clone ID: PAT_MRT3847_94335C.1
tacggctgcgagagacgacagaagggtggtaacttatcctaacctttaatagaaatatatttaatatatttatcattttacctctcttttcaacaatctaagtttctaaaattaacaacaggtgacaaaggtgtcctcaattggaaacaacggtatgatataattttaggcacagcaagaggactagcatatctacatgaggaatttcatgtgtccattatacatagagatataaagactgctaatatcctcttagatgatgatcttcagcccaaaattgctgattttgggttggctaggcttcttccacgggatcgttcccatcttagtacaaaatttgcaggaacattgtaagtaaaaaacaatgtcattcacattaatttcttgacctttattgagcaacaagttgtagcaaaagagataaattaattactaaaattaatggaacatggtaatataataattgttgttttattaactatg

SEQ ID NO: 136575 - DNA, 219 bp, Glycine max
  Clone ID: PAT_MRT3847_94336C.1
gtctagcaagctatagactgtgacggtgctggggggttctggatatgatccgagcatgtggatctgtaatacggattctttcagaggatattgttgctctgattgtaatagacatgatggggcggctactgatgacgatactgacatgggttctctcaccataaagttagtgaccttgacacttaagggcctatgtgacatgcacggacaggagccctg

SEQ ID NO: 136576 - DNA, 265 bp, Glycine max
  Clone ID: PAT_MRT3847_94337C.1
caggtatcgctggtatatgtcctttaggattattgctcataatgagtgtctcagataataatggtaagatctctgtggttcatgatgatgggcttagattgtagcagtgtatgtcaaatgccttgcaccaggcctgtacatttcagtttcttgatcagcttcaagatgctccgcattcaaggtcctggcttctctaattgttggagctctacagagagcaaagggtgctcaaaagttggttctaatgtcaggactgggacttgtg

SEQ ID NO: 136577 - DNA, 1392 bp, Glycine max
  Clone ID: PAT_MRT3847_94338C.1
cccacgcgtccgtacggctgcagaagacgacagaagggggcaagcgatacgaaaaataaatttcagttttttctcataatgggttccaccaatgccaataatgaaacggtcgcagagattccggagtggatccgcgtcttcaaagatggcaccgtggaacgcccacttgattttccgatcgtgccacccactctcaacactggactctcatccaaagacatcaccatctcacaccaccctccaaaaccaatttctgcacgcatttaccttccaaacatcaccaattcccagactaagaaacttcccatctacgtctactttcacggtggtggcttcttctttgaatccgctttctccaaacttttcaatgaccattttctcaagttggtccctcaagccaacattatagtggtttccgttgagtacagactcgctccagaacaccctctccctgcagcttacgatgattgttgggacgctctcaaatgggtcgcatcccattctactaaagacaccacccccaacaacactgaatcttggttgactgagcacggtgacttcaacagagtgttcataggaggagacagtgctggtgccaatattgttcacaacattctctcctttcgtgttgggcctgagcccttgcctggggatgttcaaatattgggctctattttggcccatccttatttctacggctcagagcctgttgggtctgagcctgttactgggctggaacagaatttcttcaatctggtttggaaattggtgtatccttcagcacccggtgggattgacaaccctttcattaaccctttgggtgctggggcacctagcttggctgaacttgcttgttctagaatgctggtgtgtgttgctgagaaggatggcttaagggacagaggggtttggtactatgaggctgtcaagaaaagtgggtggaaaggggaaatacaactctttgaagagaaggatgaggatcatgtttatcatttgctcaaacctgcactcaatcaagattctcataaggctgatgcattgatcaagctcatggcttcttttctcgtcaattagattgacttttcctagccctggaatggaacggtttttaacaataagctctgttgttttgcttttaataatgtggagggataaaatttggttctagtttttttattttctttgtcaaatgtttgtggtttaactaaatgtgatgcttttaggatcgcagacaatgttcttgcaggtctatttaggagagcaatatgtggtaaacaacgatgctatagtttaatgtgtcggtgacgttatttggtccacattgcttcattcttaattaaaatgttgcttgagtcctcataaatatataatgccaaatctcatgggccaaag

SEQ ID NO: 136578 - DNA, 469 bp, Glycine max
  Clone ID: PAT_MRT3847_94339C.1
tagatgaatattgcttatcaagagtgatctttgaggcataatcatggaagtctcactctcatggcaccaagaataggcgcatgatatctggagtcctttcacacctgcctaacgcctgctacgaataaaaaatgcgctcaaaaagctttctttgagaacatattgtgcagctcccgaaactatgtgtataactggctatgcagatatacctcaaactttttgggttctgttgcaacttggaacgtgattgcatttatgtatccactgtaaggcttgtactaaacactatgaagttagactctaatgattaaaccccaccccaatggtaccgagagacgggcctacgcactaaatggttgctggctgatcctcaaggccaaactgagccgaatgtcactgataacccatctttgtcggcagttttattagcggtacaacatccaaccgctctgaagagaaagatgagggg

SEQ ID NO: 136579 - DNA, 576 bp, Glycine max
  Clone ID: PAT_MRT3847_9433C.1
tttgattttttgataaaccgcgatcacaggttgtcgtaccttaaaaccggaaacaaaagcaatcgttacttgatttcaagaatcttccattttcttcctacttcttggtgtacgatttcttaagggaaagaaaactactctctgtgctggccacagactttgtgaatcattttcttttccactcttagtttatttgctgaacactctcctatttgatataggacttcgtgtcagatttaaactttttctgtttttttttcagttctttgcttaatttcaagttcaagctggtgaaattttggattagtgctcccactcttctatctggtataggacttcgtgggtagacttttctatttctgtccttcttttactctcttattatcactgatccgaattgccgttcaagtggttttatttgaaaaacacttgggcgttggtgcaaattgtatggttcgttaattttatttggtgacatcatgcttactgtgataacaattcttacttgcataagattggacttttttgttgcttattatacataatcaactcaatttaaaaaattcctacccttta

SEQ ID NO: 136580 - DNA, 465 bp, Glycine max
  Clone ID: PAT_MRT3847_94340C.1
agcctcggaattcggctcgagccagcctgcacgttcttcaatcttctacagagagaaagttaaagatagaaattcggatcggagagagagagagatgatggcagacgatatcctcaatgtgttacctaatggaactgcccggtcctttcgcgaccgagatgattgtgttggacagacacggcctccaactcgacgtcgatcagattcccgccttcggagactcatgccggacatctcacaacacggggttccgtggatgtgccaaatattaccatcgctcttcgatactaaacgctcaagtgaactcttcactgctgatgatctgcctgtggttcacgctcatggtgaaccattcagccagcctatatgtcaccgccacaatctatatcgacatcttgagcctgtcctccgatatgacgaacacacacctctttactgtacacactcctttaagatcttattcac

SEQ ID NO: 136581 - DNA, 437 bp, Glycine max
  Clone ID: PAT_MRT3847_94341C.1
aaaaccaaaacaaagaagttcaattggaacttcctttcttatttttatttatatacatcacggggtctaggaaaacaaactcactttggctcactaggaacttatttttttttttgcccctgacctaaaaaacccttttgaatgaaggggaagggggtaaaattgcctaaatgacccctaaaacaggggagattctcagcaaacccaagattgctctttccccttaaaaggaaatgcttgaaaaaccctcccgttttttttttagtggactgacaaaaaaactaattttttttacaaacaaagttggggaaccaaggggactttacaactggtgtttccctaaggaccggttgaacactgccaaattagttgggtgcacctaaaacccaattacaaatttttaagctccttgattttgggggctcatgaaagttaag

SEQ ID NO: 136582 - DNA, 320 bp, Glycine max
  unsure (1)..(320): unsure at all n locations
  Clone ID: PAT_MRT3847_94342C.1
nctncacacncntacggaancncgcncgananangatncnacaatgtnagaagggacanagagaaataatctggacccnctggaagagtacactgatgaacaaatctgggaggccttggataagtgtcaacttggagatgaagttaganagaaagaaggaaagcttgactccacagttagtgagaatggtgagaattggatccatggggcagaggcagttggtctgccttggtagagtgctgcttaaaaaaagcaaggttttggtccttgatgaagccactgcatcagtcgacacagctacggataatttgattcagcaa

SEQ ID NO: 136583 - DNA, 413 bp, Glycine max
  Clone ID: PAT_MRT3847_94343C.1
cccacgcgtgcgaatacgcatagaaagtgtccaagatagacttcccgctatagatcctgtcaagggcctttataagggtctctatgaatgcctatatagttcataatatatttgatgacgtagtatgagacttaatattgcgaagaataatggcttcgatgaaggcctctatgattgcctcactgcttctgtatatatagatgaatgatagactcagaatatgtggggaaaattgactacggtgtggactacttattgagctagatatcgagctatatcggctgtgattacgaattgagcttaataagatgcatataaggttgtatccatgaaaattcccatttgaaacctaacttggcctttgccattgactaattctaatggcttcctatctatcctccaatctatttctc

SEQ ID NO: 136584 - DNA, 243 bp, Glycine max
  Clone ID: PAT_MRT3847_94344C.1
gcctcagtccgggcctaacccttcaaccttaaacaaagttacaaaaaaaccatttaactcgtccaaagacgcattatcaccaaaaaatggttttttttgaaccaacctcttgtgtatcccacaaaataaaatcttggttaatttttaacctacttgggtgttttatccaaaggaggctctctagcgcgcgggcgcttaatgcgtgccaaacaaattgggggaaccccgaggggagaacctatc

SEQ ID NO: 136585 - DNA, 334 bp, Glycine max
  Clone ID: PAT_MRT3847_94345C.1
cctactatatttttcttaattatctgcctttgctccattgattgtaactttgatatcaaggaacatatccttcccggtagatacaaaggggcacccgggaagcaacattcctcgaataattttcactcgatttccttacaactaagattggctgaacggtccattatgtgaggagtcgccttggagaagtgagtcttgcttgatccccaatcaaagcctactttagacagctgcgcagttccgagaaacgttctagctagcccacctactgacttgtgtgccgtcattgcaccggttcactttactctgcccaattgatgtggacccgcgcgat

SEQ ID NO: 136586 - DNA, 747 bp, Glycine max
  Clone ID: PAT_MRT3847_94346C.1
ccacgcgtccggcgcctcttccacttccatcccagtctctgtgttccatccttcagatctcttttcttctcaaatcccacaatcagattgaattgttgagaattggcgctcaattctatctgattgacgatggcttcccccaacaaccacaactctccaccccccattcccttcgacatgcactccttcttcaacccccaaccgccctcttcctctaaccctaaccctaaccctaacccttcctcctccttccctccgcccttctcccccgcgcccttccacttccccaacttcgacctccctctccagcaccagcaccagcaccagcaccagcaccagcaccgctccatctccttccccacccaacccatccctcccccttccaaccccaacgccggagcccgcctcatggctctcctcggcaacccctcccccaccccgccgcaaccccctccgcccgaattcgtccccgcctcctcctcctcctccccctcctcctccgccatcctcgccgccgcctccgccgcagccgcggcactcacgcgactccccagcagtaaggtccccaagggcaggcggttggtcggggagcacgtggcttacgacgttgacgtcaggctgcccggcgaggtccagccccagctcgaggtggctccgattaccaaatacgggtcggatcctaacccggttctgggaaggcagattgcggtgaacaagtcgtatatatgctatggcttgaaacagggg

SEQ ID NO: 136587 - DNA, 449 bp, Glycine max
  Clone ID: PAT_MRT3847_94347C.1
aggaataaataaaaaaattccctcttgggttggttaaataacattatttgaaagtagttcccatgtttcattttgtggcccaccagggttcatttaatggaaaatgctaacccccataataaaagccacttgtaattattttatcgtaaaatggacaacgttatgttcactttccgttggcaaatgatcatttacgtgcatgaaaagaaaaccttaaaccgcagtttgtttaaagctcttaaccaaccaaataggtgtttcccttggagaaaccttttcaggcccgaatgggtttaggaacaccccaagctaatcaaaccttttttggtggaagagcctggcactgaactccatcaacccctaacaagcctctgctcgatgctggtacgacgaggtgtcaaaccagtgctgatttaaatcagcagaggaatggcttgaaaacaagcttt

SEQ ID NO: 136588 - DNA, 348 bp, Glycine max
  Clone ID: PAT_MRT3847_94348C.1
agggggaaattttgtttcgtcagttgcttctctgtccctcacaccacatgtgggtaacattgaaaacaaagatcagctggcagcctctgagatactttgtaaagagggttgccaaaatcttgtcttagctgtggcaccattattagttggtgctgcaatccttggtcgagctctttcgggtttggtaattacctgaaaaatcaaattcgagtaacgattatatgggttggcatcagcaattatgaattagcatacaatggatctctatcaaaatccaatacttataatatgatgaagtttgaaccgaaaatcttaggtaaattatttaaatcttgactactagaccga

SEQ ID NO: 136589 - DNA, 290 bp, Glycine max
  Clone ID: PAT_MRT3847_94349C.1
cccacgcgtccgtacgtctgtgatacgaccaaatatcgctgcatagataagagagactactctgcacacatggttggattatcaggacctacatacaggtgatgagcttctcttgtactacttccgttacactgaaattgacaatggaatgctgtgggaagagcatgacaagtaccatgctctggaagcactggatgttgacattgatgcataccctgaatgctgagggcttgataacaagaggtgactttatgacgcacatgctaaagctgctgacatcgactatacac

SEQ ID NO: 136590 - DNA, 392 bp, Glycine max
  Clone ID: PAT_MRT3847_9434C.1
gccaaatttttaacaaaattctgagcttcatagcagagatggtgccgtatatggagaaggaattaacagaaccggggagcgctctgcatatagcaggcagcgaagaggtctaaacaaatgtcgccaccgccgaaaggatgggtaaagctgcacataaacagggagccagcatgagtcctaataaggagacaataagaagggtatgacaattggcccgcacaaaaagaggggtccactccaagagctggacgacgggcggaccacagcaccagcctcagaatgcaccaactcgtaaaagagtcaggagaagctataccaattacacggatactggaagcaaacaacgcacattatcattaaacagcatgatcaatgctgatcgaactgatcta

SEQ ID NO: 136591 - DNA, 436 bp, Glycine max
  Clone ID: PAT_MRT3847_94350C.1
ctgaaattttgagacaaaactaaactctgatattttccctttgctctttctcgttgcatcttgatggctccttgtcaaaacattaccgcagtttggaagggttagtgctacgcgacccacaccgtggtttcggcatcgaggtttggccttttttagtttgctgctttgagggtttcagcaccgttgttctaggcttcaacccattctgcaacattgaagtttctgttaatgtcctaaaaaatttggggaagctgtcagctttgtggtgttctaatctggaactaagttgtacactgttggcattgaagaacgaagagcctcctccttctagttctgcttctgcacaattttgatgttagagagaatgcaatttctgtggctggaaggctatcaaagaaaaatcatgttagtattgttggagaattgaagcccaaca

SEQ ID NO: 136592 - DNA, 392 bp, Glycine max
  Clone ID: PAT_MRT3847_94351C.1
aacaaaaaaattaagcggcccttgtttcatctaaggaaacatcacttcctcaaaggccgcagatgatccaatttgcaacttgacaaagcgacccctttgcccaattgtaaatgaaaataaggcgggggccttacaggatttggcccttgagggacccaaaaggggaaaaaggaagaaaccttttataggtaaaaaataaggcataaaaaaaccccttctttttttttttttttttcttcttaattaaccacggggcccagggaaccccggaacagatttcggtaaaaaatgcaaattttggggggatccccctctccccttaaaatcaagggggggggccaaatcccccttctggcggaaaagttggcccttttgccattttttccattttt

SEQ ID NO: 136593 - DNA, 111 bp, Glycine max
  Clone ID: PAT_MRT3847_94352C.1
tacccacaagacgacacacgggggtacaatcttacgttcttcttcttcctgcctacagaatagggcttttggaatatcattatatactgagttctttcgccctagacacct

SEQ ID NO: 136594 - DNA, 451 bp, Glycine max
  Clone ID: PAT_MRT3847_94353C.1
gttttctacaatttgacatttaagccatctaagcgaagccctgttttctggttgaatgtgataattgttgtggctaaaaaaaaaaaaaaaattcaaccactatagcagccatgcttccattttttggagacataaactctcttataggagcttttggctttatcccacttgacttcatcttgccaatggttttctacaatttgacatttaagccatctaagcgaagccctgttttctggttgaatgtgataattgttgtggctaaaaaaaaaaaaaaaattcaaccactatagcagccatgcttccattttttggagacataaactctcttataggagcttttggctttatcccacttgacttcatcttgccaatggttttctacaatttgacatttaagccatctaagcgaagccctgttttctggttgaatgtgataattgttgtggct

SEQ ID NO: 136595 - DNA, 466 bp, Glycine max
  unsure (1)..(466): unsure at all n locations
  Clone ID: PAT_MRT3847_94354C.1
ttgtacaccgtttgtatgacatgtcttgtggaaagcctcactatttttcttgcacttggaaagcaccttctgatcaagttggaagacttcctttgtgttgccaagtttcattattatttcatttagaaagagnatgggcttaatccattaccgcttctttcatttttcccanaatttcaatgttgaaaccaagatatattgtaagaattgggccttgaagatatggataattcaagttgggcccttcaaaaaagcttgtgttgaccaaaggcttttgtataacaaattatgacccccaagatgcttatttggattgatttgtatttcaaattgtgccaagacaaggaattggngttgattattcttagttcttcnattcttaccacccctttgatttgcttattattcttgctttgtaatacaatatgcaccaggcgtctgccttcatttcttcttgcttccttaa

SEQ ID NO: 136596 - DNA, 278 bp, Glycine max
  unsure (1)..(278): unsure at all n locations
  Clone ID: PAT_MRT3847_94355C.1
gaggtaattataacatttannttttttcaacctaatgcacaancggccagnagccaaaccaaagcgttttacactttatcagctataaataaaaagaagaagaaaggacanagaagaagaagggagcagtggacattgaccatcagtggtcattagcagcagcgagtgacgaggtgattagatcttatatggttanagcagggtgtacccggtacgaatggnntagtgaggaggccagaaacntccctctnntcctgcgntttatgagtataatacaa

SEQ ID NO: 136597 - DNA, 211 bp, Glycine max
  Clone ID: PAT_MRT3847_94356C.1
actcgagccgaatcggctcgagggctgcgagaagacgacagaaacggagaaaggatggaacttgaatttggggggagttaagctaagattttggaaagggagtgtgcatccataaaggccgtgttccttggaccgggatccagaagggcttatcagaagaaccccaatttggccaatttgattgttgaacccgaattttcaaaggaaaatg

SEQ ID NO: 136598 - DNA, 384 bp, Glycine max
  Clone ID: PAT_MRT3847_94357C.1
gttcctgtgggatagtcttctatgcagcaaatttgtcctgtgatagtaaatttccgactagatcggaaaaagttacctctacaaaagcacaattggattggggagaaacctttaatattaatataacagctgctgggttacattcttcaaaacatattgctgataaggttgatcaagaaaaatccataaagactgatgcctgattgagacagataatctatcctcaatataatgaggttaaggcttagatggaaacaaatatgttaaaagtgtcttttgaagatgttggaacttacgataggctacatgttggatgataaaatgtcctaatctaagaatgctctctccaaaaacacagttggaggaaccatcctgcggagtgat

SEQ ID NO: 136599 - DNA, 402 bp, Glycine max
  Clone ID: PAT_MRT3847_94358C.1
ggttccacggcacgggggggtttttaaaaaaaacaaagttccattcccttccctggggcccaggtttgcccaaatcccctgatttcctaaattggacctaaaaggaccccttggaaaacaaaaggcaaaattccaaacgatttttttgggaagagccaaccccctttaattcttttcaacaaaaaattcggttgtggtacccataataccgattcctactcgcacttgttttttaaaacaacaccaacttttattgatcagaacctgtggttcgaaaaatgggggcttttttggggcccattaacaaggtgggagttacccttggggggtcccaaaattgtcctttggttaaccttgggttttaccaaaaggggttaccgggcctttttaaatttttttttt

SEQ ID NO: 136600 - DNA, 1498 bp, Glycine max
  Clone ID: PAT_MRT3847_94359C.1
cacaaacataatcatcaagcacacacaatctcactactcgaaacagatcgaatagagatatatatagttagagagagagaatattatacagagagataagtgcaataatggagtgttgtaagagggtatatgagtggttatgcaattcaaaatcatacttgataatattgagcttgcaatttggctccgccggcatgtaccttatcaccatggatgctctcaataagggcatgagtcattatgtgtttgtcgtttaccgcaatgtcatcgccactattgctcttggccctttcgcattttttcttgaaaggaaagttaggcccaagatgacagttcggatattttcagaaattatggcagtggcttttgtcgagataatacttgatcaatgcttcacgttccttggtatgaagtacacatcagcatcatttgcgtctgctgtgatgaattctgtaccctccattacctttgtactcgcaatcatttttcgattggagagcatgaacttgaaggagctaggatgtttagccaaagtgattggcactgcagttagtcttggaggtgcttttctaatggctctgtacaaaggtacctgttgttaacattgcagactcttctgccagccacgtgggacggcctgataatgtgaacgacccttctggcagtcactggcttatcattggtgcatgtttcctcatcagatgtgctggcttctctgctttctacatattgcaagctataacattgagaaagtacccagcagagatgatgtccctagccaggggggtttgctttgtaggtgcacttcaaagcagtgcagttagttttttcatggagcgtaacagccatgatgtctggtctctagcatgggattctaggcttgttgcttatgcatactcggtagtaacatcagcaatccaattttacgtgcaaggcatggttattataaccacggggccagtgttggtggctgcatttaatcccccccggaggatcatagtcgcggccttggcctgcattgttctctcagagaaactccatcttggaagcattattggaggagtagtggtggtaattggtctctatctagtagtgtggggcaaagctaaagaacagaaacatctcatgccaccatcccctgaaaaggtcaccctgcaacgccatcaacagctaccagttactgtacccataagtgatgatgcaaatgataataacaaacctcaattggtcataattgaagatagaaacattgggccagaacattgaatgcagagagccagcaacagtgagctacccccacggtcaatttatgtgggccttaatgggatcacaaagtagtaatagtagtagtgatagagtcacagtagtccatgatcaatgtattgtgatcttaactttactttgtttatgaaacaagtttggaaatttgggtagttttatatgcgaattctgagcttcacctccgcgttttacgatatatatggattatgtacttttc

SEQ ID NO: 136601 - DNA, 404 bp, Glycine max
  Clone ID: PAT_MRT3847_9435C.1
attatgagatgccacttactggagtatgtattctccatctcatttgccagaggcatgaggaaattggaaattatagaaatcagagaggctcctgagttgagacatgtatttggtcagaacattcattcttcccagcaataccaaagcaagtttcaaattgagtttcctgttttggaaagagtgacactccatagtacaccaaatatgattggcattttcccagaaaattattctgcaacatgctcatctttgcaattgcttgtcatgaacaatattgggctgtccactctatctatcaataatttgaaggttgatttagaagctacacattcagatcatagttctaaaacggattcaagggtagtgagtatgacaactaagcaaaagttagcatctgttattat

SEQ ID NO: 136602 - DNA, 383 bp, Glycine max
  Clone ID: PAT_MRT3847_94360C.1
tcggccatcaactagccgtggaactcaacgcctctatgtacgtctcaacaccttgcactatcttgttactcaaattcattctcttgagaaaacactctctatgaactccggagttgttccttcaaaccgccttcggtttgcaagcaaccgcaagagttggtgttcatactttgaaacagggaacttggccattcttggagcctgccaacacgtctcagaaggtgctgcataccgtcttacatttcacgactcaagctctctgttgtctgacagcctctatgttggtggtgtgggtagaggtgacatcagagcggcctggggagtcctcgagcagaagcgcacgctgatgactacaattctcacagatagagctcaaccattgg

SEQ ID NO: 136603 - DNA, 381 bp, Glycine max
  Clone ID: PAT_MRT3847_94361C.1
ttccactcgtccgcattggtaaaacaactatggcaaaagccatttacaacaagattggccgcaattttgaggtaaaaagcttcctcgcaagtattagggaagtttgggggcaagatgctggtcaagtatatctacaagaacaacttatatttgatatcggaaaagaaacaaacacatagatacgtaatgttgactcaggaaaagttatgttaaaagaacgacttcgcaataaaagggcactccttatactgggtgatgtaaataatttgcatcaattgaatgttttgtgtggaagtcgagaatggttcggttcagggagtagaataataatcacaacttgagatttgcatatacttatagggagaagagtagacaaagtgt

SEQ ID NO: 136604 - DNA, 426 bp, Glycine max
  Clone ID: PAT_MRT3847_94362C.1
gaccgagtgaactagttaactatggccttggccaggtcaaggttgagcctctagcccctatcgctcgcgttgctgaacgagggatccacaatgcacaggctgagcaattctagatttggtggaacctttgtttttatagcggcacgtaatttgcatagcatcactaccacacacgattcctactgttcttcatacctttccctgatgcaactgcttatcactcgggcgctggtgccctggtctatgagctggtaaatgttcaagagggctgaggaagcaagagcctgagctccgttcagggattggataaagaagtgacatctaacaagatacttatagaccatcttaatgaggtctgcttctctgaaacatctgttcaagacccataactaggaccacatatctcaacttaattgagatcatgag

SEQ ID NO: 136605 - DNA, 721 bp, Glycine max
  Clone ID: PAT_MRT3847_94363C.1
aaccaaaaccagcgaatcagcatcattatttgattagtccatcatcgatttacattggctatatcgtgatgaggaaaaagctttaatttaaatacattccaattcaatatccaagattgatacaatagaatgcgtgcaaacttatatataataacattggtcttgagatgcaggtgttcttccaaattggagcggataacttcataagcacaagaaagtgtatggaatgaagattcttatgatgctagaataggcttgtgaatttggcagaggtggtaagagtggtttcttgaatttggtaggaagtggtatttaaggaagaatagggtttttgaagtaaaggcttaggcttaacaaatggatttgctattggtataggcttaattacaaaaatgagaaacgactatggaataggtttagaaacttgaacaggttgaggcattttacccactgggaatgactttggtataggtttaaatattgaaataggtaaaggctttttcaccattggaaatggctttgggataggctcaaatactggaataggaattggtttaacaagtgggactgactcaggtataggcttaattattggaataggtagaggttttgtaactaatggaaatggctttggaataggcttgaatattgagataggaattggcttaacaattggaactggcttgggtatagacttaggaattggcttaactattggaac

SEQ ID NO: 136606 - DNA, 418 bp, Glycine max
  Clone ID: PAT_MRT3847_94364C.1
tgtggtggacggcgatcaggcacttcagggccacggcagcgttgttggtcccctgaaggcggtccatcagcacctccacggcggcagaagcggtggcgcgtgagccgtcgcccgaggagaggagcgtggccaggtgcttgcgcgtggggggcgtggaggagtcgtggctggtggcgcgtaggagggagagcgtggtgcgtttggataacaacgccgccttgctctgcgatgctttgtccttgatgatcccaattagattggtgagttttgtcatgtttatgtcgcgtgtttaaagataaacactactcgtgcatggtgtttggaaaaatgaaaattttgatggtggaaagtggaaagggagcgttcggcgttggccctgggaaatggcattaaagcccaacccaatgtgggatatatg

SEQ ID NO: 136607 - DNA, 258 bp, Glycine max
  Clone ID: PAT_MRT3847_94365C.1
gcgttgccattctcattcttctctgtctctctctctccaccattgccatggatccttacaagctccgtccattcagcgccttcaattctcccttctggactacaaattctggtgctcctgtttggaacaacaactcctctttaaccggtggagctagaggcccaattcatcttgaggattcatatcttgtggcgaagcttgctaactttgacagggaacctatcccacaacgtgttgtccatgccaggggagctagtg

SEQ ID NO: 136608 - DNA, 599 bp, Glycine max
  Clone ID: PAT_MRT3847_94366C.1
ccaacacgaaagtcttaggctacttgcattcacattgattcaaatacgtgaaggaagtgtcaagtgcctttgtcgggtccaatccaaccagccacctctaactacaaacccagtgattaacgatccaaaaaacaggtaactcttgtgggatccacgctacactacccatgactaaaacgaccaacaagtggtgcaggtgctgttcaaagataagtgtcattttcgttagaccaatcatatatacgtgtcattttcgttcgataaaatgagtataaatatatatacaccaaaatatttttttccttttatatatattcatagatatacacatatgatacttattaaaatttataattatatcaaagcatcaattgatactcggagtcaaatttttacattaatgtcacttaataactttttctaaagtacaaaattaatcaattcaacaattgaattgaaattttttctataatatatgtagtttataatgaattgtcatacaaataaaaaaaataattaataatttatcttactacttttttttataacagataatatattatttgaaatataaataaatatccatgactaaataaagt

SEQ ID NO: 136609 - DNA, 512 bp, Glycine max
  Clone ID: PAT_MRT3847_94367C.1
gcggccggcctagatcttatggtttatgtgaaggaaagagtgagaaaaggaaagctttggatattggggaggcttcctttgacacctgtgcttaattccatataaaacacttttttcttaatggatttggcttcattacacattttgataggtcgtgaaaagaccaaggacggcggttgctgtatcatggtaagaacctgggaggcctactgttgcggactttttgccaatctttcgcctgctagatccacaaggtgggcggataaaaaagaatggttattatggaaagctaattgcgattcctgagggtctcattgacgaaaggttgcttctaatggcatgggaatatgaatccaaagcatgccttgaagaagtaagatactgtgccgaaactcatgcttgaagagaattcacaagggacccgccctcacgtgaagcatttttttgttgccttatttggggctggaatagaccaccttcaagcaccatgaaacgggcaatggctgatttgc

SEQ ID NO: 136610 - DNA, 462 bp, Glycine max
  Clone ID: PAT_MRT3847_94368C.1
aaaagaacgagatttttttttccaacagaacctagattatttgggtctcaatattctaaacaaaacaacagctttgacatgtttttgtttatcgccaactagatcaaaccccaacaaacaaaaaatttttttcacaaaaatattatcgcattcagagtactcgagcgttatcaccaggcggtgttttctggggggggaaaaaaaacgggacccccgggggggggggaattggaacttgccatataaaatttcgcataaacatggcaattccccttgtatttggggaaatacaaaccgcacccgtaaaatccagagccaaaggaggggaatttcactggcttttctcgtaaataataaacggggggtatcaattaagccattaactggcgacttcatgtttcgggctattaagccaactagagatcttatcagggacctgggggcaaaaattatacctacttt

SEQ ID NO: 136611 - DNA, 219 bp, Glycine max
  Clone ID: PAT_MRT3847_94369C.1
agaaaaatataaatcccccccccaaatggaaacaccacagtagaaacatttaggggtctttaaatgttaacccaaaccaaactttttttaaaggggcatttcacaccccttaaacataacaattgttcttaaaaagggggggaaaatcccaaatcgaccctcaacaaaaattacgctcctggttaaaaccccccagggaaccccaacccccagggccag

SEQ ID NO: 136612 - DNA, 403 bp, Glycine max
  Clone ID: PAT_MRT3847_9436C.1
tgccgccctcgtgttcgtcgacgcgccttcgggaggctggaggcctatttgggtggatacatttccgaataccattgtgcagattgaaccagacatgaattcaaggtttcagcttttgagatctactaccaatggtgattttgttcaaggaaaagatctcgcaattggttaagttaatgcagcatgtgctgctgttggcttgacatcaagttacactccaacttcattgttggaatctggtttgcaaaaagacagagggtcaattggggaatattctggaaggatgccttactctgctcataacgttaatcaggcccaagagaaagattttgctggagggaaaactttcctttgatattaaaatcttgctctagatcggaaaaaagttcctttacttaagcac

SEQ ID NO: 136613 - DNA, 567 bp, Glycine max
  unsure (1)..(567): unsure at all n locations
  Clone ID: PAT_MRT3847_94370C.1
tcgatctgtcgctagcgaatgtaccagatgccgtacaccgtgagtgacggctaaatgggccgctacgccggccgactactaggctgtaggcttggcggcccgccgctataactgcggctaagagcgaatagacatgtaacgtaaggaaatggcgcgtcgctgctacggatgccgtaaaatttgttattattccagcacaaagcggcgctacggcggtcttaacttaagggctcggcttgtgctacggataacgtgatttgattggtagggccaagaaattttaaaaagctgggccttggcttgccgaaagcgccgtgctaagccttgttgaaggcggcaccgaagtagggcgactggtaagatatgggcaatagaggaaggatgggtaccccgcgggagcaacaacggaggaaagccgttgccatgattatggggtgggcagagtcaggaagctggagcgaatagcgagcgaacaggngaagggaacacaannacaaggaagaaaatggaaggaaatagtcgtaagaagagagagagagagacatgaacggcaataaggctcactag

SEQ ID NO: 136614 - DNA, 329 bp, Glycine max
  Clone ID: PAT_MRT3847_94371C.1
cccaaacctatcgatccgctagagccgattctactctgtattctgttcaacccatacttcttcaaatctccatctcatcctttctcaccaaccaattacaaagactatcactacccttaccaaccttccacgtactacttctacatcgataatacaaattaataatcctactaacaccataatctctgtaccatctgtaccctctcacacctctacaccctatacaaccttataccactatgctcagaatctgaattgcatgacccatgctctgaatggcaacctttttgtcaacctcactgtccattaaacatgacaacaatctgaac

SEQ ID NO: 136615 - DNA, 517 bp, Glycine max
  Clone ID: PAT_MRT3847_94372C.1
aaaagaaaacacccttatataaacgaaggggtcccaaggcccaaatgaacatacaaccgaacttctttttaaaaacccctttttttcctaacactgtccttatttttttaacaattgtttacaaaaatattattactaaaaatttgaccatgaaaggttatggaaaaatattttcaaaaattaaatcttataatttaaaaaaattacaaaaaaatggtttctcaaattttggtggaaaagattttctacaactaattattagaatggtaaataattcattccaaatactaatttttaaaatatattttaaaagctttacattactaaatcactttttaaaaggatattttataaaaagacatttttattcaaaaaccttttaaaaaagcttcatttttataaaacatttttaattagtgaagaaacctaaatcaaaataaacttaagaaccttaacttgttcaccaatgccttaaacctaaatcctttggagagaagaaataaattaagtttttaaa

SEQ ID NO: 136616 - DNA, 1111 bp, Glycine max
  unsure (1)..(1111): unsure at all n locations
  Clone ID: PAT_MRT3847_94373C.1
ggctcgaggaaatctgctgagtttcttactttcatgttaaaagccttccctttcgtctcgaactcataccgacccattaccgcaacactattatctctctctcacactacatcgaaattggaaacacacctagtaacttgtgagtatcccgcgatttgtttttccctttctttcactcatcaagttttgtttcctcgggaaaatcgacacttgtgcttggaagacactctttgtgttttggtgtgttgtcgtcgaaagatagcaacttttgcggtattggagggtggatttgttggtggctattctggggtccgggcgttttgtgatgccatgccagagaaagttgtgatttcgccccaatgggctctatggtccattctaatgcttcattggcgtgttgggttgctcactgctttggttttggttggaatggttgtggtttggagcattgatgggtgcacagtcaagaacatcattcaagcttggaggtatcaacaagattatcttgctgtaaggtctcatactcctaatttaactttaacttttgtctctccatacagtcctgtatatggcaaaaagtcccttctagttgaggggcatgcaagttgggtttcaaatgagttagaacccaacttgacttcaaatctcatagctagatggtcagctcgtggaggtgagccttgtaaagattccaaggctgtggagattgcaattccttggttggatggtggggaagtggttgatctatcagctggatatgtgcatgaatttggttttcaagcactggatgattcagagaagcctctttgtgtaggtggagactactttgaggctgatctttcaggggaatcatggaaatctaggcctttggtgaaagatttcagcaatggttcttacttaatttcattgcaggttcacccagattttgatggggtttacaatctcactataatcctgctctatagacactttgaaggtttgaagtttaccccatggaggttttcttatgaccaaatgctgcgaagtgttgcaatcagattctacataagcagtggtcggctaccagaactgcanggttgcaaggcttcttgatttgacagggatgtgtgga

SEQ ID NO: 136617 - DNA, 169 bp, Glycine max
  Clone ID: PAT_MRT3847_94374C.1
acaaaataacactttttattttcctgatgtaaaaccattccattactgctattcacaatgatgatgagcaggaaaatcatcattcttatcattttacatacatagtcttttacaaacaccattaatatcattttattagtattactcattaccattacaatgactataa

SEQ ID NO: 136618 - DNA, 326 bp, Glycine max
  Clone ID: PAT_MRT3847_94375C.1
aagttaaactgataaataaaaataaagatagtacgtgataccctaaatgtacaaataacctcaatttgtgacatccattaaaacgtcctctcacatacatgaatatatacttttagatacctatggcattatttcaaagggttacctacacaaattacaaacccgtgggttcttggcttaatgggccatataatctcgaaccattacatagtaggccggaacccgtatttaacctgacaaagatttaacttacgtacaacacaaccttaagaatacccactttaaaccctcaagctccttccaaacggtggacccggaacttccac

SEQ ID NO: 136619 - DNA, 189 bp, Glycine max
  Clone ID: PAT_MRT3847_94376C.1
gggaggtatctataggggggaggtttacacaaggaaattcttctacatataaatgaatcaatgaagcgcaagagttatgcaacctttctacttaacggtcaaataaggattaaatgtttaaacatttacaccccgattggcattcataccatttgtttacagctaatattctttacgcatgactcacat

SEQ ID NO: 136620 - DNA, 173 bp, Glycine max
  Clone ID: PAT_MRT3847_94377C.1
cgcacgccgcgtgaactcggaatcgagctcaagggctgcacagatgtgcccggatctgatgcagtatatcatacaacgagtagcagtaatttccggggataataaaaggaataatgtgcctgttatattgagtgcttgcttgtccaaaaaaatatattaatatatatattaat

SEQ ID NO: 136621 - DNA, 457 bp, Glycine max
  Clone ID: PAT_MRT3847_94378C.1
tcgcggtctcgtgggaaaaaaaaaaatataaaaaataaaaaaaaaaaaaaaaaaaaaaaggaaaaggaaaaataaaaaaaaggacaaaggaaataaaaaaaaaaataggggcggccgctttcatggttccaggcttcctttcgcttgcatcctacaacttagcttttctatagggtcccctacattcactttactggccgtccttttacaacgacctgtctggtaaaccccttgcgtttcccaactttttcgcctggcatcacttccccctttcccctgcttgtgttacttctaataggccgttactggattagcccttcctaacagttgctcatccttactgtccattgtgcccctccctttagctgctcttttatcgtcgttgcttttgctatttttttttttctcccttgttccctgtttttcctatattatgttccctttttttatttttttt

SEQ ID NO: 136622 - DNA, 411 bp, Glycine max
  Clone ID: PAT_MRT3847_94379C.1
ctgcttcatagaatatcacaccaaaaaactaactccaggccttgtcccctaaacttaacaaaccaccgagaatgattctattcctttttccttagaactcattagagacaaaccattttcgtcaccactttgttgtgcgctgtcattgaaagattgaagcttgttgtgcaaaagggtatgtctgtgataggggcgtattcacattttctctacggagaggtttatcagaaggatcaacagtgcccacagtacttggtgagtgggaggggatatttgttttctcacaagagtagttgtgggagcatatgggttggaagcagaaagagtgaaggtaaaattaaaaggaggaatttgcgtgtggaagctatgtggcctgatttgtcaagaccgaatgagttagagatggaagag

SEQ ID NO: 136623 - DNA, 287 bp, Glycine max
  Clone ID: PAT_MRT3847_9437C.1
gggaagaggagatttcttttaactaaaaaaaaacaggccccattaaaaaaggtttccagttgggcctagggggacacattttcttttccggccattaagaccctggacctttcatttatttttttaaggaacccattgtttttttgtccacacaaaacttttggtgcggactgattaccctttttggtttttatttcacataacggagaaaggttcttccgggctgtttaacccttatttaagttaaattctgagggtggggcaacgccgaaacttgtttggggggg

SEQ ID NO: 136624 - DNA, 499 bp, Glycine max
  Clone ID: PAT_MRT3847_94380C.1
gggatcgaaatatctaatctaaataatccaaaaattcactcttaatcttgacagggatatatgtggtgtatgtaaatcctaaatgtgaaaataggcggacttctcccgggaaaaaaagtgggggaaaaaatatgcgtaaggtaaattgtgtactgaggaaatacgaaagcggaggatattgaaaaaaaaagaattgtgaataaggtgcaggttcgacttccatagagaatatagatgatattgtgtataatgagagaaaaaaataaaaaactttcgaaagattttatccaattgaaattttaaaaatgactgggataaacttaagaattcaattattgaaattgaataagtaaacaatttaattggattggtcgaatggtatcaaaaaaatggagtactaactgccatttcttatttatcattgaatttagcgatcaacttgcattgttatcgaacatttctttttgattgcaaaaattttccggagaaaatttgaatc

SEQ ID NO: 136625 - DNA, 235 bp, Glycine max
  Clone ID: PAT_MRT3847_94381C.1
gggttaggggcgggaaaagaaattaggggtggggaccccccccccccccagggttacccccaaaaattttgttaacaaaagacccctcaaaggattttggttttgggagggaaaatttaaacccaaaagggtggccaaaaacccccggggcggggccccccgggaataaggccccccgcctatcggggacccgattttttagtgaaagagggggtagaaaaaggggggggaaaac

SEQ ID NO: 136626 - DNA, 168 bp, Glycine max
  Clone ID: PAT_MRT3847_94382C.1
cctcgaggccaagaattcaagctccaattccaatgtttccgactttctaatcttgtggttttttgacggttgatgactactcccgttttagcgttattaacaccaacacaatgcgaagaggctgaagttctttcttttgcggcccgtgaaatggtggatgcatgagtg

SEQ ID NO: 136627 - DNA, 127 bp, Glycine max
  Clone ID: PAT_MRT3847_94383C.1
ctcttctctcctcccaaatccctaacctcaaaaagtcatcaacacactaagcttcttcacaaataccagctccaatttctaccaaaacccaatatacaccttcacctgcacaaaaatatacaccact

SEQ ID NO: 136628 - DNA, 389 bp, Glycine max
  Clone ID: PAT_MRT3847_94384C.1
ccgtccggtctgattgtatatcacaatactgcagcaccatagaaaccaacacacatgctttgcttgaaatttcatgctatgtcacctattcgagatgttgaatctgctgcactgattcatgtactgaacctgatcagaatccaaggagcttgtgaacaaactcctgctactactataccctgcacagaagttcatgtctttggaccatgattggattgtaaataccagaggcaccacttgtggttcattgataggcaatgggatgcgcactgagaaagattgaatcactcagaaagggatcacagtcacaaagtaagctcgaagctaaactgctggaagcaatgctgactaaggaatctcaatgaactgccgtagaaacattccacact

SEQ ID NO: 136629 - DNA, 290 bp, Glycine max
  Clone ID: PAT_MRT3847_94385C.1
cgcttaaggatgcaattttggggtgtgttttgccccattggccgtatccgtcatccagagaagagtataagccttcgatcctaggatttctttccccccctttgtaccacaaggggacattttttcgatgctcgattcgatttcgaagccgggtgatttgaggacccagagaagaacgaaccgaacgttttatatgtcttcggataattcaattgaagatgtctggttgcttcccttcacccccttctgggtatagggcacgtggcgacgcctcgatcgaatcgattaag

SEQ ID NO: 136630 - DNA, 633 bp, Glycine max
  Clone ID: PAT_MRT3847_94386C.1
ttacggctgcgagaagacgacagaaggggagggagcaagggtttcaaactcgaggcagtggttgcgtgggtgcgtgcgtctgagtgggatagaaaagaaaagaatggcggaaagggcgaaaccgatcgacttcgaactcaccttaaagcctttctatcagagagcctcagaagcagagggagcgcttatcaagactagaagcagccttgaatagtaaaaaaggtactggaaacgaggaaaacttgaaagtgattaatgatcttcagtcaaagttagaagttgcaaacgtagagttaatttctgaaaaagagaaggctcaaatgcttgttgcagaaaatgcaaaacttcaataccgaattattcatcttctgagagcactcaaggaagctgatctgaagttagaaaaagctacagtgcatgagcagctacagagcatgaaattgcagggttcttgagtttatgagctgctattgacagttgctttttcttgtgtattttgttttatggttgatattcatcatacagtatgttctgggagatgctaaatatttttagctttattggttttacatctttagaactcggatctttgtttagctcatacatgatcatagacacgaatttcttcctaag

SEQ ID NO: 136631 - DNA, 255 bp, Glycine max
  unsure (1)..(255): unsure at all n locations
  Clone ID: PAT_MRT3847_94387C.1
ggctcgagacggctgcgagaagacgacagatggggggtggcatatatgctagtatgcagcagagccagaatatctccatcaatcaagtgatccgattccatgtttgaattttgattttgagtataaaatcaattatattttttaaaaaaatatttgttttataggtgtttaggatatttgataaaaataagtcagtgtttttaatattaaatactttgtaccaatgttgataaagattanaaaaaaatacaatca

SEQ ID NO: 136632 - DNA, 411 bp, Glycine max
  Clone ID: PAT_MRT3847_94388C.1
cgttgcggataatgaatgtggttggagtgcaaagtgtgcactttaacagatacatccatctcttcaaagttgagacgagattgttttggtggcttctcttctgtcctcttccctggcttattgatatagaacaattagtccaggaatttatgcaaaagactgatagagcaaggcaaagtagaaaatcttgacaataaatggtttttttatttttaaatatttcttgtttcaaataaaggcttgcattacttatttattttttgtagttagttcttttatatgtagtggaattcccacatcagaaggatgtcagttaagagtagtgtaggagctttataaataagcatcctcttttatgtatgtagtcaattcagtttcagattgctgaatagttttgttctgattcaaaaa

SEQ ID NO: 136633 - DNA, 2293 bp, Glycine max
  Clone ID: PAT_MRT3847_94389C.1
cttacaagcaatgtcatgttaacatgacatggcatgtttaaaataacaaattggttgatttataattaaaacttttaacttgtgaactggacaagtacctcaatgatttgtcatcctgagcatgaacattaagttctagacgagagtaacattcacaagttgcacattcgcaattggacctttaagacatccagcagcatgggagcagcagcagagaagttatctgacatatggcttgacaactttcctctggttcagcagctagatagtatcttccaagattggtgattcagtttcaggagttggatcttggtgtacagcttcttgttgagcattcgtggggatcaagatatcttttaagtaaaaatcatcttttttgaagcatcgacccccatactcaacgttttctttgacgcaggattatcttggcatatccatttactcccaagccaatgggtgggcttttcagaaatccatttcctgcctgtgatgcacatcttcttcttttaatgaagaattgttcaatttgatctgcaatggcacacctgttccacgtattcatcggtcacatttgcctttcaatttttgtgcctttgcccagcccacttttggacatgttttgaggttgaaatattgccaacctcacagcagaggcagcagaatggatggagaaggcactcactttccattgaccatccatgagacctacacttttgggttcttgttcttgacaccaatttgtttacttatcaaggttttgcttttatctatatggaagacgagagagatgctgaggctgctattcgtgctcttgatcgagtagaatttggtcggaagggacgcagactccgtgtggaatggacaaagcatgaacgtggtgttagaaagcctgctagttcaagaagatcttcagctaatgggaggccatcaaagaccttgtttgtaattaattttgatacataccataccagaacaagggacttggagaggcactttgaaccatatggaaagatagttagtgtgaggatcagaaggaattttgcttttgttcaatatgaatcagaggatgatgctagcagagcactggaagctacaaatatgagcaagttactggatcgagttatttctgttgaatttgctgttaaagatgatgatgataggagaaatggatatagccctgagagaggccgtgatcgtcaccgtgatagaagccgtgatggaaggcgatctcctagtccttatcgtagagaaaggggtagtcctgattatggccgtgggcccagtccatatcagagagagaggggcagccctgactatggccgtgaccgtgaccgtagccgtagcagaagcccccctaggagggagagagctagccctgcttatgggcgtagaagccttagtccacatagaagagaaagggagggttctgaacctgttcgtgactccagccgcagtccttatcacaaagagcgagggagaactgaccatggtatttctccttctcagagtccagaaggaagagggaagaaaagcccccaaaatggtcatggttctagccgtagtcctcatgatactgggaagactagccctgaaaatggacttggctccggaagtcctgatgaaaaagggaatcccagcccttacaatggttatggagggagcccaaataatatgcctgatcccagggacagtcccaactatggcggtcctgaaagtcccatgcatgaaagataccgcagccagtcaccccctgcagaagaatgattgcagtctttgatgaagaagccggaagggccaactgattgtagttctgtttcatggctggactaaaaatttcatttaagcaatttattttagtgtagtagtgataaagctctgaaacttgtgttgttgtgacaacttagtcctttatttgtttagttagtttcatatttctttgtcagcttagtattgtagaatctttgtttacagtaaagaaagatggtactatatcttttgatcaatattggcgaacttggcaatatcgctaaaaaaaaaaaaaaaaaactcgagtttttttgaatgtgataatagtttctgtcaccacatccataaaaaccattgttaagactagtctgactagaatctatacgccaggtcttgaacaaaccaatataaaaggcttacaaaaatatctttgcttaaatagaaaatagaaataacaagcaacaagcaccaaaagctagttctttggcccaatatccttgagggcacaaatctgttcctcacccatagcagacatgacagacacaac

SEQ ID NO: 136634 - DNA, 506 bp, Glycine max
  Clone ID: PAT_MRT3847_9438C.1
tcggtttgaacaccattgaattttgattctagcaagcagagcttttgacaattttctattgaccttctcggtggaggaattgcagcggtcaaaactggagattggatcacacttatacaaaattctttcaattagcaacttgatgagagttgctgattggaagaaaggctgcttaatggttaagattgtgatgtctgggaatgcagcagacaacaggagtgattggacctcattggtacaagtgtttttaacaaacagcaacagtacagagcattttgatgcatgtaagtggacaaaatgggaaccacattcctgggaattgatcttcccaatagaggtatgtggtgctaataaaggttcagaacgtggagttctgagtgggcatatcacacttcatggcatttgagcttccttatttgaccatccaaacagtctacaggtttgatttttcttgggaatatctcagaatttgaagtgatggcatactctatgccagcttttttgtt

SEQ ID NO: 136635 - DNA, 834 bp, Glycine max
  Clone ID: PAT_MRT3847_94390C.1
gctcactacgcccttgccgccctttttttttttttttagagaaaatcagatctatgacacgtgctataagtgatcaatccgggagatttttcaatctctttatgattctttatgatgacaactcgtccatatatgctgatccaataaaagtgtggacaactggacatacatgcatagtgcgggacgacaaatcatcctacatgaaattcaacctagagaagactatggccagttgcgttagctcaccaatctcaagctctttagctaaggaatgtgtaccctcccgcggaagagtacgtcaaccatgctgacaaatcacacattacccttgttgaagcttttagaagcatgcagattgaggaaggagaggagcatctggagaatggggactctactcatgagttgactgaacgaaatggagaagagcactacacatgctccagctcattcggtggaagaagagcggtggtgtgtgccacgtgggcaccaaggtggagggagtgaaggtcagaaagggttggatgaggactctgacaaagagaaaaacaactaccatggaataaaaataaaggaaccatttgtgccctttggtcctcactttgcagtgtgcactgtaaagttatatcatagtcatactcgtagagtcaaaattagctttgttactatctaaaaaatgtgctttagattacaaaaaacgaaaaaaaagggtactagtgctttgctttctttgctttgggggatggatcatggggttcttcttgtaatttcattttttttttttgtttctaatttcttgatgcctatagacagtacagactgtaaaaggatttgttg

SEQ ID NO: 136636 - DNA, 509 bp, Glycine max
  Clone ID: PAT_MRT3847_94391C.1
ggccttcaaaaggcccaaccttacctttacccctaataatttaccagaataaatccatttgggccctggccctaataaaaaataaatttaatccgatttaatgccaacccggacccggaggggtaaaccaaaatttaccaattttttttcccccccaacctggcttggcccccttttaaccccttcatttttattgtccagggggaaaaaaccgggccccccaattgggttttttcttccaatggcccattttttaaaaaaaaagcccaaccggggaccagggtggcttcccccagaaaaaccttcccttccaagggttgggccttagaacccaggggcccccttggtgacctgccaaattccactgggcaaaaaaccaaacccctgtccctttacctgggaaaagctggaccccaaggcctggggcccaccctaataaaaattttattccaaggggaatcctggaagggaccttagggtggttcccacctggtaaaggccacttggtt

SEQ ID NO: 136637 - DNA, 815 bp, Glycine max
  unsure (1)..(815): unsure at all n locations
  Clone ID: PAT_MRT3847_94392C.1
tgccggatatgatggcttcggatgcttcgtcgcctacgcttgattggacataacactccttcctcttcctctttctcgtccattttacatcaatctgtgaattctcctccttatcaagtcttcctcatcttccccacctttttgaaattttggtgtctaagaacataacctaaaagctcaaggtgagtgaaaagaagatgtcaggtgtgtctctagcagtgtctcatccaccggcatcagtgggagaacaaaacgtgcctcaagcaggcacaaagcctaaaccgcgaacagaacaggcaccaattggtggcatgatgggttcacttcgcgtgatagagcttcagcttgtcgctttcatcttggtgttctcagcaagtggccttgtcccactccttgacctagtgttccctgcacttgcctctgcatacatcttggcactctcgctattcgcatttccatcgtcatcttcttcttcaacgcgttcgttacacgactcggggactgagatcttcaaagggggcagattgttccgaatgtatgtcgttgttgggatcactgtgggactcttcttgccgctggcttacgtgcttggagggtttgcaagaggggatgagcatgctgttcgttctgccaccccgcacttgttcttgctgtcgtttcagatacttactgagaacatcatcggtgggttgtctatgttttccccaccggtgagggcgttggtgccgatgatctatacagtgcggaggatctttgtggatattgattggattcatgatgtctggctcaacaagactctgnctgtcaatgccaca

SEQ ID NO: 136638 - DNA, 496 bp, Glycine max
  Clone ID: PAT_MRT3847_94393C.1
gcttccaggaaggtttcccgtcatcactgtatgacgtcctccttctttggggggggggggggggggggggggggggggggctataatagctaccggtaggaaaaaagacccacgaatatcgaaccatgaagacaaggtgaagcgttggccacaaatagacctagaacatgtgcgtgggtggcccgtatataggtggctcggaggtgataggccatgaccaaacaagtggtaccgcgagtgtattttacaagagcccgggtttattaccgccggttgtttagagtttgctggcctatagtgtgatgcccaataggcggtcattagttgcaaggggcgcgaaatttgtttagcggtgccggcgagccgccatttgtttagcggtttgcgtcgacggaggtgcaccgtatattattattcccattagcgttattattgctaggaccacccgaattgttgctcctcggccacaacaagagttccgcgaggccacccctag

SEQ ID NO: 136639 - DNA, 504 bp, Glycine max
  Clone ID: PAT_MRT3847_94394C.1
ttttaacatctattatatctctactttccattaccaccacctgtcggataatagaggcgtatcgctactattattgctaatacatagatctcaaacttatattataaggaaatacactatatggtatcacccctcagtgtcacctgcgtgattagaaagtttgaacggaaccatgcgagcattactacctaccgcccaaacacacatatgaagtctataaactatcaaatttcactcggaaacaaaatctatcttggtgcctatgatgttaactaccccttacccatactggggaaccaaaggaactaaaacactataatgaaatactgctcccaatgcttccaacatattcgttagtcccgacctctaaccaggacattcttcctggggtatggcgatctcatccgaatgaggcacactcacaaaggtgcctgcaaaaaccgtattatgtggctcgtccagctaatcatctccgttattaagatacacatcctgaataaacac

SEQ ID NO: 136640 - DNA, 960 bp, Glycine max
  Clone ID: PAT_MRT3847_94395C.1
cagcacgctaacacccaaaccgcccaatcacacgtacgcagcaaccgaggtcaccttgcaaccttgtactgttcctctctgctcctccaattacactaccactttctgccctcactacgcaacgttccatttacaatgagacccttccgagtcaagacagcagtgcagacagcagctgctatgacctgcaagtgcatccccaccccactgaagttcctgccaaacaaagtgcctgtgctggtatggaggtcatgaggaagctgtttgatgctgtttcggcgctgaaattcgcgaatatgcgcagaaacactgcaagaaagcgaggttcaatgccgctcgttcgcctctttgatggctgaaattgtggccaaagaggcacttttggggaagctgaagtctcagaacagtgcccaagattctgagattcttcggttgtggcgggagctgcaagatttggagatgggcaatagaaatctgagcgagaagatccagcagataagtgttagactttggcttcattgctgttttcctttcaaactcaaatgggttttgcctcttttttaggggtgtttttgattttagtgttctactggtgttgcctagtttgaatgtaacaatgtgtccttttgagtgctgaaatgtgcactgagaggaaaaatctgacctttgcacttgctgcatgaaatttaatagtaaacaaattttttttgcattttttaatctgggatcctatttgccaccactaccaagtttttgtgcctggaatcttggctctggttgggttattgggtgggtgcaatgtggctagaaaaacccttttcattaaatgcatcttgagtgagggggtttcttatttttttcaatctagattttgggaaatggctttcttgttttttgaagcaaggatcactggtggattcgatctggatgaattcaagggtttgatcttttttaccatgg

SEQ ID NO: 136641 - DNA, 235 bp, Glycine max
  Clone ID: PAT_MRT3847_94396C.1
aataaatttcaatgattctacgcagtgactctcacatcttatgccctctgcatgttcggaagcagctagaagtggttttaagcatccaaaactctcaatttcgtcgttttcagccgtctatgatctatgctgaagggtatgcatggcctgcgagtctgaaatatattctctcatgcgtttctgttgcatcaattttatctccccaccttcaatatttttttccctcgtggcctta

SEQ ID NO: 136642 - DNA, 115 bp, Glycine max
  unsure (1)..(115): unsure at all n locations
  Clone ID: PAT_MRT3847_94397C.1
ggctggggagngctgttgtttcttccacaaanaaacaggcaggccacttgnttgatttccccttncacttnggcttcagnggaatnnaggggatttggccttaagggnccttgcc

SEQ ID NO: 136643 - DNA, 273 bp, Glycine max
  Clone ID: PAT_MRT3847_94398C.1
ctggatttcgccccacggctggggccgccattgcctcccatgaggatgtggacaaagtggcattcacaggctccactgagattggccgcgtaatccaggttgctgacgggagcagcaacctcaagagagtgaccttggagctgggggggaagagccccaacatcatcatgtcagatgccgatatggattgggccgtggaacaggcccacttcgccctgttcttcaaccagggccagtgctgctgtgccggctcccggaccttcgtgcaggagg

SEQ ID NO: 136644 - DNA, 265 bp, Glycine max
  Clone ID: PAT_MRT3847_94399C.1
ggaaagaatttaaagtgctttcatcaagaggggagaaagggcatacaatctgcggctatttaaacgggactgccggcctttcattaatgaaacaaaagccagctcttccatatttcggaacaaacattaaaaaatgctctgttgatgggcaaacagagatagcatttgataccagaggtccaacacctaaagtcgcctacgtggttgtccaactattattgcgcgacgaacctcatggaatttatttcctgaagacatggacaac

SEQ ID NO: 136645 - DNA, 592 bp, Glycine max
  Clone ID: PAT_MRT3847_9439C.1
ctttaattgtactttccaaaaacacagttggaggaaccattctgcgtagtgatctattggcaaattttttgacagagggcaattttagagcaagtgttgatttgcagcgcacttatcgtattaaaggaatgattaaaatggtggccacagttggtattcctgagaatacaggtatagcaatggcctgtgctatgaatagttcttttagggggcgtgccagttctgatatatacactatctgctctcaagactgggaattatggaaacctgcttgcacaaaagcgatgactatgttatttaatccaaacccgtgtgctgatgcatggagcttggaatttctgaagcgtaccggatatcaatgtgaaatacttgggttactggatggactcgcaccccaatgcaggatgttcaagataccaatgattggtttatttctttcaaaaatgggttccaggacctattgtgttttgaaatacaacaatcctttttggttaaataagggtgtgggaaaatatgattttcccatggttctttctcgaatgtaaaaaaatctccttttttatggggggagctggcccaaaaatgttttttt

SEQ ID NO: 136646 - DNA, 1445 bp, Glycine max
  Clone ID: PAT_MRT3847_943C.1
gcttgtgttagtgaggttagaagataaagaaagaatggcatttgcaggaacaacccagaagtgtatggcctgcgacaaaacggtttatctggttgataagttgaccgcggataaccgagtgttccacaaagcttgcttcagatgccatcactgcaaaggaaccctcaaggtctctctccctcttttacaattcttgttgattatatagtctctatctagttcaggcttctagctttggatctggtgtctgtaatttggttattagaaggcatgtgaatgtgctggatagcgtgtttggaaagaattgggtcgcagatcgccaccttctctccatgtctaaggatcaaaatacatggaagttacttcaagttgcttctgatgaatgtggtttatcacgtttgcactgtgtttccaaacacacagggaaacagaataatgactaacatcaatcttagaagcatttcctttaagtagtaattcagagttctttttctttatatataattttaagcactttcttcttaagaacatattatgtctctgtctcaaaactttccatgatttcatgataatactgataaatgatataggaaattaggaacctcttttcccttttggtgtattaaaggcttgttagcacattgcaattttcattaaatgatgttttctgactaattaatgtatctatctgcagctgagcaactacaactcttttgagggagttctttactgcaagccacattttgaccaactgttcaaaagaactgggagccttgacaaaagctttgaagggacaccaaaaattgccaagccagagaaaaatttggaagagaaacctgcagcagccaaagtctcaagtatgtttggtggatcaagggaaaaatgtgctggttgtcagaaaacggtgtatcccactgagaaggttactgtgaatggaactccttaccataagagttgttttaaatgctgccatggagggtgtgttatcagtccttccaattacatagcacacgagggaaaactctactgcaaacaccaccatgtccaattgatcaaggagaagggcaatttaacccaacttgaaggtgacaatgagaagagtgcgactaatgggaaaatcaatggtgaagaagtttccgcagagacatgaaggagtcgagtctcagaattttgctttctcaagtttcatatttgtgcaccatatatttctactctctcttgcttttaccattactttgcagtccgggaagctctttacccgtgacaaatatggtattctattttttgttagacaaagtgtgcggatcttcaccatatgtttttggttgttgtgagcgtttgattcaaaatgtgtgatttagaagtacatgttactgcacttcttaacactctcatggacttccaattgatattatatacaatcgttacacccaaatttcgtttcc

SEQ ID NO: 136647 - DNA, 372 bp, Glycine max
  unsure (1)..(372): unsure at all n locations
  Clone ID: PAT_MRT3847_94400C.1
agggaagcaaaatccccctcaacaaaggcctcccaaaacgaaaaaaaaaagaagagcaattttccctcaacaaagaagaagaagccaacaatgggcgattaacttaacgaagaacaaatttccgaattcaaaggaaccctcaacctggtcgaaaaaggacgggaagggtggaacaaaaccaaaggacctggaaatggtaagccttcaatgggggaaaaaccaaatgaaggcaaaactcaagaacatgataaagaaatggatgccgatgggaatggtacnattgacntccctgagttcctaaatctcatggccaggaagatgaaggacactgattctgaggaggagctgaaagaggcattccgggttttcgac

SEQ ID NO: 136648 - DNA, 253 bp, Glycine max
  Clone ID: PAT_MRT3847_94401C.1
ttttgaaggggggctgaaatatgctacactatcctaaacggtcatgggagtcgccggggctaagtctaagtgcagtaccgttaggattcaatgaatcgcttgggaccttacgagtggcatgatcttcgacgtcggttactgcaccgctcggcgtctcagggggacacatggacccggcggtgacatttcggcatcctgtggcgaggaagttgtcgttccccagggcgattttctacattgtcatgcaatagct

SEQ ID NO: 136649 - DNA, 307 bp, Glycine max
  Clone ID: PAT_MRT3847_94402C.1
tgcgggtgcacgacagcgagggaacggcaacgagcacaagatccagttacatattattctactagacaacgcacgcacagagtatggctggaccttttgagttgggttcatccatgaaggtaccagcggattgcgtgaatgatttacgcacttttagggcggacaatatgcacagcagcatgacaattatttactacagccgaacatttttgtccaaaattggtgaacttgttgccggcattttggggttcacaagcttgttacggtttgtaatttacttccttctcatgatgggtacttcacttgg

SEQ ID NO: 136650 - DNA, 377 bp, Glycine max
  Clone ID: PAT_MRT3847_94403C.1
agaaagaagctaatttcattgatttatttacttgggtggaacttaaaatattttatcctacaaaaaataaaacccccctacttttccaatatttcattactgggcctgcccaaatcctaggtaggaaggggagacccttatgggcagcccctttggggccacaaccctagggaatttgattagggtacctccccctactttttcccacctgtttttagttacaaaggaggggaaaaaaggggaaatttttggtatccccaactccttcccaggacattggcggggccctcccccaaatatcaaaaagggggtttgggactctagactggtacccacccatccccatgggggggatgctaggggaccatgatacaaaa

SEQ ID NO: 136651 - DNA, 325 bp, Glycine max
  Clone ID: PAT_MRT3847_94404C.1
tggttctcatttaatgtaaaacagctttattttaatagacttgattacatatccagagagaacaacatgcgcatgaagatgtatgctccctatttagagggagaagtataggcctgcaaggtatacattataagatacacgcggagactatttaatttcacagcacacacaaggtataactgatggaactgaccctagcttcctaattggcgtgatgcttttggatacgacaacacagacatagagactgatctttgtccatacgaagggtatcagatatatgggccgagagctgtacctgtagcggcactaaatttacagtact

SEQ ID NO: 136652 - DNA, 193 bp, Glycine max
  Clone ID: PAT_MRT3847_94405C.1
gaaaagccttggggataaatccaacgtgggtgagaccatctcaaagggtctcctgaatttgaaacctaacagagaaaaagttggagcagcattattgcaagaggtggtggataggaggaacaaggattagctgctctcggaggaaaagttagaggaaacaagggttttggtgagtttgataaagcaacaagcg

SEQ ID NO: 136653 - DNA, 471 bp, Glycine max
  unsure (1)..(471): unsure at all n locations
  Clone ID: PAT_MRT3847_94406C.1
atatataggctttttgtaatgggcaattggaacatgggcactttggcctggaaaaggaaaaaaggacagcggcctcccggattcaaagaaaaaccaaagggaatttttttaaggaacaacgaaaaaaggggggggaaacccccctggcaaaaaagaaggaaagggggaggggggggggaaaccaaagggggggggggggaaaaacacaaaacaaggtctacccagaaaaaaaaacaatagggacaaaccccccccctaaaaaaaaccaaacaggggggccccccttttggggggggggggggaaaaaaaaaaccacccccgcgtttttaaaaaaaagggggggcgccacaaaaaaataatggggggggtacaaaaaaaaaaagaaaccccattaaaaatcgccgcttttggcaaaagaagggggggattgnccccccagggaggggcacaaatttccacccccgggggggg

SEQ ID NO: 136654 - DNA, 288 bp, Glycine max
  Clone ID: PAT_MRT3847_94407C.1
ccatttcattataatactacataattctcctccctctacatccaccttttcttatactataattcctatcatccaacatcctcacacattttatacttcacctcttacaaaatcatactccaattccccttaacttttatacttcaaattacctttttatatcatcaattacactcctctaacaatacacctctcctattattactaactcacccatattcaaaatttccacccatatatcactccaacattcatcctacatacctctctttttatttcccaccttac

SEQ ID NO: 136655 - DNA, 292 bp, Glycine max
  unsure (1)..(292): unsure at all n locations
  Clone ID: PAT_MRT3847_94408C.1
agcaaggcattgtttgctacatttttcatttttagcactagcaagncacgcggtgtagactaatactattcaatctctctctactaatcaatttcatggcattgggtacaaacaagactgcccaattagcaacgaaaaacctatcgtaggatcagggaaaagcgcattttttttttttttatctccccttaccannncagggactgggcttacgatgcccataatcaacttagtgatgaccattattattaccatggccattctcatgaccataataaggacaacatttatg

SEQ ID NO: 136656 - DNA, 139 bp, Glycine max
  Clone ID: PAT_MRT3847_94409C.1
ggggggccgcctgccagtgccggtgcggtatcgccggtgcgcgccacgcgtacggatggttttccaccgcgggatcgcagggtgaggtacctataatccggacacaaccgccgtcgctgctggcttgcccgagatgagt

SEQ ID NO: 136657 - DNA, 276 bp, Glycine max
  Clone ID: PAT_MRT3847_9440C.1
ctagacccttatcggctgcagataggactagattgcgagtctcttgctcgtattctagcacacatcaccctgcatgctactctctctcatctgactgggacaccaaaccccgtgaacctgtcaccaacaaagagaaactcaaaagccgccatcttactgatctcgaccaaagtcggggactctgtgattaagaccactacgatcagggctgcacatttattagactcgacgatgcaattcggcgactattactgctacgtccattggtgacaacag

SEQ ID NO: 136658 - DNA, 390 bp, Glycine max
  unsure (1)..(390): unsure at all n locations
  Clone ID: PAT_MRT3847_94410C.1
atatatttttattttnnnttttaccaaaattaaactattttgcattaattggtaacattatattggcccccatactattcatggaacaaaatgactttagattcatcatttaatcttaacattatattctggtcacactaccatcggaggttaaaccggagtttgacttcaaattcatcatttaatttttcgaaggtataacgagcaaccccaaaacaccaatgaaaatatacttgataataggcttttcaatcataaagatgggcacccaacctacgtaagggaagaacccgacgggtttacccataatggggtgcctttgcaaccaaagttgaccgtgagcatacaataacctgtcataaccataaattgtgctatcttgtgagaaaa

SEQ ID NO: 136659 - DNA, 182 bp, Glycine max
  Clone ID: PAT_MRT3847_94411C.1
ttttgggttgttagaacaattttttctgtttgatcatttagaatgtaaatgctctgcatggactgatccaaccacacaggaactagggggactttcatgcaatgatacatacaaataaatgcaggctcgtgtttgcgggatggaaccatgacaatatttatcacattacatttatacatagc

SEQ ID NO: 136660 - DNA, 309 bp, Glycine max
  Clone ID: PAT_MRT3847_94412C.1
cacacgcgtgcgaatacgagcgaccggtctagaggatgcacgcgtacacaagagctcatggggaggtgcagatggcttcctgagtgatctcttgctaatctattaccactggcaaccgttccggtaccagcatggttgctccattcactggcactaagtccatggctgacttctgcatcaggaataccaacgatgacattaccataattgctagcaacggtgcatgagtgcaatgcatgcatatgtggacacctgttagcatgaagcagattgatactgattcatacctaccagacattgatcatgcac

SEQ ID NO: 136661 - DNA, 238 bp, Glycine max
  Clone ID: PAT_MRT3847_94413C.1
cccacacgttcgtacgcgagaagactgatgttttggggtgcttgctttgactagattctctggcttcttccacacatactcacatttctttttacccttttataatgggttttttgataatgctgtaatcttgtgtctttcacaattgtcaaaagagtggtagtagcaatctgtctccgtcccatctgttataaaacttggtttctcaatgtaagtgtcattttcattcactatatcc

SEQ ID NO: 136662 - DNA, 667 bp, Glycine max
  Clone ID: PAT_MRT3847_94414C.1
cccacgcgtccggactctccaaccgaaaccgcctccaccgtttttcttcctactgacgcctactttattctttgttaaaccgaccgaaacgaccgtcgatttttccctttttctttcaccaaatgctgatgggttcaacccctactcgatcatgagacacaccaaactaacaagagaagcagatagaagccagaatggcgatggtgtcatcaaaacgactgctactacgacggcagctgaaccggcacctttctacatctcgcgtagtgatcgacgacgacgacgacgaccacgatcggcgattgaattcttcttccgcggagaagatgtcgaacctgtacggggaatacacactacgagatccactacctgctcaatgtggtgcatgatcggggactccggcatgtggaagacccagtttctcgagcgcttagccaaaaaccacttcaacgtggattctaaagccaccattggcgtctagattaagaccaaaacgctcatcattgacaagaagaccgtaacggcccaaatatgtgacaccgtccaccaagaaaggtacagtgctacctactagtgcatattatcgaggtgctgttggagcaatgctaatgcatgacgcgactagacgcccatcatttcgtaacacggcaaagtggttctaggaact

SEQ ID NO: 136663 - DNA, 257 bp, Glycine max
  Clone ID: PAT_MRT3847_94415C.1
accacgcgaccgcccactttttttataactccctagacaacgcagtaacggcgcgaggaaagggagcatacaagattgaagctcgcaacaactaaccacgtaggagacataaaaataccaagcaactacgaaaggagcaaaaaaaaaaaaaacgcaagaacaaaacaaaaaaaaaaaaaaaaaaaaaaaaaaacaaaaaaaaaaaaaacaaacacaaaaccaaaaaaaaaacgaggaaacaaaaacaaaagggggcg

SEQ ID NO: 136664 - DNA, 1585 bp, Glycine max
  Clone ID: PAT_MRT3847_94416C.1
ggctcgagtgtttcagcaaaataattatttatgtcataaagttgttccaactgaagatgagaaggctttttctctctctctaaaagcagtggccatcatgttctcttcctaaaccctttcaatcatcatttagctctgaaaaaaataatagaaattaaaaagaaaaatgtcctggctcttcaagtccaaccaccctgacccagaatcttctaatctccacaaccgcaccgttatccactcgtcttcgccgccgcatcccgccgccgatcgccacggcgtcaaggacgacatatcgcatattttccgcggcgtcgccaacttcctcgctccgccgccgccgtcttcttcttcttcttcttcttcttcttcttcctcctccgccggcgattcctcctcctcgcaagctctgtcaggaatccggaacgatctcgtggagatcggcggaagcttcaaaaactctctctcgcgcatttcctcgaacaaagccgtcaccggaatctccaagctcgcttcgcagttgttgcagttggagcctgatcaacaacggagcaacgatgacgacgcggtgcctggaacgacggaagatgttgttcgtttcgtgaaggagatttctgcgcggcctcagtgttggactgaattccccttgccactccataacgattttagcatgtccaattctcagagagaacatgcattggctatagaacaactggtacctgaattcatcgcactaaggctgaatctttgcagttacatgaatgtggaaaagttttggatgatctattttttgttaatacttccaagactaaatcagcatgattttgagcgcctatcaactcccaagattgttgaagcaagagatgtgcttcttcagaaactaggagagaggaaaaatttgcaagccggagaacctgaaaaaccaaggactgtggatacatatcaagagggtagggaggactctgaaagagaaagtatctcatctgaacaaaaccagatactgactgaggttacaaatgcagtagagggtttagaagttgatgacacgattagctctgaaaaatggttgggagatacagatattgatgctagttcattggcttcctgtacaaaacttcaacaggaagaggacgtctcattcagtgatctagatgatgataggagttatagctctgacaaattatcaggctatagggaggcacatgacatcaggggttcatcacctgaaggtgctactagtgactgggttcggctgcgtaaaagttctgagagtgatggcaggaagaaggttatccgtgtaaagggtaaggattcagaagatgagtcaaatgattggctcactgttgatgatttcaattagatagtcttttcttgatttaccaagttctaaaggttcaatatttccccccttctccgtggttctgtatttagggagtacaaaattatataaattcaagtatttcactatttcttttcttattcacacgtacatatttcttgtttgtacaaggctaccactgttgggcattgcgtaaacaacattcatttgttcaaactgtacaatgcaaataaaatcaaggatttcaag

SEQ ID NO: 136665 - DNA, 189 bp, Glycine max
  Clone ID: PAT_MRT3847_94417C.1
aattaacttgtaagaaaactgggggggcattatccattcaaccaaagaccaacggacaacgtttaacaggaaagaaaacacaattgagggtaaaccatacacagaagacgattccggtgaaattcaataatacacatttctactatgaaagaggacactgggcccctctactagaaaatcgctgggaag

SEQ ID NO: 136666 - DNA, 152 bp, Glycine max
  unsure (1)..(152): unsure at all n locations
  Clone ID: PAT_MRT3847_94418C.1
ctcccctgcttcagcggttatgcctttttatttcttccgatcttatttcacattngattgtctcatttaaaaagcagggccgtcaataaaaaaaaacaatttacttatcttatcacaattatatcttcattttactcatcaaatttctatct

SEQ ID NO: 136667 - DNA, 272 bp, Glycine max
  Clone ID: PAT_MRT3847_94419C.1
cgaggtcctgatcgtggctatttgaatggtacctgtagcggcttcattcgcgcttgggataacatctgagggtacctaggtaggatggtacgatgggggaatgcattgcttttgcagttagtcttgtaattgatgttacagctatactgtgcattataagctgtcgcttcagctccgacacctaaatgcagataagatgaatatacacctggatgttgttagtggtggtgaatgggttgaaatctctctgcatgtcatccatggttaggatg

SEQ ID NO: 136668 - DNA, 1018 bp, Glycine max
  unsure (1)..(1018): unsure at all n locations
  Clone ID: PAT_MRT3847_9441C.1
atttattactgattcaactcttagaatttgggcttaaagcctaactcaaccccacaaaatcagtttgtaaggtgagacgtgttcaagtcttatagggactacattggtcatatctctagtcaatgtgggatctcaacatcagcatacatatccttttttgcttaaatgcatgcaatacaactcccttgcattacagtgcaaaatacttcaaagaatccctctagggactgctatgtaatgacaagctactgattttttttttcctttctagaaaatatatattatgatttcacatgaatgcatgcaacacaactcccttacattacattgcaaaatacttcaaagaatccctttagggattgatatgtaatgacaagtgttaacagattgacaaatgtatcaattttatcacaagtaataaagattaaactgaagaccgagtgtcgagttcacaaaaactttgtttgtacttgcgttggtaaatactcaatttgtaaacaatagaagaagtggaagaggaaaaaaattgtaagtgtgaaatttgagggtaaaagggcaaaagaaaaaagataacaagaaaattaaacaatagcttaaatgcaaaagatgagttcagaatgcaattatgttgggacctatgcctaactacccttgatgcaatattaatgttttttctcgctttcccaatttccacccacgtttattaatatgttctcccctatccctcacgatgaagagcctaatttatgtattctctctcccacatccttttgcaaagatggaatcataaacaacattaagtataaagatgtatgcagaggcacaacaaagccactctaacaaggagctggatgcatcaccactactagtttggtaagtctgatcagggttatttgattctggatactgaagttagattcaattttgtcacaattcatgttacttgatgatgatggatgatcaaacagagtgatatcatcatctcgtannncctgtgtatnnnaatggcaatcagagt

SEQ ID NO: 136669 - DNA, 211 bp, Glycine max
  Clone ID: PAT_MRT3847_94420C.1
gacccactcgtccgacaatttcatttcattacaactctctttcaatctctcagcaacagaaacacaataccgggggcttttaatgccaaaggacctgcactatattcagaccaaatgcatagtcaaacgctaaagcataaaaaccgttgaaaattaaacactaagttataacaaatttaaaagaaaaaaacaaaatacaaaatatttcaac

SEQ ID NO: 136670 - DNA, 563 bp, Glycine max
  Clone ID: PAT_MRT3847_94421C.1
cctccgaatgctatataaaaatatagaggatctcgtgctgttattttgaaaattttatattgatagagaaaatatgcggtgccatgaataaattatagaattacttcacaaaccactggacatcactctaacaatctaaatactcactctggaggctactaaacctgtccatcccttattaatccaatatatagactctgcagacccaaacatcgggaacggtcaataacgatgtctacatagacttcgcgactagcgctgaccattatcgtgttgttagcagatccggcaacatcccctctagcacgtgcctcatcggtctagtcgtccttcgacggtcaacgctagcttgactatgtcatgttagcgatgcaatggcccggcactgactgcaaacgcacccgcagttgctgacccaccaatggttgctgtagaggctccaattctctagcaatattcaccatacatggactatggcctgactataatgatgtgagctggaccgtctgtagctctggatctagcgttgatccaacagagatatcaacattgactaatgcttt

SEQ ID NO: 136671 - DNA, 1524 bp, Glycine max
  Clone ID: PAT_MRT3847_94422C.1
ctgcagtatcctttttacactgaagggtcaaaggctctcctcgatgccagaatttatattgctaaatattctttgacaagggctgcattacgaattcaacgtgcacagagaagaagggatgatccagatgaagatatggatgcagagatgaattgggcattgaagcaggctgggaatttgagtcttgaattcagtgaaattggagatgatcggccactttctggttgctccttctcaagggatggaaaatggcttgctacctgttctctgacaggagcttccaagttgtggagcatgcccaaaataaaaaagcattccagctttaagggtcacacagagcgtgctactgatgttgcttattctcctgttcatgatcatttagcaactgcctctgctgatcgaacagcaaagtattggaatcaaggatctcttttgaagacatttgagggtcatctagaccgtcttgcacgcattgccttccatccatcagggaagtacctgggcactgctagctttgacaagacatggagattatgggacatagaaacaggagacgagttgcttcttcaagaaggccatagtagaagtgtatatggtttggctttccacaatgatggatcattggctgcatcttgtggactagactccctggctcgtgtttgggacctccgaactggaagaagtatccttgcactggaaggtcatgtcaaaccggttctcggcatcagtttttcacccaatggatatcatctagccacgggtggtgaagacaacacttgtcggatttgggatttgaggaagaagaaatccttttatactattcctgctcactctaatttaatttcacaagttaaatttgagccacaagaaggttactttttggtaactgcctcgtatgatatgactgctaaggtttggtcaggccgtgactttaagcctgtgaagacactatcagggcatgaagctaaagttacttctgtggatgttcttggagatggcgggtatattgttaccgtctcccatgatcgcaccataaagctgtggtccagcaatacgactgacgaacaagctatggatgttgactaagctaatttgaggggatgcaatttatcaaaggactttggtggtgcaagttagattaatcatttttgttagaaacaacagcgtagcagcatgactatgcttggatttttagtaattatacattgcattgaaaacatgttatttgccgcctgatgtatcactcaattgaggaactggagtactggtaatatctttctcgcttgatgtagcatgagtaaatatctcttaaatttttatatagcttttcccttgctgctgtttcgtaatttgtttttttcctttttatttttatttacaatagttaaagattggattttggtggaatgctcggtgtgtaaaagcattcggcagctttagtatttttaattgttgaattctattaataattgtattttatagggatattatatttgatttagagaaaacgggatacgttcaatt

SEQ ID NO: 136672 - DNA, 301 bp, Glycine max
  Clone ID: PAT_MRT3847_94423C.1
ttagtacgcatgggggaacttaaaatttcccgatctaacattttgctgcccaaaaacacagtaggcggaaccattctgcgctgggattcatgggccaattattgacagagggcagctttagagccagtgttgatttgcagcgcactcatctctttgaaggaatgactaacatggtggccacagttggtattcccgagaatacaggtagagcatcgccctgcgctatgaatagtgactttagggggcgcgccaactctgacagtcacaccatcagctctcaagactgtgaaaaatggaatcc

SEQ ID NO: 136673 - DNA, 320 bp, Glycine max
  Clone ID: PAT_MRT3847_94424C.1
atagtgtgctccatcttgcacacactctataatgtgggactctagtatacccaatctcggtgtgcgtatctcctgagctaaccctagctggcagagacgaccaccttgccggtagctgcctttgacaccatcgtcagcgcgtacgtcaagatccacgacctggaaggtcctgcctccggatcaacaatgtttagtcttgatccactgacagctctattacggacaaaccgtccccgcctactacatgacaaatggagtcgctgcttcacctattactccacctgcacctacgaatgcatatcttgctcaacaccctgact

SEQ ID NO: 136674 - DNA, 622 bp, Glycine max
  unsure (1)..(622): unsure at all n locations
  Clone ID: PAT_MRT3847_94425C.1
catcagtttttcacccaatggatatcatctagccacggggtgggaaggacaaccacttgtcgnatttgggatttgaggaagaagaaatccttttatactattcctgccccctctaatttaatatcacaagttaaatttgagccacacgaaggttactttttggtaactgcctcatatgacatgactgctaaggtttggtcaggccgtgactttaagcctgtgaagacactatctgggcatgaagctaaagttacttctgtggatgttcttggtgatggcgggtctattgttactgtctcacatgatcgcaccataaagctgtggtccagcaatccgactgatgaacaagctatggatgttgactaagctatttttgaggggatgcaatttatgaaaggactttagtggtgcaaactagataaatcatttatgttgcaaacaacagcgtagcatgactgcttggatttttagtaattatacattacattgaaaacatgttatttgccgcctgatgtatcacttatctagtcgcccaactaattacacaattgaggaactgagtattgctagtatgtttctcgcttgatgtagcatgagtaaaaatatatcgtaatttttatgt

SEQ ID NO: 136675 - DNA, 2556 bp, Glycine max
  Clone ID: PAT_MRT3847_94426C.1
ctcactttctctctgtgtgcgccattccgttgttcgcagcttctccttcgccggaacacttctccgaccgatccaactatcaattttccggcattgactccgatgattcctcactcggatccatagctctcacagtctccgggccactttttttttcttcttgttccttgctttccagatccgaatcccgacgcgaaaatcgggagagagaacgaacgaaccgttgatactacatggattagcatcacctcgatgaaaacctcttccacacgcgcctcacgaaacgattcgttttcctctcccacaaaatcatcatcgtccaatcctagggttagggtttttttctcaccgcgacaggatgttcaagaaaatcatgaaaggcgggcacaagaagccctccaagtccgacgccagtgatccggctccgcagccgtacgccgccgccaacttcagcgctccggcggcgccctccgccaatgtcgtcgtgaatttcgtctccttgacccccctcacgctctcctccggcggctccgtcgagccggtgcctccgttccgcgacgcgcccgtcgcggaacggcagaacctcttcctccggaagctccacgtgtgctgctacatcctcgacttctccgacacgctgaagaacggctcgaggaaagaaatcaagcgccaggcgctcatggacctcgtggacttcatccaatccggctccggcaagataagcgagaactgccaagaagagatgatcagaatgatctccgtcaacatttttcggtgcctcccgccggcgtcgcacgaaaacacaggccaagaacccaccgatcccgaagaggaggaaccttccttggacccttcttggccccaccttcagctcgtctacgagcttctcctcagatacgtggtttcctccgacaccgatacgaaaatcgcgaaacggtacatcgaccactcctttgttctcaagttgctcgatttgtttgactctgaggacccacgggagagggagtatttgaaaaccatactgcatcgtatatacgggaaattcatggtgcataggccctttattaggaaagctattaacaacattttttactttcggtttatatatgagactgagcggcatagtggtattggggagcttcttgagattctggggagtattattaatgggtgtgctttgcccatgaaggaggagcataagttgtttcttgctagggcgcttcttcctatgcacaagccccagccggttggggtgttccaccagcagttgtcgtattgcattgcgcagtttgtggagaaggattacaaactcgcggatacggttattaggggtttgttgaagtattggccagtcactaattgccagaaggaggtgctcttccttggggaactagaggaggtgctggaggccacgcagaccgcggagttccaacgctgcatggtccctctttttagacaggttgcccgctgcctcaatagttctcactttcaggttgcagaacgagctctctttttgtggaataatgagcatattgtcagcttaattgcccaaaacaggactgtagtattacccataatatttgaagcattggagaaaaatatcaagagtcattggaaccaggctgttcacggcctgactgtgaacgttcggaaaatgttcatagaaatggatgccgaattgtttgaagagtgtcagaggcagtatgaagagagggaggctaaagcaaaagaattagaagagcagcgggaattgaattggaaaagactggcagatgcagctgcacagaatggggtggatatggtcacagcttagtgaaattactttactgccgtaaccggcagtgtgaattggataggtgaaggattacatgtgctcctcgccattttggtgccattatttattggtttctttctttcccacttaatttcttttccccctctattttctcagttggataatcagcaagttgaagaagcagtgattaatgtaacttaaaagtgcagttgggataatcaatcggacgctgttagcaatgtctgcagattaagaatgtttaatgaaatactttcttatagttttttttttaggagtgactaaggcatttaattttactaccactgctagaggtgtgtattacataggtgaaggatgatgaatgtgctcttatccattttggtgccattatttatcggttgctttcttttcagcctaattttttttctcctcttctatcttattacattagtttgatcattagaattttaagaaatcagtgattgatctaacttattggaagttgttgcaatatctgcagattaagaatgtttcgtgaaatactttcttgtatttttctccttttataaagagaaatacggaagatttttccctttttacagataaagtacatctactgaattgctcccttgttttgttttcgatacggtcggaatcactgggatttggaaggcgttgtgcagtaaacctttaaaactaagagcgtttatgaagtgaccttgctattcgagcctggcagattggcacattttaataaggaa

SEQ ID NO: 136676 - DNA, 515 bp, Glycine max
  unsure (1)..(515): unsure at all n locations
  Clone ID: PAT_MRT3847_94427C.1
gtcattggaaccaggctgttcacggcttgactgtgaatgttcggaaaatgtttgtagaaatggatgcagaattgtntgaagagtgtcagaggcagtttgaagagagggaggctaaagcaaaagaattagaagtgcagagggaattgaattggaaaagactggcagaggcagcttcacagaatggggtggatatggtcacagcttagtaaaattactttactgccctaatcgggagtgtgaattggataggtgaaggattgtatgcgctccttgccattttgatgccattatttattggtttctttctttcccacttaatttctttttcccctctattttctcagttggataatcagcaagttgaagaaagcagtgattaatgtaacttaaaagtgcagttggataatcagtcggacgttgttagcaatgtctgcagattaagaatgtttaatgaaatactttcttgtatttttttccttacaaagagaaatacggatctttttttccccttctgg

SEQ ID NO: 136677 - DNA, 769 bp, Glycine max
  Clone ID: PAT_MRT3847_94428C.1
attgggtgatggtaacaaaaatataactgtccaaaatgtgaactgtggacctggtcatggcattagtgttggaagccttgggaggtacgataatgaagaggccgttgaaggtcttctagttaagaattgcactttgaacaatacagataacggtctgaggattaagacttggcctagcacgccattaacaattacagttactgatatgcattttgaagatattaccatggaaaatgtttcgaaccctgtgatcatagaccaagagtattgtccatggaaccagtgctccaaaaagaatccgtcaaaaatcaagataagcaaggtttccttcaaaaacattaagggcacttcaggaactaaagaaggagtgatttttatttgtagtagtgttgcaccatgtgagggtgtagagatgactgatgttgatctcacattcaatggagctgcaacaacagctaaatgtgctaacgtcaagcccgtaataacaggaaaagctcctacttgtgcagcctagaatgagcaactacaataatgcccatttttttaacaatgttcttatggttttttcctttcttgagttagcaagccatccccattaaaagaggagatgtctagctagtaattgtattcccttgtaaataaatacttcaacgcaactattcaataacaaaggacgtcttctttatttatattattaaggagcttgtaatatgtcccaaatatgcatacccaagtttaaattttagaaagtgtcatggaatgatataag

SEQ ID NO: 136678 - DNA, 290 bp, Glycine max
  Clone ID: PAT_MRT3847_94429C.1
ctctctgtgtatttccctacctctcccttcaagatgcatatcttcatcaataccctgaccggcaataccatcagccttgatgtggaaagctatgacaccatctacaacgtctaagccaagatccatgacaaggaaggaatcctccctgaccagcaacgtctcattttctcctgaaagcaacttgatgactgacatacccttgctgactacaacattcagaacgagagtactcttcacctcgtcctacgtctacgtcgtggcatgcagatctctcctaaaacactcaccgt

SEQ ID NO: 136679 - DNA, 329 bp, Glycine max
  Clone ID: PAT_MRT3847_9442C.1
gctccaggggttgcagatacccataaaggtgattcgagtacgtacctggcagatttgagacagttgggggaacaggctatacggggagggcttgatcctcggaacaaggtacccggtgctcctgaggcatcaatgacaagattgaccatctggtgcccttggtgaccatagtaacttgaatgctatgactgtattaaatgctaacaagggatgatctttggaggcattttgttgacccggttcatgattccattacacttctaatgtatctgctccccgagtttaagtttgaggaagttttagtcgctggaattcacgctttttaaatg

SEQ ID NO: 136680 - DNA, 750 bp, Glycine max
  Clone ID: PAT_MRT3847_94430C.1
ccacgcgtccggtcttcatggttcaacgactctattttagagaaactaataaagtctacacttcttgtggatataataatgatatatatggtggtgcaaaggttgccaccagtttattctctgttcatgtgatgatgaaattagcagtttgtgactctggaagtatatctgtgttattgcttcagaagattcatgaaattctgacgaagctcagcattcatcctgctttctctgaattggtgtctcagtattcacaacgtggttacagtgaagggaaggaactaaagaaattgatactcagtgacctctattatcatttgcaaggagaacttgaagggaggaaaattgatattggcccattcaaagaattatctcagtatcttgtcgaatcaaattttttgggaacgtatcaacacctgttcaatgaagactcttttacaaagaacatgtttacaaagaatgtgtacttgtttgaccttgcacacttgcgagaagatttgagattagatttgtggggattgttctaattggaaaacatccaaggagattgcagaaaccatgctgcgtttcctgcaggatgcaaactcagttatgttgctttcaagttcaaagctttctgctttgaaaggactgatagctggtttggctgtcaaccattatgattcacaagggagggctaccactggagggagaatttcagatgaactcatattcgctttcatggataatatatgccaatctttccttgct

SEQ ID NO: 136681 - DNA, 250 bp, Glycine max
  unsure (1)..(250): unsure at all n locations
  Clone ID: PAT_MRT3847_94431C.1
ccgaccagcaacagtctccagcgcgacgaacgacggcgcgagcatcggcaacgcacacgacaatcgcagatgacgttctcgagcgcaatggcagtagaccagcagacgatgcacgcgaganaccgacgaccaaggcacgagacatgcgaccgccgcatgacgcacgacacacgtcnacggcgacgacagtnctctggtgcgttttattnttttttgttntgtcatggcaatctgggcttcttaaacaaag

SEQ ID NO: 136682 - DNA, 194 bp, Glycine max
  Clone ID: PAT_MRT3847_94432C.1
gtcgacccccgaaggaaaaaaaaggtttgatgggctcttttttcaggaaaaccaaaattgaaaatggttttgttgggtgttagactcacccccccaaaaaaggaaaaatccgggcgggttccacacaacattccctttgttggagaccaggggtttgaggggcccccatgggaccttgtaatgatttcttgggg

SEQ ID NO: 136683 - DNA, 584 bp, Glycine max
  Clone ID: PAT_MRT3847_94433C.1
aattcatcaaaacatcttttattttagagcttttataaaatggtatttggccaatcacacattttgacagggatagaagctcaaaaatagttgggccaaatgctaaagccatctcagataagaagacaaattatcaagaaatcatatcaaagaaaccaactcatgtttctcaaaagttacagaaaaagctgaaattgcaagaaaggttcaccaggacacaactcatcaaatcaattccctatgcatggtaaaaaatccagcaagctctgaggtccaggaaagcagatgcccctaaccacatattttcccgaaaccaagatgaccatgaacagttccccactcagaaaaagctcaaaaaatggatacaaagaggggtataccaacaaaatgaacctctaggtacatacatgaataatatcaccaggttttggccaccaactaccgaaggtgcataggcttatagtatacctctgaattaatagcggtttttctctagaagtgtaaaatagatggcttggataaaatgagtcgaaataaattggatgggtaaaaaacaaaatctgtccacttgtgacctattaaaa

SEQ ID NO: 136684 - DNA, 317 bp, Glycine max
  Clone ID: PAT_MRT3847_94434C.1
tccggaaattcccgggttcgaacccacgcgttccgaaggaccggaaaagccgaaaccgtcaccagctgccatacttggcaataacggcaatcaatcgttcgaaacggccgcctctgaactgcagacctctgacagggggaaagcttaccctgcggggacactgcaaagagaactccagcacttacaactaaaagctttctctcaagacgcccaactatgacaactactaccaggtggatgttgggactctgaatggacactgttgaaaacttggttaaaacccaacccccggaacgactggactggggttggcttgg

SEQ ID NO: 136685 - DNA, 271 bp, Glycine max
  unsure (1)..(271): unsure at all n locations
  Clone ID: PAT_MRT3847_94435C.1
cggctcgagctcgagccgaagcatttaatgattaatgactatttccatttgttcttatccaaaaagaactgtagcagcattgcttgagcaaatggcagaggaggaaatagtacattaaaaaggagggatgcttgtaagtagttttcgtgtaaaaaataaaagagtttgttgaatttatgtggaacaagcatttaatgattaatgactatttccatttgttcttatcccncnnacacttttctctctttctcttttttttttcttaattaat

SEQ ID NO: 136686 - DNA, 348 bp, Glycine max
  Clone ID: PAT_MRT3847_94436C.1
gtttggcctacgactccacgcgtggacctgcgaatctcccctgatcgcatctcaaatctgctatccgtggcttcatatcactcgacggggaccttcgcttgacccatctgaagatccagttgaatctggatctgatcgaaactgtactgactcaaatcctctgcagatctgacgcgcatgatcgccattctcactctgctcatcgtatacgtgcgtcagaaatgtctcttttaccgcaaggcgcactccttcaaatcactgagagttgcaacgattacctacaggaggagttctacgtgttccgagaaattgtcaactagtataactacgaggcgacggattcctagt

SEQ ID NO: 136687 - DNA, 465 bp, Glycine max
  unsure (1)..(465): unsure at all n locations
  Clone ID: PAT_MRT3847_94437C.1
tttcgtcaacattgttctcatggtttgattaaaaataacatttgttaggtaattaacaacgcagatcgagcacgcagggccaatcatttatatatgagaggctgaagacagtttgaatttgtcattttgagtagtcatttgtatgatgatcattgtgagcgaaggagggacacaaaatgatgtgtttgcaagagatgcgttgctgtctggaatcagaggaaaggcatatgcggagactacttgaattttgacaaactaagactagagggaagcaatcgcgagttgaggatgaatgcctatccttgccatcacaaataaaaagaatttttttctctgtttatagaagtttggcttttgttctacactacagtttatacaagttctttgttcatcctctgagcaatataatatgagtgtttttccttaattaatgtagctaaatatatatcggggaaaggatntctg

SEQ ID NO: 136688 - DNA, 210 bp, Glycine max
  Clone ID: PAT_MRT3847_94438C.1
atccttgggtttggttaacaggacaaatactttggccttagatttttccgaacagaaacaaaactccccgaaattttatttcaatccgttgtacaataacaccttttttttctgataaaaaaaaacaaattgtcaactatagaagcaatcgtggtttgaaaaaaaccttggtaccctccggccttaaattccaaacaggattttggccca

SEQ ID NO: 136689 - DNA, 503 bp, Glycine max
  Clone ID: PAT_MRT3847_94439C.1
aagtaaacttttttgtattatactacaaacctatcaataaagctgtggcaatagctaaaacattctttgctgaaagtgcttttctccaatttgggtttgaaacgttgctgggagttcctatatgccactttatgtacaaggggcatgctacactttcatcctctttagagtacaaggattattctataaaaaagagtaaggactttcttgtaagtaacataccggttgttctgtacaacgactacgcaactatctgctttgtgactgtctctacattcaacttgtactgtgcaagctgatgtattggatctgccctaggcaaagccaaaaactgcactactataagaatagaaccttcgacacaaacgacatcctttgaagaggcttgatttggactactacgcatcttacgacatccagggccctgaataactgtgccctggcagaagccattcgtgcggctgtccacttccaattagaatctaataccatggtccaggaaa

SEQ ID NO: 136690 - DNA, 412 bp, Glycine max
  Clone ID: PAT_MRT3847_9443C.1
tcctactcgtccgtaaaccgcgatcataggttgccgtaccttagaaccggaaacaaaagcaatcgctacttgattccaagaatctttcaatttcttcctacttttttgtgaacgacttcttaagggaaagaaattcactctatgtgctggccacagacttcgtgaatcattttcttttgcattcttagtttatttgctgaacactctcctatttgatataggacttcgtgtcagatttaaacttcttctgtttcttttgcagttctctgtttaattacaagttcaagctggtgaaatcttggattagtgctcccactctactatctggtctaggacttcgagggtggacttttctattgctcttctttctttcactctattattctcactgatccagattgccgcccaaagt

SEQ ID NO: 136691 - DNA, 238 bp, Glycine max
  Clone ID: PAT_MRT3847_94440C.1
gcggttttgttttttttttttttttttttttttgaaagggaaaatttttattatagaaatttttcaccttgaatcccccagaagaggggggcctccagaaagagaccgacctcttcagtgttacacccttcaccactaatattaaccccattctcttttagaagtggggggggcgctcggggaacacaagtgcacagggcacagggggtgaaaaaacacaaatatggaaatttaaccc

SEQ ID NO: 136692 - DNA, 424 bp, Glycine max
  unsure (1)..(424): unsure at all n locations
  Clone ID: PAT_MRT3847_94441C.1
agcgagaagaggttgcagtgtttttgaagaagattgcttactaaaaggatactacaatctatgtgacacaatcaaagaggcttgaaagcctagagggtgtgatatattcntcccctaaaacatatacaaactaatccatcattcccacatataaaaagaaaaagttcctagactctaaacattcttatttggacaaaatgattgacttttatattacctcttaaaatgatcttttcgtaccaccaatatcaggtctattttattcaaatatatcttgtaaaaaaattggctctactaaataccatatactggatcctactaatattccagattcatctgcttctgcctccatactcttctcccattatgtctccaataaaaaccacttcacctatccttcctactgttagttccaattgaaaac

SEQ ID NO: 136693 - DNA, 266 bp, Glycine max
  Clone ID: PAT_MRT3847_94442C.1
ggggagcattgacaagccacttgattgaaaaaaagccacaaatctacaaatattatttccaacgaaaatgttacacatgcgtgcaagctttaggaaataaatgaagcgtagcaagcatcagggactccacaggatgcggggccattaaaacgggcacaatataaccacttgaaagggggaatacacatgcagggtgggacttgggaactgagctagcttggaaattatctaactcgacagataacgggtcatccatgtctcaaagc

SEQ ID NO: 136694 - DNA, 266 bp, Glycine max
  Clone ID: PAT_MRT3847_94443C.1
aagctaccccatcacccaactacccaatccgacatcgaccaaatcgagaaccacatcaatgccaacgttcaccaatcagacccaacaacaattcaaacattcaaccacgcgccaccatccccgacaccgtcaccatctccactgccccttcccccaacatctcttccaacctccctcctatcccacccctccccaaatcctccgactccgccgaaccaccgtccccaccaccgcctcgccccggcatcgccacctccgggttcggt

SEQ ID NO: 136695 - DNA, 133 bp, Glycine max
  Clone ID: PAT_MRT3847_94444C.1
gccgccgctggcctcctgcagcatgtcgccggtgttgatcaccagccagccggcatcgccgggcacgtcgcgccacaggccgtcgcggccgagcacctgcaggcccggctcgcgcgctgcgggcagcacggtg

SEQ ID NO: 136696 - DNA, 276 bp, Glycine max
  Clone ID: PAT_MRT3847_94445C.1
aatccccgggacgacccacgccgccgcttttttcgcggacggacacgcgggccgacgcgggggactacagagaaaacgggggggaggccaaaaaacgaacacaagaattcgaagagagggaacgagcaacaggagggacaacaaagggacaaaagggaagaaacagggaaaggcaagagccgtggaggaccacggagaagaagggggagaacaacagacaaggcaagtggaggggactcaagggaacaaggacccggagagcatcgagaaagggga

SEQ ID NO: 136697 - DNA, 574 bp, Glycine max
  Clone ID: PAT_MRT3847_94446C.1
aaacccaaacccggcggggggcccaaaaaaaaaaacccaaaatagcgaaaaaaaaggggaaaattaagggccagagttaaagcaatattgggggcaaaaaaaaatggacaatggggcccggatatcccaggaaaatatataccaaaaaagggaaccccgggggaagaggaagaaaaaaaaagaggggggggcccaaaaaaaaaagggggggtggccagggaacttgaccccaaaaggacaaacatttttaccaaaaaaccggaagttttgccccccccctggggggccgggggggaccttttaagggaaaaccccctccttggggggcaaaaacggaacccccccattagggaaaaccctggaaaacggggactggatcttggactgggaccggggcctaaccccaaaagccaagccctggtccttccgggccaactggaaaagggtaggacccccccttaagaaagcggcccccccagggggcatttaaaaaatctgttttttgggggagccccacgtaaggacaaaaaacccccccccctgggccttgggcaagaacccgccggggctgccc

SEQ ID NO: 136698 - DNA, 1000 bp, Glycine max
  Clone ID: PAT_MRT3847_94447C.1
agaattcttgtcaccgccccccaaactttaaaaagttaaaaacagtttaaaaggaacaaagacaataatacaatttgactctcaggtagacggcagacaatgcatataaaaaaaaggggcaggaatgaaaggagtaaaatctgaggtagcatccaagaaactttccactataaccagatgagaagaatgttgaaaaaaagggtacagtgcattgtacaccaaatttgcacacttaaatacctaagttaaacatcacgagcataattataatcatatagaatacaacttcgcacagggcagctgcggccatatatggtctcttgggaccaaacaatggttgcatttaattattagaccgcggaaggaaatgcctcctgtgaccggtccctttcaaactcacatcaagacccttaaaaacccgggaggtgaataagattagtagctgttttgccatatttgtggggactgcttaggtggttgggtttgagagccagcaagggatgcttcccttggattctgctgctgatgttccagagaaatcccagtctgagaatggtagaagttagggtatcctccaaaatgctgtgaaggctgttgctgctgttgctgcctttgccgaaatccacctggttgttgttgattctgtccctgcaaattataatagttgctgggaggaactgcagacattgttcgagagccagggccctgaacccacatgggagaattctcgttctgctgtagtgacatcatatgattattgtccttaaactgggagtttataagatcctcatatccaatggttgtcccagtaggagcagcaggtggattcagagaaaaatttcctccaggaatgcttgttgaactgccaaagccatatccaggaggaatagcagcagactgaggcaaactgctggcagaaacattatttttatactctggcagcagtgcttccacacccacgcgtccgcggacgcgtgggtcgagccgggaattccggccc

SEQ ID NO: 136699 - DNA, 208 bp, Glycine max
  Clone ID: PAT_MRT3847_94448C.1
agtaaaaaaactcacattattaatctcaattgatctacctactaagacagtatttgcttggaaaaagcatgatacaccccatcaaaactgacgatccttctaaagactacataaaaagcacttcacaacatcgtaaatgaaacaacatacgatcactgcaccaaaattaactgtacactactaatggaaataatgacgatactctttc

SEQ ID NO: 136700 - DNA, 387 bp, Glycine max
  Clone ID: PAT_MRT3847_94449C.1
ggctcgagctgtatggatgaatcgattaacagaatatgtgttgaccgagccgatagtgctcagcgcttaacatacggaatccttgttatgactcatagactgagcctgactatttatacgcacttccccaggatgctttgcgcattgagtgtgatcacatgtacaaggccgacacaacctatacaacgtgtgagatactgaaggtgatacggttacggatgcatcagtcatggagtgtgtgcttcacaaacgtggctttgactaagattgaagctagccagctataagcatataggctctggcattgatatggctgctgacacagttgctgatcatcaaacatagacgtaatgtggtcagcttgagcagatccgggtatgataatct

SEQ ID NO: 136701 - DNA, 393 bp, Glycine max
  Clone ID: PAT_MRT3847_9444C.1
cggctctcctcttttctcctctctttccttttgcacaacgtttcctttcttaacgctgtgcgccttgttaccccatcagtttttgtttcggagtagttctccaagtcgttcttttgcaggcctggcgccaggaagaaacaacagtcgttcactcgtttgtgcattgcatcactcacgttccttacagcagctgttccgggtagtgctggtatagacaaagaggttattggcccatctacgcagcgtagttacaccattgtgtcgaaacatttccctcgacattgaattgcatgccaagtgggcgcgcaccaccaacgctctgggaaagttgacagcaagagctttggaatttggttgtctacggcaacgcacagtcagcgggacatcacagtg

SEQ ID NO: 136702 - DNA, 458 bp, Glycine max
  unsure (1)..(458): unsure at all n locations
  Clone ID: PAT_MRT3847_94450C.1
cccacgcgtncgcagagatgcctctaattggtacttgcagtcagtatcgtcaccagggaatgtgccgactgcttgtgagtgctattgaacagatgttaatatctttcaaggtggaaaagcttgtggtatcagccattccagatttggtcgaaacatggacaaaaggctttggatttataactgtcgatgacattgaaaggcaaagattgaataaaattaacttgatggttgttactgggacagagttacttgtgaaatccttacatgggaaggagaaaattgaaagactgtgtgatctatcaattctagcaacagatgaatcaatcaaagcatgtatctgttctgaaggaatggccatttctgaatcatttgcacaagttggtggaaacataactaccaacaaaggtggagcaaaagcagaacatgaacctgtggatggaaaaaatcaatcagactat

SEQ ID NO: 136703 - DNA, 284 bp, Glycine max
  unsure (1)..(284): unsure at all n locations
  Clone ID: PAT_MRT3847_94451C.1
aaaaaggggcgcccacccttccccacaccttcttaactttntaaaaatttacactcaatacataccctactttancggcacatctcaaacaagatagccttccattttcctttctaacaaataataacattctttctaataacactaattattccaaaattaaaacaaatatttatatcatagactgatctcttcctctacatttgaaaaccaatatctccttccttaatcaatataggctacctaaacccacttttatttttcactatacctattctccctat

SEQ ID NO: 136704 - DNA, 252 bp, Glycine max
  Clone ID: PAT_MRT3847_94452C.1
atcttgtctctctctttcactctgctcattcttttcgccgatccaatctgaatgaagatgtgtatatacatgcattcagcatttgccaaaacgagatccatcttcttcacaccttcactactcctcttcatattcgcagtcaccacacaccaacttctcatacatccacatctaccatcatgctcctttaaaaaactcggcaattcctacctcctcgcttgccgcaactaacgcatcttcacttcccaaccc

SEQ ID NO: 136705 - DNA, 3497 bp, Glycine max
  Clone ID: PAT_MRT3847_94453C.1
ctcacgcgttcgctgcggcttcttctccttttttgtctcacccaggagtttatgttccatcacccccaatggctcccccactaggtatccagccaatgcagcagccaggatctgtgcccccaatccgtgctattcagggcttggcagaagacttcaacgcactcacattgcaaactcgtcctggaacaatggatccgttatttgatgccaaggaacttccacggccattagaaggtgatattgaaccaaagaatttggttgacatgtatcccatgaactgcaatccccggtatctacgactcacaaccagtgcagttcctagctctcagtccttggcttcaaggtggcatcttcctcttggagcagttgtatgtccgcttgctgagcctcctgatggggaagaggtgcctatagttaattttgctccagctagtgttgtccgctgcagaagatgtcgcacatatgtgaatccttatatgacatttacggaagctggaagaaagtttcgttgcaacgtctgtaccttgcttaatgatgtgcctagtgaatattatgctcaattagatgcaactggaaaaagagttgatataaatcaacgacctgagcttacaaaggggaccgtagaatttgttgcccctgctgagtacatggtgcggcctcctatgccaccagtgtatttcttcctcattgatgtttccatatctgctgttagaagtggcatgattgaggttgtagccaatacaataaagtcatgcttagatgagctgcccggctttccacgtacgcaaatagggtttgcaacttttgacagcacaatacatttttataacatgaagtcttccttgactcaaccacagatgttggtagtgtcagatctcgatgatatatttattccactgccagatgatcttctcgttaacttgtctgaatcaagaaatgtggtagaaaccttcctagatagtttgccaaccatgttccaggacaatgtaaacttggaatcagcttttggtcctgctcttaaggctgcatttatggttatgagtcaacttggagggaaattgttaatatttcaaaacacacttccatctcttggtgttggccgcttgaagttacgtggagatgattctcgtgtttacgggacagacaaagaatatggattgagactgcctgatgatccattctataaacaaatggctgctgagttttccaagtaccaaatctcaacaaatgtgtatgcattcagtgataagtacactgacatagcctccttaggaactctggcaaagtatactgctggtcaagtgtattactacccagctttccaatcagccattcatggggagaaattgagacatgaattgaggagagaccttaccagagaaactgcatgggaagctgtaatgcgcattagatgtgcaaaaggtgttcgcttcacaacttatcatggaaacttcatgctgaggtccactgatttgttagcacttcctgctgtagattgtgataaagcctttgccatgcagttatcacttgaagagacattgttgacaactcagacaatgtatttgcaagtagcattgttatatactgcatcttgtggtgaaaggcgaataagagtacacacaatggcagttccagtagttacagagttagcagatatctatcggctggctgatacgggtgcaattgtatcactgttaagtaggctagcaattgagaaaacattgtcccaaaaactggaagatgcacggagtgctgttcaactaagagttgtgaaagccctcagggaatatcgaaatctttattctgtgcaacatcgcttggcaaacagaatgatatatcctgagtctttaaagttcttaatgttgtatggattagccctttgtagatcaacagctttacgtggagggtatggcgatgttccactggatgaacggtgtgctgcaggacacataatgatgactgtatcaataaaaagactgttgaaacttctctatcctagcttaattcgacttgatgaatatcttctgaaggcatctgtacaggctgatgacttaaaaagtgttgagagaaggttacctttgactggggagagcttagactctagaggcctttatatttatgatgatggtttccggttcattatatggtttggtcgggtgatttcacctgatatagccaagaatttacttggggcagactttgcagcagaactatcaaagactactctcagtgagcatgataatgaaatgtcaaggaggctggtgaaggtacttgagaagttgagatatacagatcgtgcatattaccagttgtgccaccttgtgaggcaaggtgaacaacccaaagaaggattcctccttctttcaaaccttgttgaggaccagatgggtggtaacagtgggtatgctgaatggatgctgcagatatcccgacaagtgcagcaatcataatatatagcttccctggctaaataagcaagtcaggtctgctatttgtctcacaagtgacgaccatttctttctgcattggagatatattaaatctgtcctttgggggtgcttggagaagcattcttgacctggctaattgatcgtgacttgtgagaagcatgcttttgagagattgttgattcatcctgggatgtatccgttaggtgaactctaccacagagattgaatttaaacgtgttttcatgtttttgatatagagggaagaaagaaacacttttttggttactttaccttgtgagattagttgtcactttctgttttatatttccttttgtcgtcatcttatggttgattctttcattgtagaaaaagaaagtagacagagaactgagaagagatggcatgtcaaattggtcttgcgaaatcttaaattttgtttgttgaaaattattatttattgtgatagtgggtatgctgaatggatgctgcagatatctcgacaagtgcagcaatcataatatatagcttccctggctaaataagcaagtcagatctgctatttgtctcacaagtgacgaccatttctttctgcattggaggtatattaaatctgtcctttggggtgcttggagaagcattcttgacctggctaattgatcgtgacctgtgagaagcatgcttttgagagattgttgattcatcctgggatatatccgttaggtgaattctaccacagattgaatttaaacgtgtgttcatgtttttgatatagagggaagaaagaaacacttttttggttactttaccttgtgagataagttgtcactttctgtcttatatttccttttgtcgtcgtcttatggttgattctttcattgtagaaaaagtagacagagaactaagaagagatggcatgtcaaattggtcttgcaaaatcttagattttgtttgttgacaattatttattctggtatttaatgttgaaactttgttttctttcaaaaaaaaaaaaaaaaaaaaaaaaaaaaactcgagactagttctctc

SEQ ID NO: 136706 - DNA, 214 bp, Glycine max
  unsure (1)..(214): unsure at all n locations
  Clone ID: PAT_MRT3847_94454C.1
gtgttcagaaccttgcaattggtgagttnaaaaatagcaagcnnctcaagctgactgtcaatgcattgtnngggagcgtatagannaattatcaattgnnatagtttcgcaaggtccctgattggcaacccatagttggtgccaatgctttttggtgtgataccttaatcataccaatcctgaaaatgcagttctgtagtattttntgttgcgc

SEQ ID NO: 136707 - DNA, 314 bp, Glycine max
  Clone ID: PAT_MRT3847_94455C.1
aaaaaacaaaattttataaataaaattaaaaattcaaaaataaaaacaaatacaaattattttcattaaaaaatttaatcttaaaaaaattcactctaaccaaaattaatttgtgcaccataattcaagacactttaataattaagaaatatataaaaacattacaaacagaattcctaagtcccaatagctcatacaattgggttttacttctaaaaaaaataattgccaaacttaccttaaaaaaaaaaaaatttttttcttaaagcaaagaaaaaagaacatccatttccatagggacaaaacttgggttt

SEQ ID NO: 136708 - DNA, 2077 bp, Glycine max
  unsure (1)..(2077): unsure at all n locations
  Clone ID: PAT_MRT3847_94456C.1
gtaccgccctgcaggttatccggtncnncggaattcccggnngtcgaccccacgnncgtnnccggaacactgtcttttggggttgaatatgaagaaaaagtcctttttactccatgtgctgaatgtgaatcaatccttcaacttggtctttcgggtgtaacaaatgaggcatcaagtgtgcttgactgatgagtgggcggacgggtgggtgtgaatatgtcatgtttctcaagccaaacttcttcagaaaattattattcaaggattcctgttgttgatgagggttctacctcagcaaagaaatcaggtggctatatgccatcacttcttttagctccaagaatggatagcgctgaaagttcggtgcagacacaagaatttattgttggaagtaaacctcaaccgtgcccagaaccatccaatggtgtagattactcacttggcactgtatctgggccccaggatacagggataactccagagaaccgaacatgcaaccctaagagatgtagattttttggctgtacgaaaggagctcgaggtgcttcggggctttgtattggacatggtggtggacagagatgtcagaaacctggatgcaacaaaggtgctgagagccgaactgcttattgcaaggcccatggtggagggaagaggtgccaacacttgggatgtactaaaagtgctgaggggaagacggattattgcattgctcatggcggtggtaggcgatgtgggtatccaggtgggtgcaacaaagctgcacggggtaagtcaggactttgcattagacatggagggggtaagaggtgtagaatagaaggttgcactcggagtgctgaagggcaggctgggttgtgcatctctcatggaggtggacgccgttgtcagtaccaagaatgtagtaagggtgcacaagggagcactatgtattgcaaagcacatggtggtgggaaacgatgctcatttgcagggtgtaccaaaggtgccgaaggaagcaccccattgtgtaaggcacatggtggggggaagcgctgccttttcaatggaggtggcatttgcccaaaaagtgtgcatggaggcactaacttctgtgttgctcatggtggtggaaagaggtgtgctgttgcaggttgcaccaagagtgcacgtggccgtactgactgttgtgtcaggcatggtggggggaagcgatgcaagtatgaaggctgtgggaagagtgctcaagggagcacagatttctgcaaggcacatggtggaggaaagcgatgtagttggggagatggaaagtgtgagaaatttgcaaggggaaagagtggactctgtgctgctcacagcagcttggtgcaagagcgggaaatgaacaagggcagtctgattgcacccggacttttccgtggtcttgtaccttctgcttccacggcctgtagcagttttgagaacaattcttcctcaggtgtcagtgttctgtccgactcctacgattccatggaaactccagcaaaaagacagcacctgatacccaaggaggtgctagttccgctctcgatgaaatcaccatcttattcaagcttcttggctgccaagaagtcggaccaagatagaaactgccaaagcttggccgcaggcggcagtggtgctcagaaaggcattgactttaatctcccggagggcagggtccacggcggcgacctcatgttgtattttggagggaatctcaaaaatgcacttgacggcatctgaaatgggagagggagccggtgtcgcgcaagttgtagattcattttaggaattagggaccatttccatcatggaattctgtataatgctttgttgctgcttgttcaataactgtgtatagttgggtgtttattattattattagccattaggctcttcctattgtttgtagtgctttgtctgtaaggtggctttcattattcattctaagatggtgaacttgctgcaatttaatcattgtaatattcttaaacatatatttttattgttttaaaaataaaagcggtgaaaactgaagaccacatctgctttgtggccttgtttcgcaaactataaa

SEQ ID NO: 136709 - DNA, 769 bp, Glycine max
  unsure (1)..(769): unsure at all n locations
  Clone ID: PAT_MRT3847_94457C.1
attggctttggagaaacaaataagactagttatacatgtaccaggagcaatcttgggatgaagttttccaatgggggggatgatggctgcaaattggttctgggattgggcccaacccctatggcatatgtcgatgactacaacaatttggggtttaatatgaagaaaaactcagccaacctttttactcagcatgtgccatctgaatgtgaatcaatccttcaacttggcctttcgggtgtaacaaatgaggcctcaagtgtgcttgactgctcaggttcaactgagactgatgtgaatatgtcatgtttctcaagccaaacttcttcagaaaattattattcaaggattcctgttgttgatgagggttctacctcagcaaagaaatcaggcggctatataccatcacttcttttagctccaagaatggataacactgaaagttcggtgcaaacacaagaattaattgttggaagtaaacctcaactgtgcccagaaccatccaatgctgtaaattactcccttggtactgtatctgggccccaggatacagggataactccagagaaccgaacatgcaatcctaagagatgtagattttttggctgtacgaaaggagctcgaggtgcttcggggctttgtatcgggcatggtggtggacagagatgtcagaaacctggatgcacanaggtgctgagagccgaactgcttattgtaaggcccatggtgganggaagaggtgccaacacttgngatgtactaaaagtgc

SEQ ID NO: 136710 - DNA, 322 bp, Glycine max
  unsure (1)..(322): unsure at all n locations
  Clone ID: PAT_MRT3847_94458C.1
atngcnacacnnancaaacnccngaaggcnnctnnagnaanggtnnnaccngncnagntnctcgnnnnagannngngacntcncggacgncganagngtnnagggntaagggcaaaaatacgnnngacccnanatgcagnaangcncagnngnangaacnngnnnaagnncanagtagnnnacaagttnganngtctngannacatnngcattctgattccnanctagccntcnatgcccattgctnatnacanntgncngatnaagcangtgnngagancanancntgatatgcangagtcgcnnatagcagcgaaatgnt

SEQ ID NO: 136711 - DNA, 408 bp, Glycine max
  Clone ID: PAT_MRT3847_94459C.1
cccacgcgtccgctcaaatatggccaaaatgaaagtgtccgaatctctggaccccatgggtgccccaaccgatgactcctcctcagctctgcagattcagaacctcaaaaacctcaacgccctccttctcaaggagaccacccaacgccgccaccagattcactctctccagtccgccctccaccgctccgccgtcacattcgacaccaacctcgccttccacctccaaaacgccgtcgtttccgtcttcttcaagaaccagctccaggaaatgaacctccgcttcgacaccctgctcggagatagggacttcgaggtttccgctctcaagcaccagctcagcgacctcgtcgcgcgtctcgagaacgaaacgactgctctcgccgaggatcgtgacgggctcgttcg

SEQ ID NO: 136712 - DNA, 418 bp, Glycine max
  Clone ID: PAT_MRT3847_9445C.1
gtgtgttcatccattgaattttgatcctagcaagcagagcttttgtcaatggtctgttgaccttctcggcggaggaattttagtggacaaaactggagattggatcacacttatacaaaattctgcaattagtaacttgttgagagtggctgcttggaagaatggctgatcactggttaagattgggatacccgggaatgctgcagtcaaagggagtgattgacactctttggtacaagtgtttttaacaaacagcaacagtacagagcattttgatgcatgcaagtggacaaaatcggaaccacattcctgggaattgatcttcccaatagaggagagtggtcctaacaatgggtttgaaatgtggagttctgagtgggcaaatcaaacttcatggcactagagtttccttattgac

SEQ ID NO: 136713 - DNA, 425 bp, Glycine max
  Clone ID: PAT_MRT3847_94460C.1
gggggaaaaaagatttcttttcaaacttttttttactggggacagcaaatgaaaaaacattctgggtttaatttagggaaaaatttttttcccgggcttattttggggttccctttttatgtccaagggaccctgtttacattccctgggggccccctgccccaaatgaaagattgaatgaatggaaaaatgtcccgtttaggcaagctgaactttaatagaaggctttcacatgttagtcccccttgaagcttcattaaaaattaaaaacttctttccatgggggggattccccccaaaaaaacaaggttttagttgcttgttcaagtccaactcccatgatctatggccttcccctgcctttgacatataacggccaaaccaaacccctttttagcttttttagagggatttacattttttcc

SEQ ID NO: 136714 - DNA, 398 bp, Glycine max
  Clone ID: PAT_MRT3847_94461C.1
gtcaaaacccactttcccaaaaacgggcgttaagctttgcggcgggcaaccggaaaacaggtaacccgaaagcaaaaatgacaaagccaggggagtgcaaccaactttttggttaacacccccttgttaaaaaaaaccctgttaacgaaaacacactttttggaaggagataatggggagagaaccttttaaaaaaaatggggatacacagagtgggaatttgcatgaaaggcaccccaatttaaaaaggggcgactcaaaaaggggatttaaaaaaagtgtggggattattgaggtaggattctgcttgaacaaataagggagggcttgtttggcggaggctattttacaaaacgcgggcctacaatacccttggaggggattccgtgcgcagggaa

SEQ ID NO: 136715 - DNA, 289 bp, Glycine max
  Clone ID: PAT_MRT3847_94462C.1
acgcgtccggcatgcgttcgccactcgaactggcaagatcacatgtgccattatgataatctcaggccacgtcgccaaaggctcaaactcggacgggaaattcttacatgtcatcctaccggggataaattatacacacgatgagtgaacacttatcatatcatgatcaaggttcgagctcttgaaacgggagtgaagtatcagacatgtggactggttgcttgctaggttccgttcatgatagaacgtgggatctgaacgactcacccgatcagaggattaacatgga

SEQ ID NO: 136716 - DNA, 316 bp, Glycine max
  Clone ID: PAT_MRT3847_94463C.1
atactaattactttcaatcttataattacttattcccggagggctaatacttaccacgagtgctagcataaggtgaacgccagccatactatagctgatagtgccactgctataacagattattatacagctcttctattgcatttactgaatacaaaaaattaatactttacatacatgttatcatatgcaactgggaatctacattatggcctcttatagcgacaaatgggagtatccgaatatgaaccatcaatacccgtaccccatctacttgcgaacactacaaaccgtagccaatcataacccgtgcgca

SEQ ID NO: 136717 - DNA, 236 bp, Glycine max
  Clone ID: PAT_MRT3847_94464C.1
tggtcagccatcacaacaaacaatcctaacatccaaaaacgttttttttttttctaaataatatactaaacggatggtctgccatcacaaaactgggggcaggattccttaccacaataacctaaccatccttttctataattcacttattttccaattctaccattatatgtgccttccatttaccttaaacttatgcttccacactatcttttatatataacatttttcattaa

SEQ ID NO: 136718 - DNA, 130 bp, Glycine max
  Clone ID: PAT_MRT3847_94465C.1
cgctgacaagtgcatggccaacactgccttttgattatgaagcatccctgagcaagaagagagagcctcaagctacagggcgaggactctggagcaatcaatgcattatctaggaatatgatcaatgctg

SEQ ID NO: 136719 - DNA, 576 bp, Glycine max
  Clone ID: PAT_MRT3847_94466C.1
cggacgcgtgggttgccactgggatggttcgttttggaccatgtagcagcacagcgatactattatgtctatgcatagttttaggttcttgcaacttatattcccctgtcgtcgttgtttctctacccaaaattctgtgtttcgatctcttctggattattctggaaacgacccagtagcgttgatagctactcagttgagtaattgcgctactgtgagggaacttaaccaagtgtatgcccacgttttaacgacgcactttttgatctccaatccggcgccgtttaattggaacaacattgtaaggtcatacactaggctagaggctccacgcaatgcacttcgcatcctcgttttcatgttaaggaatggggttttgcccgattgttacaccctccccattgctctcaaggccgtgtgccaaacatttgatgttaaccttgggaaacagcttcattccattgctatcaagattggactgcaatgtaacgagtactgtgaaacggggtttcttagcttggatcttaaagctggtgaattttgaggtgcccgtatggtgtttgacgaaaatcctga

SEQ ID NO: 136720 - DNA, 400 bp, Glycine max
  Clone ID: PAT_MRT3847_94467C.1
gttattgttctttttttggaccccaagcagggtggataagcaagcaataaaaatgaattctaacgagggacaagagatcttgatgaaaaagtacaaaaaacgacccatcttaaaccataaaaaccgtgagttgcccctttaataactggataaaatgggccaaaatcataaaaacaaactggtgtagtaggggaaaacggaaggctaagaggaccttttaaagcaaagaaggtatttttcagaggatctacaaccaagaaatgccccaagagggtcgcgaaaagcttctccaacctaaagaactactacagatgaaccccttggggatgcagggcgaacaaaaaggcggaaagggattgggaagaccacaggctcactgtctgaacggatgaaagcgccc

SEQ ID NO: 136721 - DNA, 489 bp, Glycine max
  Clone ID: PAT_MRT3847_94468C.1
ggaacagggaggaagcacttaactaatcaaaagcataaaatagatagcaatagaagtcaaggaaacagagcttaaacatctttaaagctaaaagaaactaaactactagtcattacaatccaagtacaatatcctcttaatgggaatcttcgtcctctacaaaatgtcatgtcttcttcaagaatataaaatagcacaaagacaggaaaaaaaatatggttgcttccagcaagcaagaaagaaaggaaacaaagaacaaaggtaaaatatagaaaaagagtattggggaaaggaagaaaagggaaaaacatgataggtaggaatctgagttcagagagaagaaaagaaaaagaaacttgaaacagataataggtggccttcgccaaagtggtctggtcaccggaaaaagttgccttcgtaggagaggaacgaaggtcgcaaaagaagaagaattgtgtgtagatgcagcagagaaggaaaaggagaaca

SEQ ID NO: 136722 - DNA, 388 bp, Glycine max
  unsure (1)..(388): unsure at all n locations
  Clone ID: PAT_MRT3847_94469C.1
cacgcgtncgccatgcccaaaaaaagaggatttcgggtgctggtcaggatgtgcagcaaaggggtgagcagagggggttcatccctcgcgtggtcaaggagcttgccttcttagatgccagtaaccatggctgactcaccgaggaagatcatttgagagatgccaagtgttgcaaacgaatctacgacgatgaattacgccggataaacagtggttctttgaaaataaaaaggcctaagactgattgaggggtagaaggcaacaatggtgaaaccaaatccattatggcatcaggacattacagtgatgagacaaataagatgtcggaggaagaagattagctcgcgtatataaattttaagttttgaacgatgaaactagagcttta

SEQ ID NO: 136723 - DNA, 254 bp, Glycine max
  Clone ID: PAT_MRT3847_9446C.1
ggaattattgtagcgtaaatgcaatcttatcaatgaaaaaaaagaatgcgatttaagaaaatttgagtttgatctctactggtattttgcagtgacaggggtttttgtttatacaatggggatgcaatgttctctgtttatttaagacgatataaactatcgaaacaagatagtgtgacgtgcacggtttaatataatgaatgggtccactttactcttaatgatttgatatgatataaaaagggcgaaacgta

SEQ ID NO: 136724 - DNA, 222 bp, Glycine max
  Clone ID: PAT_MRT3847_94470C.1
gggacggccacccacccatcctttgtttaataaagctttttttttttttgccaatacatacattgggggggactcacaagacggctggagattactctacattctacaaaacaaacaataacacacctttttctttatgggatatcgttcttcccacattcatagtcccttcccaaaaccttagggtgtgatctgatttaaaaacacggccattgcagattc

SEQ ID NO: 136725 - DNA, 591 bp, Glycine max
  Clone ID: PAT_MRT3847_94471C.1
tattttttttttttttttaaacatactcaaagaactatgttttttatttatctgcaaagatagaattatatattaatatgaaagcagtacaaagggtactgttatatgtacaagcaccagtctcccatgtggaggtttggttccctaatacaacactattcagcatgaattaaagaaccaaatctctgattgtataggttacatagatgatcccagcatgtaaacctagtttcccctaattacaaaaaccttctctgatattgcttgaccaaaagtgaaaaggtgtgtcaaatcctttctcaaggttccgcagccaagtccagcagaaaaatatagcgtcctccatcagcttgttggcattgaaggtgtcatttgaaaagaccattcttgtccctccccagtgctgcatagtgttgtaagccattgcatgaaccatcctggtgtactggcatatgagaaatggtagtctcaggagtggggcttctcaatgcttcagagagattggtgcatgctgccaagcactgaaaaggatcctctgcttgcaaccaccagcgctttccttcaagaggtctgtctgcagaatcaaatata

SEQ ID NO: 136726 - DNA, 281 bp, Glycine max
  Clone ID: PAT_MRT3847_94472C.1
cccacgcgtccggcaagaatgaaatgtaaagcccgtttcagcttcttaatgcttaattcagagtaattaacgtgccttacaatggcataatctaattaacagggaaagcactagtgcatcactcccgttgtgtagtctaaagatttactttactttcaccctctggggtctgttccctaaaagaagtggttttattactcatttgtgatcatttaaaaggcaagctcaaagaatgaaagctccaaacttttgccttttgttttcaggaactgaatgcccag

SEQ ID NO: 136727 - DNA, 339 bp, Glycine max
  Clone ID: PAT_MRT3847_94473C.1
gctgggaattctgctcgaggctagaagctttaagatgaaaatgaatttgcttgctttgtttggtgctacagtatctggggcatattaatgccatggctcatcactaccataagttccctctccaaatgaaaactgggtatggtgggcaattcatcattgatgttgcatgtcccagttggatgcttggcctggaagcaaacaatgtattccagcggtacactgttcctgcaacttgcatgatagtacatacctgactacgtcttaagagacccctatatatcagattccaaaacagttcactcacactcttatttctatgctaaatatcttacactcacc

SEQ ID NO: 136728 - DNA, 228 bp, Glycine max
  Clone ID: PAT_MRT3847_94474C.1
aaaccaaaaaaaaattttttttttttacccatggctgaaaaacgggacaaagtaccccctaaattttgggtgggacatatgcccatttataaatataaatgggttctaggcagtctataatggatcccccctaccgaagggggggctaaaaccctttaagttttttattggtatgagcgggaacccaaaatccaaaaatttaaccgcccttgaagctgtttggatttt

SEQ ID NO: 136729 - DNA, 969 bp, Glycine max
  Clone ID: PAT_MRT3847_94475C.1
tcatattaggttataattcgctatgtctaaatacccttgtataggaattcaaaggttgcctatatttttcaacagtaccaactatataggtagattttcccccccaatgtaagtcactaatgttttccttataaaactataaaggctgtaaaacaagagaaagaaagaaaaataaggggctatatatgaaacactcgaattaactattgacaaacacaacatattaattaggtggtggaagaatatcaacaatgaataatgcgatcaaagtgtcaggttgaagcaggtgcgatgagatgggtatcttgttgtcgttggatcttgaagaggtcaaggcgagcgtctcccaatcttagagaatatgctgcctgcttgtattgggcccaggtgaagggcttatagagacttggattgtggggtgtcaccatcttcggcagtggagtgatccaccaattcagcggtggtgctgcaaagtacatcattgacatgctgagtacatcattgacagtcaacaccctgtgtctcacgtcaacaccctgtgtctcacgcttgcaaaccttccatttgtcaaaacctgcaaggcatcaccaaccataacgaagaattcattggggtcaggggggacagggatccacaagccatcgtgggtggaaatctgaaggccatcaacgttgttggaccgcatgatggtcaagatctgagggtcagaatgctctccaaagccaatattgttgttgttgttattattattttggctctggagttgatgtgcctcaagtttggacgtgtcccaattcttggtgccctttaggctcacgggagggtattgattgatccttaggagtgagtcactatggacgtctctgatgagcttgctgagtgagaacttgtcttggacccacaaaccctcctccaccatatcgagaacctcaccggacgcgtgggcggacgcgtgggcgaacgcgtggg

SEQ ID NO: 136730 - DNA, 285 bp, Glycine max
  Clone ID: PAT_MRT3847_94476C.1
cggctcgagattcatggctgaacacaacgacccaccccaagaatatgatttggtgaatagaagaaattagggttttggggagaagaagaagaaggaggaggaggaggagaattaataccggcggcaacagtctctcgagtctcagggactgtcacaccgaatgaatggcttgccttagtacaaaaccctaatttctgctattcaccaaatcatattcatggctgaacacaacgacccaccccaagaacccacattgccctccaagcgcatgtccgatcccgacct

SEQ ID NO: 136731 - DNA, 1207 bp, Glycine max
  Clone ID: PAT_MRT3847_94477C.1
agaaacagctggggaaagcgagggcaagttggaaatagacccacccaaaatcgcatccgaaattcctaacagaggagaaaaggaaagcatacattcacatttcacacacacacacatactactctctctctctctctctctctgatggattcgagggagtaaaagcaagaaagcaagcatttggatttggattgagatccgcaatggcaccgaacaacaacagaaccaagggatcccatttccctcttctcgctttcctctttctctgcctcctcgcgccccttctcttcttcttcttcgcatcgccccttcacgatcgaagtgataattcagctgtttcgattgaaaaggttgccaaattgaaagaatggcaggcactgcaggatcttaaatcgcttttttcgaaagaggttcttgatgttattgtgtccaatacaaatgatgtggggcctttgagtcttgagagtttcagaaaaaataatctgtctgcttcatggagagttgctggattaaggacttcaaatgctatgaatcagctaaaccaaccagcagacaattttagacaagagaagcaaaatgggaaggaaggaagattttcagttggtcgtgctcagtggactgacagtcctgttcagctatcaagaaggcaattagtagagaaaaggaaggaaaagcgtgctgctgagttggtaaaacaggatgatgaagtaattgtaaaacttgaagattcagctattgaacactcaaaatctgttgattcagcagttctaggtaaatacaacatttggaggaaagaaaatgagaatgaaaatgctgattctacagtacggttgattcgagaccaaatcattatggctaaggtttacttgagtattgcaaagatgaagaacaagcttcaactgtaccaagaactggaatctcagcttaaagaaagtcaacgtgctttaggtgaggcaacttctgatgctgacatgcatcacagtgatcatgaaaaaatgaaaactatgggccaagttctttctaaggcaaaagagcaactgtatgactgcgagttggttactgggaaattgagggcaatgctacaaacagctgatgagcaggttagaggattgaagaaacaaagcacattccttagtcagttggctgccaaaaccataccagatggaattcactgcctatctatgcgccttaccatagattactacct

SEQ ID NO: 136732 - DNA, 465 bp, Glycine max
  Clone ID: PAT_MRT3847_94478C.1
aaatgatatgtgaattacttgcttaaaaagtcattcttaaagtttttcaaaaatttattatgttatatatatttattttcatataagagtttttagatataaagtattttgaccctttttcaaatcctttcaccctaagaattcattcaacacttaattctgctaaaatgctctctggtacttgattaccacaatgtgtaatcgattatagcaaggtaggctaagtgtaatcaattaccaaaaagatgtaatcgattacaacgcgtccctggtgcttataaattcaaatttcagaattcatgaaattgcaacttcgtctctctcgtgaaacccttattcccaaattttctttctgccataacttactcatttcttatccaaatcacatcccacaaagcccaaaattcatcttttttcattctccttcatttcaaccgattgaaatttcgaataagtctctcaaat

SEQ ID NO: 136733 - DNA, 634 bp, Glycine max
  unsure (1)..(634): unsure at all n locations
  Clone ID: PAT_MRT3847_94479C.1
gaaagcaaacttaacaatatataatgacatttaagaatagagagtatgacaattaaaaaaaaaagagtggaaagtacactagttaagcccaaaatctctttatttttggtaaaataaagagataacagaacatgtggcttgaattagagtaagaaaaagcagcacaattgcagcaatgaaagatgttattttccaaggagtgctgaagtagtcatgcatgaagattgccttgtatttgtgggaaggatcctcataaaagcaattcagttttctgcagagataaatataaccaccattaatattaatattttcctgaacaacatttaggcacagattgttaaccatatttgcaactgcactgctatctcccaatgtgttaatcatgattcccttgtcaacaagtgtatcaacatcctggctagtgtcaataaggaaatcgaagacgaatatgtaatcagtaatgtaggtttgaaatggataatgaccctgctcaattgcaaccncatttctaatangaatcttnagtccaatgacaaacttcaaatcttggnattgtcaacacacctttttcaaattgcaactctagtgcaccttttgnttttaccaacctggagcttcacacctgcctccacta

SEQ ID NO: 136734 - DNA, 415 bp, Glycine max
  Clone ID: PAT_MRT3847_9447C.1
gtttcatgaggttgcacaaattatgaaccttagacaaagtgttgttggtgatcttaaacttcttactgatgggaagttgcatgagggtaagcatattcctgtatctaatattagtgcaggggaaaatcatgtagttcaaatacccctaatggcacaagaggaaaccctgtcttctatagctagtgattacagaactggaatggtgaggaaaaatagcaagcctaaagctactgcaatgcatgtgggagctatcgaaattatgattgataggtccccaagtcctgactgcaacatagctggtgcaaggcttttggttgatacttatcataccaatcctgaaaaagcagttcgtagtatatttgttgcgcctttcataggcggaaggcacattcaggtggttacattttcgaatacc

SEQ ID NO: 136735 - DNA, 374 bp, Glycine max
  Clone ID: PAT_MRT3847_94480C.1
ctcaattttcccatccttcaattccccctatataatatacatttgtacatttttccccaaaatactacttacataatatttttttttacataacaaatgtatctccccctttatgtgttcctctttatatatacacctttttacacacacacccaattatattatttctctcccataaccttacattttcatttgctttaccccctttttcttcattccttaaattttcatatatttttattatttcattaattttctcaacttttataattttaaccctttcttatacttttttcctcctctttcctttctttttattcattcattttccatactttcctacctaccttttaatattttttctttattttcct

SEQ ID NO: 136736 - DNA, 415 bp, Glycine max
  Clone ID: PAT_MRT3847_94481C.1
ggaagggaaaataggggcttttgtaacctttatttgattgacaatgtttgatttgttgaaacaagaaatgaaaattgttaagcttacttaaatattacacaccaaattttcatgtgtgctataggctgggaaattaacactctcaaagggctttaacatccaccacatctacaaagggcttattgtacaagatggcggctccattggtcacaaagcactaaaaacaggcaaatttacacatgaagggggagtttattccacttacatcattgaacattttggctagggattagggcccaaaagtgagaaaaaaaaagacctcgtttgaccggaggtttctgagtgtacttcatgcgtcagaggctttttgtggttctttaaatatgcagctttgatatgctgcgtttcaacctca

SEQ ID NO: 136737 - DNA, 219 bp, Glycine max
  Clone ID: PAT_MRT3847_94482C.1
gagcagtccgcccacacgtacgtacggcgagaagacgacagataggattccttagtgtgacagaaacggaggcttcacaggaaaaggccaatgaaggggacccaacgcacattacgtatagaggagtacctaagagaccatggatttttttttgctgcggatattagagatacacctagtacatggcgctcgagtatagctcgtgacatttaacactgc

SEQ ID NO: 136738 - DNA, 233 bp, Glycine max
  Clone ID: PAT_MRT3847_94483C.1
gtccctttattccttccttcctttcttcttcttccttacctctttccctggctgatttagggttttctggcaataatctcctttcggtactttttacctctgaatcctcatcatcgctattgctgattacactcctcacaatgctcactcaacgcctcgttcgaaaaacgtgaaatcttctcttctgcaatttctagggtttcgaattgcggaaccgattcattcaactcaac

SEQ ID NO: 136739 - DNA, 287 bp, Glycine max
  unsure (1)..(287): unsure at all n locations
  Clone ID: PAT_MRT3847_94484C.1
tgcatccctcttgatttgtaantttttttgtgcttaagttaaaagttctgccaaatccaagaggggttttaagatcataagtgtgtgttttgcaacaatggctaagttcttgctgctatgatcttgncactctttgccattccanacttcaaacagtggtaatggctgctaatgaacaaggaggccacttgtatgacaacaagagcaaatatggaagtggaagtgtcaagagttaccaatgcccatcacaatgctcgaggagatgtagccagacccaataccacaag

SEQ ID NO: 136740 - DNA, 119 bp, Glycine max
  unsure (1)..(119): unsure at all n locations
  Clone ID: PAT_MRT3847_94485C.1
gtgtcngtgtcgtngnaaatnctggtnctgttacacccacccgagaggcaaacacgcntcattacctaggtattcgaattttgttagatgtttctngaannngtngcttttttctttag

SEQ ID NO: 136741 - DNA, 292 bp, Glycine max
  unsure (1)..(292): unsure at all n locations
  Clone ID: PAT_MRT3847_94486C.1
atttttcttcctcagtagtgtcatttacgcttctcttctctgcagcaactatgcctaaccctaaggtcttcttcgacatgaccatcggcggtnaatctgctggccgcatcgngatggagctctangccgacgtcactccccgnnanngccgagaaatttncgcgcgctttgtanngncgagaagngcgtagggcggancagcaagancctcnactacaagggctcgtccttccaccgcgtgatcccgagntncatgtgtccagggtggcgantcaccgccggaaaaggaacc

SEQ ID NO: 136742 - DNA, 510 bp, Glycine max
  Clone ID: PAT_MRT3847_94487C.1
tcgaagaactcatagagagacgaataagaatggttattttgtggtctgcgagtactgggatgattgatttcacgtgagagttctggcacaggttccgtgagtgtttcgagtgtggcgtagagtggaggagtttcgagaaaagccaaccactttaaccgcagtaagtgtctccgatttcatggatccccacctgagctcccaaacagagctattagctagctctttcattctcatggttactttactttacttgggttctgttcaagtttgtggtttagatgagtagttgaagactcttttttttcccacaagaatgtcaatggtagatctgaacaagacttaaaagtgagtgagaagaccaaagaaagatctgttgtggtctcaaccgtttttcagctaatttaagtagctaggtcagttaactgttaactctcctcctatgcattaaagagttaaatggatctcattatgggacgaaaccaaaacagttgaaattaactaaagcccctc

SEQ ID NO: 136743 - DNA, 373 bp, Glycine max
  Clone ID: PAT_MRT3847_94488C.1
cagtaggaatgcaacaagacaacggaagggagggcctagttaacgtgactccagtactgtgtccatggcggctgcgtttacaagtatcagtgtaagactgatactgtcaactgttggagagaccagaggtttgcaactgcgtatgtgtaaccctaatcctaagaagctgaaagttatggaggggtttggaagatgttctggagtggcagtgggtgtgagaaaaagaaatcgaattggaacggttacggttcgggatcgggcaagttcttcgtcggacgatgccatgaatgcgcaatcaaaaatgactcagaaagtaatcattgacgtcagtattggaaatccatttgtgaagcttgtgtcacgtattgtgatt

SEQ ID NO: 136744 - DNA, 169 bp, Glycine max
  Clone ID: PAT_MRT3847_94489C.1
cccactcgttttattttcccctcgacatgaaagcaactaaccatgtgggataaacttgactggcctggagctaactggattgtggcttttaaatcagcgggtcaatgcaatgggttcgttgatgcttacatgggctaagcacgcatgatactcagaagcctaacactgg

SEQ ID NO: 136745 - DNA, 295 bp, Glycine max
  unsure (1)..(295): unsure at all n locations
  Clone ID: PAT_MRT3847_9448C.1
acaaaatccttccactccaaattcagtttcatacaaaacagcggcgaaagagaaactgataaagcaaggatacaacattgttagaatcatttgaaaccaatggagccatctcctcagaagccacagagacgaaagcacaacctttaagcttcctaatccgcgttgctacattcaataattccttcacctctcaacaatctancttactcctatctatctatatataataaaaatcgttcaaataaaaccactatcttcactttatgtgtgttcaactgtgtctcaacaagtcgtt

SEQ ID NO: 136746 - DNA, 171 bp, Glycine max
  Clone ID: PAT_MRT3847_94490C.1
tttttgttctatttttatttttcttttatagggaaattttattgggttatatacgggcgaaaataagctttgaagcatacttggggttttataaaactcaaggggcttttaaaggatctaattaggggcttttctgccttacaatgtaaatattttgtatgagttttaggc

SEQ ID NO: 136747 - DNA, 151 bp, Glycine max
  Clone ID: PAT_MRT3847_94491C.1
agtagcgtccgaaccaacttcaccattcactctgttacttgagctgatggttgatttcgactagcattgcgccgtgaaccctcgctacctcactctccaatcagatccaagtttgtgcgttcaatagctgtattttcgagttttacaatta

SEQ ID NO: 136748 - DNA, 462 bp, Glycine max
  unsure (1)..(462): unsure at all n locations
  Clone ID: PAT_MRT3847_94492C.1
ttttccatgcgtacgttccaagcatccgccgcgcgactggttgctctttatgcttctagtacttcgcttgcttcagtttctattcttgacttagtttattcttccgctcttaagagctagctggcaaatagaaaataaatactagataaaatcctctggtgactgataaaatatttccatggaatctgaattggtttgtttataattattgcttgctgcggaaagcaactctattgtgtatgtctgtgtgtctgcggcattctctaaaagaacatcaaggctattaaaaggacttgctcggtgctaaagctaactatgctttctgcgatttacaccaattttaccaagactgatctttgatatatggngctaaaagttttggatcgacttagtttggttagtggatctaaaagtggaagggaattaccatgtagtgtaaaaatataacatcatctcatggat

SEQ ID NO: 136749 - DNA, 456 bp, Glycine max
  Clone ID: PAT_MRT3847_94493C.1
acggctgcgagaagacgacagaaggggcctttccaatttttatgtaaatatcagtatttctattatatttctcttaaattaattaatcaatatgtgcactctatttcttatttattcctcttctttccttttatcatttacgtatttttactctatttccttcttcaccgtcaaatatactgtaatttagtattattttatttcaaaactttaactgttttaaaatttgaatatgtactagtactcattttttcaatcatttgactcttttttttagtgaagtattaaataaatttgatttttacatgatacttatagttgaatattaataactctgaatttagtggagtaaataagattattttaatttaaatttgtataaataaaatatttcttcatttctagtaaagaattgaaaaaggagagaatagtaacaaatatcccgcaccaacaaaa

SEQ ID NO: 136750 - DNA, 485 bp, Glycine max
  Clone ID: PAT_MRT3847_94494C.1
gagtgttagcagagaaagaaaataaaaaaaaatgaaaagaacgtgcagacggttaagcttcaaaatttattttggaaatatgtgcaatcctctaaaatcttcaaatttaaagaactaagaatatttatcaattttggaagattcttcaaaaaataatttgaaagattccttgagcctacccctttcattttaactgatttttttcatcccttactagacgttttaaatatgatgccttagacgaatagattgtgctaactgtttaataccaaaactaagttaggattaatatagaatagagtagaatgaaattatgaaatagaaagatattacatggtaaaataaaatgaaacaatatgcagacttagcgtaatatttagtttacttgattttgatatcttagacattagacagtgatacgataattaatcaggattgagtttagcagaaaaaaatagttcttaacaacatagcaaattaaagtt

SEQ ID NO: 136751 - DNA, 304 bp, Glycine max
  Clone ID: PAT_MRT3847_94495C.1
tccacgcgtacgcccacgcgtccgctcattgtgtgaccacagttattattacattgcgggatgaaccatgttaatgcagatgtgcgcttaccttacctttgcggagcgggttatcatgggcacatcggacttataccaattcgttctcgacacaaaccgtatacgcgtgacctgcgatgatcagtactacatccggccagacctaacgcgcacttgaaggcatcacacattgatcaacctgtacaggtccggacctgtgtacaactgactcgtaaacaccgactcgtcactcagctatactgtg

SEQ ID NO: 136752 - DNA, 417 bp, Glycine max
  Clone ID: PAT_MRT3847_94496C.1
tttggttttttttcttttttttgtttttttaaaacgaccttggaaaaaaggaattgaccccggatctaaaccgctcgcagggaacccccacgtatttcttaaactgaagtgcgaatttgctacaactcacagattgccaggcggttagaacataatagtgaggttcaactcaatcacctcaaggtatgcaccaaaagcgatatgtttcactcttaaaaaagttagggagaagagacccttaatatgctcccaaacaacgttggacccatccttgtccagctgatcaagataacttggcagaaaggctaaccagggagcgggccatagagattttcggaagaggtgggtttcttaccaccacctggggagaagaggcatctattgccttccatgcctcccttgggcaaaaatcatctg

SEQ ID NO: 136753 - DNA, 405 bp, Glycine max
  Clone ID: PAT_MRT3847_94497C.1
acgggttctggaagacggcagagctgccgccattttgcgggaagaggaggctctgtacctgcggtgctgcttttcttgcggagactctaggaactatccgagctccactccccacaacatactcaaaggaacggagagaaccgggacccccctgcggggacccggaactgatctgacaggatggcatctgatgactttgacatagtgattgaagccatgctggaaacctcctattaaaaagaagaagattaaccaccaaagaaaaaagttaaaaaggattatcctagcaataccaccagcagcaccagcaacagtggcaatgagaccagtggaagcagcaccatcggggagacaagcaagaagaagaggagtcggagccataataaaagcaaggatagaaagccc

SEQ ID NO: 136754 - DNA, 466 bp, Glycine max
  Clone ID: PAT_MRT3847_94498C.1
ggctcgagaacaatcaaaaggccttcagtggccgccggatcgaaacgagttctttatgggccactggtgaaggacaagaaatctgagggtgtcaggatatcaatccatgagggttcatcggactcatgcctgatatgggacatcattgattggacttccgacctgacttagtcaaacattctctgggaattcagcagttgctaacaacgaatggaacctttctgcgaggagctaccagtcaagtccatacgctatgaacagattcgctctatgactggtccatgtaaagggcccacgtagatcaggctgtagttactactccatatactgattctcatcacctaggtcaatagataacttactacagaggctgctgtgtgacaacgcactggctggaccatcttgctcaagatatgatcatgctcactcatcacactcacggaagagagcttctgttagcaaaagc

SEQ ID NO: 136755 - DNA, 372 bp, Glycine max
  Clone ID: PAT_MRT3847_94499C.1
ctcacaacttcatcaaaccaaacaacacatctgactacagactgagagaaactgacagtgcgtcgcttcgtattaagatatctcatcaaagactggattctctcgcactataagaaacgtactccgacgtgcaacgaaggagaccgaacaaagcacaactattagaagttgacgcagtcattcccaaccactatctctgaccgataagtcaggagctgatcacacatccggtgactttatcaactgtcattacctactaccgtttgatcatgctgatgtatatcaatgcagaaatcagatcctgacctgtctactaccaatagctgacaaccttcgacctcatccacaaccatgccattcccatgatgattc

SEQ ID NO: 136756 - DNA, 193 bp, Glycine max
  Clone ID: PAT_MRT3847_9449C.1
gaacacactcatattgtatacctcacaacttccatgtcactgcccgtgtgtcgccgctatggccagtgtcatcaaccaagcctccgtcgcaattttccgggcatgtaccgctaaatcgaggctgctgagcggcacttccggtcaacttaaaccggaagtaaccttgctgccaatgaggtgccctccttcagcc

SEQ ID NO: 136757 - DNA, 951 bp, Glycine max
  Clone ID: PAT_MRT3847_944C.1
ggtgtttttgaataaatttcactactagtttccattatatctcatcttcgttataccaatccaaaaaaaatggaccataatatcgttacatttcattctcttccaccagttcaaacatgtagaacaaaaatgagactcactcactcactgaacctgatatgtatgagacaacaacagttatgtcatcaagtttgccaccataataacagaatccagctttttcagcagcagtagaaaatggtgtccgactactcttggacagtgctcgctgacgagccagtgctgctatcttctgagcagttacttggggctctagtccagccctaattgcatgttcaacaactccagtgatctcactgttgtacaaattgtcaaataaaccatctgttccagaaatgaccacatctcctgaagcaacgggtatggtaaaaacctcaccagagctgggtagatcagcgccattcccactctccaactgatatgggaaattgaagtcatgctgttgagaaggggactcgaaaatggtgcatccatctctaaccacaatgaatccactgtcacccaaattaatagcatgtagtccctgaccaacttgtcagtaagagcaacaatacaagctgttgatgaacccttgacctttgtatttgcgtgagcttcccttaacactcttgtcagattaaaagaacctttaggctccttttgaattgctctcactaaattggatataagttcctgtgcaaacaataatgcattaatgccaacatccgcccagccacctacaccatcagcaacaccaattgcttgttcatccgtgcaaataaaatgagcatcctctcctcctgtctcctccttatctggatgtggtaggtaacaagatcctgacaacatcttcaagggcttaccaccaacaatagttgggtcaggcgaaaaagaggaatttgcaagctgttc

SEQ ID NO: 136758 - DNA, 196 bp, Glycine max
  unsure (1)..(196): unsure at all n locations
  Clone ID: PAT_MRT3847_94500C.1
agatgtaatgccaatcgctactgcacaccagcgccaggagcttcaggctgagctcgaggaatggagtatccttgatatagaccatccccaatgatcattctgcactaaggaagcacctgctgttgacaaatcttactatgataaaaggatagtncgatgcgcaggaggtgatgcgtgagatgagcatgatgtagtc

SEQ ID NO: 136759 - DNA, 497 bp, Glycine max
  Clone ID: PAT_MRT3847_94501C.1
ggtactaacgacagcatcaaccccgacccagacgtccccttcatccccccgaggccgcccaaaaaaattcgccatgtctgccgacaacaagtcccaccgcctttacgtcaagggcaagcacatcagctaccagcgcggcaagaggaacaccaaccccggaacttctctgctcaagcttgagggtgtcgacgatgtcaaggcagctcagtggtacgccggcaagagggtagcctacgtctaccgcgcacaacgggcgatccaaggctccaagatccgcgtcatctggggcaaggtcacccgccctcacggcaactccggtgtcgtccgcgccaagttcaagaacaacctccctcccaagtccttcggtgcctccgtccgcgtcatgctttacccttcttcgatataagctgttccgatacgatctttggcgacgggaacgaacggtcgaaaagcaatggagtgatggatgattaggcgcaaataccgggcacggagcg

SEQ ID NO: 136760 - DNA, 246 bp, Glycine max
  Clone ID: PAT_MRT3847_94502C.1
ggttattttttttgtttttttttgtttttttttttttttttttttttttttttaataaaaaaactgacaggtgtgacttaggggtatcctgcattttagggggggggttaatatattttgaagtttaggcattacgccccgttgaaaagggggcacccaacgaaatgcttatggcatgaaatgggcccaaaggtactccttttagttggtcgcaaaggaaaaacttggtagactttgacactcaaa

SEQ ID NO: 136761 - DNA, 464 bp, Glycine max
  Clone ID: PAT_MRT3847_94503C.1
ggatccaaggagaagagcccccatgttgattcttcatcagtgctgctgctcagaaccttgccatgctttcggaaaccaggttatcctcttttcacctctttcatttgttcccaaaattttcaaaaaataaaataaaaaattattttaaataaaaccaattcaaattaaacacgtggtaaaaaataaaaaaatctaattgaatcttactaaagaacacaggatattatccaaccttaaaataataaaaggattaaatccaacctaaaatataatttaaccttaaaatttttaaggtgatatatgttaacttgaacattattaaccatgtcaacgatgtcaataactagagactaaaacaaacatttttttattgtatgggatgggattattcggtaataacaagtgctaagccgggtaagctgaacattattaaccatgtttaaattactttttttttttttttg

SEQ ID NO: 136762 - DNA, 1799 bp, Glycine max
  Clone ID: PAT_MRT3847_94504C.1
cccacgcgtccgctcacgctccgagtagtggtggctctgtggagttgggtgctgtggcggctattcgcatgccgttacttcatgtgtcaaatttcaaaggagggacgccggagttggttgagacgtgttatgctatacttgttttggttctgccaagttcaagcactagggtttggacctaccatgagatggagatagttgaagtggttgctgatcaggtggctgttgccctgtctcatgcatctgttcttgaagagtctcagctgatgagacagaagctggaagagcggaaccgagcactgcaacaggctaaaaagaatgcaatgatggccagccaggcacggaagtcgtttcagaaggtgatgagccatggaatgcggaggcctatgcattctgttctggggatgctgtcattatttcaagaagatattgtgtgaactgggcagaggataagaggcgatacaatgttgaaagttgtaaatgagctctcgatttttattgatgatgtaatggaaatgtcataaaatgaaaagggaggcttccggttagagatgaagccttaccttctgcattcaaaggtgaaggaagctgcttccattgccaagtgcttgtgtgtttatgaaggctttggttttgaaattgatgtccagaagtctttgcctgaaacagttatgggtgatgaggcaaggacttttcaagtaattttacacatgattggctatttattgaacatgaatgacaaagggactctcaattttcgagtttttcttgaaagcgatggtggagacagggatgataaaaatattggaatatggaggtcaagcagtcaaaatgagtatgtacatataaaatttgattttcagattactgagagttctcagtcagacaaagcaatttcaacaatacattatagtagtaggaggcagtactacaacaatgaacctaaggagggcctgagcttcagcatgtgcaaaaagttggtacagatgatgcaaggtaatatatggatatcaccgaactcccttggtttggtgcaaggcatgacacttcttctcaagtttcagataggaccatcacttggaaaatccatatttgcacctaaagattattcaagctcacagttcagaggccttaaggttttgttagccgaggatgatggtgtaaacaggaccgtgaccaagaagctacttgagaagcttggttgtcaagtaattgctgtttcatcggggtttgagtgcctgagtgctataagtggtgctggtaactcattcagaattatcctgttggatcttcacatgcccgaaatggaaggctttgaagtggcaaagagaatccggaagttccacagccgtagttggcccttgattatagctcttatagcaagtgcggaagaacatgtgagggagaaatgcctacttgctggaatgaatggattgatccaaaaacctatcgtacttcatcagatagcaaatgaacttagaacagtcctacaaagagcaggtgaaaaactgtgagaacagttttaaaagcatgcttcggtttaagaaaatatgatttcattagtaattacaaaaaggtcatgttattttagttctgtttcctattttcaagcattgcgggctatgcttttattattttgtgaacaaattcttgaaaataagaaacaaaataaaataatgtgtcttttataattactaatgaaagagtgactcaattttctgaagttgctcaaaacggcattgtgaacttgggggatttctaacaatatcaaataataaaaaaagtagccttttgtcccc

SEQ ID NO: 136763 - DNA, 275 bp, Glycine max
  Clone ID: PAT_MRT3847_94505C.1
ccgacacattgtgggacgcctgtggaaatccatccttgactgacattctggatacaccgtcactagggaccatctgcacgctcacttttatttcttatacattcaatggcatcccactgacacatacgtgttcagtataaattgcaccgctctatccaatatcccatactataactcaacatgcttattgcgaggagaacattacaccctccttgtttgatgctttggtaaacacgggcagtgcaccgttgccgtggctgactcttacgaattac

SEQ ID NO: 136764 - DNA, 159 bp, Glycine max
  Clone ID: PAT_MRT3847_94506C.1
acactagtcatgttattcttggggtgcatatgaagattcatgatgggtattttgagatattaggattggacaaactcgcctgtggctcgtgctactctttacagatctctatttagagatgccgtcgatgtcgtcccagatgctgtcgaagccttcagg

SEQ ID NO: 136765 - DNA, 315 bp, Glycine max
  Clone ID: PAT_MRT3847_94507C.1
attagagctctagccgaaacagaatgaatttgcttaacctggtagatcaaccagaagcgaacaccaagcaacagaacaatttgcagaacatgcttctggttgatctaccattttatgcacaatcattataaacagaatgaatctgccaacgattcataactgtcagtcagcacacagacagatctgatcctgaaacttggtaggagagacctaaattcatgtttgcctggaaaaattcataatgtaaaacatgaggaggaaaatttacatgaacatattgggggaccatcaatgatgtttcatgaagggcaaggc

SEQ ID NO: 136766 - DNA, 256 bp, Glycine max
  Clone ID: PAT_MRT3847_94508C.1
gaagaattgagaaaaagaatgtggtctccaaagtcctagcaatacagatctctagctctccctccgtctctcttgtatccctttatatgaatcttctcagatacgttttctatagcccctttttccttatcatagcctcgctgtagctgatatgtcatgctgttcttgttcctaacaaagtagtatgtgttaccatggtattttaaccggataccggtaataccatttagctgatgcgttctaacagctacctccg

SEQ ID NO: 136767 - DNA, 276 bp, Glycine max
  unsure (1)..(276): unsure at all n locations
  Clone ID: PAT_MRT3847_94509C.1
cgaccgccanccccaaaatccaagcncaactcagcgaagccctcgcncnaatcggtcaccangatntcnccaaatccnggacctctcgtctcnctgaacgcancgcaaatncnccaaaaggcntcncagtccnccgattacgcntccagtaacggtatnctcggcaccgntaacncnatttgcaagagggttaggnttgcagtatnaaacaatgacctatnactggacntaaagtactggctcganaacttcgcctctcctttggtggagatttcc

SEQ ID NO: 136768 - DNA, 616 bp, Glycine max
  Clone ID: PAT_MRT3847_9450C.1
gtgtcatcatgttatgtgtaaaaatgtcttcttcttcttcttctcctgctgttctctcaaaatgcaccgttttccctcaccggaactccactctgggggacctcaagctctctatctccgaccttaacatgtttttatctcactacatccaaaaaggctgtctcttcaccactccttcacttccctctcactctcacactctcatccctcacctcaaaaacgcgctttcccaaaccctctctctcttccctcccctcgccggccgtctcaaaaccgacaccgacggcttcgtttacatcacatgcaacgacgccggcgtcgacttcatccacgccaccgccgccgatatctccgtcgcagacctcctctccccgtcgtcttcgtctgatgtccctccaatctccaagcaactcttccccttccaccacaaaatcagttacactgctcattcttcccctatcatggccttccaggtcaccgatctcgccgacgccgtcttccttggctgcgccgtctgccactccgtcaccgacggcgcctccttctggaacttcttcaacaccttcgccggaatctcaagaggagccaccatctctcccttcagcctccccgattt

SEQ ID NO: 136769 - DNA, 339 bp, Glycine max
  Clone ID: PAT_MRT3847_94510C.1
gtgaagaacaagacaagattgattgaacatacatgacctacgttgtggtgaaacctattcagacccttccatatatgccttgaagccgtaactccatgacgatcgtggcgcatgcccctgaggcgatgcactgatgagggctaaactaaaacttctgaaaagtggctcgctccgcaataccggcagttgagcagggtggtcttgaggacaccagcggcatcctccggctgagggctctcgcggagaacacgctccattttgtcgttgaacatatacctggggtactcctggacagcaaacatggtgaacatggggttgagcaacatgatgaagggggtg

SEQ ID NO: 136770 - DNA, 153 bp, Glycine max
  unsure (1)..(153): unsure at all n locations
  Clone ID: PAT_MRT3847_94511C.1
acgangtcgcatgcacttgtacgtaaagctcggaaatttcggcttcgagntncntgcngctangagnnttgnngtacantggnnnactctnnngtancnntgannattcatacnaattcngnatntntcctnnacgaagaagagaaagaaaac

SEQ ID NO: 136771 - DNA, 808 bp, Glycine max
  unsure (1)..(808): unsure at all n locations
  Clone ID: PAT_MRT3847_94512C.1
aggaagaggacatgggttgctgatgctgaggaatgcaagagaagaggttctattgagactgcccgagctatatatgctcatgccttgactgtcttcttaactaagaagagcatatggatcaaagcagcccagctggaaaagagtcatggtaccagggaatctcttgatgcattacttcgtaaagcagttacctacagaccacaggctgaagttctttggcttatgggtgccaaagagaagtggcttgctggagatgtgcctgccgcgtccgtacggcgcgagaagacgacagaagggattcccaattctgaggaaatatggcttgctgctttcaagctagaatttgaaaaccatgaacctgagagagctaggatgctgttggctaaagccagagagagaggaggtacagaaagagtctggatgaaatcagcaattgtggagagagaactggggaacattgaagaggagaggagattgttagatgaaggtctgaagcaattcccttcattctttaaattgtggttgatgcttggccagcttgaggaacagcttgctgagaatgcaaagaggcttgatcagcctgaaaagtggcttgatcacatgaatgcagctaaggaagtctacgaatctggattgagaaactgtcctaattgcgtaccactttggctctctcttgctaatcttgaagaggagatgaatggactgagtaaagcacgtgcagttctcacaatggctcgcaagaagaatcctcaaaaccctgaactctggcttngctgctgtagagcggaattgagcatggatataagaa

SEQ ID NO: 136772 - DNA, 244 bp, Glycine max
  unsure (1)..(244): unsure at all n locations
  Clone ID: PAT_MRT3847_94513C.1
gacgacagaggggggcgcagggagtgtttttgacaggaacctgggtttttcccggccaagcgatgagacgacaaagtcgccactcggtccctaggagactgcgcctcagcgtgagaccagtctcctaatggctggccatgcgaacacgtgcctctgctaactacggnggcgttccgaagagtgcgcattagaaacggaggtcctcagtgctggactagagtgccgaggcgaccactgagtcccg

SEQ ID NO: 136773 - DNA, 1341 bp, Glycine max
  Clone ID: PAT_MRT3847_94514C.1
ccacgcgtccgaacaagacatgtaagggggaccactacgctgcgagatttggaaattgtattcctaatctaatttcgaggtccaattcctgtggagtgtttgtggttctttcttgctgcaatttcatatagtatcatcagtgtttaagaaatcttatttgcagagtaaggatggggaaaaaccaagactacagagctgtgcagaaagcaagtttcggcagttctttggctggccccgaccaagttgaaaacggtgctcataatatgtctgacgaagggagaaggaggcagaggtacaggagagaaggtaggtaggtataccgttgaggggtgcaagaagcaatggcccgcatgttaaactcgggggcccatatagaaagatgtggtttctgcgtctgcgaatgagaaagaggacgataaaggtggaaccaaacaaacaaacaaaacgaacgaagacagcgaaggagctacgctgcgagatttagaaattgaatccctaatttcgaggttccgactcctgtggagtgatcatatagcgaattttgtgttagcgaatcaatttgcagagtaaggaataaggatgggaaaaaaccaagcctacaaagctatgcagagagccaggctcggcggcgcctccgccggccccgacgaggttgaagacggcatggtggatggttcatttcattcaccagaatggcatgcagctcgtttggctagccttaacacctctcacaccattacctgggaggagtacaaaatgaagcaaaaggaagaagaattgagaaaaggggaattggaagcagatgcagataggatgatgagagagtacagagctcaactagatgctgaaagggctcgtaagctttcccaaggaagaaatcactctaatagtaagtctaaacatgtgaaagataagagggacaaaatttcaaagaagcacagcagcagaaagagaaagcattcaagaagatcttctgcatctagctcctcttcgtcatcctcagactcttccagtagcgatgaagaagaaagagggtcaagaagatccaagtccaggtccaagagatcaaagaaggaaaagaagtccaagtcaagaagcaaggatgctggaagcgctagtgaagacgagggtccagttcgcctttcaagattctttgggaacgtcaagagtgaatagtgcttgaatacttggttgtgtatcataaaaaaatcattttatgcaaatagtaaattatggcaagctttacttctatgatcaacgtattctttctttacagatttgtaattttgtatgtcattttgtattctcttctctttcaaaaagattattttgtctttgatt

SEQ ID NO: 136774 - DNA, 203 bp, Glycine max
  unsure (1)..(203): unsure at all n locations
  Clone ID: PAT_MRT3847_94515C.1
caagtctgtggttttctacctaactatttaatcctccaaaantatatngnntgtgtcagatttcttaaaaaattggcgagcgcaccaaaaaatcaaccaacncttaaaatatcaaaaacaaaaataatatttactcaagatcttattatgccttgttacaaaaatattcccctttacaataaaattttttattcacaatcacc

SEQ ID NO: 136775 - DNA, 136 bp, Glycine max
  Clone ID: PAT_MRT3847_94516C.1
ttttatctataaatgcctaccccctcttgctaaaacaatcttttctttgtcaaatgaaactaaaccggcaaagtaaaacaataaaatcttccccttgcaaaattttattctgaacatacctttgaaaacggggttg

SEQ ID NO: 136776 - DNA, 184 bp, Glycine max
  Clone ID: PAT_MRT3847_94517C.1
gtttccaggtatgtacaacacggaatagaacccccgcggtcccatcactgctaccggccacgatgcctcaacactgtatgcacctctcatccatgatggacgtatggagaagctccactgtacaccaacacaggaagaccgcattagcgtctgcaccggaatatgacgcactgatgacgtagct

SEQ ID NO: 136777 - DNA, 480 bp, Glycine max
  Clone ID: PAT_MRT3847_94518C.1
ctaatcttgattccaaaatttagtcccacaaaattcttctcttctctccaaaaatatattataacccaaattcttgccaacaaactcgacgctttgacaaatatcaaaaccataatttagagtgtcaaatccaaaccaaaaaccaaaaacacagaaacatcaagcaagttctttccgtctgggtgtctgtctgtctctatggacataaatcttcaacttgtgaaattcactgtacactgattaatatggcaaccacttttttcctattttcctttttcctatttattatggtagaagcttaaggtagcacagacaaaccaacgtgtgcttttgccttgtggagttgtgggctaataaatttcaagtcaatcaacatcgttggctacaactgtactcagaacagaacagaaaccatctcttataccagagttgttgtcttaattttttttattacttgttattttttgttagcaggaagat

SEQ ID NO: 136778 - DNA, 619 bp, Glycine max
  Clone ID: PAT_MRT3847_94519C.1
aataccatatttcagtttaacattggcaactgaaactaacaaacctcatgtcatggaacataatcggagaacataattacaaggaaattaatcattctgaatgcaaatgtgagaattcacttcttgtttcccatcttcacctaccaatactaaatgaaaaatcaccattttctcacagcttagaaataccaactccgaatttacacatgaaatgaaaagaaaagctatacgagatcctgttgtaaacagatcattcactaaagtcaaagcttccactgcgagagccgatgccggtaccactatttaaagagaggcccctcatgtggccatgacaaattagaaccatacttgttgttcatataaaacctcttcctctcaatgagttttgcatgctgcgggggaattgatacaaggtgatggatcctgcccattcatgttttgggcgtcgaggtggaataacaaaaagtggagatctgttataaaacccttaagatggtgggatcactgcaggaggagatcgagactcaacttgtctttttggaggtaatataaagagtggtcgaaccatatgacgattgaacatatcttcaagaagaccaaatcactggatgtcagtttc

SEQ ID NO: 136779 - DNA, 1394 bp, Glycine max
  Clone ID: PAT_MRT3847_9451C.1
aacttgaaacagtttttgtattggcatcaagactagaacaactttacagagaaataacaagatcaatttatataatatgatcaagatcaagattacaaaactataaagttaaccattttcttcaagagttctctttttcaaaaaaaaaaagttgggaaaatccatttacatgagaaagttacatatggtcaatgtttcaagacaagatttaaaacagttacattacactggtacgccattgatcagaaaagcagtgaaagttgatgcacaatttcaatgccctaagcatttccaaatgataatgtctccaaaaaatgttccccaaacatcatcagctgcatacccccttttaagcattcaaacccttatgtagaagtttctaacctttccttcagcagtgtacatcagcttcatatccctgtcacactgtcacagtacctcttgcgttatgtttcaccttgaattccattcacaaaaatctgtctatggaactgaaccagcattcacagtcaggcatgctgttcattacagcttgtgagaatgatattttactgataaacaaaatcagcccattgtgaggaaataacattatgaatggtcagagagaatgtcattgcgaagaaaacacatcaagaaaatcactagtaatcctcagtttcgtaaatgttgatgtacaactgaacattatgccataagactctagcttagtagatagaagcatcaaaccttggctcatagaaacaaacttgattgttgtatgactgcagagcacacccaccaaatccatgaccagatcttttcatcctcctgatctccacccatgtaattttggtatgatccaattcccaaattctcatactctgtagagtactataaaggccaatccttccaacaagaaaaagacgcttctgggtaccagcaaccaaataaccatccaacaaagatcgagggaacttagccggaatatgttcccaatgacctgtgtctagtctatacatcatcaaaccaagtggtgaaagggtttccaagtacaatctggagtcacaatatgccatttttgaagagcagagattaaccgccggcataatctgatgaactgtccagctgtctatctttgagtcataaacttcagttggcaatgacttgtcaccgtaaatatcactagtggctatcactttaaaccactgatccacccgatcaacaaccaatactagttgcctttgttgattgtaatgcatactaggcaatgccctccaagtttgagttaggggattacacaccagggtcttaaacgttagcccatcatgcccagaaaagcaaacaagaccaccagaagagccaaccaaccagaatgcccacggtggcaaaaaagtgaaaggtattctattccaacc

SEQ ID NO: 136780 - DNA, 736 bp, Glycine max
  unsure (1)..(736): unsure at all n locations
  Clone ID: PAT_MRT3847_94520C.1
ccaagcgtcctagaaagtgtgatagggccatgaattgctctgtgtttcacgttatttgttgttttatgtgagacgaacttctaagaaatgttggagtaccctgctggtgtttttgtttaaaacttggaaatggtttcacataggagaagagtggtgggagtatcttctttcccagccagaacttgaggcacttcatagtatcaacattcaactaagtgggaagagagatggataagattctggaggccgatgcaaataatatgtctcagcattcctcgtcttcagttgttgctctagcaatcaagggtaacaagaaaagcaaatatgtggtacaatgggcacttaataagtttgttcctgagggaatgattatcttcaagctgattcatgtccatggtggtataaaaggagttccaacgccatcaactgcattcaagaaggaagtggagtggcaaacaaatcaaatgcttctacctttcaagagaatgtgtgagcaaagaaaggtgcatgtggatgttgtagtgattgaatcagatgatgtggcaactgcaatagcagatgaagtagctaagggtgccataaccaaacttgttgttggagcttcatctcgtggcttatttaaaagtaacagaaaggtatgtctacgaaaatatcagtatgcacaccaagatttgtacaatttatgctatttctaagggaaaatgtncattcggncatcagcatgcctattgatgga

SEQ ID NO: 136781 - DNA, 175 bp, Glycine max
  Clone ID: PAT_MRT3847_94521C.1
ctcgcatggacgtaataatgtgataggagcaagtgtggtaactgattacatgggctccacaggtttgagtcgcatgttgtttggacacaccagctgctgacacacttgtgtgctgatccacttgatacttgacctggatggacaaagaagggacattttacctacaaagagcaga

SEQ ID NO: 136782 - DNA, 308 bp, Glycine max
  Clone ID: PAT_MRT3847_94522C.1
gagctcctcaagggaaaacatcctacgctttgagcttatccgagtttatgccatgtaggagcgccaggaaccatgaaggttttgccttattaccaataggctcggaatttatttctgaggatttaaccccttcaaaacctcccatgacaatgggcacggtatcacctacattagcctggggcattacttaggcattggcagacaccaaagggctaatgccattttggggactatcaaaatggtgctgcgggtgcaggttttcacttgccttcttttgggcataatggctttttttttggaccttgggg

SEQ ID NO: 136783 - DNA, 290 bp, Glycine max
  Clone ID: PAT_MRT3847_94523C.1
cgagatggccgagatcctgctaccgtttcctggggggccagtctagactcgtattgacacgcatacaaagctcttgcgtgtcggcaactcaacctcgctggataggttgttcatggaccattacaaggagaaataaatcattgacgttcttaataaatcttacaggattaagctcatgctcatagccccacgggggttaggcagagaggctaccttatatatgggccttcatgaactgcaaagagaagcatgattgccggtatggccaatcgtctcggctatgatattta

SEQ ID NO: 136784 - DNA, 700 bp, Glycine max
  Clone ID: PAT_MRT3847_94524C.1
gttttttttttttttttttcatccacaaaataagctggaacctttaccattaacattgaggcaaaacacacacacacataaggcaataaccacacacacacacacatatatatatatatatgacaccacataaggcaatcagcaaatgcaactttttcaactttttacacccttagaacatgacactaaattcacaccacaatatgtgtttcaaataccacaatatgctttgatcctggaatcagattttatggcctcttcagtgagaaagaaacgaagatatccataatgatcaaatggtttataacgtagaggatattcctcatcaactaactcctcttgtggttccattatcttagcagcatatgaaagtagtcccatggagtatctgtctatctttgagttcattaaaactctatgttcacaagcgggtatcctgtcattactccaaaccatcaatgcatcgccgcccattaccaaatatagcgagggtgaagcaccgacctctaaccatttcccatccttcaatttgacccccaagccttctaccttctgattcaatatagttaggaaagctgtgtcacaatgaggagcaactcccaaattgctctcaccctctcggggaattctgtatttgtagcctcgaagcacatactcagttgattcaagtaaagtctcaaatttctttgtctcgagtcca

SEQ ID NO: 136785 - DNA, 313 bp, Glycine max
  Clone ID: PAT_MRT3847_94525C.1
ttattttaacttttcaaattctaatttatgcgttgactttgtgtttgggaacgggagctttttctacaactatcttacttgcttccaaattaggtggggatggtgaaaagggcaggatgcaagcattgttgtcaatagaacccgaggtcaaacatttcaagtcttggtaaatcctaattatgcatcaagagaagatttccctggttccaggttctttcttagggaagggaaggttcaaaaaatgatggggccatggtggatcctggggaagccaagcgatgggttgccttacaaatggaaggatttaaagcaa

SEQ ID NO: 136786 - DNA, 447 bp, Glycine max
  Clone ID: PAT_MRT3847_94526C.1
ccgggaccccggggcccacccggaaattccgacccggtccccgtaggggaaccatttttccctttaggggggcaaataaaaactgggggaaatcagggaaaaagttgttccctgggaaaaaaggttaaccccccacaattccacaaaaaatacaaccccgaagcataaaggggaaaccccggggcccctaaaaagggggcaaacccacattaattggttggccctaaaagccccttttccaaggggaaaaactgtttgcccaactgcattaaaaaaggggccaccccccggggaaagggggttggctttttggccccccggggggttttttttttacccaaggaaacgggcaaaaggtgattgcctttaaccccctggcccaaaaaaatttgtaaaacccggccccccctggtttcccccaaaggggaaaaaccctgtttgaggggg

SEQ ID NO: 136787 - DNA, 302 bp, Glycine max
  Clone ID: PAT_MRT3847_94527C.1
gggggaggagagaccagagaaaaaacacaggcagttggattttgaaaagaaacatgacagttggctggaggggaacatgaaggaggggaagcaataacaataatagcccgggaacatacagagggaagcaaacaaatatactgaaaagcaaggaggacgcaagaatatagcataagttacatgagcgaaagcggaaacagcgcagaagtcacgaggtccacccagggacagctgatagagagacaaacgagcggcgagcatccctcgaaaaggctaccgagggacaagggaacaccacagag

SEQ ID NO: 136788 - DNA, 347 bp, Glycine max
  Clone ID: PAT_MRT3847_94528C.1
ggcactggtggccggggcgggttttcttgagggaaatgcaggcgtttctagaccacatgaaggggaggacgtcttcctactgtgggtgaggacacatttctaagggcaagaggatggctcgtctgcgctggtcacagacttcgtgaatcgattggtctcttccaggctgtagatgaccgctgagcactctcctcattagcgacaggatcaccgagccacacttaaagccccatctgatttcgtgcacccagtctgatcattgaagccaggctggtgatactacggctcaggactcccactgtcctatctggtctaggactacggggggtgactgagggctttccctc

SEQ ID NO: 136789 - DNA, 233 bp, Glycine max
  Clone ID: PAT_MRT3847_94529C.1
tactgctagattcatcaactcggatttagttttacgcacacgacctcaacaacgtgtagcggttccactggtaatgggctcccagccattactttatgcaatggcactcattttcaggctagataatgacaactttaacaatagtcacactatagccgaagatttaggaacccttataacaatttcatgagcaaaggttcatactcattactcaggctaaacttttcatctca

SEQ ID NO: 136790 - DNA, 366 bp, Glycine max
  Clone ID: PAT_MRT3847_9452C.1
tttgggggtaccctccgagtcttgccggggcagtttgcgtttgctgcagtggaggctggagattacatgactagcttctgggctgtggatcacaaccctgtggaaacgttgactgtggattttgattggaaaacgggtgttgcggccaaggattggtcaaatgttgctaaaaaaggccaagttgatgtgagtactgtgtagagtagttactagtcgctactacgtgtcacttaactttttttttttgttttaaacctctggttcatcgggggaaaggatttccccgactacttcgaagttcggttaggagataaataaagccccgcgaataatttatcgaactcgggtagtatccaaatagtatcc

SEQ ID NO: 136791 - DNA, 205 bp, Glycine max
  Clone ID: PAT_MRT3847_94530C.1
gtttctctcctcatcgtacaaccacaacaagcctcgcccgtgttttgccgcgaacgattttgtgtcagtcccatgattgttaccgaggatctgctggccactgctccagcaactcgttggaaaaactcctctcttctgatcttcatcatcagcttcgtcgtccttcttccagaaccttcgggagtcgatgacggactcaggttgc

SEQ ID NO: 136792 - DNA, 171 bp, Glycine max
  Clone ID: PAT_MRT3847_94531C.1
atttgttacttcatgtagaagagcttctcaactgtccaaatatattacagtatcagcaagttctaccacagatactgatttgtcaaaggtgccccaaggtaaagggaaccgaccacaggtgtacaaccaaacaattcagagtgatagaacttgctgatactgtaatatatt

SEQ ID NO: 136793 - DNA, 217 bp, Glycine max
  Clone ID: PAT_MRT3847_94532C.1
gccgaagaggcctggcgtgggggagtcccaagaacagagccacgagagagggatcaccctttcctccaagaaagagaaaaagcgcgagaaggtgtgtgggtatttgggccggggggcaaaggagaagaggctcagggggaagggacctgtgaggatgccgactaagggtcttgacatcactaccaggaagtgcccctgtggtgaaggtaccaacaca

SEQ ID NO: 136794 - DNA, 252 bp, Glycine max
  Clone ID: PAT_MRT3847_94533C.1
atgaagaagcactcacttgacttggcttgtgttgtaaaagaaaaggacgcttggaagcactcattcttatttgtacaaatggtacttcgaacttggaagagtatgaagaaattaatgatacttttttatcttttgagttgttctgtcggatcggtcgctcaagacttttggtctctactcgaatctgatgaaaaaaatgggatcacgtcttatagacgtattctcatacctaacatgtctctttatagctaa

SEQ ID NO: 136795 - DNA, 369 bp, Glycine max
  Clone ID: PAT_MRT3847_94534C.1
gaaacggccagtaggagcatagaggctgggggccgatctgatctaacacatgaccctacgacatgggagaccatctaatgcatccttaaattaaaagttaaatcaggctgacccaaatctcaaatgggaaccaacaactaatcccacatctacacataatcgtaggctaactgaccgtttattgactatcctactatgatattactattataggacatgctgctgctgccaaaacgcatatctgatagagggctgatctagatcatcccgacaacaccccagataaacatgtcatctaaaaccgcactcgcactgcgctgagtcacttcaccacagaatacatgctgcgcagaatgcattcacgagctg

SEQ ID NO: 136796 - DNA, 811 bp, Glycine max
  unsure (1)..(811): unsure at all n locations
  Clone ID: PAT_MRT3847_94535C.1
tgtctctgctggttgaaaccttgaggttcaaactgggaagataccaggcaaaaattggttgcatctgataataaggttcgccaattggagacccaagtacatgaagagaagcttgccactgaaaatgagatgaagaaagtagaacttgaacaacaggaaacaagaagattaaggaaagagcttgagagcgaaaccacgcgtccgcgagaagaagcttgggctaaagtttctgttcttgagcttgagataaatgctgcaatgcgagatcttgattttgagaggcggaggttgaaaggtgccagggaaagacttatgcttcggtaaggcttgatttgttgtttataatcattggacatctgcaatttgaaaagtatgtagaatttccaacataggctgcagatactgtcgtagaatatcagaggacacaggaatgcactctagctgctacttcttccagctaattgtttattgcattcttgggatttttgttataataattactaattattctttatgtagattgaattagatggtgcttcaaagtctttctaataaaatcttcaaaggagcacgtatactaggtttttataaacatttctttcatggatcttaactaatttttaaactgatctaaaaacgaaatgagataaaaaggatntagaaacatgttcagcgagactaggattagggaaccttattaagatggttttagcgtggtgtgtgcttataaacctttttctattcatactttctttattataattgaaggcaagattgaaagttggcatctctatggaccatgtctttgcag

SEQ ID NO: 136797 - DNA, 371 bp, Glycine max
  Clone ID: PAT_MRT3847_94536C.1
acgaaaaggaggggttatataggaaaccaacaatgtttcacgtaggagatcagattctacattatccctagaaacatactagtagataacaaaaccatcatgctgtcaacctgaatcacgaatctactgacacgagctaatacagcattttaaactacatgctgccgcaaagtgactatgggacccagtccactctatacactacaggctaactgctttaactctaattaagagagaagtgtctgacccaagtagccatagtggatgacatgcaattgagcagtgcctggagtgaggttgtatctaggtgtttactatcactggactccccgacgatcgttgccgttgcatctgcatgtactcgagctaca

SEQ ID NO: 136798 - DNA, 1265 bp, Glycine max
  Clone ID: PAT_MRT3847_94537C.1
ggctcgaggttgattgttgaagtttctcttctcttgctctgactccaatatttcctttaaaataaaaatagcattctcttccttcttccttcttccattcattcattcacattccacgctttcttcagagcctgcacttgttccacccttcaacataccactcctcctcttccccaattctcttatccgtaatctggcactcttcagagaagactttgtaagataaaaagagaaatggccttagaccagtattttgatgaggctgtgccccagttggattccttggaagataaatcgtctctcgaaacatggaaatgtggcagtgacgatattgcagattcggatagaaatgcctctggtggctttgattgcaacatatgcctggagtgtgtgcaagatccagtggtcactctttgtggccatctctactgctggccctgtatttacaaatggcttaatttacaaactgcctcttctgaaaatgaagaagagaagcaacaatgtccagtctgcaaatcagaaatctcacagtcgtcccttgttccactatacggccgcggccaaaccgtgttaccatctaaaggcaaaggccaccaagtaggggttgtcataccaagaagaccccttggtcctacacttgattccgcaactgtttccccacctatttctcacgtttatcatcgccattatccgaatcatcctcaacaattcaactcaattcctggcagttacacttcaatgttcaacacaggtggttcactagcaaatgcttttgatacaacatatggagtctttggtgagatgatatatgcaagggtctttgggaaccagatgactaacacatatacatacccgaattcttatgatctttcaaggaacagtaatccgaggatcagaaggcatttaatgcaagttgatagatcactcaatagaatcacttttttcctcctttgttgcattgttttgtgccttctcttattctgactgctattgcatattttttgtgcaatacatccctgtatagaatacaagcagtatgcagattctgccagatgcatcatatactcagaagttgtttgatgatgagagagatatctgtaactaataggcccttttgggtacatagcttaattaaggacatattgagtaaatgcttatcatacgataatcgtttccgtattaaattgtttctataaaagaaaaaataaggttaaactattgtcatataaaaaactagaaaaaaaaaaaaactcgagactagttct

SEQ ID NO: 136799 - DNA, 159 bp, Glycine max
  Clone ID: PAT_MRT3847_94538C.1
tatggctaacgtggctgcagggtccaagaaggaatggcgtgacagtgacaaagcggtcacagaggaacataaagcatcacagcagatgagacttgacacaaagatgcttcaacagaacacacagcgacagatactttcgagactaaacctggacctgat

SEQ ID NO: 136800 - DNA, 558 bp, Glycine max
  Clone ID: PAT_MRT3847_94539C.1
ctcagaactcactacgacatcatcggtttcacaatatagtccaaaacggtatcgtattttaaataaaacgtaataaatgaggtgtaagaaacacttaccggacctcaccagcaccatcggcgtgtgcgcttcgtgcctccgcgaacgcctccagcctctcctcgcagcccaggcccaagcccaggcccaatcagaacgttccaccaccaattccaacgtggataataatcatcgtcgaagaaagcccaagcccaagcccgaagaaaaccctccgccgctcaatttcccgcgctcggtgtctccctacgtgactcaccggaaatccgactacgaccgccttcgggataggctgttctacagcacgccgcaagtgagccggcgccgcctgcgacggcggaactgctttggagaagcggaggcacggccgaagggtctggatcctctcgaacttattccgagccagatcgaacaagaccgaatcttcgcacgaaccgcgtgaggatccgacgggtcctcatccgccacagtcatggttttcgacaatcctctatgcgcgcc

SEQ ID NO: 136801 - DNA, 263 bp, Glycine max
  Clone ID: PAT_MRT3847_9453C.1
ctcggaattagggtcgagcgcaagcaaaaagaaagaatcccaggcgaggagaaagatggaggggaaggagcaggatgtgtcgttgggagcgaacaagttacccgagagacaagcgattgggacggcggcgcagagccaagactacggcagggactaccaggagccggcgccggcgccgttggttgacccgacagaaggtacgtcatggtcggtttacagagcatggatagcagagtttgtgggcacttttctggttctttaca

SEQ ID NO: 136802 - DNA, 354 bp, Glycine max
  Clone ID: PAT_MRT3847_94540C.1
tcggctcgaggcccaacttctgtcccgatccaccaacttttttttcgttctcttccacaaccaggggggggttctaaccatccgagccgccattccacttataagaaagaagcaacgttggctacagagctgtaccagcttaaaaacttctacctactgaccgacataaactacaaaggcttcacctttaatcacttacaataactccgtaagacgctcccagaaacaaggtacctgatcctgaccaataacacgaccgtctacaacgcggataataccacgccctgggatacactaaataccttcatgaactgcctgaacatatgtctctatcttcacaccaaggagatccct

SEQ ID NO: 136803 - DNA, 282 bp, Glycine max
  Clone ID: PAT_MRT3847_94541C.1
gggaccccctgaaaaaaaatttaaagaaccataaaaaagggtttgcctgaaaattttttacagatgcctgaaacccttaccctaaaaaaaatccctaactaaacatgacgagggggtaaactccatgtttgggacccaaaaaaaagttttttcaccaattaaaaccaaaaaaaaaaggggctagcccttacaacattttgggaaaaaaattgccaaccttttaaaaccctgaagccgtcaggaaggttttccccccctgaaataagggttaaggaccctttt

SEQ ID NO: 136804 - DNA, 589 bp, Glycine max
  Clone ID: PAT_MRT3847_94542C.1
agcttgcctgcctgcaggtcgactctagacaaaaagaaagaaaatcacgcaagtttttttctgtgtaaaaacaagtagagaatgtgttggtcttcctcataggttcctgatgctaaaaaggatgttctctatttaacaatgctcatgtgttcctatggagcctcctggactgctagaccccaattcctcatgatagcctagcctagtcctgatcaagcctcatccgtagattcctcttggtagactaaactcaaccaagaccgtattaagacacacatacacaactaagttcttgtaccccgattcctcgtgatagcacatcaacttagtcccgtactatcaaggactttagaatcagacaaggttccactattgaataaccctaacaaagcatgcatctacgtgatcaaggtaaaagcacactggaatgaaaagtagatagcacagagaacacacaaaacatcattacatagataggaatatctttacataaggtacctacagggaagatccaacagaggatttagctttccatagtctggaaacctcctttcaacacagaggagaacatgttgaaagactgcaaaaa

SEQ ID NO: 136805 - DNA, 154 bp, Glycine max
  Clone ID: PAT_MRT3847_94543C.1
tttcaatgcataataactattacccattcaagaacctttttaaattcggggtcaacgctacctaaaaatatttcatcatctcataactcaaccccatcttctcatcctattaacattcttcccttcacaaaacttttcacaatattacttacca

SEQ ID NO: 136806 - DNA, 146 bp, Glycine max
  Clone ID: PAT_MRT3847_94544C.1
aaaaggaagaggtccagttacctgaattaatgcacacagatacagtcaaatgaaagagaaaatttacactccacctaaattggggaaagaataaaacacaaggccagcgggagggaagtatgcgctagaaggagcataaaggagtg

SEQ ID NO: 136807 - DNA, 708 bp, Glycine max
  unsure (1)..(708): unsure at all n locations
  Clone ID: PAT_MRT3847_94545C.1
ttnttntnngaatattaacatcttgccaattattccccaaaacattcattaaatcacattacatacacacacatatacatacatacatacatatatatatatatatagggaatcctacatattctttctgtaattagattgaatcaggtcagatacaagattgttaaacctagttcacgagccgactcaatcagatatatacaaattcaacccaatcaaacctttgttttttcccttgaatcagggagttgcttcggtaatatataccttgatcaccactactttgtattatcatttcttattattctgctagccgtggcaaaggttcccagactgaaatactttgacaacatccagcatataaaggctaggcatataaatgtgtccatgaactgaaatagataccctaacgaaaggtagctactgccctatttctcattattattctatttcattcccaagatgatagttggtcattttcattcaccaactccatccccaaaaggaataaaataaataaataaaataaaccaatgaaaatatggtacaatattaaggccttgtcaaactattcttaactcaaggtttggatagccagcccgagctttgtgcctttcaaagagatcttgaagtgcttccacaaacagaccatgtatcttggcaacctcctcggtggttggttctcggtttttgtcaacctcaattggt

SEQ ID NO: 136808 - DNA, 357 bp, Glycine max
  Clone ID: PAT_MRT3847_94546C.1
aaaaaaaaggcctcctaggaatgacgttgaaaatcacaggccacaatgacttttttccaaagggtttgtttaactccccccttttaacctcgggactaatgttttgggaaaaatttgcctatgaagcaacctttggggcctcacttttggggcggaagcatgcagggaccaaccccccttgggggctttcgggcccccttgggacaaaaacaaaagcccttgcccccttgggaaaaccccccctttttgatgccagcttttggatcattttaacacacttgaaaaccctttcctgccaaaaagaaacaaccaatgggacattgggaaactttttttaaaccggggtaacaattaatt

SEQ ID NO: 136809 - DNA, 184 bp, Glycine max
  unsure (1)..(184): unsure at all n locations
  Clone ID: PAT_MRT3847_94547C.1
nttgcangcacncgtacgtaagctcggaattnggctcgagaannaaccatggcaatggcnacncaannntctntcttaacncnacccatctccccaactcaaagccagcgaangcgtcttcagtgccatggaagcaaaactcaagcntctccttctncancncgaggcccctcaagtncnaaan

SEQ ID NO: 136810 - DNA, 374 bp, Glycine max
  Clone ID: PAT_MRT3847_94548C.1
ttagggaacaatcactaatttcattacatgttcataaggggtgtacgcattgactccaaatatctcatgttactagtagtaatgaaacctaacctatgtgcctgccaggcagcaacaagtgaggaggatcgagcacagatataggtgtgaaaccgctgtccattcatcttgtacatgctgtttgcttataaacatgagtgactctaagcggacctttatgtaaactcgtagcttgcggcatatgccgactactttaaggtgagatgatgagaattatgaccggtgatttgagtcttgagaagcttcctcatgaagtgtttctaactcagacccggactaaagcaccttgcctgcttacacatggagaatctgac

SEQ ID NO: 136811 - DNA, 246 bp, Glycine max
  Clone ID: PAT_MRT3847_94549C.1
gttcttcttccccataccaccactactgacactaccaccactgctctcgaacaaagtcatcgtcgcgtttggctcgaaaaaccgataacggaacggtggagccaattcaaatttccctcgacacgcttccggcgacggcgcagccttcgtcgccgtctctcctccgatctccgacgagctcccttccgatcaaggagcttcatgcttctatcgccttcctcggcgcggacgtcaagtgcgcttcga

SEQ ID NO: 136812 - DNA, 597 bp, Glycine max
  Clone ID: PAT_MRT3847_9454C.1
gactagctatcgatctatcgctaggaatgtaccagagtccgtacactgtggggtgtgtggtgccaaggaggcgtagcctgaacactgtaggtaacagccaatatttatggcacaccacctacctgcaactagtgtccagtacccacaacgagtttcaaacaaggttactgaggctgcaaaccctacataacacgcatcggttgcaaaggcagaacaaaaacgtgtgccgtttgctgcaggacatgcggccttacgaagcgcgagcgccgctccaacacaagtaactgcacgtttcacaaccttagtggtagggagccgaacaagaggggcttattaatgctcctaagcagcgtgctaaggcagcaccaaaatatccagcaacagccagtgtgagatagcatggatacgccacacaatatagggccctggctcggtgcaaagaagctcgcatgccgaattagtgcaagacgatggttgaaaagtcattaagcgcaacaagctactgcaagtcgaaaggtgtgccagtcagctgctgagcgcaacgccagcatcgtgatgcgcatggagggcaaaacgcgtactggggagtactgtgaa

SEQ ID NO: 136813 - DNA, 185 bp, Glycine max
  Clone ID: PAT_MRT3847_94550C.1
agttgattcatgccagatgggcaatgcttggtgctgctggattcatcattcctgaggcctttaacaaatacggagctaactgtggtcctgaggctgtttggttcaagactggagctttgctttctgatgcgggtacattgatctacattcgcgatacatatccgcgtcaaatctcattcttgctt

SEQ ID NO: 136814 - DNA, 248 bp, Glycine max
  Clone ID: PAT_MRT3847_94551C.1
gatttattctttcttccacacgtacatggcactgctgggctcatcaatgagggtaatcatattgatggtcggagaacaagagactttcgcggattaccttaatggcggccagctaaccgagaatagcccaccacgaatagcggtcgaactgtgcgtctgaatcgaaaaactagcaatgcgtgctcaggcccggacctcgcccggggaccctgattggggacaccacttagggcgatagccctgtcacc

SEQ ID NO: 136815 - DNA, 298 bp, Glycine max
  Clone ID: PAT_MRT3847_94552C.1
caacatcaatttatttcacaaatatttacattaatcttactcattccaatttcaagcactgtttacaatctatgcgttccacaccttcaacctttcactcttcttttatattaccatcattcaactccaacttcttttcttaatcttcacatcttctcatatttcattttcatctctaatctatattcctttcatactccttcactcccataattctattccatcttatacaccatcttctatcactttctcctccccctactattctctcaatcaactttccatttttcttcatttt

SEQ ID NO: 136816 - DNA, 542 bp, Glycine max
  Clone ID: PAT_MRT3847_94553C.1
ttgccgtctacacgtgtgtagtaccaccttcttgggggggggggggggggggatatgatagagagaaggggaggagacacctgtgctgtgcgaggtaaattgtatgtagtaaggatataccgtaaataagataagcagaagaaagaagccgaccaagaaacgagagccaaaagcagcaagtaagaaggtaagaacaaatggagccaactaattagaaatagacgatgatagcgcaagggaaagcgtatccgggtggtgtcacttcaaggttcactggatcgatctcgctagctcatcgtagactgtggagagacccgcattgaaaggtaaggtatgccattcgactgggataatcggcgcatgcccaaaatttgcctcggatttaatggaagtcttggctagcatagtttatggggcttacagcctcgaagagtcaacaactttctattcagactttggcttaatacggctctacgtgcgagcctcaagcccatctctttgcgactcctctaggaactctccttcagcgccgccggatctct

SEQ ID NO: 136817 - DNA, 112 bp, Glycine max
  Clone ID: PAT_MRT3847_94554C.1
ccccccccttattgatatgcttaaactcagcgggtggccccgcatgacctaaggactcccattctgtcgatttccagcacccgtacccttatgtcgactagtcccagccgta

SEQ ID NO: 136818 - DNA, 412 bp, Glycine max
  Clone ID: PAT_MRT3847_94555C.1
tttataccccccaagcaacagagcagccaaaggggaggaacaacaaaaagccgatattcaaaggccggaaaaaaaaaaaaggaataacaaaaaagaccggaaaggcaaacaacacggcagaaactctcaacctggaggacggagcggccataggagaggtggaggccgccaacaagaagggcgaggatcccacaccccaatctcaacaaaaatcagaaggggataactgccaaaacactgaagaccagaagccctgccacgaaacccaaagctccgcgaagggcaaggacaccgacgaaaccaaaggcacacatcgccaaagcggagaaagccaccaaggacagcgtgaccagggcccccaacatgagagacaggctcagaaccgagaacggaggcaacgaaaacggaacca

SEQ ID NO: 136819 - DNA, 714 bp, Glycine max
  Clone ID: PAT_MRT3847_94556C.1
ggcatgtcacctccgctagctattggcatgggatgtcctgactcttaagatccgtttaagcgatgaagtttattctgttgagagtcccagcaagccggggcagcatggggccaggcaggcagccacagagacagagacgggaggggagtgcttggcttggacctccgccctccatggactctgtttccatgatgtcagagaggcggaactaagaagagtgcctcaaatccaggaggccacagccctgccctccattcgggtttggaggcaacactgagcgaggtgagcatgcctctgttttccttgcctggtttcctcctgggctcgctccccacctggctgcagctgaattctggccttcatcctcaccatccagctctttgtctgaatggcatttgccaagagacctcataggatccacctaggcagaagacactcggctcacagaaagccttctgtgggccgggaacattcctgttcttactgtgtttggcgacttggggactgagtttggcggaggaccccacgttaaaaaaaaaaaaacaaaaaaaacaaaaaaacagttttctaattcctttttatgtgtcattgggaacagggcgggaaactgccgttccgttccggagggtggtgttcgttcggagcctgcctgtctgcagacgcacccttgaccttggatggagtctgttcctttcttgatgtatccatttcctt

SEQ ID NO: 136820 - DNA, 421 bp, Glycine max
  Clone ID: PAT_MRT3847_94557C.1
cccacgcgtacgtccacgcgtccgtgtggttttgctgtaatacgcaccgatgcatatcttcgttgatgagggcaactggcaccgggtgtgttcttatgaagctgaacaagcttggcattgacgattttccaattgccttattcggtttttatgcaccgcgctataactctaaggtgtcaaatcatttaactgcattagctgaaactttaccttatgaattgagtgaggcattattaatgcgtgaacccagcctgaggaaccggatcatgtggtctgttacagtgatactttacaacactaatactgtagaaagctttcatgcacttgatgagagtgacctgctgaagaaagaggcagcgatgatatgggatgacattctatctggataagctgcggaagactgcacagtactgtcaacatt

SEQ ID NO: 136821 - DNA, 260 bp, Glycine max
  Clone ID: PAT_MRT3847_94558C.1
gaaaacccggcccggaccaacccgtccgaccgcttgcaaaaaacttacaaaagggaatatatattactcatcaacatacgatctactgaggatatacaaccatgcacaatattgaataccatagtctctaccaacaactactatggcccaaaaaaaaggaaaaacatgaacaaaacaaagcggccgctctagaagatccaagcttacaaacgcttgcatgcgacatcataactcttctatagtgacacctaaatacaata

SEQ ID NO: 136822 - DNA, 1664 bp, Glycine max
  Clone ID: PAT_MRT3847_94559C.1
gcatccactccacttctctcacacttgacaaaagaggaggcaccatgacaagcactcttctgtctttgctcttcttgctcttctctcttctcactccaactctaatttcctcttcaccagttctaaaccctcaagaggtcgtacaagaggtcaacaagaaaatcaatggctctatagcaagacccagaaggaacttgggctacctctcatgtggtagtggcaaccccatcgatgattgttggaggtgtgaccccaactgggagcagaacaggcagaggctagcagactgcgcaatcgggttcggcaagaacgccattggcggcagagacggcaagatctatgtggtggaggacgacggcgacgacgacgcggtgaacccgaagccgggaaccctccggcacgccgtgatccaagacgagcccttatggataatcttcgccagagacatggtgatccaacttaaagaagagcttctcatgaactccttcaagaccatcgacggaagaggtgccagcgtgcacgttgctgggggtccatgcataacgatacagtacgtgaccaacgtcatcatccatgggattcacatacacgattgcaagcagggagggaacgctatggtgcgggactccccacggcactacggctggagaacctgtatcggacggtgacggcgtgtccatcttcggagggagccacgtgtgggttgaccattgctcgctgtctaactgcaacgacgggttgatcgacgccatccatggctccaccgctattaccatttctaataactacatgactcatcatgataaggtcatgcttttgggtcacagtgattcctacacccaggacaagggcatgcaagtcactattgctttcaaccactttggtgaaggccttgttcaaaggatgccaaggtgtaggcatgggtatttccatgtggtgaacaatgattatacccactgggaaatgtatgccattggtggaagtgctaatccaaccatcaactgccaaggcaacagatttgttgcacccgatgacagattcagcaaagaggtgacaaagcgtgaagatgcaccagagagtgagtggcagggttggaattggaggtcagaaggggacttgttagtaaacggtgcgtttttcacggcatcgggggctggagcctcctctagctatgcaagggcatctagcttgagtgcaagggcatcttcattggtggggtccataaccactggtgcgggtgcactcagctgtaggaagggttcccgctgctgaggaaacagaatgacccttatgacccctccattaattccaaaccaaaattatcaaaagggagggaaggggaaacagaatgaccctattaaattaactatggtcatttctttatagttaggatgtatactttcctatcatttccttcctgcattcttttctttagttttttttttttttttaccattgttttccactatttgtcttcttttttttttctttagcttttttacttttgggtttcttctatggtctacttttgtctgattacaacctccgctgtaaacctcatagaaccaaatttgtgaatctggtctgtgagaaagcaagtgcagaagagttgatatatatatatatatatgatgattttacatgtttcaaaatatgaaaaaaag

SEQ ID NO: 136823 - DNA, 387 bp, Glycine max
  Clone ID: PAT_MRT3847_9455C.1
aagatagcaaggctcaagctaccgcgatggatgtgggagctatagaagtgatcactgacagacacgcatgccctgactgcaacatagcaggggcaacgctgttgccagatactgataataccaatcctgctaatgcagaacgacgtatttaagctgcgcctatcaaaggcggaagggccattcgacttggtacattatccgaataccattgtgcagattgaaccagacatgaatctcatggtttcagcttttgagtaccactaccacaggtgattttggtcaagggaaagatctcgcaatgactaaagataatgcaccatgtgctgctgtagggattgcatcaagtctcacttcaactgcattgctgggatctgagtcgcaaaagac

SEQ ID NO: 136824 - DNA, 682 bp, Glycine max
  Clone ID: PAT_MRT3847_94560C.1
gcgcccacgcgtccgtacggctgcgagaagacgacagaagggtcagcaaagaggtgacaaagcatgaggatgcagcagagagtgaatggaaggggtggaattggaggtcagaaggggacttgttagtaaacggtgcgtttttcacggcatcgggggctggagcctcctctagttatgcaagagcttctagcttgagtgcaaggccatcttcactggtggggtccataaccactggtgcgggtgcactcacctgtaggaagggttcccgctgctgattatgacccctccagcaagcaactgtatctgcaggccgctccattaattccaaaaaaatggaatggaatcaagaatcaaggggggagggaaggggaaagagaatgaccttattaaattaactacggtcatttctttaatagttaggatgtatattttcctatgatttccttcctgcattcttttcttttgttttctctagtttttttttttttttttttttacttttgggtttctgatttggtctacttttgtatgattacaatttacaacctccgcctgtaaacctcatagaaccaaatttgtgaatctggtatgtgagaaagcaagtgcagaagagttgatatatatgatgatgattacatgttttttttttttccaaaaaaaaaaaaaaaaaaatttaccaaac

SEQ ID NO: 136825 - DNA, 523 bp, Glycine max
  Clone ID: PAT_MRT3847_94561C.1
tcctctatagtggccgcccttggtttgttctttttttgaaacacaactcattttttattgatatatgttggatgaatccaataaaaccgatacaagtcacgaaaaatcagactagatgaatccttcgagatcacatgagcaaaagctttcgacgaaagctgtcctatagtcgtggaagcaataacacttgataaagataggaattcagacacgagaggttgcagactataagatgtcatcaaatctccttgaacgccgcgaagagatcaccgttgatgtagtcgttgtccacaagactaaccaagaagtagctcttctggaccttgtctagtatctccctagatgagtcgccctcagggaacaggcaagcccaaccctttgaccaaatttcgaaagcttcgtctttccaaaccataaagctggctgagtcaacgacagttggctggactatttccttgccagggaaaacaccccatgtgaccgcattcacagcgtttgtgggaatgtttgagaatgactctcc

SEQ ID NO: 136826 - DNA, 1131 bp, Glycine max
  Clone ID: PAT_MRT3847_94562C.1
cagacctacggttgcgagaagacgacagaaggggaatcaattcagattcaactaaaggttgaagatttagcaaaacaatggaagaagtgaagctgattgctacacatcaaagcttcccttgtgccagggtagaatgggctttaaggataaaaggtgttgaatatgagtacttaaaagaagacttagcaaataagagttctttgcttcttcaatctaaccctgtccacaagaaagttccagtgctcctacataataacaagcctatagctgaatcacttgtcatcctggagtacatagatgagacatggaagaagaaccctttgctaccacttgatccatatgagagagcacaggctcgcttctgggctaggtttattgatgagaagtgtgtgttagctgtatggggagctaccgtggcgcaaggagaagagaaagagaaagctgtgggtgctgcactagagtctctggcacttcttgagaaggaaattcaagggaagaagtattttggtggagagaagattggttatcttgatattgcagctggctgcatgtctctttggttcagtgtcctggaagagcttggagagatggagctactcaatgctgagaggttcccttctcttcatgaatggagttataactatattgcagctggctgcatgtctctttggttcagtgtcctggaagagcttggagagatggagctactcaatgctgagaggttcccttctcttcatgaatggagtcagaacttcttacagacttcacctgtcaaagattgcattccatccagggaaagtgtggttgaatatttcagctttggcatcaactatgtgcgttccttagcagcatccagtaaatcttgaaactgaaaatatacctttaatcaactacatgcatcatttataattgttcacattgtttgtattggaattggagtttggcttcaaatagtgttggttatcttatcatatgtagttgtgtgaaatgtgtaatcagttttctgtgcaatggtggcccttcttgctatagtgaaattttcagtttgctattagatactgcttaaatagaagaaaaacaaagtacattaatcctttgttcgcctatttgaataaaaaaaaaaaaaaaaaa

SEQ ID NO: 136827 - DNA, 231 bp, Glycine max
  Clone ID: PAT_MRT3847_94563C.1
cgaaaaaaaaaaaattaaaaaaaaaaaaaaaaaaaaaaaaaaaacaaaaagaaaaaaaaaaaagacaaacctgaaaccgaaaaaaggcgcctcccaaaaatgaatacgggggcaccgtcaaataacttcacgaccggagccctacaaggactccctttatccctttagcgggcgggtcctcacagatggcgtttctctccccctgcgtttatattttctgctacatgtgca

SEQ ID NO: 136828 - DNA, 435 bp, Glycine max
  Clone ID: PAT_MRT3847_94564C.1
aaaggaaaaaaccaggaattttttttcccccccccaaaaaaaaatctggggcccgccctttttcatagggaacccccccccgaaaaaaacggcttggggtcggggcaggggccccaaacccttcccaaaccaaataaaccccctttaatagccttagccccccctaggggaaaatggggcccccggaaaaactaaaaaaaggaaattgtcccccccaaaaaattgggaacccaaagcctttttaacggggggggggctggactccccccataaacgggccccgggcccttaacattattcggaaaaaaccctgaacaatttcgaccctggcgggccaaaattcgggttcattcggaaccccggaaaaaataagggttggaaaacgcacccgggttttcttaggaattcccccacttaggggggggcccccccttt

SEQ ID NO: 136829 - DNA, 516 bp, Glycine max
  Clone ID: PAT_MRT3847_94565C.1
ccctttcgtccgatggggtcaaccttagccagcttcatgttcttgtggacgatcatgaggcagtactgtccctacggtgttcaacgtttcttcgagaagtacacacacaggatcatgagttacttctacccttacattagaatctccttccatgagtacatgggagacaggttgaagcgcagtgaggcctatgcagctgtggaggcatacctcagtgccaacacatcaaagagtgccaaaaggctcaaagctgaaatgggaaaagatagcagcaacttggttttgaccatggatgagtatgagagagtaacggatgattatgagggtgtgaaagtttggtgggtcagtagcaaagttatgtcaccaacaaggtccccaatgtcttattatccagaacaggagaaaaggttctacaagctcacttttcacagcaagcatagggacacaataactgggtcctatttggagcatgtgatgagggaaggaaaggagattcgtttgaggaacaggcagagg

SEQ ID NO: 136830 - DNA, 430 bp, Glycine max
  Clone ID: PAT_MRT3847_94566C.1
ctcgagccgttttcgcagtttcttcgtttctctctctctctctctcttcagaaaagcagaaagaaataacccattcaaaaaaagaaagagccatcaattccaatcacaatggccaatcaactcaccgatgaacagatctctgagttcaagggagccttcaatttgttcgataaggatggagatgggtgccttacaacaaaagagctttggacccgtattccttccttggggcaaaaacccaccaaaggttggcttccagaccttgtccaccaaattaaatcctgttggcaagggcccctttgacttccccaagtttttgaacctattggcccaaaaaataaaggaaactgtttttgaggaggagctgaaggaggcgttcaaagggtttgacaaggaccaaaaagggttcatttttgctgttgaactcccc

SEQ ID NO: 136831 - DNA, 112 bp, Glycine max
  Clone ID: PAT_MRT3847_94567C.1
gcctctacaatggagcaacgacaaggacacatttcaacgtcgccgattcttcactttctgcttctcaaacgaggaacaatagaggcagaccttgttcaatgcttcttaaagg

SEQ ID NO: 136832 - DNA, 341 bp, Glycine max
  Clone ID: PAT_MRT3847_94568C.1
ttggatatttcgaggcaccgaaactagaggcgggcgtaatttgaatccggcaacaccggccttcttgaatcggttataaaacccattctagaccttcttactcaaaccggttccatcctaatggggaatgactatcacgtctttgggttacgctgaaacctcgtgaaaaatttttttagactacgtgctgttataaggcaaaacactgtcgctggttgatataggacttggtttaaagaacacacaccttgtctgacgctcactaagacgtctgttttactgcaaggtcaagctgcagaaacgacgactttgagattgcactttccgatactggatgggct

SEQ ID NO: 136833 - DNA, 313 bp, Glycine max
  Clone ID: PAT_MRT3847_94569C.1
ctcggaattcggctcgagctcatctttagtctgttcttcagaactttagtgtgttatgtaaccccaagactttgagaatgccgagctgggtttgttgaaatcgctgcaactgtgaccgcaactgcggttagcacaagtactattttgactagagctatgtcgataagacaaccacagcatcttctagttttgattgtttcctctttcctcctctatttttttttttattctttttatctctcttttaatttatctcacatccctcttctctctttattttttattttttctctatttatactctttctcattc

SEQ ID NO: 136834 - DNA, 417 bp, Glycine max
  Clone ID: PAT_MRT3847_9456C.1
ctgcaccaacacaatgctaccacctgcgtacaccagttaagccaacacctagtaatgcacgctcaccttcttactgaaaaaaaaaacgaatcacgatgccactgcgcttgtccatattctttttatcgtttggccaaagtgcttggacgagactactgtgatcataaagaaaaaacacgacaagggtaggtgttttctcaatcatatcggacaaattattagtttgtgctcattctacgttgcacacccacgtttctgcctcatctttccagaggttaaggctgtgtttgtatttccgttggcttcaatgcaacgggaaagcaacatgggtgttgcttttggaaattttgcctcagaaagtctattttttccgttcaacacgattggatcgcattcgcaaacatacactaagttgtt

SEQ ID NO: 136835 - DNA, 218 bp, Glycine max
  Clone ID: PAT_MRT3847_94570C.1
tttctttctttcccgttaaaacaactcacacttcacacatgattcccacaattaaaagaggtggggaaattttccaatatgcaaaacttacttaacaagagggcgatgcccaattttctttcttggattaaacaaacgagaccgcgaaggaaaaccccaatttctcaacatgccgaggattcccctttttcaaaaaaacttgccatctccctgggaac

SEQ ID NO: 136836 - DNA, 126 bp, Glycine max
  Clone ID: PAT_MRT3847_94571C.1
gggaggggctagatgggcccagatggggaaagcccctttaacaaccgaggctaacagatgaatacccaccccatttctgccttattccgaaagggggggccaggtggtctcttcaacgaaaaacca

SEQ ID NO: 136837 - DNA, 376 bp, Glycine max
  Clone ID: PAT_MRT3847_94572C.1
gaacaaagacgaataataagaagaagtgtaactattaactgaaaggagtagcgtatatccaatttgtagcggggcgaaaaaaaaaaacgatttacgcccaatagacacacttaaaatgggcaggatacgaaagtgtagtgtatcggcataggtattagcgtagtgagaatgtggagggttaagtaataatgatggttagcgtaagaaaagcgacaaatgaaaattgcgcattacaaaaggggccaaccaagataatagttagggcggatgtgtataccgtgcatcccggcggacgacaacagcggcatagcgtagtgacaatggtacgaattcatgttagcatatggacagtagtgggtaaaattgttcccccata

SEQ ID NO: 136838 - DNA, 543 bp, Glycine max
  Clone ID: PAT_MRT3847_94573C.1
tgctcctcacatctgtaccccaccaccatctctcaccaccctctctagtctctacccttttcactttctatttatatacttgttttctgtttatttattttcttgctttcccttttggtgcttgtactaaccctaagtagcagccagggacctcactatcagcaaaataataaatattcacaccacatcgatctcatacatatcacaggttttgaaaatcctgccggtttgctacggatacatattgaacggtgcgatacagaatcaatgatgttctattttcattgtgtttagaattgaagggaagctcagaaagcgcctgatgttgtattttctttgggctttgaagaggtcgttttcgtgggaaagaaatgagtactgatgagatgacatggatgtataaatgtttttgtctatgtttgttgcagctgtgcaaattaaactggcataagattgataccaattgtgtaggggtttttgagattaccttcattaggatgtagtactattgagtattcaactaatgtggatcaatttgagagc

SEQ ID NO: 136839 - DNA, 265 bp, Glycine max
  unsure (1)..(265): unsure at all n locations
  Clone ID: PAT_MRT3847_94574C.1
anagannagagnagaattagtgtgaccctaccaaaaaccttgttgcatgaatgantgatatcatcatcactactancanaagtnnnnnnnnnnnnnnnnnnnnnnctcttcttctaccatggcttttcctccttctcacaccggatgttccaaacccatgaagatcatgatccccaccagctccatctgcgttcaanttcaacctctctcaacgctttcccctctttnccanctcatcangttcaaggtgcnggnggtttaatga

SEQ ID NO: 136840 - DNA, 326 bp, Glycine max
  Clone ID: PAT_MRT3847_94575C.1
ggaggaggagcaagagatgtttcgttaaggtcatgggatggtggtagctgcaagttgaacttttctgtggcttctgcgtccactagctagaaccatgagaagagcaccttacaaaataataataacgcttctactggtactagaggggaaggtaccgtggattcatggatttgctcttctgaatagactaaaccgggtacagaaacttgttatcattacatggtagaatatgatgctgcaatgaattaagatcgtgatcatgatgatgctgatgatagtgggtggttgctggttagaatttgcagctaacatctttcttcttttct

SEQ ID NO: 136841 - DNA, 336 bp, Glycine max
  unsure (1)..(336): unsure at all n locations
  Clone ID: PAT_MRT3847_94576C.1
cgtnnccgattcttggcttggaggggagctagatgcttctctcccaaacaaagggtgattgacaacagtaagggcaaggagaagttctgagcctgngtcgtagattacttanttatccgacnncggtcccaaacaaccctccatgttgatgggcnngtgggccgtgttgttggtttggaagtggcttatgttcttcatagcaaaggtcattccannaccacacttgcccttcttaagtgttnngcggtggtgggaagggggtttccgtggcccttagctagtcacaattcannaactagttaaacctcttaaaaaaaggggtcaaattaagggttt

SEQ ID NO: 136842 - DNA, 637 bp, Glycine max
  Clone ID: PAT_MRT3847_94577C.1
ccacgcgtccgttaatgttcattcatcgaccaataatttcatatggcatggcccccaatttgtgacagagtgtgttcaatgacatgtaggcaagtcaaacattagcagggattaatgttacttagaacaaaaaccatgattgtttggacaatgacttaatgtcttaaatttgactaggaggtcatcccggtataacaaaacagcttaagacactacattgttgcatcttctattgattcagacactacatagaacacgccatgtcaaagactttattagatgagcaagtgacagctcaagaactattcagttaactgaaaatacaagttgcaacttaaagtaaagaaatataattccatagttactcaaatcccttcccaaatagccattgaatgaagttataggacaacaatgtttaatgaactaggggtgagtgacatcaagcagaactgcgcaaggaggtccacacaaaactatctttacagataggatttaactcaccacaatacgagtgtaaaaaaaaataattaaaactatcttgacttatgaatcaatcaacagcaaacccatcaaaccaaagcagaatagctcaagcttcaattccaatgaccaaagcagaggtggggggttatacata

SEQ ID NO: 136843 - DNA, 757 bp, Glycine max
  Clone ID: PAT_MRT3847_94578C.1
aaaaattgaagcattattaatgcatacttgatgcatgtttgtttatgatgtttaatgctcaagaatttgaatgacgatgtttgattttgaccaaacagggagcaatattatcggctgcgctgccgggtcttcaggagaaggtatgcgtaaaacaatactagaaacttagcttgattatgaattctctttaccacgttgacttagctagccataaatttatatttcttactaatgcaataaaaaaacaataatatattataaaaaaattttaaaaaaattaattgttcaagtttgatgaagttggagagggatcaagtgtccttaagttcaaccatgtagctcacctcttatcaaaatgtcatcaggtagtcttctacacatgtcttcttgacattggtccctacagcccttatgggcactctcggtcaaacatcgtatataagttatagcatattgtcattgtatgatatcatattaataatcaacataaaaaaatgtaacaaaagaaacataatcagtataaaatgatttatgctaaattgttataattcatgtgcagggcgtggcactcacgaaggttccgaaagtgaaattcctaataatagtaggaggggcaaagtttaggtcaccttcagtgatggacaaagcatattcttcttccattagctgtccctccctccactttataggtacctccgtttccaccttttattttatcatacttttttgtcattggtattttttgagaaagcatact

SEQ ID NO: 136844 - DNA, 576 bp, Glycine max
  Clone ID: PAT_MRT3847_94579C.1
gaacaaacaacaacaccaacacctctctgctcaactcaagttgttcactaccgattcctaatgccaagcttcttaacaccttcacaacattcacatcacaaaaacactcaaaacgatgtcgtttcaccccaaccctaacctcaacaccgccgcgaccacggagcccctcaaccatatggtcctcgccatgcacctctccgaccccaaatccaaaaccctaaccctaatccccaattcaaccctaatcatactggaccgaacccttcttctctccgacgagcttctcctccgaatcctctccaagctccccgattcttcgcagcagcgaaactccaattccttagtctgcaaacgctggctgaacctccagggtcgcctcgtccgaaccttacgcgtcctcgattggagcttcgtcctctcgggtcggttaattaaccgtttcccgaacctcaaccacgtggaccttgttcaggctcgtttacttcttcttctgtcaacacgacaactaccattgtggtgagccacaggctcctttcgatgcacggggattccgcgtggcgaaatcgcgtagaaaaa

SEQ ID NO: 136845 - DNA, 409 bp, Glycine max
  Clone ID: PAT_MRT3847_9457C.1
tagtcctttttttttttttttttttttttttttttttttttttttttttttttttttttttttttttttttttttttttttttcaaattaaaggggcccctttaccccaaaatttttggggaaaaccgccccttttgaaaaatttggaaaaaacacctcaaactgggcatttttttttggccccaaaaacattggaaactttaaaaaggttccccccaagccccataaaaacttttacccctgggaccagcccaaccttagggaacaaaaatttttcctggccaagtttgtttggcccccaattcaaaattggaaaaaagtccccctgtaaaaagcacccccgttggcatttccaagggcaccctttttaaagtacttgccagccaatgggactttttggacattcttt

SEQ ID NO: 136846 - DNA, 503 bp, Glycine max
  Clone ID: PAT_MRT3847_94580C.1
acaaaattgcataatgtgtgagcggcgtccagcttcagcagtatcagcgggtcgtgatccactatgttaccatttccttgcgtggagttaaagtatcaagatgaggagcaccaccaacatggaactatctagagaggtacctgttgtggaactgtatcataggttgacattactggttactgatttcgcacagatcactgccattgacatttagggaggacaaagggaactaccctaccatctccaggtcattacatcggagcacaaactctctatcactacctgcgcttttacaagcatacatggactcttagtgtcttacagggagcggcaagatgacttggacatatgatgatggaactaatgcgattcgattacgcgaaggagatgtctgcacatctaaaggaaggatctggtttatatatacagagcaactcaaagggtgaaagaaccaaacgtaatgatttatcccaacgtttaccaactcagacgacattccttac

SEQ ID NO: 136847 - DNA, 187 bp, Glycine max
  unsure (1)..(187): unsure at all n locations
  Clone ID: PAT_MRT3847_94581C.1
aaaagtctgccananctacgccgntaccgttaaagcttcgggnnaatttcnngcctgnncagngtccgtaaaatggaacgnaanccccccggggngccgtgtngangcccgnaattggncncgtcggttttgtagcttgaagtgtttccgcttgaaaaattggntngggaaatcctgnangaaaatt

SEQ ID NO: 136848 - DNA, 465 bp, Glycine max
  unsure (1)..(465): unsure at all n locations
  Clone ID: PAT_MRT3847_94582C.1
ggctcgagcgcccgaccagtcccacccatccctgtcgcgctcttcgtcgccatggctgctctgcgctcctctgctcgcctcgccgcgccgctgccgcgcgctgcgctgcgcctgccggcccgtcgtgcctacgccacaagcccggcgcctggcgcccacccgccgccgcagcagggtggctcgcgctcccagggcacgagcaagacgctaatcggctccgtcgcgctgctcgcggctgccggtggcgcgttcctgctcttcggcccggagaacaagcgcgccgaccttggcgtcggcccggacggcagcaacaagctgagcggcagcggtgccaaggcccagcgcgccgncacgtacaagggcgtgggccccagcctcgacgccgacccggncgactaccagacggtgtacaacgccatcgacgacaagctcgactcgaaccccgagtacgacgacggcagctat

SEQ ID NO: 136849 - DNA, 570 bp, Glycine max
  Clone ID: PAT_MRT3847_94583C.1
aacttgggttttaaaaaaaccaaaaaggccgggccgggggttaacaaaaaaacaaaaaatggggcccccccccccttaaaaaaaagaaaaaagaaccttaccccagggcaattccttggggggaaggggggggatcccccccaggaaaaacaaaggcgggcttcccttcaagggaaaaccccacaaaaaaatttcctttggggggaacctcatagggggggcccccgctggaaaaccccaaaaaacaaaccttggggttttttttgggggtttccaaacccttcaattttaattccaaggaacccgggttaccacaaaaagcccggcccctttgaaaacccagggaaatttcgggttaggccccgggccctttttatgaggcccaggcccaaccttttgaaaccaagggaaaaccccttttttatgaacggggcaacaggggttttccccccgaggcagggttccctctggggccggcgaaaacccaaatgggtttaaaaccttaacaaccggccaaaactggggccttttggccggaggcaaaaaccaacattgctcgataaaagcccc

SEQ ID NO: 136850 - DNA, 222 bp, Glycine max
  Clone ID: PAT_MRT3847_94584C.1
tttttttttagcaaaaaaggtttggcccaattaacctaacagggtcttaatggaaaggggtggaaccaggccctatggaagcttaacaaaaataattttgcaaagggaaaaggttttgttttgtttgagggttttggcaaattaaagtgggaatttgggatctcggattcatcgttttggtagtttggccattattaattaaatttggtttggcaactcctt

SEQ ID NO: 136851 - DNA, 1180 bp, Glycine max
  Clone ID: PAT_MRT3847_94585C.1
tttgtttgattaacgacggcccactacgcgatccccacaatgcagagggtgcaagggcggtgacgagtacgattacctcttcaagctggttctgatcggcgattctggtgtggggaagtccaacctgctttcgcgcttcaccaggaacgagttcaatttggagtccaagtccaccataggggttgagttcgccaccaagagcttgaacatcgatgctaaggtcatcaaggctcagatttgggacaccgctggccaggaaaggtggtgatcaactttttatgtggctaggataatacggtggagttgattacatgtttcacatgtgttgtagtatatggagaatagaggcaagtatgtagctgttgaatctagtcgcatttactcccattaatcaaacaggaggtaccgtgccattactagtgcttactaccgaggagctgttggtgccttacttgtctatgatgtcacacgccgtgctacatttgagaatgctgcaaggtggttgaaagagttgagagatcacacagaccccaacattgtggtcatgcttattggaaataagtcggatcttcgacaccttgttgctgtcccaacagaagatggaaaatcttttgcagagaaggaatctctctacttcatggagacttctgctttagaagcaacaaatgttgaaaatgcatttactgaggttctttctcagatataccgcatagtgagcaagagagcagttgaggcccgcaacaatgccagttcttctgctgtcccgtccaaaggacagacaataaatgtgaaagacgattcctcagttttgaagaaaattggatgctgctcaaactagatgcatcatctatggcagttggtttttgtagactgtttcatcttgtaaatgcctacactggaatcgtgatatcatgtagaataaggctagtcttgcatattgttttgaatttacaatttacaagcatcatccatacataggattatgtttccgtgaaacggtcattctaaagacgtgcttgaaacaaataggtctacatcaaagttcatatagcttaagttttatttgaaggattttgatatttgctatgctctaattatggtgcagctagtaacaattcgaacgtctgctttaaaattgaagtttcaatgtatggagcttgtgtttagtttcgttgaacaa

SEQ ID NO: 136852 - DNA, 1562 bp, Glycine max
  Clone ID: PAT_MRT3847_94586C.1
gtcgacccacgcgtcctcgagccgaatcggctctagcgaaggaaagagggcttaaaagtaaaacagagggaagcaactggtgcaggaacagaaggagaaaggaaaggaagagaagagaagagaaggagaaggagaagggtttggtagttggttacttagtttgtttgattaacgacggcgcactacacgatccccacaatccagaggcttgttattatctccatccatttaatttaattcccacaaccacgctcacctaagtttcaatttcaatcccttttctttttcttttttatttaaaattccaatttcgcgaaccccaaattccctccctccttttccctttctctctgttctgtaacgtagcatttacagcgatcagtttatagtgagtcacttagaggagttttaggtatcatcgatcatctatggcagggtacaagggcgatgacgagtacgattacctcttcaagctggttctgatcggcgattctggtgtggggaagtccaacctgctttcgcgcttcaccaggaacgagttcaatttggagtccaagtccaccataggggttgagttcgccaccaagagcttgaacatcgatgctaaggtcatcaaggctcagatttgggacaccgctggccaggaaaggtaccgtgccattactagtgcttactaccgaggagctgttggtgccttacttgtctatgatgtcacacgccgtgctacatttgagaatgctgcaagatggttgaaagagttgagagatcacacagaccccaacattgtggtcatgcttattggaaataagtcggatcttcgacaccttgttgctgtccccaacagaagatggaaaatcttttgcagagaaggaatctctctacttcatggaaacttctgcattagaagcaaccaatgttgaaaatgcatttacagaggttctttctcagatataccgaatagtgagcaagagaactgttgaggccggcaagaatgccagttcttctgctgtcccatctaaaggacagacaataaatgtgaaagacgattcctccgttttgaagaaaattgggtgctgctcaaactagatgcttcatctatggcagttggtttttatagcctgtttcatcttgtaaatgcctacactggaatcgtgataccatgtagaataaggctagtcttgcatattgttttgaacaatgtttacaatttacaaacatcatccatacgcaggattatgcttccgtgaaacggtcattccaaagacgtgtttcaaacaaataggtctacatcaaagttcatataggttaagctttatttgaaggatttcgatatttgctatgctctaattatggtgcagctattcacagttcgaacgtctgtttagaatttagttttgttgaaatgccctagaccatatggatcttcgttatcagggtagttagttattatttgtttctaaagttaataagtatattggttaaaatttccattgtcttctgaagtttttacggagatgagaaaattatttgtttctaaaaaaaaaaaaaaaaaaaaaaaaaaa

SEQ ID NO: 136853 - DNA, 224 bp, Glycine max
  unsure (1)..(224): unsure at all n locations
  Clone ID: PAT_MRT3847_94587C.1
gcggtaaaanataatatttttttttttttttttgggaaagtaaaatactaaacaatactttatttacgatataataatacatcttgacactacaatacacaaaaggatcaacccaaaaccattcttttaattacaaatcctatcaaacaaaaaaaagtctactactgattaaaatctcaaactacaacataaaagactcttataaaacccataataaaacttat

SEQ ID NO: 136854 - DNA, 242 bp, Glycine max
  Clone ID: PAT_MRT3847_94588C.1
aaaatgcgcacttgatgtctcccaccgctggtgctcctgctcatagccttcgccacctctgtctccggccgaggtgacctcaccggatactatgcccgggtggcctcggaagctgatcacgacgacaactgcaagggcacccggtgggccgacctcctcgccggacacaatggttactggatttacagacctcaggctgatgttcgttgcgcctatcatatatggaggatgggtggtccgaa

SEQ ID NO: 136855 - DNA, 519 bp, Glycine max
  unsure (1)..(519): unsure at all n locations
  Clone ID: PAT_MRT3847_94589C.1
accggttgcaaaacgacaacagggggacggggtcaagattgagaatgtgaaggctgcggctcaaaccgtgttagatgtgctgtaagcggtgagacgtgctgtcattggggataaggacagggactacaatctagttaccgactctgtggaccatgtacccttcccactgattgaagatactngtcactatattgatagcacagtctcttacctaatggaataaggatactctaagtgcacttnccatagataggaatcgcgtgaatgagatgcatatacgtagatgatgatgatgatgaggaggatgatgagggtgatgagaaggaggggtgtacatcaaatggaatgaatggactgaaagttgattcataaattattgcagacaatggacagcctaagatatcggatgcaatctagcacgaatgcattggttctggagcttcaaggtttgaagcaatcaaaagaaaatgtttatctgacacgcagagttctacttccacatcttctgatgacgatgat

SEQ ID NO: 136856 - DNA, 371 bp, Glycine max
  Clone ID: PAT_MRT3847_9458C.1
ctgtcgcgtgggctgagaatacaggcatagcattggcctgtgctatgaatagttcttttagggggcgtgccagttttgatatttacaccatctgctctcaagactgtgaattatggaatcctgcttgcacaaaagcaatgactatgttatttaatacaaacccgtgttctgatgcatggagtgtggaatttcctgagcggaccggattccattgcgatctcatctgtggcactggatggactgccaccccaatgcaggatgctcaggctacaactgattgggttatttactgtcaggaatgtgtccccagtacctattgtagtttcaatccacaaaatacttttgtgttaaataggtggatggggaaactg

SEQ ID NO: 136857 - DNA, 266 bp, Glycine max
  Clone ID: PAT_MRT3847_94590C.1
cccacgcgtccgcttaagcttccgacgaatttggtctttctaccatttgatattgaagcgctgcttccaacagttagcagtgggataatcttctatgtggtcaataacttgagtattctttaaccgactctgacttgaacctgtacatggatcatggctagtgtctctctacatcaatactgtgaagaattttttaaccgtagtgcatttctctgatgatacagcccttattacagggagtacttattgatttgcatccctgacag

SEQ ID NO: 136858 - DNA, 225 bp, Glycine max
  Clone ID: PAT_MRT3847_94591C.1
gtctctatatatactgtgtagctctatctctaacgttttctctctttttggtcacagggagagtggggtgtgtgtgtttttgttgcgattcgcgcggaatccattgaaggacgaagagcgcgagatttatgtcgacttggtcttatttcgaaagcgtcatcggagctttgttgaagctcgcgtaccgttaccctcgcatacgctgcatgctactctcgctcctgg

SEQ ID NO: 136859 - DNA, 271 bp, Glycine max
  Clone ID: PAT_MRT3847_94592C.1
acgactgcgagaagacgacagaagggtgtccatataagtcttacttagttcaaacacgattttgtcacgtgtgatttctagaaagaaatatcatttactattattattattatatgatattgtataaaggatttgcctgtttgtatatttaaattaaattgtattgaaaaaaaacaaaaacacttctcaaatatgtgtaggcgttggtgttaattaaaaaagtctttgaaaagaaggtgccaacgttaaaagtgtggattcatcgagccac

SEQ ID NO: 136860 - DNA, 418 bp, Glycine max
  Clone ID: PAT_MRT3847_94593C.1
caattcttcaaactcgctgagtatagtgagtggctgattggtttctgctatacatgctatgatgcatcaccggccaccacattttagtgggatgttaatgcttaaccacctgtccaagttgacattctgagggtgtgtgccatgaagatgtgaagcttacatgtaaagaaattaccagctctggttgcattctttggagagtgtgttgttctgaggtatatacatgcacagagagtattttacatttggtggcaatagatcttatttgtaagagttaagttaggagtttgctgcaaaacaaacacaaagtaaaggttccttactcattttcacttattttacttgtttttagccaatattttggttttatttggctccatgtcatcttaatatagtttcaagtataatcgagtttatc

SEQ ID NO: 136861 - DNA, 536 bp, Glycine max
  Clone ID: PAT_MRT3847_94594C.1
tcgatctgtcgctagcgaatgtgccagagtgccgtgcactagcagcagcaaacgccaacaaaaacaggaccacacgcaaataacaacaacaacaacaacaacaacaacaacaacaaggcacaacagccgcgggcaccaaatgcactgcacctgcccatgcccatgagcgtgtttgccaaagccagttatgctaataatgcaactgctgctgctccaaggaccacgcaccaacacacccggtgtgcacatgcaaatgcagcaaatacttattcggcagggcagctggaattgtgtatttaccaactgctgctgctgcagccgctacagttatcgcacaacttaaacatggtcttcaagcacaacatttggtgctggtttcagtttcttaacttgttgcttaacctctaacgccgcccagccgtatttcgcaacgtgggttccaacaatagcggtctactttaaaacactactcctccacagcaaactcaagacactactttgaagctaactgggcgtaaacggactagccagccact

SEQ ID NO: 136862 - DNA, 433 bp, Glycine max
  Clone ID: PAT_MRT3847_94595C.1
caggaccgtccggaattcttttttcccacgcgacttttattctcgctttacccctttggtggggctgttgttgtcatgttgttcagagtagatggcacgtccggtgcacgccgtggatgttcctttggaagtttaaggtgtgctaaaaggtgctgagaagatgttcgataaatgtcaacgggattgaggcaaactttacatgtatcttgacaattcaggggaggcgtattttgtaaaagaggtggatgatgattgtggtgatttaaggaataaagtcaaatgggtcttctgaagttgctgataactttgaattcagaccagaacatggtggtgttgaaattcatgaaaaagataatagttatctgagtatgaatgattcacctggttatagacttggccatagtatatttgatttaagggtgccttaattttt

SEQ ID NO: 136863 - DNA, 475 bp, Glycine max
  unsure (1)..(475): unsure at all n locations
  Clone ID: PAT_MRT3847_94596C.1
aattcggctcgagtacggctgcgagaagacgacagaaggggggttttgttttagatgtgttgttgatgaagtttctaaaggaacatccaattcagtagagaggacaaccgtggaatgtaatgcagataatcataatagtaatagtgactgtcatgctgaggattccttttcaggaaaagtttctgtgtctgttgctgatacaggagagacggctgttgttgtttcgatggttgaccaaacaaaatgggttccatcaacaagtgagaaaagcctattgccttttgaagttggtgaggacccaatgactgaatcatgtattttaatgtccgtcacaagtgatcagcaaagtggggaagtgaagacagagacaaatacattaccagtcatggaggaagaactggaactgtctntgtcaaacaacatatcctgtagcgtaacttctaaatnctcagtgcataatgatttaaagaaaaat

SEQ ID NO: 136864 - DNA, 465 bp, Glycine max
  Clone ID: PAT_MRT3847_94597C.1
ggacccaaacccttggttctaaatttttttcccccaaaaaaaccctttcaactaaaaaatttttctcaaaataaaaaaaaaaaagggggaaacattttttttttttttttccaaaaaaatattttttgggaaacccaaatttgggggggaaaatcccgagagaaaaggacaaaggtttaaccccccttttttttaaagaggcttatgacaagccatgttcaaaggaatggggggttcaaaaaaggacccttcaaaaatcggaccaaacccccttttgttaccccccggggggtaaggccccccttcccaattaacccaaacaaacggatccttgcagggttttccaaccaaaatctccttgccaggacccttatttttacccccccatccaaggggaaaatggggggggtccttcccaccaggcccaaaaaaggctttaaagggctcctaaaaaccaggcttttt

SEQ ID NO: 136865 - DNA, 416 bp, Glycine max
  unsure (1)..(416): unsure at all n locations
  Clone ID: PAT_MRT3847_94598C.1
tctagatcgcaatcgcctcaggaattcaagttatcaaacaaaatgagaggcagaaagactgccaacttcaaatagatagctcaatgaaattaattgtagttctgctgtatttcatttttggtttacctttgtatcttcggaagcattacaattttatttgaaatgtaaaattttgtttttccaaaaaaaaaaaaaaaaaaaaaaaaaaaaaaaaaaaaaaaaaaaaaaaaaaaaaaaaaaaaaaaaaaaaaaaaaaaaaaaaaaaaaaaaaaaaaataaaataaaatcccactaaaaaaataaaggttggggtaaaaataaaaaaaaatttttaataaaatataaaaaaanggggggggggcttttttaaaaaaaaaattttttttctccccgttggggagaaatatttttttttt

SEQ ID NO: 136866 - DNA, 600 bp, Glycine max
  Clone ID: PAT_MRT3847_94599C.1
atcgagttctgcagccaccaccacaacaacccaatgcgtgagatcgaaaagccattgaagagctcggacatgcacgacgtggtctcggactgggacgccaactttgtggacattgagcaggacatcctcttcgagctgatcctggcggccaactacatggacatcaagagcctgctcgatctggcgtgcgcgaaggtcgcgagcatgatcaagggcaagaccccgcaggagatccgcgagactttcaacattgtgaacgacttcacacccgaggaagagagccaaatccgcgaggagaacaagtggtgcgaagaagcgtaggcggctagtcagtcaccgaatgcagaacggcgacgacccggtccttgggctcgattgccgttgtgcagcagtccgttcaccatttgcgctctgcatattagtcagctgattgattgagggagagcagcgagcagtcagtggattggctctcaggttttcttttgtttcctgtcggcccatccgcgatcttgaatagaggtcgtggactctttattaaatggacatcagcggatggcgtgcatttacacggtaattgataaagagtcgttgcttcatact

SEQ ID NO: 136867 - DNA, 401 bp, Glycine max
  Clone ID: PAT_MRT3847_9459C.1
tacatctcgagaaaccgcgaacacaggttgccggaccttatataacggatacataagctttctctactcgatctcaagaatcttccaatttctttctacttcttggtgtacgatttcttaagggaaagaaaatcactctctgtgctggccacagacttcgtgaatcactttctttaccactcttagcttatttgctgaacactctcctatctgatataggaccttcgtgtcagatttaaacttcttctgtttctttctcagctctctgcttaatttcaagttcaagctggtgaaattttggattagtgctcccactctcctatctggtatatgactccgtgggtagaacttttctattactgacctttactttcactctcttttgtctcactgttccccat

SEQ ID NO: 136868 - DNA, 465 bp, Glycine max
  Clone ID: PAT_MRT3847_945C.1
ggcatcccagctgacctccattaccacctttttttctttcttatagtcaaaccttaccctgcctccttatgaagtatagaacaagtgctgtgctagctatggcctcaacctttctttggtgtgttaggagagtgaaaaagatagtaccaacatggtggcttcaaaaggattttaactccaacatgtgaacatagtgtaacatgttgataaataattttgtttctatgagtggttgaaatttattaaaaaattatcaattttaatgaattttatttataaatctagagggatagtcgtcaatgataattattaaaactcatcaaaattattaatttttttataaattttagttaatcataaaaaaaatattataaagcaaattaataaaaaaaaatattataaagcaaattagaaatatattattaatattccctcttgttaaatagaattaattatgtcaaaata

SEQ ID NO: 136869 - DNA, 361 bp, Glycine max
  Clone ID: PAT_MRT3847_94600C.1
gaaaagaacattcactactatttgtcttgatttatgtttaactttataggccgttttaagaaaattaaggggagcaccaaaaggaaagaatggccactgtcttcggcatggaaaagttcaacagaacccattgttcaatgggtacacagcgcggacatgaaaaatccccaatgaatgctcttcatgtttacaggccttatatcaacacctggaaaagacccaaaattcccttcttaagaagggatattggaaaccaactggactattcttatttttctccatgggactaccaccggttaaaacgtgtacacccagtggcaacatccctaacattttccatccgccatctcgagccgaatta

SEQ ID NO: 136870 - DNA, 314 bp, Glycine max
  Clone ID: PAT_MRT3847_94601C.1
caagttcttaaaagggttcaatgccgtttccaagaaattggattaaggaaccaggcgaggggccaatgaatcctgtgggaggtttaaaacaggtggttctttctgggcttaaaagaaagggattggattattcccaggaaaatgttgaaggcccatttagaccggccaaaagccagggattattagtggaattaggtttggagtattaatccttgggctggattcaagttatgccaccaagttttaatcttgaacctgaatggtccagggttggaaaggcacctttaccggaggttttccggtcctttttggtt

SEQ ID NO: 136871 - DNA, 458 bp, Glycine max
  Clone ID: PAT_MRT3847_94602C.1
gttttgtaattttttttttttttttttttggggggaaactctacttgggggatcaaaaatttctgcctacacttgtaaatagggtgcataaaaattcttttaagttattatatgttggctgtgtcacaaataaaattaagtgaactaatctccctcctctgcgggggggggaagaaccccttcaatttccacaattagaaaccaaaaactggggggcgcatagggaaggacataatgctaaaccctgccgctctgccatttgttttttcactcacagtcctcatataagcttcccttcccttaaaatagagcaagctctcatggatggcctctactgatccttctacctttttaaggtcaagctcgactccctcaatcttttcttttttaggaacagaatcccaatcctgggctggaattccaattttccaatcaagggtgacattaacctcaccaac

SEQ ID NO: 136872 - DNA, 906 bp, Glycine max
  Clone ID: PAT_MRT3847_94603C.1
gttaaattgcctacttaatatttatcacatttcgagttttccattattaagaaaaaaaaaatattattttcttgacattaattataaatttttaaaaattaattttttcttaaaagtattattcattaaatttaatttctaattttgataactcttggtaattcaactaaagttatataattaactacctttttcaataaaaaaaaattaattttttttgagaccgaagatatacacatataactcaatatggtaaaattttactattggcaacttctacatgacttgatctcgttgccggggggcttggttatccatgtcaccagttactaaaaattcacctacaataaaattaaacaaaagaaataggtaataaattaaaaaactaaactttaaataccaaaattaaaaaaccatattctacatgtactgaaacattatttcagacaattttacatgtacttgagtctccaccgaattctatccgtaaacgttatcggtttgatctttgtcattactataaaatctcattacagattgaggtcttacatatgtcgcacatttataatttaataatttaatccatacatgtatgcaaaatagtaatccggtccttatttctatggctagattaatagtggagaaacaaaaaaaaaacttagttatacgaaaaacaaaaacattttaagcaaaatgataatatatttaaataacatgtaagaacaaatttcatctcataaaaactatgataatttatgggaaaatacaaaaaaaaaaaagtttgcttttaccatgaaaaaattataacttagactatttctcaccaacaaccaaattgcaaacaaagggtacgtttaactacctaattaaatgctaatgactagaactgagattgatatgacatct

SEQ ID NO: 136873 - DNA, 192 bp, Glycine max
  Clone ID: PAT_MRT3847_94604C.1
gcctgctgattcctctcatgcctttgaaccagaagaccactcagaagacttctcccaagatgaagaggataaccttagtgaaaaccttttgatgaccttcccttcttcttgttgcttacaagagttttcaggagagctcgccaagcagtgttcttaaatcttatgcgagcaacaagcagaggtatgtggatt

SEQ ID NO: 136874 - DNA, 260 bp, Glycine max
  Clone ID: PAT_MRT3847_94605C.1
cctagctatatatgggcagccgctatcgtctatcatagcaccactgcaatccgacgtgtacttttactgcatgtcctctgccatggcccctagagagtccccattggtctcgatatggatgcatactctaggtccagatcctttgcctagtggtcactattcagccacaaattcccatcgtggttcactcgcttcttacttaggaagtcccgagatggccacggaagcggttatgtactcgtaccatgagtacctcaatg

SEQ ID NO: 136875 - DNA, 367 bp, Glycine max
  unsure (1)..(367): unsure at all n locations
  Clone ID: PAT_MRT3847_94606C.1
ctctgaccccncccctctctggtggttttgacgggtttaataaccccccttttattccccagtccgaaggttttcactggctatgatgaaaaaaaaatggggggagttggaaagcaactttccaaagggccaacctttttggagactttgattttacatttatttgccaacttgggaacccatttggtttaagcagttactatcataacacacaacatctcaagagatggatgcctttcaatccctctatttatttggcccccctgccccctgtttatcggtgcaagcttctctttttaaaaaattttcaaaaaactcttcctgtatcctttaagtctaatcttctttccttctactcagccataac

SEQ ID NO: 136876 - DNA, 318 bp, Glycine max
  Clone ID: PAT_MRT3847_94607C.1
cagatctgtcatggccagcggcttcttttgaaagtggggatgatggactcatgacggaacaaaatccacgaggatgaggttgcttacccacccgagttcggatacatggtgggacaggcattggaagagctgcggattaccatccggtatcataagagtgaccggatggactgacacatcaacgcaggagggcaaggtgacgattgtgggaaccatatggttgtaggaatgtgtgtcccggaccgattgaggtttagatccacaaagacctatggtgggaatatggcagggatggggaaactgactttacccgggggg

SEQ ID NO: 136877 - DNA, 468 bp, Glycine max
  Clone ID: PAT_MRT3847_94608C.1
tggctctggaacctttgggctgatgtatgtgcttgcatggtcgtgagaagatgatagaaggggacgaagaggatgaggatagcgataacgacgacgacgaagacgcggcggtaccgatgaagctatttaagaagtactaccgatgatgcgcctcaacacactacgccgccgcctcgccctaggtccttacgcgccggaagtagggaaattcttctagcccagacagaagaatgacggccagcccccaggaacccagtctctctacgaatagaggatacaccagggaaaaaaaagaaccgcacgccgggcggaaacacgcccagcctaaaaagctgccagcgcccccctttctccgttccctatacacagttgccatctcaccaaaacacctaaacggtagccactagaggcccattgtctagctacgcgtctgacgccggctcggcgccggtccgcaaaggaatcggc

SEQ ID NO: 136878 - DNA, 359 bp, Glycine max
  Clone ID: PAT_MRT3847_94609C.1
ggctcgaggcacctaatctggcctgcatctccttctgccagaccggatgccgttattatgtgagactcctaccacacgcaggaccctgtaaccgttaggtgaaggactagagctcagtctgacatcgcctcactatgatcgcatcttagaccattgcatgctctgaacgctgcttatgctcttggcgaatgtagccactggttgaacactgctactcatgttcaggggcgtctagcttcttacacattggctcaagcagtgaacgttgtgttttgagcatgacgcgttccctgttgttatgaagtgacacctggcacttgttgatgacttttatgccctatgatgactttctatactgc

SEQ ID NO: 136879 - DNA, 438 bp, Glycine max
  Clone ID: PAT_MRT3847_9460C.1
aaaataacccacacttcacacattattaccacaattaaaagagggggggaaattttcaaatagacagagcatactcaacaagagggtcatgtctaatttcctttattgaattaaacaaacgaacaaacgaaagaaaacccaaattccagatcatgcagaggattccgcattttcaaaaaatctggcagtagcctggggaacaaaaaaagctggcataagagttttacccgcaatttcaaaatcttgagaaattcccaagagaatttcaaaaactgtaaactgtttgggattggcaataaggaaacttaagggccatgaagtttgatttgcccacttaaaactccacatttcaaaaccctttttaggaccacatacctttattgggaagatcaattcccaggaatgggggtcccattttggccacttacatgcattgaa

SEQ ID NO: 136880 - DNA, 750 bp, Glycine max
  Clone ID: PAT_MRT3847_94610C.1
cctgaggaccggtccgaattcccggtcgaccccgcgtccgctctcaccaagcccccccccccccacacacagaatgtagtgtagtatatatatatatatatgtatatatatatatatatatatatatatatatatatccctcttctcttaacccttccaatcctgctttgcttgcttatctgcgccatgacactgagagagtgaagcttccttgtctttcctacgaatccaaaataattaggggtgagttaacaaaagggggggggggaacgggggggggggcccacaacgaaacaaaacaaaggggccctcaagaaacccccattaaaaaaggccccaggggggttaaaaaacacgggggagcggaaaccctgtggaaaaaaaaatccctttttttcttttaaacacccccggtttttcccgcccggggggcccggggggtgtaaggcggaaaagaaaattttttttcttccctcttttaaaaaaaaaaacccccccccccccccccccggggggtgaaaacaccaccccccccccgggggggggtttattttttttttttctcccccaccccccgggggggggggaaaaaaaaaaaaaacccccccccccccgaccccaaaaaaaaaaaacaccccccccccccccccccgcgcgggaggcccgggacaccgacaatcttttcccccccgggcggggggggggggggggggggggggcctgtccccccccccggggcggggggggggg

SEQ ID NO: 136881 - DNA, 202 bp, Glycine max
  Clone ID: PAT_MRT3847_94611C.1
acacgtgagaacacaccagcatgcgttttttcgattactaattacacaatccggccggtttattaacaacgggaggtccttattacttcaacacgccttcatttttagatgaattattcgctctgtcaataccttaataaaccgaattagataaaacgcacgtcttgaaaacaaaaattctctacagaaaccattaccacaa

SEQ ID NO: 136882 - DNA, 386 bp, Glycine max
  Clone ID: PAT_MRT3847_94612C.1
acctgtggcgaaaagtgtctcttggacgacgaggccattagggttggaggatcgaaccacagtcatgccacccaagacctttacgattcaattgctgctggaaactatcctgagtggaaactctacatcctggccctctgacaggcaagaaagatttgtccgccgatgggttgatgctttgtctgacccacgtgtcacccatgaaatccgcagcatctggatatcatactggtctcaggctgatcgttctcttggacaaaagatagcatctcacttgaacttgaagccaagtatctaagattggtggtggataccatagcttctaggagttgcagatgtaggaacaagtgagaagtctgtggcactgtaataatttgaaaggactg

SEQ ID NO: 136883 - DNA, 2161 bp, Glycine max
  Clone ID: PAT_MRT3847_94613C.1
gtcgacccacgcgtccggttttttcttctcctgcttttcagcccttccaaagaaagggtaaaagatgaacattcatgatttatccttgtaaggcggtgacaaaaaataatatagaaaagaagataccaactagaagtggaaacaaggaaaagcgggtggtgactgtatagtataaaataaaattgtgcccatagaaatagaatagtgacagacacactcgtgaatcgtgatttagcatttaccacaccaaaatcaatctgcggagtcagaaagccatggatccctacaagaatcggccatcaagcgccttcaattctcccttctggactacaaattccggtgctcccatctggaacaataactcatcgctgactgttggatctagatattgggaattgaattggggcatgcaggtccaattctgctggaggattaccatctggtggagaagcttgcaaactttgacagggaacggatccccgaacgtgttgtccacgctcgtggagctagcgcaaagggtttctttgaagtcacgcatgacatttctcacctcacatgtgccgatttccttcgagcccctggagttcagacccccctcatcgtccgtttctccactgttatccacgagcgtggcagccccgaaaccctcagggatcccagaggttttgctgtcaaattctacaccagagagggtaacttcgaccttgtgggaagcaacttccctgtcttcttcgtccgcgatggcctcaagtttcctgacatggttcatgccctcaaacccaaccccaagtcccacatccaggagaattggaggatcctcgatttcttctcccaccatcccgaaagccttcacatgttctccttcttattcgacgacgttggtatccctcaagattacaggcatatggatggcttcggtgtcaacacctacacccttatcaacaaggccggcaaagcactctatgtcaaatttcattggaagaccacctctggcgaaaagtctcttttggacgacgaggccatcagggttggaggatccaaccacagtcatgccacccaggacctttacgattcaattgctgctggaaactatcctgagtggaaactctacatccaaacattggatcccgaaaacgaagacaggcttgactttgacccccttgatgttactaagacctggcccgaggacgttttgcccctccagcctgttggccgcatggtcttgaataagaacattgataacttctttgccgagaatgaacaacttgcattttgccctgccattattgtacctggtgtatactactccgatgataaattgcttcaaactcgcgtattctcctatgctgatacccagagacacagacttggaccaaattatctgcagcttcctgctaatgcccctaagtgtgcccatcacaacaatcaccatgatggtttcatgaatttcatgcacagggatgaagaggtcaattacttcccttcaaggtatgatcctgtccgtcatgcggaaaaggtccccgttcctcctcgtatcctaggtgggaagcgtgaaaagtgcatgattgagaaggagaacaacttcaagcaacctggggagagataccgatcctggccctctgacaggcaagaaaggtttgtccgccgatgggttgatgctttgtctgacccacgtgtcacccatgaaatccgtagcatctggatatcatactggtctcaggctgatcgttctcttggacaaaagatagcatctcacctgaacttgaagccaagtatctaagattggtggtggaaaccctagcttctaagagatgcagatgtaggaacaagtgagaagtttgtggcacagtattaatttgaaaggactggtccttttattacagtattgctatattgtatattgcttatttcatgaactcaacttcttgacttgtccacttaatactatatgtccattgtgataaggatgaggatctggacagttccatgattctccgttcatttggggtttagtcttcatttatatttcgaataaaattttataatgtcacttatgatagtcatccctaactgaaggagaattttggcccagtggttagaagtgctgccgtgtgactagaaacagataacaggtttgggtacccgaatctctcttcacttc

SEQ ID NO: 136884 - DNA, 340 bp, Glycine max
  Clone ID: PAT_MRT3847_94614C.1
actaattgtacccaacttttatcctatgatgatattcaatatcttgttaaagtaaaatgtattgttaagctttatcatggtattaccacttcatatgatgttggtaggcttatgtttgtatgcttctgattttatgttgttatgcatttgttcttagattccattttccaatgttgtatatattgaacattcggacttccggatgcaagattcaaaagattattatggccttgctcctgggaaatctgtgatactcagatatgcatttcctataaagtgcactgaagttattctagctgatgataatgagactattcttgaaattcgagccgagtatgat

SEQ ID NO: 136885 - DNA, 488 bp, Glycine max
  unsure (1)..(488): unsure at all n locations
  Clone ID: PAT_MRT3847_94615C.1
ggaacctttgggctgatttatgtgcttgcatggtcgtgagaagatgatagaagggggcagtaaggtattccacttccttctactaatgataaaagcggtcgataatacagagaataatcctcgcgtcgataacgtattagaatcggcccttccgaattgactcgaggaggaaccctagttaatggctctcgttctccgagtacaattagcgcccgtcttgcctcacgccgcgcgacagcgcggaagatcacgagcacgaacgcagaactatagatatcgacgcaaccgcaccaggccacgaagctcgcaatcgcgccccacacgcaatacagtcatcaaattcgaaacggctcgcaatagcgcgatccgaaagcngcgcgtactcgcttatgctcaggaagcacgtcacngcgcccgactatctcacagcaaatcggcacctcggcacgagatcacgcggattatcggacactaacggggcgacgcct

SEQ ID NO: 136886 - DNA, 554 bp, Glycine max
  Clone ID: PAT_MRT3847_94616C.1
tcctcgcgtccggttgccccaaacactgtggtatacaacactttgcttcatgcactttgtaggaatgggaaggttgggagggccaggaatttgatgaatgagatggaggaccctaatgacgttacctttaatattttgatatctgggtattgtaaggaaggaaattcagttcaggctcttgtcctgctggagaagagttttagcatggggtttgtgcctgatgttgttagtgttactaaggtgctggagattctgtgcaatgctggccgcaccatggaggcggccgaggttttagagagagttgagagcatgggaggtttgctagatgttgtggcttacaacaccctgataaaggggttttgtggagcaggcaaggtgaaggttgggcttcattttttgaagcagatggagaacaaaggctgtctacctaatgtggatacctacaatgtactgatatctggtttcagtgagtctgggatgttggatttggctcttgatctttttaatgatatgaaaacagacgggatcaaatggaacttttgtacatttgacac

SEQ ID NO: 136887 - DNA, 412 bp, Glycine max
  Clone ID: PAT_MRT3847_94617C.1
acataccacaatatggaaaaactccccattggctgcttttttagttggggtcattcccatgcttaggcaggtatataattaaatattgggataaaggcaaaattttaaataaaaaaaaaaaagggaaaaagggttttgacctaggagtcccctcccataaccaagtcccccctgcaaaatagttaatcctttaactaagcaaagccccagccaggttctagggcccaaaaaattaggcgtcaaccgaaaaccatgtgccatcctggggaaattgaccccaggggggtaaaaagcctaagaaatcatgttggctatcattccagggtcatctccctgtctgggctcgtttcattccagggctgttaaaagggaacaggctggaactaatacttgggctcatgcttgaactttc

SEQ ID NO: 136888 - DNA, 615 bp, Glycine max
  Clone ID: PAT_MRT3847_94618C.1
gttttggctgttttggctcaggtgcaggttccgtctcagaatgcgagacccggccccaacggtgggggggctgctggaaatacggtcacgacgacgtccgtttacgtcggaaatctttacccgaacgtcagggacgctcagctgaatgatttgaataaccaataggggcaagtcgtaaacgttagggtatgcacggactagacccggaagagatcgatcgggtatggggatgtcaactttaacaaccagaaagatgcttgcagagataagcatgtactaaagcttactcctctcaatatcaggcgcatacgtatcatgcatatgcatactgatcccagtatgcaagacagtgggcaacgaaatatattcattaagaatttggataaggcaatagaccacaggagcgccgcatgatacttgtattacattgagcggaatatgactccatggcagaggaatctacatgatccatcgtaggcaatgccaaatgctttcggctgagttccaatctgatcatgaagaatctggccaagaggctcatcgttacgctgagtggcatgctgctgtatgataaacaagtgtatgtgggacccttccttagcaagcaagagagaa

SEQ ID NO: 136889 - DNA, 220 bp, Glycine max
  Clone ID: PAT_MRT3847_94619C.1
ggctcgagcataggtggtttagtagagcatatcattcaatcatcaccaacatgagctcttctaggcttaatgagtattgctcccttgaccctcatcttggaactacaactgtgacctagtgaagcacacactgcaagccatggcaacttacgcagaaacatcaacccttcagtggatggatatatgcctcttctgtaattgtgcatatatacaagcgtca

SEQ ID NO: 136890 - DNA, 128 bp, Glycine max
  Clone ID: PAT_MRT3847_9461C.1
tgagcattcagcgtagcaaactcccgtggattcccttagaaacgggagagcatatcctgttgaaagtttactttgagaatcaggcgccctattaggtcgaatttcaccgtgccaaatgaagatccatg

SEQ ID NO: 136891 - DNA, 348 bp, Glycine max
  Clone ID: PAT_MRT3847_94620C.1
aaattgtaccaagatatggaaagccgaatataaaatgcagctaatgtggttcaagtacccggagaatttcaaacaaagggtaaagcattttatcagtactattcatatacttctcgacgtaaccattacacaattcttcaaatattacttcatgtaaaggactctattactcaaaatgtatatagaaatgatattcccatattgttatattttcctctctaaaatataccccaaattgcacataacttcaaaacttggatcaataaattcattgtcaatggtgtaatcaattattatcaatgtataaaatatccttaaattaaaattgatacatttacttaaacaatt

SEQ ID NO: 136892 - DNA, 162 bp, Glycine max
  Clone ID: PAT_MRT3847_94621C.1
ggggttaatttaaaaatttttcaaaacaactgaaatctccaaaaactggggataaaaggcgggccgcggctaagtaaccttttttccacaagaattaattttcgacccgttcctgacgggattccaacttttccttatagggaggctattaaaacttggcca

SEQ ID NO: 136893 - DNA, 327 bp, Glycine max
  Clone ID: PAT_MRT3847_94622C.1
ggctcgaggttgcttaccggttcatactgtacgcctggcatgccagcggcagaatcatcttgtgtcaaccttggcatgttggccgcgcctatgatccagggcatcaacctgggcggatctacaccgagttcgtgcatcagcatgcccatatcggtgaggtggcggattctgcttcccgatgggtgctatagcgtgtacccagagcctcgtgcacttaggactgttgagatgccggagctagtgcagcatcatcgtcaatcagcgattaacgcaattcgagcacgatttgaacgaatcgggattgatggggcacatcggtatctgatt

SEQ ID NO: 136894 - DNA, 478 bp, Glycine max
  Clone ID: PAT_MRT3847_94623C.1
attcatttcattacttaatataagcaccgatttcaatttagtaccataactttatctaaagtttatcgcagacttcttaaaaaattatcatttatcttttgaaggagcttattaatgaattttttgggatagattttggagactttgcatcaaatttttgtgtgtaaaggattagcaaaaagcccaacaaggaaactcctagactattgctaataaactcggcactagtcacttgacaatgtttaaaatgtgattgatggcatttctagtgaatcactttatcattgtgtagtagggatctcatgtcacagagaaaaaaaaaatgcactcatttggtggtctatcgggtggtgctcaaaaggccaaaagcatgtccttgccttgcatttggtctcttaatcttggtactggacttctgttttctttcacaggtgcaagaatgaagattggagacaaaaagctctttcatttttttctg

SEQ ID NO: 136895 - DNA, 295 bp, Glycine max
  Clone ID: PAT_MRT3847_94624C.1
tgagaggtacattttttttgtgttgagattatcgatgattgcatttcaagcacttttgagctactactgtctttctctctactaattgcattcctggaccgttgatttcaacagcaatggtctccgattcctgcatatgtaaaaacaacaattttgggagatggtccttttctttttagttagcctataaaatgaacttcaattcaattttcccaataaaatgatttcccccaaagctggaagtttaaaagaaatttttgtatttatttcaatattttcttatgaactgttttta

SEQ ID NO: 136896 - DNA, 318 bp, Glycine max
  Clone ID: PAT_MRT3847_94625C.1
agcgccttggctcattggccatctaagggcccagaatctatgattgtactcccacgagcatggatgttattatggactctggtggactcttatgcacctatttgctggcaaggcatgcctagcagagccttagcagaagatggtctttatgaagaagaaagatcgtgacctgggggatatttcctggtcttggggccgtttgagccttgatgcccttacaatgacgtgggaaatatacagtttatgaagcaagtatgtgaaggtttggaacctgttaataagtgaagcaagttccagtaacctgaacccagagtccat

SEQ ID NO: 136897 - DNA, 1128 bp, Glycine max
  Clone ID: PAT_MRT3847_94626C.1
cccactgatataacaaaagaatatagatgtacatgattcatcaagtccttcccctcgatataacctatgaagaaaagcaaaccggctaatataacaaaagaatatagatgtacatgattcatcaagtccttcccctcgatataaactatgaagaatagaaagaaaaaactaacaccgaaaaggcctggatatcataaatctatacagtgtatgtgtacccaagaactttccctatgatgatgtcctaatgatgtgtatgatcatgtttataatgataattaaaatcagtatgtagaagactgttttaaaaatccaacaaaaaaaagggtacgtgattactaatttactatgcacgatgcttatgatcccacaatgaaaaaaaccatggatctgcaaacttgctttttatatatatataattcaattcaattctcttatcttgttcttcagtagtcatcatcccactgcaggcattccaaatctgagagaggtgcaactgaagaagggccttcaagatcctcgtacagtgccctattattattatttcttcccatcgaaaccaccgaggatgtgtcagttgtgtttctgtcgttgctcaagcccgtgtcttgtgagtggttagaagaaaattgctccatcttgcactgtatgtgctcgttgttcttggctgcaaatgctcttaggatagcttcatcatggttattgttgtcgctaacaaaacctgagcctgcaacacttggcatgatggagcttttgatcctgttttggtgtacatagtaatcagctgagaacatgtttaagggctgtgatgagagtgtgttgttgttccccattgggttaacgttgttgctgctgagattggtttggttggaggtgaagttaattgtgggaaattcatagattctgtggttgtggtggtcttctggcttgatgagaagctggtggtggttgttgttgatggagaaactgggaagataatagccctctgattgtgataatttagttgatgaaagtgggttagcattgttgttgttgttgttggtggtgttggtgttgttgccataaggaggatccatgagagatgggagtgaagaataatcaagaagatcatccccaatagagtttatc

SEQ ID NO: 136898 - DNA, 359 bp, Glycine max
  Clone ID: PAT_MRT3847_94627C.1
ttctgtgtttaacaatacggaagcgaaaaatccaaaaaaaacccttgtattgtataacgaataatacatagttacacacatactacacgtgaatacgaatgacacacgcacatgttgcgaggttctcgcataccgatctctgagactacctgtcacagagcccgcggatcaaccattccgctttagagggacccaacctatcataataagagaagactgagacttccttggggtgaagaacaaaggggtaatgtccagaaaagcatgtgttataaaggaaacctgttaagcccgcactgtgggtgagcgaaattctcggaagggcagttgctaatctcaagaatatacttcagtgaatc

SEQ ID NO: 136899 - DNA, 423 bp, Glycine max
  Clone ID: PAT_MRT3847_94628C.1
atcatttacttcatggtgcaatttcatccgggtttatctaattgtgcatttttctgtatcaacttgttctgctgcctatctgttgttgagtgctgcatcatgattgttgcctcagtggtccccaatgtgctgatgggcataggaacaggaactggtgtaattgtcttcatgatgatgccctctcaaatattcagatcattacctgacattccaaagttcttctggcgctatcccatgtcctacctcagttttgctgcttgggcagttcagggacaatacaagaatgacatgctgggggttgaatttgatcctttgctgccaggagatgttaaagttagtggagaacaagtgctatcattggtatttggtgttccattggatcataacaaatggtgggacttaacagcattggctaccttatta

SEQ ID NO: 136900 - DNA, 188 bp, Glycine max
  Clone ID: PAT_MRT3847_94629C.1
agtgcggtccggccgaaaatccggggcaactcctagcgcctcgccttttttttttcggcaataacaattcttagggaggaccttttggtacaagaaaatggaaaaacaagaaagtgaaatgaccttttttacaaaaatcctctatatgtccaaatccataactaaaataccacctaatattaaatgac

SEQ ID NO: 136901 - DNA, 757 bp, Glycine max
  Clone ID: PAT_MRT3847_9462C.1
gcgccctcttgtccgcccaggcgtacggtgaaacaactctgtcgtttgatgggtgtccatatttgtttgctatggcacatgatagttcagtgtctacaagaccaggggatttcgtgataggagtgaagctgacaaccatgaacaatatgtgtgcatatgggctcaaccctggtattgcaggatctcggactttgggcaccattcctgagtctatttcacagcaaactgtttgaaatcaaatggcaacagggagaacaccattgaattgtgattctagcaagcagagcttttgtcaattatctattgaccttgtatgtggcggaactttagtggacaaaactggagattggatcacactcatacaaaagtctccaattagtaacttgttgagagttgctgcttggaagaaaggctgtacaatggttaagattgcgatgtctgggaatgcatcagtcaaaaggagtgattgggcctcattggtacaagtgtttttaacaaacagctacagtgcagagcattttgatgcatgtacgtggacaaaatcggagccactttcctgggaattgatcttcccaatagacgttttggggccctaacaatggtttttgaaatgtggagttttggaggggcaaatctaacttgcatggtccttggagtttctttttggaccatccaaaacggtctacagtctttgatatttctttggggattttcccaaaatttttaaattggtggaaatactttttatgcagctttt

SEQ ID NO: 136902 - DNA, 455 bp, Glycine max
  unsure (1)..(455): unsure at all n locations
  Clone ID: PAT_MRT3847_94630C.1
ccattccacaccccacactcttctcctctatttaacaacgcccaaaaaaaattaaaaaaaattagggttttcaatttggggaaatattctggagagagtgtgtagaaaatatggttgtcgatgatatgacgctgtgcatcatcgtcggctatggaggttcctcttcttctcgtttctccgatgcttatcccaaaaggaagggaaggctatcatcctttgatgaacagatacataacaagtggtccagttaagagttaatttatttttggaaagggggtggccgtggctgtaaatttcatattaaatagtccttttactattactttatatagttaatgactttgtgacgaatttataactattctcattttattttgatttgtatatttgatctgcttaaccatctttttttttttatatctatcactaaatataattntaatatgtgacaattt

SEQ ID NO: 136903 - DNA, 958 bp, Glycine max
  Clone ID: PAT_MRT3847_94631C.1
gagaagaggttctaatttgggaaggtgctaagaatatggagaaaacatcttgggcgtgcaccgttatcacccaggtgtgtctctgctttgctctatacatagctctcaacttgggtcaacctcagacttctgatctttacttcatcagtgtcaaaggaggtttcagaccctttacccaacaattgcatcttctcaagcagatggataaggtggcaaaagcttacaacgcaagttttgttgtgagcagcagtgagctgggggaatatgattcactcatgcagaatgctactcaacattttccgtctctgagactaccctggtacaccacatacactactactacatcttcaaaaacaaaaggacaagaagtggggtgcttttcaaagaagatcacgacatctaacaggataacctcaggtgtcatcggtgtggatactgaattattgaaagattatgtcttgagaggatcattaagtggcaacaaaatcaatcaattgcattggctaatcaaaacactggcagcaaacagtagcaactggcgcattattgttggataccatagtagagaaccctattcaatttttctaaatggaaattctgtctttaaaagagaactggctaatggattccttcttcaccatgtcagctcagatcaaattgtaaccaactatataaattttgctggtgaagttgtttgcacagctgtgctacaacagaagggtagagagatcatgtaaatatttcgagttaaagattcacagtattacatggtggtatccgttggattaatttgttgtaaattccatgagtaaacagtgctcatacattttgttatgaattacttgagtaaacagtgctcttaagagattttttaattcttcacacacgatggatttcaacattgctaataattattttgaatattgattattaattctaagaccttcattataagatg

SEQ ID NO: 136904 - DNA, 293 bp, Glycine max
  Clone ID: PAT_MRT3847_94632C.1
aattggaatttcaaaaaaaaaaaacaatatatgcggatagttaatttattgatagatgaagctttggtaaaagtaccatacccggatttttatcttgatcactgggagctataacagcttacgttttattccatactaattaaggaaaaggcccttaaattggaagacaaaggacccttgtttcctttatcaccctaatttttctttttaggctgaccatccacaaggaaggattttgtggggctattaaatagataggaaacaggttgtgcaaacccagggaatgcaagctc

SEQ ID NO: 136905 - DNA, 381 bp, Glycine max
  Clone ID: PAT_MRT3847_94633C.1
ctcgttcctttcgaccaatcgtgctactgaccttggggcgttaggcggggaaattcggggcagtctgcttgatcgcgttcgcgatcgacttgacgatcttcaatgtcttgcgggagaccgacgtcgagcccctcctcgccaagaccgtctccacggtgatcgcgacgaccgtcgcgttcctgggcaaccgcttctggacctggcggcacggggcgcacgaccacatggcccggcagtacacgatgttcttcgtgttgaacgccatcggcctgggtatagccctgacctgcctggcgatcagccactacggtctcgggcagatctggccggtctagcatagcccgctcgccgacaacatctcgggccagttcatcggcaccg

SEQ ID NO: 136906 - DNA, 183 bp, Glycine max
  Clone ID: PAT_MRT3847_94634C.1
ataagtcacatatccaatttaagcgcgtgcacgagcccattaacgtatggcgagaatatcgggttatcttcagcccccaaatatccaggaagggagcgatgctctttttaaaagtgcttagctcctagcaaaaggttgggcacctggatttcaagataaaattttggtggctgctcggggaat

SEQ ID NO: 136907 - DNA, 623 bp, Glycine max
  Clone ID: PAT_MRT3847_94635C.1
tcggcccgacgggcattctaaaaagtatgaaggacgtcattgggtaccaataggatgggcaataattccaaaactagaccaatcagttcatgttgatgctgactggccttctcatgaatcggaattagaggattctgaagatgattgtacagcaccatatttggcacctccttattgagagcctccggctgggcctatatggtggtgccatgtttttgcaagacaccccactgttgaagctaggctcatcactgctcactggctacaccctgctgttactttagccttgaaagacaaaagttcgctgataagtgaacgaatgaaacaccttctctatgaagtcccattcaaaattgcacgaaggctgtcatttgacctcttgggacaatccacaggtgatcctgtggtaaaaaaatatgacattccaatcgtgcttatgtcttggcaacctcaaaacttccttgaaactgtaatgcatataaaaggatcactttcaacggtaactgttctgggtataacagaagcccaagatctcctttccgctggatggtataatctgccgaaaaccgagcatgaaggtctagcactacttgcttgcctactgtgacggtgggatgataggt

SEQ ID NO: 136908 - DNA, 594 bp, Glycine max
  Clone ID: PAT_MRT3847_94636C.1
ccgtccggctcgagctctcctactgttaacgttttctgttttctttccgtcgacgttctggctgcgtcccaagaatctctgacgccgttgtcggttttctccggccacggctacttccaacggatggcgacgacgaccacggagttcgatctcgattacgagttccccgatctcgattacgaccttcgctatctcagtctcgccggaatcgatgccctcaccgctttccaaaacctattaccggaaaggatctgcaccctattgaaggggaaaatataagaagagaaagatatttagagaaatagtgttgtggtaggtggattaagattaagatctcaaacattagatttttgttgtgaaggtgaaagtaaaattactctgaaataaaagaaaaaaaagaatttagtaggagtaggagatgtttgggctgaataaaaaggtgagtgggtgagtgaaggttgcagtgaagtttgttcgtgaacaagacttttgtgatgtggactgcttcttcattattgggttgtgttgagacttgagaacttgtgtgaacgcaggactttgtgaaaaagcgctgtctcttttataaaaaaaaaa

SEQ ID NO: 136909 - DNA, 415 bp, Glycine max
  Clone ID: PAT_MRT3847_94637C.1
gggaagaggaattcaaacctatttaaattccctttttggggggtggggcaaaatttgggacgaacccttcccccttttttaaaaaatcctttttttaaaaaaaattgttttacaattggaaaaaggctgggtttttccctgccctttttttttttcccccccccctaaacaaaaaaagaaaaaacctttttggggtcagggtttttttttccccaaaaaaggggaatttttaaaattttttttggcgcctactacaaagggtccggcatcccaggggcgccccaaagttttttaaaaaaagcccctttttttttccccgggttaaaggcccttctgaaaagggggggggttttttgtttgccccccatccaaggggccaaaatttttggggggaatatgggaccacaattccccc

SEQ ID NO: 136910 - DNA, 482 bp, Glycine max
  Clone ID: PAT_MRT3847_94638C.1
tggtttgagatgctatttttgacgattcttctatttctttttttcttctccaatgctgaaaaattaacgtttgttggcggacattcattcaatgaaatgggagaatttcgtgtgaaatttcgtcaattggaggcggacattgaggaactgaagggcaaaaatgaagcaattcaaaaaagattggtcgagttcgaacagaaactgtcgacaagcgcaaattatacgcgaattgtgagtggacaagagatgattcgaattttggcgaaaaacaattggaaccaaacggacagtcacaaggaactgttcttgtttaagccaaatctgctaaaagttgtttgtctgggagctgaaaaggttccacgtactgtacgtgccaaagacagggcgccaaaaaatttggaaattgtttactacgaagtgaaaactctttcagcggagcaaaagattttgatggaacccaaatgactcatttgcattggctt

SEQ ID NO: 136911 - DNA, 276 bp, Glycine max
  Clone ID: PAT_MRT3847_94639C.1
gcgttttgaccgacattaccatgcacagagggattccaaagagcgtcctcatggctttagcgggtaccaggcatctggtataggaactccttccttcaaaaatttacactctctatatgaatgcagctcttcctgatcgtactaccaacgataaatatgaacaattctagcttcttaggcaagcacacaatatcttctctttagagaccatcaacttatagctattatctccatcattggattacatacttcttttgcaacatacatcatacttca

SEQ ID NO: 136912 - DNA, 528 bp, Glycine max
  Clone ID: PAT_MRT3847_9463C.1
gaaattctgataaaccgcgatcacaggttgccgcaccttaaaaccggaaacaaaagcaatcgttacttgatttcaagaatcttccaatttcttactacttcttggtgtacgatttcttaagggaaagaaaatcactctctgtgctggccacagacttcgtgaatcattttcttttccactcttagtttatttgctgaacactctcctatttgatataggacttcgtgtcagatttaaacttttttctgtttcttgtctcaggtctctgcttaaattcaagttcaaggctggtgaaaattttggattaagtgcctcccacctctcctatctggtataggactgcgctgttagacttgaatatttgtgaactgtcttttacgtcttccatatcacatgatccgcatggccattcaatgcggactgatgtgaaaaacacttgggcgttggagcatatgtttgctccgttaatcatctttgtggacgacatgctcactgagaaaacagtttttacttgcagagatttggaca

SEQ ID NO: 136913 - DNA, 271 bp, Glycine max
  Clone ID: PAT_MRT3847_94640C.1
tttaatattaataatcataatattattgttaataacagaacatagaacaacaattccttacaatattatatgtacaactacctgaaagaataataagaggcttaattggaatcatcacacgaactggtctcttggaacttcaaactctgctcatgatgggtttagatctcccgaggtcttggccctgccatcttaagagaacaaatctttgctattgggcttaaaatactatttgaattatgtgccttgttgtgatagctcttcactgtta

SEQ ID NO: 136914 - DNA, 220 bp, Glycine max
  Clone ID: PAT_MRT3847_94641C.1
gagactcgttattatagatttatcatttattttttacatacatacttcacaaggcaaggaaggaacacataacattgaaaagtgtgttcacttcagacttgatcgctattttcctatctgacaaagcctgcgcatttcattcaagtcccatcaaatgcacgctttcattattaaatacataaatcaagttctgaggaacccaactaaaaatacagtcttc

SEQ ID NO: 136915 - DNA, 610 bp, Glycine max
  Clone ID: PAT_MRT3847_94642C.1
cccacgcgttcgattaaaaaaaaaaaaaaaaaaaaaaaaaaaaaaaaaaaaaaaaaaaaaaaaaaaaaaaaaaaaaaaaaaaaaaaaaaaaaaaaaaaaaaaaaaaaaaaccaaaaaaaaaaaaaaggggggggcggtttaaaagaatcaaatttaactaacgggggaaggaaaggaaaaagttttttaaaagggcaacaaaaataaaataaaggggcgggggtttaaaaaagtcggaatggaaaaaacctggggttaacaaaattaaatggcttggaaaaaaatccccttttgccaggtggggtaaaaagaaaaaaggccggaacgaatggcttttcaaaaaattggccaaccttaaagggaaatgggaaccccccttgaacgggcgaataaaacggggggggggggggggtaacgcaaaggggaacggtaaaatttgcaagggcctaagggcccggtcttttggtttttttcctttcttttttggcaaggttggcgggttttcccggtaaagtttaaaaaggggggctcttttaagggttccaattaagggtttaaaggaactttaacccaaaaaaatttaataagggggagggttaaagaagggggc

SEQ ID NO: 136916 - DNA, 433 bp, Glycine max
  Clone ID: PAT_MRT3847_94643C.1
gcagcgcggccgcggcctgaatcgggtggacccacgcagtgccgcccactcttgtcgcggtcgcgtggacttgtatagagcccaagctgcctgacgtggaggatacaggtatccatcgacacacatgagaacttgggctacgttcatatatagcacctgaaattggctgtgaggtaattatactgtcagcctgggcggttcagcaaccttggacattggcctgtgctaatgatagtttggctaagagtaaagactttgatggagagggcactcttacttatccatcagcgactgaggctgcacaaaccagatgcccgagacttgtataataagcacattttaaagtggagcagatgaatctctagcagccggtcgatgctcatggaacatcttataaaagattagaaggtacaggtgtagcacattcttcagc

SEQ ID NO: 136917 - DNA, 502 bp, Glycine max
  Clone ID: PAT_MRT3847_94644C.1
agcgttgaccaacacaccaaaaaaaaaaaatatttcccctttctaacattttcttactttgttatatttgttgctgattattacttttcatctcacccttcgatgaatttgtggaaaatgaaaattcccagtggaactatttctcctccaaattttacatagttcgggaaaatgctggacacattgctattttaccctctgttctattagagcatgagcttataaaaacttaatgacatggttgttatgctgccattttcatttgaaaaagtattcccaataatgtgtttggtttagaggagagaaataaaagagaattttttgaattaaagtagagtgtaagaggtctgagtcccacagaatagaatacaaaatttatttggtatattatttctctcctaccaaacacccctaaatattgcatagaaatctattgcagatggttgtgctaagttcctaactagaagaaaattgtgattgcagtgtttctcatgttcaagtt

SEQ ID NO: 136918 - DNA, 424 bp, Glycine max
  Clone ID: PAT_MRT3847_94645C.1
acgaggatcactgtgatttgaaaatggtagcagtatattccttttcttccccaagaatatgtttactagtcagttggatagatctatgggcagcatgtgctgtaggtcccctgttggcagagacaggcataataatcatcacatctgcactcagcactttgcggcttcctagccggtttcttttcagttcgaacatgatggggtcgagacctaggatgcaccaaaacgggcaccaggacggaggacggaggacggaaaacggttaaaagaagagaaggttcaagtagttgatgtctcgctaagagagacatatgtgcttagcgagtgacatccgctaagcaaagcatgcagctcgcttagcatgttggaaaaccctagaataggatcagtcagagatgtgctcgcccagcatgccgcaaacttg

SEQ ID NO: 136919 - DNA, 648 bp, Glycine max
  Clone ID: PAT_MRT3847_94646C.1
gtcgaccccactgcgtccgcgacacaactcggctcgagatttccacctactcttctctctctctttctctcttcttctgcaccatcgatccatctcatcgttctcttagctaccatggcgactgagaaccctttcaatagcattttgaggacgctcgagaagcccggcggcgctggcgagtttggaaagtactttagcttgcccgctctcaacgatcctagaatcgatagacttccttactctgtgaggatacttttggaatctgcaatccgtaactgtgatgagtttcaagttaagagtaacgacattgaaaaaattattgattgggagaatacctctcccaagctggtggagattccattcaagccagctagagtgcttctgcaggactttactggggtgcctgctgtggttgatcttgcttgcatgcgagatgcaatgaacaaacttggtggtgattctaataaaattaaccccttggtaccagttgatcttgtcattgatcactctgttcaagttgatgtggcaagatcagaaaatgctgtccaggcaaatatggaacttgaattccaaagaaacaaggaaagatttggtttcctcaaatggggtctaatgcattcaataatatgcttgtcgctcctcctggat

SEQ ID NO: 136920 - DNA, 314 bp, Glycine max
  Clone ID: PAT_MRT3847_94647C.1
tccggccggattattcccggtcgcgagctactagtcgtgggcggccttttccttttttttttttttactgaaaaatcccacctttaaaaggtaaaaccggttattggttacatggagaatctcaaaataattgccggttaaaacctccctcactggtaaccattttaaagctggttcttcctggcaaaaaatctattattggtccccaaggtttctcctaaaagattaaaccatgaaaggtggggggaaaaaatccccaaatgtgtcggcattgggtgaaatagcttttaaacaaacattatcgagtcgggatc

SEQ ID NO: 136921 - DNA, 441 bp, Glycine max
  unsure (1)..(441): unsure at all n locations
  Clone ID: PAT_MRT3847_94648C.1
annnattttttacatcaaccaaaaaatgttaaccttcaggaatatggaaatggaaagattgtgtcacagtctcactaacaagttaattacagtacattgcacctaataacacactagtccattttgagacaaactctgcagccaaagagtaaagcggtcttttcaagctcctactcaaatacactattaatcatattatcatacatgaaacggtgcaatgtcaagttacaaacttgccagaacttttactgaaggcctgaagggattttttcttatcgcattttggtttcatattctttgaaaaacaaacagggaacctttggaacccaatcctaacctgattttctcatcaacataagcgattctgagtttaacttcactctggccaccatactggacctgccatgatcctaccttcaattgaggtgcttcaaatataac

SEQ ID NO: 136922 - DNA, 834 bp, Glycine max
  Clone ID: PAT_MRT3847_94649C.1
gaggtgaaggagatggaaatggagggtgtcgtgattcggagattagaaatggagggtatcatgatttggagatgccggaccgcgaggtgaatgagtcggtgaatggaaactcaggtgagggaaacgatgcaatggaagtgggggaagagtttgatagagggataatgtctaaagagcaggtggtggatgtatcagatggggtgaactacagtgtggctggattgttgagtggaggtcagaagtgtggcggcaatgatgataagggcttggtgttggatccatctggtggggatagtgatggtcgaaagaggaagagagacatgttggatttgtctgatggtgatagtgatagtgatagttctgatcgtaagaggatgagagagtttgcgttggatatgctgagctgggttacaggtgccgcaaagaatccctgtgatcctgaagttggttcaatacctgaaaaggcaaagtggaagtcttacagtaatcaggaggtgtggaaacaggtgctgttgtttcgagaatcagcgtttctcaaaagaggttctgatccaagcagtgaacaacgtagctggcagagtcagaagatgcacccttgcttgtatgaagatcaccttgggacaaactacaatcttagggataggttgaaacgtgacaagaagattttagttggccaatctacaccatctgcacgaagctcttctgattcatctgtaggagctgagaacagaacaccaagtcctcatactgaagatccctctgatgcaaattcaggtcttgacagatgtgccaccgtacgcatcccttttgggggcaaatcatcaagctgaaata

SEQ ID NO: 136923 - DNA, 622 bp, Glycine max
  Clone ID: PAT_MRT3847_9464C.1
gccgcacccaaataccggaaacaaaagcaagcgcaacttgataccaagaatctctcaattccttcctactttcttgtgaacgatttcttaagggaaagaaaatcactctctgtgctggccacagacttcgagaatcatattcttttccattcttagattatttgctgaacactctcctatttgatataggacttcgtgtcagatttaaacttctcctgcttctttttcagttctctgtttaattacaagttcaagctggtgaaatctcggattagagctcccactctcctatctggtataggacttcgagggtagacttttctattgccttcctttctttcactgtcttcttctcactgatccgcattgccgttcaaagagggcttatttgaaaaacacttgggcgttggtgcaaatgtctgcttcgttaattttctctggggacaacaggctcactgtgaaaacaattttcacttgtagagatttggacatctcggttgattattatacatttacaacgcactataggatagtggtaccaccttacattaggaggtatctggataccttgttgatctacattctaatattcctgatcaagaagatcatgaaatacccaaag

SEQ ID NO: 136924 - DNA, 224 bp, Glycine max
  Clone ID: PAT_MRT3847_94650C.1
gccacgcgtcgccaccttccagtgctgtgaatttactgtaggtgtatgttttgcggattgttttaagttactttaatatgtttaggatttaatggtttgtcaactatggttttatgagtaatgggggattttttttttggtttaaatgaaggttttgtgttatcgtacaatctgaaactaaaattgttgaacttacattttgctatatgaatcgatgattgtat

SEQ ID NO: 136925 - DNA, 819 bp, Glycine max
  Clone ID: PAT_MRT3847_94651C.1
ctatatcttctatccatccctctcaaacctcctcctatatactacgtagaatccaacacaacactcacgaaaattaagaaaacactgctatattaatatcttcacaacgtaacctttgatctccacaacatggagaaatcgagagaagaaaagcttagccaagtttgggattgtggcagcaccctttatgattcctacgagctcaactccttcaaacgccaattaaacacggcaatagcgaattccccgagcaatagaagaaccctttccatgtctcatttacccgaacgttgtctctcatcactacaatcacagccacagccacccatgtccaacaacaacaagtctttcaagatctctcgaaccttccagaaactccttcgatttgttttcaagtccagcaacaaattaaggatttctagcacccgtaatactactagtaacaatattagtactttccaagtggcagagaaatatgccaatgaccgtttatacgttgtttatgataaatctgaaccggttctctccacaattcccgaacttccagagtttgaggtgggtgtgctttcgccggatatcacttccttcgtcagaaagtcgtcgtcggagcggtttatggccaccactgctatcggtatttcgtgtgcttaacacaattgcctcagtctttagatgatgataattattattatttcactgtcataacgtagaaattagcgtatgtgtatagttggtttatgcttttgttataagtttcaaattggatgattcacgatgtaattgtttaacttttattttacaaggcagcgttgaatccaa

SEQ ID NO: 136926 - DNA, 471 bp, Glycine max
  Clone ID: PAT_MRT3847_94652C.1
cacgcgtccgccacgcgtccgcagagtttctctgttctcccgcctcaacgcaaaaatgagtgatataaggaagtggttcatgaaaacacatgacaagggcaacaatgccgcttcttccaagccttcttccgataaaccccagtccgagaaaacggtggctggaggtcaggaaagttcagggaggaggataactagcaaatattttaattcgaacaagcaaaaggggaaagatgagaaagaaaagcaggagctccctgctaaaagaaagaatgcgaaggacagtgaggaaattcatgaagacgatggagatgactctgtcttgcccactaataaaaagaagttagctgacaccactccaacaaaaaaattgaagagtggatcaggtagggggattccaaagaaatctgcagttttggaagaaagtgatgaagatgatgacaaagatgctgtgtctgctgctaaatctgtgag

SEQ ID NO: 136927 - DNA, 505 bp, Glycine max
  Clone ID: PAT_MRT3847_94653C.1
gaatcgaatgcattttgataagccatgccaacagtgtatgatacgggaccaacacaggctaaactgccaaatgcaaggaacatggcccatgtgcttgctaatgcaaaaaccatagacagatcttcctcagcatcagcaaatgtggattgcctcctaatactgcaccgaggatactttacaactgactttgaaccaaaccatcttagccttaactctactctatcaaacatgtcatccactatcagaggttgaccactataataagcatcccgtgcttggcaataaagggcttcgaggttctctttgttagcggtttcgagggggccaacgtagatgcagcagggtcccgcggggcgttggtcagaggtggcggagacgcggtggctcttggcggagattctgacgtggcgggtggttctgggcaattctaggaccgtcgattggatcacgtgagagaggctcgtgccggccatcagcccacgacgccacaattcggggctcttcc

SEQ ID NO: 136928 - DNA, 231 bp, Glycine max
  Clone ID: PAT_MRT3847_94654C.1
ttagaattagggatgcaggctaggatttgattgacgtgttctaccccaaataaattcatttcaacattaaacaataattaagtaatggatcgaaatttgtttgtcaggaataagacaaacgaatttcaaatcagtcagacaaattgaaagtagaagctatatattcactttaggtactcttttctaattgctccattctctaattcatgaatttgagcttggtattcttat

SEQ ID NO: 136929 - DNA, 679 bp, Glycine max
  unsure (1)..(679): unsure at all n locations
  Clone ID: PAT_MRT3847_94655C.1
ctcgagccgaatcggctcgagtacggctgcgagaagacgacagaaggggggtgttgataagataagatacacgaatgtgtgccactgccactatggctcaatgattatatatgaacacaggaagaagcagtgaaaaactttcctttgggtgatgaacaccttttaagggactcttaacattgaaggtttggttttgttgctcattggctgttttagtacaattctttaagagaatgaattgaaaagtgacattcaacactagttgggtgcccactatatcttctagccaagagcaagagactaattcctcaaagtatggagatccaatcaagggcctgatctttcaacaaatattttttcatacaaaaacctgagaatcaaacttctgagatgcttgagatatgattatgtatcaaccataaccccccacgctggctcactggttaggtcccccaattatgtcctttgccccccctcccccgcccttctcccccccttcccctgtccccttcctcctcccctttccccctcactatcccccgtacctctctccgccccctcgcccccctccctctgcgcccctttcccgcagtgcccatcaccgccggcaacgnnnnnnnnnnnnnnnnnnnnnnnnnnnnnnnnnnnnnnnnnnnnnnnnnnnnnnnnnnnnnnnnnn

SEQ ID NO: 136930 - DNA, 547 bp, Glycine max
  Clone ID: PAT_MRT3847_94656C.1
aaaatgggttcaaacttcaaagttaaaggaaacaaaagtgtagccaagagcaacagtaaaacgatcttgggatcaatttttatcagtagactttctttgacaagtcatcttcaagtattatcactattattattattattagtagtagtagtagtagtcttttccaaggcatgtggcatggcgtaaccttgcagtgagacagcatcaaaatgctctctggcccttaaaacttttataacaaaaacatgtgacagtatctctttatttttctatactttgccaatttgatctttcagtaatgtgctttgcatattgctttgaattcttgagttttatggttgagttgcccatatcatcacttgtttgtgtgtggttctccctgtatcctgtttcgtggatagtagaaagtgaatggaaagtggatagagtggaagatccttttgttgggagaaatagcaattttatataacatcttcattcctaccttctcttcatttccccctttctggtatttgttaattacatgagaaatcttataattctcatg

SEQ ID NO: 136931 - DNA, 668 bp, Glycine max
  Clone ID: PAT_MRT3847_94657C.1
cccacgcgtccgctctgaactctcaatccacaaaaaagcaacatggcttcaattcgcgccttcttcacagccattgcttttgtggctcaatcatttcaaaactacatgatccagagtctgcacaaactttacaagcattatggatatgctgctgaagtgaaggacaatgaagagaaagaaagtgattattgttctgtgtgtctaagccaaatttgtaaaggggaaaaagctaagtctcttcccgtgtgcaaccacagataccatgttgattgtattggtgcttggttgaagaatcataccacatgccctctttgtaggaacaatatcactgatcatatcacccaaaaacataaacaggtgaagagcttaggagaatctttgttcaatctcattcagagtttctctgatctattggtagctattctctacatgatgcttccatctaccatcactgagagtttccctttggttcattaatattgctttctgctcacacaatactagtatgagttgtatgcaattatgtatgtaatatgtagaatagtaaatcaggattcctgccattcattaaattgctaatattttgagtttttgcttgtttggcactaggaaatatgtaattgtgcctaattacgattgattccttcaatacagaatttgattagtgc

SEQ ID NO: 136932 - DNA, 385 bp, Glycine max
  Clone ID: PAT_MRT3847_94658C.1
gatgagatgacattgattccaggaaccagcgttgatgaggcttacaacaagctgatagttgaacttgagaaaagggttcctacattggttggcatcgagtgtgccaaggatgagaaactgactcgaagcaaaatttttgatcaacctaagacgcgctggttcactattctccctatggagtataatcttgggggtcgacagaagtatttaaattaggagaggttcattatgaagaacagggacaagctcagttgccaagttggaatcaacccatactccatggaatggactggttgggccaatagatcactgagtcagggcaacgacagactgcgtggcgagaatgctagatttgatggcttgattaccaagcaagttatgaaca

SEQ ID NO: 136933 - DNA, 322 bp, Glycine max
  unsure (1)..(322): unsure at all n locations
  Clone ID: PAT_MRT3847_94659C.1
cgcangcacgcgtacgtaagctcgggaattcggctcgagnnnanatcaatactnnnntactcttcganagattcaagnnaaatactaagaatnacatatntattgnagaatgagcgttaacattttatatatgtgcaannaaggntatattattantactggggaananatggatgtntgccngggaggaaagaccactcacatngctgaagggngaataangnactaccactagnntggnaccntagctgtgnatnncnnnncatgnnnaangcttntaaattcaacngaaatcacatnngaccccnnncccggtgcgctn

SEQ ID NO: 136934 - DNA, 792 bp, Glycine max
  Clone ID: PAT_MRT3847_9465C.1
ggggatcttaggattcattgtgagagaaagccacaaaagcctatggtggtatataggaggatgggggaactgactttgccccagggcacttcccaaagtgttaaaagaatgcctatttctatagggggaggagctggtgcaaagaatgctattctcatgaatatgccaaatgctgttctttcaatgaggagatatttcgtaggagatctcgtgtttgaagttgaataagatgacttctacctacattaaatgcacaccctctgtcttcatagcatttggaaattaggctgatgacaccatcaattttgaggcttttccccacaagctggtgcaatttggagagattcaggaaaaagttgtattgaaattttcacaagaggaatttcttacagcttggtcaactcaggtgcgtcctacaacaactctgttggctgatgggtgtacatatttgcatgctatggtgcatgatagtacagtgtttacaataccacgtgatttctgtcattggtgttaagtagacaaccataaacaatatgtgtgcatatgggctcaatcctggtatttcaggttctcagtcttttgggcaccattcctaaagccattgcgcataaaactgttctgaatcaaatggcaactgtgaggacaccattgaattttgatcctaacaagcagagcttttgtcaattctatattgaccttctcggcggaagaattttatcggacaaaactggagattggatcacatttatacaaaattcttcaattagttacttgatgagagttgctgcttgg

SEQ ID NO: 136935 - DNA, 274 bp, Glycine max
  Clone ID: PAT_MRT3847_94660C.1
cccccaaaataaaaattacctttctttccatatttctccttcaaacgaatgatcttcaacttctcgctttcaacaatcctttcatcaccacttattacatgacatacatgttcaagtaccacacccttcattcccaatttaaacattttaatcttaaccctaacgactctaatacccttctctttcattaaaaccccctcacccttttttaaatcaataaccctcacgaaattccatttcattaaattcctcctcattattttcctccatcaac

SEQ ID NO: 136936 - DNA, 331 bp, Glycine max
  Clone ID: PAT_MRT3847_94661C.1
gcaaccacttccattctcaatcaccacactgatctggatcgaagttctcataattgactacatagagttccacatgaacccagatctgaacccaaaaaaaaagctgtaccctaataacacttacttctacccactaagcctgtcctcatatccacagaataaatccacccttcaattgacagagatcaaacacacccatctctccatggtgggcttcttgaactttacactccaatctaccaccactgacaagggcccactcaacaactagaccacccacttaagtgacccactccacacaaccatcattaacaccttctcatcctcctct

SEQ ID NO: 136937 - DNA, 647 bp, Glycine max
  Clone ID: PAT_MRT3847_94662C.1
tacggctgcgagaagacgacagaaggggagggacacaaaattaaccctaagcctttccaggcacagggggtgctcactacccagaaagaggaagggttccgtttttatccaaaaggattcctttccttctttctcgataatctattcatttaattgggtcaaattaatattaattaacattccttgaaaaaattaacaatgaggaagttgtgccctaattttgacaatgaagatgggttggataccgtccttgaggtgccaattcccgaggagatgttgtccggcatgggcagcaatgggtccaatcgttggaagaacatgcgaactctcatgaatgctcaattcgttgataagtcttctggtctctcaacaccatcaaacaatgaattcatggtgttgcttaagcttgtgggtgctccccttattcctcttcaggttccatcagaccataatttgactcgccccctcaaagattgttccattagagattcgagtgccaagtacatagttcagcagtacgtggcagcgacgggaggagtagctgcgttgaattcactggaaagcatgtatgctatgggacaagtgagaatatgtggatcggaggtgcgtcgtcaaggtgatggatacgaagaaagcgttcaatcaag

SEQ ID NO: 136938 - DNA, 222 bp, Glycine max
  Clone ID: PAT_MRT3847_94663C.1
ggctcgagctataccatgtctatgccataggttgttcaaacaacaggacaattttctacgcaacgatagggacaagatcaccaacgtcgggtacgagaccctgattctaaaacacgtgaacgtggcgccttcagtctccacagcgagacgttgattgaccgctaccgctccatagtggtcacccagaacctcgatttgcggcgctacggcgactgctccatt

SEQ ID NO: 136939 - DNA, 561 bp, Glycine max
  unsure (1)..(561): unsure at all n locations
  Clone ID: PAT_MRT3847_94664C.1
gcacgagggctctatctctctcaaaggaggtaacccatgaggggtgtctttggggaagacatccccaaactccttcaataattcttccacaccttaggcaaagaactagcaacagaagacaaaccataatcatgaaacattactaaatacataggttgcctagctagcatcactctcttcacctctctttctctcatgaacaagctctgtatttttctctcttcttgattttcatctttttttacagcctcgcttttttttttatctccactcttttctttcttttctctcctttcatgctttctctgttcatcaattgtgtttttctcttcttttctctcttgttctcttttcactctcatttttatgtgatcctcacaaacctcacttggagacaaaggtgtgagggtcacctttttttcctttatgtacaaatggaaatttgtttgtgacatcattatggacaacatacctatcatactatcaaggccttccaagtaagaaatggctagcctccatagggactacatcannnagtatctcatattcccattgtatgac

SEQ ID NO: 136940 - DNA, 249 bp, Glycine max
  Clone ID: PAT_MRT3847_94665C.1
ggcgtggcacaccacctggtgaacagcagcgcaactcatacatgatggcagagatgtgtccagtgatataaagtcaagaaactcagatatgagctggtcacaccagccacaaaatactcatgctcagtgggagcataatttggattatttatctgaaaccagagatttgactaagtggcaatcctagtggagatcccattaagaggcagctatctggaattttggacagtgaatttgaatccaggagaa

SEQ ID NO: 136941 - DNA, 396 bp, Glycine max
  Clone ID: PAT_MRT3847_94666C.1
gaaattttgtttaaccgcgatcataggttggcgcaccttaaaaccggacacaaaaccaatggaatcttgacttgaagactatctcaattacttcctactctactgtgtacggtaccataagggaaaggaaaagaactctctgtgctggccacagacttcgcgaatcatttccttttccattcttagtttatttgctgaacactctactattcgatataggacttggtgtcagatttaaactgcttctgttcctttttcagttctctgttcaattacaagttcaagctggggagatgttggattagtgctcccactctcctatctggtataggacttgacgggtagactctactatttcactcctttctttactctgttcttctcactgacccgatt

SEQ ID NO: 136942 - DNA, 958 bp, Glycine max
  Clone ID: PAT_MRT3847_94667C.1
cagacattccttcggttcactcttgctccttttcctcgtgttgttgcagaagcgattccaaatgggcttgctagaagaaaaccctaatcattccaagaccatcctgatccgcgaggtctgggcatccaacctcgaatccgaattccagctgattcgtcaagtcatcgatgattaccctttcatttccatggacaccgaattccccggcgtcgttttccgtccccacactgtagaccccacaaaaccctacctcccaccttccgtccactaccgctttctcaagtccaacgttgatgcacttaacctgatccagatcggtctcactctctctgattccaacggaaatctcccccacctcggaaccgccaaccgcttcatctgggaattcaacttccgtgacttcgacgtggagcgtgacgcccacgcgcctgactccatcgatctcctccgccgccagggaatcgacttccgccgcaacgcggcggagggcgtcgactcctacctgttcgccgaactcgtgatgtcctcgggactcgtctgcaacgactcggtgagttgggtgacgtttcacagcgcgtacgatttcgggtacttggttaagatcctgacccggcggagcctgccgagcgggttggaggagttcttgaacatgttgagggcgtttttcgggaacaacgtttacgacataaagcacatgatgcggttttgcgacacgctccatggcggtttggaccggctcgcgcgaaccctaaacgtggaccgggccgttgggaaatgccaccaggccgggtctgatagcttgctgacgtggcacgcgtttcagaaaatgagggatatttatttcgtgacggatgggccccagaaacatgccggtgttttgtttggattggagctcacttgctcaaccagttgagaaaactgccaatatatatacataaataaaaaatttattcattta

SEQ ID NO: 136943 - DNA, 1183 bp, Glycine max
  Clone ID: PAT_MRT3847_94668C.1
ccatttaccaacagagttgagtagctggtggcaagggccattcgtgcggacctcttagctatacagataagtggcgccagggggatgctctgaaaggcgattcaggtgggtcacgacaaggttataccagtcaaggcgttgcatacgacggtaagaacaatatatttacttaccctcagttaaaggaatatgtctccggcagcaggtttttttttttttttttttttttttttttttttttcgcggcgaacaaataaattcaattggggttaggcgtttcaagaatatcaaagtacaatttccgcaacaacgatgatattcatacaaaacacagccaaacaccagcgaaaataacagaatgttataatttcatatacttaaataaaaactaaaggtctaaaccaacacaaactcctcaaaactcgtcaaaactactttagaacagcaactcaaaatgccagacccaaaaattctacaagccaatatcagaatatgtggatcacttcttagatttctttggtgcttgcgctggctgtgatgctgtagcagctgtagcactgggtgcagcggatactttttctccaggaccttgggccaatcgctcctccctccgagcaatttttctttctctgctggccttgttcttggcacgtttggcctcaaattgatcggacaaggtcttctctcttgccttctcggctttggacttatgaatgctctccattaaaactcttttgttcttgaaaacgttacccttgaccttcatgtacatgtcatgatacatgtgcttgtcaatcttcttagattccctgtatttgcgaagcaagcgtctaagcacacgcattctcctcatccaaaggattttagtgggaagccttgcctcccttgtacccttacgcttaccatatccagagtgacgtcctttcctcttggcttccttcattcggcgggcacgtgagcgagagtgaatcttggtgggcttcctgataataaacccatccttaaccagcttccttatgttttggcgagaattagccatggagatttcgttgacttcattggggtcaagccaaacctttcctctgccacacttgaggacgctggctgcgagccgcttctgcagtttcagcgaaaccatttttcctgcaactgacggtgaagctaagcttgtcgaggaatgtgg

SEQ ID NO: 136944 - DNA, 715 bp, Glycine max
  Clone ID: PAT_MRT3847_9466C.1
atatggaatagctgtttctcctgctagttccgttccgttattcccgggtcgtcccatctcgtccggtgatgtctatgtcattttatccaaacccgtgtgctgatgcatggagcttggaatttctgaagcgtaccggatttcattgtgatatcattggtgtcactgaatggactgccaccccattgcaagatgttcaggttacaattgattggtttatttcctctcatgaatgtgttcccagtacctattgtgttttgaatccacaaaatccttttgtgttaaataggtggatgggaaaactgactttcccccatagcatcttccgtagtgttaaaagaaagcctctttctatagggggaggagctggtgcaaagaatgctattctcatgaatatgccaaatgctagttctttcaatgtggatatattcaagtggacaaccataaacaatatgtgtgcaagatgacttctccctacattaaatgtacagtctctttcttgatagcatttgtaaatcatgctgcagataccatgaatgaagaagctgttacccacgagctcacgcatgtagtatagattcaggaaaaagttgtattgaaattttcacaagaggaatttcttacagcttggtcaactcaggtgcgtcctgcaacaactcttgtggctgatgggtgttcatatttgtatgcaatggtgcatgatagttcaatgtctaca

SEQ ID NO: 136945 - DNA, 1619 bp, Glycine max
  Clone ID: PAT_MRT3847_94670C.1
acgacccacgcgtccggttttctggcgtggcagcatgtaaccatacattatgggtgatgtgtctgggttcactttgtctttgtgtcacgttctctaagagtgaagaaagaaagaagatactaattcatgaagatgatggtcaatttgtagttgaaacttaaagagtgatctatctatggcgaacctgttctgttctgtcacgaggtggcactctcactcactcacacgggtgtctcataaagttttctgtcattaaacacttcgtggcagtttcctgctacaaacaccgtttcatttcacacttcacaaacaaatacaaaaggatctccacacgcacactcgtagttttcttcattctcttctcttatgtcactcttctgatttctttttctcatctctcagagacccttttgagtcatgaagcaaaaaacgccttcttcaccaaccactgcaagaaatgcgtcgaagatgcaaggtgacaagtccctgcagagtccaccaccaccaccaccaccacgcctcagagcttcttctaaggctccgaagtcaccgccagagattgtaaatagggaatccatttcatcaaccagagctaagtcagtgcctccagacttgaagaacgtttcaagggccaaaaggggtgttgtggtgaacaagcctaagttgaatgaagaggctaaggttgttgttgttgctaggccacggcggagggttggggattttgatctgcaaaagaatgaagacgatgatcctgatgggaagaagaagaaggagttgcaggagaagctagaggtgagtgagaatttgatcaagagtttgcaatctgaggtgcttgcattgagggaggaattggatagagttaagagcttgaatgtggagcttgagtctcggaacacaaagctcactcagaatcttgctgctgctgaagctaagatatcaactgttgacattggcaacaatggaaagaaggggccaattggagaacaccagagtcccaaatttaaagatatacagaaactcattgctgaaaaattggaacggtctagagtgaaaaaggaaggtactcctgaaataatttttgctaaagcatcaatctcagctccaacaccaagttatgccattcctgaaactacaagtataggaagaaaatctccacccaatacatgcctgcagccaccgccaccagttactagtgtaggaagaaaatctccatccaacacatgcctgcagccacctccaccaccgccaattccgactcggcctttggcaagattagccaattcccaaaagtcccctgcaattgttgaactatttcactccttaaagaataaggattggaagatagactcaaaaggatcagtgaatcatcagagaccagtagttattagtgcacacagtagcattgttggagaaattcagaaccgttcagctcatctgttagcaataagggcagacattgaaacaaaaggagaattcattaatgaccttataagaaaagtagtagatgcagccttcacggatattgtagaggtcctaaagtgtgttgattggcttgatgtcaaattatcatcattggctgatgagcgtgccgtcttgaagccttttaagtggcctgagaa

SEQ ID NO: 136946 - DNA, 746 bp, Glycine max
  Clone ID: PAT_MRT3847_94671C.1
tgcacttaactcatcaatatttaaacattgcatgaagttatcaacacaatccacacttgttttatgtgtcattttatcatattatcacaagacgagtgataaaatgttcagattaaccaaagtacttaaatacattcatccaaatactcaaaatataaatagtttgccacataacaaacaaaaaaagttcttcaatagtgcttcgtcgtcatcactcaatcttgatatgtttggtcaccccgattgagcggacgcgtggggatgataaatcttcaaatggtatatcatccaattgagtattagataggacgagattgtgcttagctggtgtaatggatcctgataaaagtggattagactcagcagtggtagagaagcattgctttttcactttgctgacttcatcaaaatatatcatttttgcattatgcataaagcgatctccaacagaatacaatgaagaccccgaaatttggtttccactttgggtacagtgaatcattgttagctgacttggatccataccacacaaatctctccgacaatgagcttgtgagcttgctgaagatatgcagcgaagcttcgcttgaggagaaggtgaatacacgagatggaaacagagaaatgatgaatatgcattggtttattcatttgttgctaaacatcaataggtcgagaagcttcctagctcgacgacgtgacctcatagccctggtagctcagacgtgtagagctattgtaggtag

SEQ ID NO: 136947 - DNA, 300 bp, Glycine max
  unsure (1)..(300): unsure at all n locations
  Clone ID: PAT_MRT3847_94672C.1
aaaaaatgctccgccatgatccacgtctgttccctcgccgcgcttcccgaaaccgtccgcctcaccggggccagccacgntgctgaccgtgatggccaatgtcgagcaggtggcgcggccggtgtcggtgctgccggccaaccatctcaaggtgtcgatggacgacatcaccgaggagaggacggctttgtcgcgccgtcggaggcccatatcgaccaggtgctgaacttcgtgcgccgctgggaacgcagcgcgccgctggtggtgcattgctacgccggcatcagccgctccaccgcg

SEQ ID NO: 136948 - DNA, 257 bp, Glycine max
  Clone ID: PAT_MRT3847_94673C.1
gctgctaagcatctatatcctagtctgttttcatggcaaaaacaactcacatagctatcgtttcaagtcctggtttcggccacctagttccaataattgagttcagcaagcgacttataaagaatcacccaaattttcatgtaactggcataattccctaattcggttaaccaacaaattcttccaaagttaacttaaaacacttcctttatttaatgagcctaattttctttcttccatttaccaagaacaattac

SEQ ID NO: 136949 - DNA, 129 bp, Glycine max
  Clone ID: PAT_MRT3847_94674C.1
acggctcgaagaagccgccagaagggcatacccaggggccacgaatgcgtctatgatataggatatcgtagcatctgctctccgcgacttgagatgcctagcatgggatgcgcacactatgtactagaa

SEQ ID NO: 136950 - DNA, 719 bp, Glycine max
  unsure (1)..(719): unsure at all n locations
  Clone ID: PAT_MRT3847_94675C.1
gctcctacacccaccaaaccaaaaacgcttcctttaatcagaagattcagaacaaaacccatcaccaccattcaacaaagtttaatccttttcacttcaattcatcattgccttttcgtttaagcacaaaagctatgccgaactgggagctcaggaactgttgtgaccacgaccagaaggtcttcattgcttgtgttgctgccttcaccgttgtaatcctcgtgctatggaggacctttctacttacaccttttaagctcatcaccgtgtttctgcatgaagcaagtcatgccattgcttgctggctcacttgtggcaagatctcggttcatcattttggggaatggctttgatacttgcgtccacaaatcttctcactgcaaaaattgctgctggttgctttattgctgctttaattgttgtgctctttctcgcaaaaaatgtaagattggttatggatgcagatgttttgtatcaaatatatcaaagctatttttgtcctgacttttctcccttttcctgtcttgctacccacttttgttctaaaagtggaccctccgaggactctgtattggtgagtgaatntatgatctttatctcaaataaaatggaaaggtattgacaattctcacattattcttcttgatcaatgaatatcaggatttattgtttttattgctgtaatttggcttctgcaagagaaaacaacgtgcacgttc

SEQ ID NO: 136951 - DNA, 346 bp, Glycine max
  Clone ID: PAT_MRT3847_94676C.1
ggctcgagctcttgtcaaaagaaacaaatagaatgtagtaaggtgaaatatttaacataaattcgtggacactggaatggtgaacctaactccatggccatttaatgcgtatagataatggcagaggtttcgtttctctaatattcaagttcaacaatacaaagggtggcatgtagtcatgatgtagaaatatagttaaatttaaatttaatttattaaacaaggtttaagaagaagtaatataaattgcaggatagaggaggttccttatcatcttaaccaaatcatagcaaatgatgtagcttctgctttttcgttgcattaataaaatccagcatttacacgt

SEQ ID NO: 136952 - DNA, 1295 bp, Glycine max
  Clone ID: PAT_MRT3847_94677C.1
aaataatcaattacagtaaattgtgtctcttactctctctctctccctctccctctgtctcctacacccaccaaaccaaaacgcttccttaatcataagattcagaacaagacccatcaccaccattcattaaagttcaatccttttcactttaattcatcattgccttttcgtttaagcacaaaagctatgccgaactgggagctcaggaactgttgtgaccatgaccagaagatcttcattgcttgtgttgctgccttcaccgttgtaatcctcgtgctatggaggacctttctacttacaccttttaagctcatcactgtgtttctgcatgaagcgagtcatgccattgcttgctggctcacttgtggcaaggtggagggaattcaggttcatgcaaatgagggtggggtaacccagactcgtggtggcatatactgggtgatcttgcctgctggatatcttggttcatcattttggggaatggttttgatacttgcgtccacaaatcttctcactgcaaaaattgctgctggttgcttcattgctgctctaattgttgttctatttcttgcaaaaaattggaccctccgaggactctgtattggatttattgtttttattgctgtaatttggcttctgcaagagaaaacaactgtccatgttcttcgctatgtcattctctttattggtgtgatgaacagtttgttttcagtttatgatatttacgatgatttaatatctcggagagtccactctagtgatgctgaaaagtttgcagaagtttgcccatgcccttgtaatggttttggatggggagttatttggggaatgatatcatttgcatttctttgcgcatctttgtaccttggcttggtcatattatcaggttgagaaagttgtatttggtactgcaaagaaattgaccctttctcttttgagggtttgcatttttgttctaattttttctttctgctgggagtttgctctctcaatgttactcccatgccttcattctttgcagcctattctgggttgcttgatacatgattgctattgtatagaaaacttagttccatgtattgaattattgggggccgatttacagttagtgaaatacatgtgagtatttcaatagataggttgcctttggcacttgcagctattattctccctttttttccctccaaatttttcatgtttatgtaaaagcatacaactgggctggtttagaggtattcgagaccttaagtgcaaaacgttgtggcatcttaataatataaaatacattgtac

SEQ ID NO: 136953 - DNA, 397 bp, Glycine max
  Clone ID: PAT_MRT3847_94678C.1
aaaggggcaaaaatttttttggggaatcaatataatgattagggggcccacctcccggtcccgtttttgtgggaagggtaaacaaaaaaaggtttcctcccaaattacaaaacccaatttgaaaacccgaagggccctttttttttccaaacgagttttacttcaaactttcaccctttatataaatgctgggggaaggaaaaactcttcccttaactggtttttccaaatccccccaaaaacccctaatttaaaatcctttcgggcaccaccggaaaaaaaaaggggcctatttcttttaatggtgagaccataaaaactgtgtcgaaacttggggggggtgtccctgattcttttagggcccccctgccaaaaatatttcttccatttcccccac

SEQ ID NO: 136954 - DNA, 396 bp, Glycine max
  Clone ID: PAT_MRT3847_94679C.1
aatggctctgacttctgggcttttattgagaacttcttcccggggtctaccaccaccagaaacccacactttcattaggaccatgccttcttctgctgacttgcgcaccattaccgatagctgatgcaccgactctcattcatctaagccatcccgtaaaattcgtggtatcatgaaaccccgcatagtctccctcaagatcgaacacctcgtctgcacttcctagatggtttgaacccaagtcctcaaacggatttggtcttacattaacgacaacaatattgacgaccctacacacaagatgactataaattgcgatgagaagctgaagaacgtgtttgcagggaaagatcaagacgacatgctacagattgctcgctcgattatcccttactt

SEQ ID NO: 136955 - DNA, 2324 bp, Glycine max
  Clone ID: PAT_MRT3847_9467C.1
atgccaagaaccaccttattaaggcccacgaaattagccaccgcccaacccttaaatcttgccaattttccatcaaggtttaatcctagacaatcctaagtcaacctttgtgcaatgaatgttcatatcatgaatggtaagttgagcttagcgcagaaactaaaaggtgcttttaagaatgacgtagttctaagaggttcaagttgttcacaactttgtgggcatcaacactctcatgtattacagcctaaccattgttcagtttgctggaattgcctccaactccacaggtcttgcactctctcttattacatctggtctaaatgcgcttggcactatcttgagtatggttttcattgatagatatggaaggagaagactcatactggtttccatggttgggatcattgttttcctcgttgtttcaagtgctatatttttacctggcagtgcaaaatgctccttggaatagtaaccatgacaccttggcttttggtcgaaactctacttgcgaggcttacccaactgcccttattctctcttcatggaacttcatgcaatgcttacaggaagattgtgccttctatgccaacagtgataatcaagtatataataagttaacttcttccaacctcctcttatcatttccttaacccgctctcatcatcactaattaacttacataaatatgtcctcatgcatgtaccagaaattattatatggttcacaagtaccatgatatgactaatttccatataatatataattgagtttttttttaaaaacgaaaactagaattgagaaactcactatatattatatagagattagtcgcgaccataaacacgtaatgatttgagactatctaatatagtaatttctcttactaagaatttgtatagattatgtatttctcctaccatctaccatgcttacagcaaagtatccatgaaggaatatatcaaaaacattacatatttcttttatttgctcttcctgtccagttttttgtatcatgcactttctagtttttagatgtttgctaccagttcttttattgcttttcttgttactaattaatggcttatactttattgcaatttcccctaaggcatttaaacataaacatttggcaggttcgtcggttccattttctccattagagaagcaaacccctcgttcttggtcaataattgagccaagtcccttcagagtcagaggcaaaaactactttaggtaggcaccaacttcgtattttgtactaaacatttatgggtcgatgattgaacctgttgttagggatgtccctcatatacaagtcattcgttatgttaacaatgaagcactgttccatttttgatgattccataatttatttgttgcatggttgtcagggataagaagaaagattttgcaccgggcaatgctgctttttatcctcttggtgctgacctatttttgtctttgcaagaaattgatcatattgctagctttgtacaaattcagtaggaagccaacatagctatgccacatagctatatataaaattaagatatatactccctgcaatgattttgatgtaaaattaacatacttatttttttctttcaatcttgacaacaaatagttcaattaaaatcagcttggtttctggaaatcatgcaactacagaatatgatgcacgagtcatttcagttttatatatgattactttccttcgtatttatgtaaaattaaacacacaagcacatctttgcagtgttggtgcaatattatttgatcttcttacaagaacaaccccaacaaatggaaataatcaaatacatgtatagaatttatattagtgcctttttctttgtagtgtattgagtattctttcaatggtaacaaagtagttctttcaaccaaaatgaagggtcatgtgttgtttcttttacttgttatgctttgattttattgaagattgaaatttcacacataaatgaagggtcaatctataagccaatttaacatattcaacaccatcatgaaagagtgtgtaccctggaataggccaatctttagctaattgtggggtattctgaatcaaagtaggtttactcatttgtaattgctagctattatttcaattcaaaataaaatggggtaattgtgggggtattcttccataagctctcataagtcataaacaactttttattattaagtattacctcaatgaaccagtatcttgagcctgcagccttgtttggcctcaatccatttggatttttcctgtctcttgggctaaagaaataccattgagccttaatgacttatttgcc

SEQ ID NO: 136956 - DNA, 208 bp, Glycine max
  Clone ID: PAT_MRT3847_94680C.1
gcagggattaacaattggttggttgcatttgaagtgtgtccctgtctacaaatttccatcaataattagtcttaaaaatcaaatttggttcattgttttgcctcatctttttgaaaaaagttaacccacctaatagatcttcgttttgggttccttgtcttaatatttgatgaattttggtcctgtttatatttattgggtttgggaa

SEQ ID NO: 136957 - DNA, 2084 bp, Glycine max
  Clone ID: PAT_MRT3847_94681C.1
cgcctacgtatgctcggaattcggctcgagaaaacattgggcctggcatcacttatgtcaaaggctgggatgcatttgcctgccaagaaaaatccaaaacttccttggtttgaccttatccttgcagatattggagatcaccagtcccttgaacaaaatctctcaacttttagcgggcacatatcacgtatttgtaagattttggaagtggcctcaacacaatcacttgttctcattgatgaaattggtggtggaactgatccttcagaaggtgttgctctttctgccagtatcttacaatatttgaaggatcgtgttaacttggctgttgtaaccactcattatgctgatctgagtagtatgaaggaaaaggatacccgttttgacaatgcagcaatggaattttcacttgaaacattacaaccaacttatagaatcctttggggatgtactggtgattcaaatgcgttaagcatagcacaatctattggctttgatagaaatataattgatcgtgcacaaaaatgggtagaaaagtttaaaccagaacagaagcaagagcggagaggaatgctctatcagtcactacaggaggaaagaaaccagttaaaggctcaggctgaaaaggctgcatctgttcacgcagaaattatgagtgtgtacaatgagatccaaggggaggcagaagaccttgatcaacgtgagatggaacttatggcaaaggaaacacaacaggttcaacacgagctagagcatgcaaaatctcagatagaaactgtgatacagaaatttgagaagcaactcagaatttctggtcgtgatcaactcaattatcttattagagaatctgaatctgcaattgcctccattgtaaaagctcatactcctgctgatagttttcccatcaatgaagctgatcgtgctttgtatactccacaaattggagagcaagtccatgtaaagggattggggggtaaattggctactgtggtagaatcgcctggcgacgatggaacaatcatggtacagtatggtaaagtgaaagttcgtgttaagaaaagtaacatcatagctattccatctagtagaaagaatgctgtaactagttcttcttccacacatcagggaaggcaggtacgtataaagatgtttagatatttactgtcatgtaaatgttcaattgatataataaccttaaaggaagaaaacaaagtgatatacttttccatttagaaagtgattgagcaagcattaattaaaagacattttgaacatggaaaaacctagcttagcattgaattcaaaacctgctgttgatcaatgtttataactagatcatcctataaaattattcttattcttctttccataacaggcttcttaacctggtttatttttaagaagttcacatgttttcatcacttagatattttgcacattctgctgaattataagtaatttcagatccagagattattaataatgacccctttcatgtaggcatataatttatctgtgcattactatgtaaaaaccattcatctaaaatcaaaatgcccagtggtaacattttgatataatattgcagagtttgcggaatggagaatacagggataatgtagacaacaaaaccaacgatgatatttcttatggtccagtggtgcgtacatctaagaatactgtggacctacgaggtatgcgagtagaagaagcttctatccaacttgagatggcaattaatgcgagtcggccatattcggttctctttgttatacatgggatgggcactggtgctgttaaggagcgtgcacttcagattctgcaaaaccacccacgtgttaccaattttgaaccagaaagtccaatgaattatggtagtactattgcttatgtcaagtgaagcctcattgccctggtgcaataaacaatgtcaggttgaaccttcttccttttctgggagttatcgtgcttcttccttgcctgataaaatcaaatgactaaattgatatgtaaataaacacatttgatatacaatatggagaatttgtaaaattttgcagttttaaaacattaaaatttacact

SEQ ID NO: 136958 - DNA, 285 bp, Glycine max
  Clone ID: PAT_MRT3847_94682C.1
ggctcgagcggctttatgggacaattttttttttaaaatttattgagcgtgtcgtatctggttatatttcagtacatgtgcaggcggtttggggtggaagcaaaaatttgtatttttacttcacgagtttatagtagaactttgtactaaacgttaatgaatgtgtataaaattgtatttttatacaaaaaaaaataaaaaaaaaaaataaaaaaaaaaaaataaaaaaaatgggcgaccgtctatctatggagctggaggacccggaatttaatttcgtaccgg

SEQ ID NO: 136959 - DNA, 812 bp, Glycine max
  Clone ID: PAT_MRT3847_94683C.1
tgctatcattatgaaattgagtgctaactagttgccattctgttagtgttatcagttcaaagaaaaacatgagttcatctaaccagttaaaccagagcagcaggttcctagcaaataaaccaaggaatgaggttaatgtgcagggatacaccttcagaattgatggaaacacaacatttgtgatgaactatggacgttggtcagaaaagcgtaagagacttatttctgagatacggagtgctttaaatgttcataatgatcaagttcttgatgacaaactactgtttctcatagacacagtcatgaagcactattttgaactcttcgggcttcaatgttgcttctgctatttgtgtcttcagtgttgtttctgctatttggtgcacaacagctgaacgcaatttgttgtggattggaggcttttgcccttctcaattgcttcagaagatgctcttgcacaaggcatggaaaaactccagcaaaaccttgacaaagcaacagcagctggtgacaaagcattaaaactgacgtgtgtctcacaacaaatgtcatttttaaagcaggccaatcatgttcgccagcaattcttgtatcaattatctcgtctccttacaatttgtcagtatgctgaattcttacttgccttcggagaatgcctctataactcccagccttggagctcactttgagcatcatccatcatgcttccgttcatcacaatgagaccatactatattataatacaaataaactttgcatcggatcaatgtgcatgtatcctttgcttaggttactataattgtatgtagttt

SEQ ID NO: 136960 - DNA, 266 bp, Glycine max
  Clone ID: PAT_MRT3847_94684C.1
gatttatctggtagggttgttatgctggggatccaaggtctggctgctgctggacagtgttgcaagcagcttgaagacttgaatctgcgattctgcgaaggattcactgatactggtctggttaaattagccttaggtgtggggaagtcgttgaaatctcttggtgtggcagcttgtgccaagataactgatatctcaatggaggctgtagggtcacattggaggtcccttgagaccttgtcgttcgactctgagtgcatccacaa

SEQ ID NO: 136961 - DNA, 563 bp, Glycine max
  Clone ID: PAT_MRT3847_94685C.1
aagatacaaaggaggaaacgatgacgatcaacctacgcgatctggctctctcgacccttgccgttccagctcttgccatctctgcgctcgcccgtacgacaccggcgctggccgcggcggcggacgaagaagccgtggcgaagaaggtcgaggccttccgcctcgcccagatcgcggccgatccgaaggcgctcggcgcgctgtgctgggacgatctgagctacagccattccagcggcaaggtggaggacaaggcgaccttcatcaccaacgccaccgacggcaaatcgaaattcctgtcgatcgaatacaaggacccgaccatcaaggtcgtcggcccggccgcgatcgtgcgcttccactgggtcgcggaacaggagatggcggccgatgggaaaaaagtgccgaccaaccttcacatcctgatgaactggcagaagcagggcgacgactggaagctgctgtcacgcgcggcgacgaaattgtgatggcgcttcttaccctctccccttcttgcgggagagggcaagacgagaaatatcaaaacacaaaaaaacaaagcg

SEQ ID NO: 136962 - DNA, 552 bp, Glycine max
  Clone ID: PAT_MRT3847_94686C.1
tttttgttgtttcaaatgaaaatgcatctgttgctgaattggcagcaaccctacaggctgacttgtcacaactgcaggctgctgcatcttttgtatgtcgattgggatgggcgacaaaagtaattgatccagcctctattcttcaagatacaaacatacctggttctccaaaaagtgcagtcaatgatgaatatgcttctattgctagtcatggttttgataatatgcttattgataatgacaacaatcaaagcgatgcctatggtcctcattcttgccatactcgtgttgctttcatagttgatgctaatataacatcatatcttatgatgggttctgtttcaccaggcctgaaatctcatgctgttacactctatgaagcgggtaaattgggtcatgccagtattactgatctttgcaaggatcttagcactctggaaggtgccaaatttgagggagaactgcaggaatttgctaatcatgcatttagcttgcgttgtgtattagaatgtctacaatcaggtggagttgcttctgatgcaaaagtgggtg

SEQ ID NO: 136963 - DNA, 365 bp, Glycine max
  unsure (1)..(365): unsure at all n locations
  Clone ID: PAT_MRT3847_94688C.1
gagtcaaagtgataactaatggggactgagcattttgatcgaagaaatggtttgtagaggttgttggccttgagtctctcaacaatggccatgttgctacaaacgcattaccctctcggtctacactcaccgcgttacccttatcttttcccaaacccttattatcattcatttctcattatccccaccaaacccctaccgcgattcaatgccgcagttgcattatccggtcaccggactctgtcgccacccccagccttcgcttccgaccgccacgcgcttccnggaacagcccctttccctcaaggtttttacgcgcgtcgccgtctccaccgtgctgtttctctgcttcggcgttcgcatgt

SEQ ID NO: 136964 - DNA, 520 bp, Glycine max
  Clone ID: PAT_MRT3847_94689C.1
cccgggtcgacccacgcgtccggaggatattcaactcaccctagctggctacagccgctgtgactaagaaagcccttagctttctattggattgatggttttcaactcgtgacatggtgctcagttgtcacccatcagatagagggtccctcggtgccatactgggctcattgaagagacaacagcaaccttttctggcttgcagtctgtggggggaagatcatgcgttccttcatcacaataggatagcagatgcaggggctggggtttttgggggtaagtccaagagtgggcgctgaggaataaacttgcaagtgcatgtcttattgcatggaggcaaccttgtgggcggggctggactgtgatggtccgataaacattggcaaaagtgtcgctgaggctatgactgagtggagtgcacaaagtgcttgctcaggggtgccacttaagcggaacggtaaggagggcttttatagggtgtgttgctgatgacaatggataagcatgggcaattgcaaaa

SEQ ID NO: 136965 - DNA, 677 bp, Glycine max
  Clone ID: PAT_MRT3847_9468C.1
cctttattacaggttggcgcaccttgaaaccggaaacaaatgcaatcgttacttgatttcaggagtctctcaatttcttcctacttctttgtgtacgatttcttaagggaaagaaaatcactctctgtgctggtcacagacttcgagaatcatttacttttccactcttaggttataggctgaacactctcctatttgatataggattgcgggtgagataaaaacttcttctgtttctttttcagttctctgtttaatttcaagttcaagctggtgaaactcttggattagtgctcccactctcctatctggtataggacttcgcgggtagactcttccttttcctgacctttcttcactctcttcttctcactgatccgcattgccgttcaaagcggtcttatttgaaaaacacttgggcgttggcgcaaatgttctgcttcggtaatatttctctggggacaacaggctcactgagaaaacaatttttacttgcagagatttggacatctcggctgattattatacactagcaactcaatttagaaaattcctacccgcttacaattgtgtggcttccgtgtaccttggtggtttacaatttgccatcttttctcacctgctgaaaattaatataatccggatctggattatatttcatatttccggcttatttt

SEQ ID NO: 136966 - DNA, 1128 bp, Glycine max
  Clone ID: PAT_MRT3847_94690C.1
ccaggaaaaaacatcactctgctcgcgcttctcaccacatgcataagcacaaagcaaaacattcctcctccaaagacaaatattcttccagggggaccaagcatgattgctccacatctgattatgaacatcatcgctcaaggcatcatcgtcataaatatgatggctcctctgatgatgaacaacatcatcgctcaaggcatcgtcgtcataaatatgatggctcctctgatgaaaagcaccacccttccaaacgacgacacagagatgatagcttgtcagaccatgagcatagacattctcaccattctaataaagattatagttcatctgatgatgagcataggcatcgaagcagaaatgtaaggcttaagagcagatctcgtgctgaaagagaaacagagctggaggagggggagataattttgaaatcggaaaagtcagtagtaagtggtgaagttggacgtgctagtagggaggcttctgagggattatctaatgcaagggtaccatctcaatcacctgaaataactgatgtttctgatgagcttagagccaaaattcgagccatgttgatggctaacttataaaagatacttgtatatgggtctgacaattgtattgcttcacttctttggtaatatcatagtgcattgctccaatgagagctcctaaaaagatgatgagcaccactccttccaaacaacgatcatagggatgataacttgtcagaccatgagcatagacattctcgccattctaatgaagattatagttcatctgatgatgagcataggcatcgaagcagaagcagaagtgtaaggcataagagcaaatctcatgctgaaagaaaaacagagctggaggatggggagataattatgaaatcggaaaagtcagtagtaagtggtgaagttggacgtgctagtagggaggcttttgagggattatttaatgcaagggcccaatctcaagcccctgaaataactgatgtttcttatgagcttagagccaaaattcgagccatgttgatggctaacttgtaaaagctatatggggctgacaataattgcattgcttcaacttctttggtaaaatcaaagtccattgctccgggggggggcaggt

SEQ ID NO: 136967 - DNA, 359 bp, Glycine max
  unsure (1)..(359): unsure at all n locations
  Clone ID: PAT_MRT3847_94691C.1
cgtttgcgattttttgcacagangccaaaccgaacggaaccgtccaaactaacggacccnnaccaccancaacgcccgacgggaaanaaanacggagcgccacgcacacgcncngagacagagcaggcgagcgaggggccacggcccncggagaaggagcnnacgacgccggcgagccgacggacnccgcgggcacaccgacaggaagccccacgccnccggcgacggcnccagcgccgacgcccaggccaagaaccggancgaggagcagagccaagncgacaccgaccccgacgccaccaacgncggcggcnacgacggacacggcggccccgaagcnncaaganngggcaacaagc

SEQ ID NO: 136968 - DNA, 399 bp, Glycine max
  Clone ID: PAT_MRT3847_94692C.1
atttatatcttttagacggagcatgattttatcgattatatcccttctctttctctgtgcgacagcagatgatggacacgacggcgaagcgagacgctgtaaatgcgccaatcgcggcgacgacgatggaggtgctataccccgcgagtgcggtggtggcggctcaggagaactcggacgtgaagacgctggtgaagcacatgcgcgggaagacttactgtgacaaaggatgggaatgtaagggctggtcgatacactgttgtgccgtcactattactgattattaccagacctaccagttggagaatcacttctccaagcggaactcgccggcggcgcacggccgtggattttgtgactaccactcgttgatcgccggtgtctagcttttcttgccgc

SEQ ID NO: 136969 - DNA, 130 bp, Glycine max
  Clone ID: PAT_MRT3847_94693C.1
cagaatatactcggattgatacccatgtgccctgaggagtgccaataacccaatctgtgatatggagactggcagcactagcagctgatattgcacttgagagcataatagctctgataatggcagctgc

SEQ ID NO: 136970 - DNA, 417 bp, Glycine max
  unsure (1)..(417): unsure at all n locations
  Clone ID: PAT_MRT3847_94694C.1
cggaattccgggtggccccagccgtccggtctttcggtcggaacttccttggngctgtacaaggaacggaatttggccaaaggaggcatttaactaatggttgcccaacccaaaattcaagggtttccattgggcaggatagctgcttgttccagcattcgaggaaggcattgaggaggccacttttcctttttgtctgggcctaagctggggtttttccaacttggccgtcttatggcaggccaaagagtaggattcctgttgatgaaaaacggtggtttaaccaaaatcggcggatccagaaggaaaccattgcgccagaggacttcccaaatttggttggagagggtttccaggttaagagggtttcatcggatacctttttaaggggggttccagggctcatttcccgggatt

SEQ ID NO: 136971 - DNA, 395 bp, Glycine max
  Clone ID: PAT_MRT3847_94695C.1
cgctctggccttttcgttttctgatactggtgctcgacccgcacaccactgtgagagcccagaaccttaagctaccctaccatatcggaagcctgctgacatgaaccatgaccgccaacctgctatggaacggcatattaccccgactccaacgctgcatggacctgtacttcattaactcgacaggaaccaccacagaggccacagtcccctacgtgccatcgacgtggaagatcacggaccactgcaggaggggagccacttcactgggactaaggaacacaaaacctagagcaaacttattccctcagaaactacctgtacggaacacaactgggatttctggtcttaaactctgacgacctgaacgccataaggttgggactcacatgtag

SEQ ID NO: 136972 - DNA, 1984 bp, Glycine max
  Clone ID: PAT_MRT3847_94696C.1
ctcgaaccgatcggctcgagctcgagccgaatcggctcgagtcaagatttggattcctgagaaaacatcaaataaaatcaaaacccaaattcgcaggttattgaaaattgaaatcctaggagaaacacatccacagcaaaagaagaagaaggaagaaaccagcgtcactcatctcatcgtggttctgcaaagtcttcttttcttttcggtgaattaataaagggtttttgcgtggtgattgtgttgtgttgtgctgtgctgtgtatctgaatccgcgcaattaggttttgtgattaattcattgattaatcagagagagaagggggaataatgggagatcaagtggagggaacggtgcagaacgttctggaacaggagactctgaagtgggtcttcgttggtggcaaaggcggcgtcggcaaaacgacatgcagttcaatcctatccattctcctcgccaccgttcgctcctccgtcctcatcatctccaccgaccccgcccacaacctcagcgacgccttccagcagcgtttcaccaaaacccccaccctcgtcaatggcttctccaatctctacgccatggaggtggatcctactgttgagcatgaagacatgggcggcgctgatgggatggacaccttgttctctgagctcgccggcgcgattcccgggattgacgaggccatgagctttgctgagatgttgaaattggtgcagacaatggattattctgttattgtctttgatactgctcccactggccatacactcagactattgcaattcccatcggttttagaaaagggccttgcaaaagtgatgtctttgaaaaataaatttggtggtttgtttaatcagatgactcgcatgtttggcatgggtgacgattttggggatgatcaaatccttgggaggcttgaaggcatgaaggatgtaattgaacaagttaataagcaattcaaagatccggacatgacaacctttgtctgtgtgtgcattcctgaattcctttctctgtatgaaacagaaagattggttcaggagcttacaaagtttgaaattgacactcacaatatcatcatcaatcaagttatctttgatgatgaagatgttgaatccaagttacttaaagcaaggatgaaaatgcaacagaaatatctggaccagttttacatgttgtatgatgactttaacattaccaagctgccattgctcccagaggaggttactgggattgaagctctgaaagcattttcaagacattttacatcaccatatcaaggcttatgtggtaaaggagacccggttgaacggttagagcgtaaagtatcagcactacagcgccagttacatgaggctgaagaagaactggagagactcaaaaggggcaactaggtttgatggcctccattcatgaataatatgtcattgtattcctttttggttcacattattttttagcttaaatttgataaagcatcttttttctttgttgggctgccaacacaagtcattccctatatgttttttatttaattattggcacagcgagctttcttatgtaacccccaaaaaatattgctgaggttagcctaatttgtttcacgaatattcttttcatattatgagttggataatttcttatcaaaaaaaaaaaaaaaaaaaaaaaaaaaaaaaaaaaaaaaaaaaaaaaaaaaaaaaaaaaaaaaaaaaaaaaaaaaaaaaaaaaaaaaaaaaaaaaaaaaaaaagggggggcccccccattagggaccttctcaccccggaaattatttcgggcccggaccctgggggggacccatttttccttaaagggggccttttaaaacttggggaaaacaagggaaaaacttgttccctggggaaaattgttttcctttaaaaatcccaacaaaaataaaaccggaaaataaaaagggtaaacccgggggccccaaaggggggcccaacccccatttaattggg

SEQ ID NO: 136973 - DNA, 174 bp, Glycine max
  Clone ID: PAT_MRT3847_94697C.1
gggcgcaggagctccggcggtctcctccgacgtgctgcgtcggtggagcggcgctagtgacatgagcatcgacggcagcggccagaagaaagactttgacagctccttacccccgccagcatcctctgtttctgaaaccaagtccgttgtcgtttctgaagataaggttcgaat

SEQ ID NO: 136974 - DNA, 1711 bp, Glycine max
  Clone ID: PAT_MRT3847_94698C.1
gcttgaaataggaggatgagatcgagggatgccataatatcttatcactgataaaagaaaaacacagagacaaggattccagaaccagagatgaaacctcaaacaaaacaaaactaaactaaacaaaattaaaagtaaaaacaaaacatgttggtttttcaaaatcaatggctgtgtcttcctctcactcattcccttttcttccaagttacttcccagaacaaaacatgcagcaacagtgttatccccaagactatgcccctgtttggtgtcattcagtagctcgtgccaccactctgcccacttctccaggtggggcggagcaggttgtggacagttagtttgatgcaccgaaagttaaattattgaagcagaaaatggaacttcttggtgtcaactttgagaagtctagtttgcctgggcagaaccatatcccgtttcatctaaaatgcatagctgggcagtttaaggaccgccctttttatattcacaaaagctttgatcctcaactcaagatgattcaaactcttgtcgcggtcttttccaacctctacgccatggaggtggatcctactgttgagcatgaggacatgggtggcgctgatgggatggactccttgttctccgagctcgccggcgcgattcccgggattgatgaggccatgagctttgctgagatgttgaaattggtgcagacaatggattattctgttattgtatttgatactgctcccactggccatacactcagactattgcaattcccatcggttttagaaaagggtcttgcaaaagtgatgtctttgaaaaataaatttggtggtttgtttaatcagatgacccgcaatgtttggcattgggtgatgattttggagatgatcaaattcttgggaggcttgaaggcatgaaggatgtaattgaacaagttaataagcaattcaaagatccggacatgacaacctttgtctgtgtgtgcattcctgaattcctttctctatatgaaacagaaagattggttcaggagcttacaaagtttgaaattgacacccacaatatcatcatcaatcaagtaatctttgatgatgaagatgttgaatccaagttacttaaagcaagaatgaaaatgcaacagaaatatctggaccagttttacatgttgtatgatgactttaacattaccaagctgccactgctcccagaagaggttactggggttgaagctctgaaagcattttcaagacattttacatcaccatatcaagccttatgcagtaaaggagatccagtagaacggttggagagtaaagtatcagcattacagcgccagttacacgaggctgaagaagagttggagagactcaaaagtggcaattaggtttgatggtatccattcatgaataatgtcattgtatgcctttttggttcacattattttttagcttaaatttgataaagcatctttttctttgttgggctgccaacacaagtcattccctatatgctttttatttaattattgtcacagtgagctttcttataaccccccaaaaaatattgctgaggttagtctaatttgtttcatgaatattctttacttgtatctttcatattatgagtagaatagtttcttatcaaataaaaaaaaaaaaaaaaaaaaaaaaaaaaaaaaaaaaaaaaaaaaaaaaaaaaaaaaaaaaaaaaaaaaaaaaaa

SEQ ID NO: 136975 - DNA, 776 bp, Glycine max
  Clone ID: PAT_MRT3847_94699C.1
tttaaggataaaaaaatataaaaaataaaagcgaaaatctaacaaccaaggtacaaatttgacttgttgactgaagaagtttggcaaaggcagggaataatttatgtagtggattttgttttgaggcggaaagagaagagaagttgccggtgacgtggctaatttagcaactacaaaatgaggtgaggtgagaagtgagaagtgaagagaaagatgattgtttcgatgatgggtggtcgatgttacagttcatatcgtagtaatgctgtggcagctgtgatgagggacaggaaatggaaatccaattcaaagtcagaagaagctgatgttgttgtgattggtagtggcattggcggactgtgctgtggagcactgttggcaagatacgaggaagatgtgttggttctggaaagccacgaccaaccaggtggtgctgcccattcctttgatatcaaaggctacaactttgattctgggccatcgttgttctctggcttgcaatcaaggggtcctcaggctaatcctcttgctcaggtcttggatgcgctcggcgagtctcttccatgcgctacttacgattcatggatggtccacatacccgaaggacaattcttgtcgcgcataggcccgacggagtttttcaaggtcctacaaacattcataggtctttttcttgtctctctctctctctctctctctctctctctcatcactgtctcaacagcacgcactgcaggtcgactccccaggatccccgggtaccgagctcgaattcg

SEQ ID NO: 136976 - DNA, 560 bp, Glycine max
  Clone ID: PAT_MRT3847_9469C.1
ttcccgggtcgacccacgcgtccgcgttttggtcatgacacacttgttgatgccatgcttaaggatgggctttgggatgtatacaatgattgtgccatgggaatgtgtgccgagctttgtgctgacaatcatgccctcacaagagaagaccaggatgcatttgctatccaaagcaacgagcgtggaattgctgctcgtgacagtggtgcttttgcatgggagattattccggttcaagttcctgttggtagaggaaaacccccaacattaattgagagagatgaaagcctggataagtttgacccagtaaaactaaagaaacttcgcccaagtttcaaggagaatggtggtacagttacagctggaaatgcttctagtataagtgatggagctgctgcattagttttagtgagtgggcagaaggctcaagagcttggccttcaagtccttgcaaggatcaaaggttacgctgatgcagctcaagcttcggagctttttacaaaccactcagcacttgcataccaaaggctatcgcaaatgctggattagagtcatcccat

SEQ ID NO: 136977 - DNA, 193 bp, Glycine max
  Clone ID: PAT_MRT3847_946C.1
aaattcacatgatgtgatggttaaatgatactgcctgggcgaatatcagtgccgggtacttaaagctgaaactgcccttagagagaaggaggaagagaatgacgtacttcatcatcgtcttcgacaatatgacagctgatggtctgagtatgaatcaaaaatgaaatccatggaagaagtgtggcagaaacaa

SEQ ID NO: 136978 - DNA, 458 bp, Glycine max
  unsure (1)..(458): unsure at all n locations
  Clone ID: PAT_MRT3847_94700C.1
atctcctgtattcggcccccctcccttttgagttttggtttggataaaacaaatgtgacctgccaaccgcccaaagcacaaaaaccaaaaaggacangggggggggaaagggtgcattaattggggttttatgtgaagccttatagtantattacctntaccgcctcccccaccttcaatcttccgatgagggatatagacacttacttcggtcaaggggaaaccctgatcctagttcggcacgccaggccctaaaagctcaccccctgaaacccaaaagggatcgactctactaacacttccaccatttgggaatcgcttgacctcctgacttgctcccgaatgacaatgcggctatccctactgacaccgtccacatgcctcatgacttacccgctaaaagtagtgggcttatntcggagcatttatcgctttttgaatattccgctttcttatgc

SEQ ID NO: 136979 - DNA, 340 bp, Glycine max
  Clone ID: PAT_MRT3847_94701C.1
gatgccactatacacatcgtctatttgtctccttacgtaattgtttctttcatgaaagtggtccaatcttactatcttaattctttccatattgtctttgacgttttagcctctctctcttttcttttttttttatctatattgtattgtactaaggtaagctttccgtatcatattttgacgcgttagcctatttttatatttgttgtattgtattatattgaacaggagacttgtgtcgcatattggtgttattgtagacgttcatcatacaggtggtattatcaagttgaattcttttcagagattgatttgtttcttctatctgctctttgccaaa

SEQ ID NO: 136980 - DNA, 725 bp, Glycine max
  Clone ID: PAT_MRT3847_94702C.1
tttttccatttcccaaatccaaccagtaaaagaatggctggccagaatcggttttgcaccattcttcatagtaataatgcaagttatgcccatagcggtggcgtggatcaatagcttcaatccaatgttgaaaagccaatttttgtgctttggcgtccaagtacaaaccctttcccaccttggaagcgttgagtttgaccctactccaccgtgacgcagcactctcaggcaaattgaagaacgagatggtgctgtggtttagcctcgcgaaatcaatcacttgccaccagagctcctcggcgacgacggcggaatcagccagcctccgccgtgtgcggtaactccggtagaccttttgcaccttgagggccgcggtggtctgggggcacgcgcgtcccagcgtgtgaggctctggcggcgcgtgagtgggtgtttggagtggcgggtcatgaggggagagtgggaatgtcgggtttgggtattcggagctccgaaattggggttgatgaatgtcgaaggtggagagagtgtgagtttgaacttccatttagtcaaagaaaagacaaaaaacagaaacagaatatgcagaatcgaattctgaggatgtggtctgaatcacacagagaaagagagggttttgtttctgaacagtgagtttgatcgttggacgatgtcggaatgtgtagagtgtagagtgaagagagaagaactaagaagctcgagcc

SEQ ID NO: 136981 - DNA, 792 bp, Glycine max
  Clone ID: PAT_MRT3847_94703C.1
tccatatattattgttattttttttttttttttttttttttttttatttttcttaaatttcatcacatggtgatcatatatccatttattattgttattgatttgcctcacattatacaccatggatacttctcaaagttcatcacaaagtcaaactgttcacatttcacagaacagaacaccgactgcttaattttgtataatatttcaaaactcaatatacagctaatggaatacaaggaaagatacagaaaataattaactagtgtgatttccaaggtaaacactgcaagttattgcaagattctgtccatgtactagtgcaggcacctccaaccccatcacaacacttgcatacaagtccaagcgttgcaaaaatctttgagtacccttgaccagatatcaaggaaagagcccttccttctattactgatggtttctctgcaattgagacaaccatgatgatcaacagcataagcacatgaggcttagtcacacccatatgatatgttaatggcctaattaaactctctattgtgcttagctgagcttctaaaacctgagaggttcaagagccatatggatcacaaagaaattgggagctttaaaggacaaaactgggaggaaagggagttgcgtagaaagtatgtgagccacatgattggtattattataattcctaaagtatgaaataggagaagtaatagtggatgtgacgtgcatagtgttgttattgtagtaacgtttaatctatgcgctgtctggagaaaaaagttggcatatggtcttcca

SEQ ID NO: 136982 - DNA, 388 bp, Glycine max
  Clone ID: PAT_MRT3847_94704C.1
ccggaccggaattgaagtgttccggcccagcgcgacccgtcacgtccaatccgatcatcaatcctaactcgaggattccaatctcgctcagttcctcgcattcccatacacaaataatgctctttatttttctgcgttgcttcgagtggatttcgcataatcatattatcatattcttcattacatcctgggatatgagtgcagaaggactcttgtgaaggttggaaaaacgaaatctgaatgtgacgtatgaaccacgggtgtaagaagaacttgatgtgatggaaccccacgatgaataagagatacatagctgtctgatcaagctaagaagcaatccggaaaggcaaaaggataaggtttacattgattgtagagctgggtttgg

SEQ ID NO: 136983 - DNA, 233 bp, Glycine max
  Clone ID: PAT_MRT3847_94705C.1
ctctcctgctttccagctaccaagctgccagcacagcggatgtgcacgtttgcagagactcttgatctcctcatgcagccggggagcaagcacgtcgacctaaatatcgacgtcaagctcgacattgatcctgaattgctctatccgttcatgaggtgggagattgtgtctttcccaggctggtatacgtatcttgttccgagacatatttcttggcctctggcacgcctagc

SEQ ID NO: 136984 - DNA, 410 bp, Glycine max
  Clone ID: PAT_MRT3847_94706C.1
ccacgcgtccgaaaaaaaaaaaaaaaaaaaaaaaaaaaaaaaaaaaaaaaaaaaaaaaaaaaaagggggggcgctctataaggagcccagctgttacacacgcgcatgcgccacgatatatcttttatatagggaccccaatttacttttctgggcgcgggtttatacaacggcgagtgggaaaaccccgtggtgtccccaatttaaagccttgtggaacatatccctttttccacagggggtaatatcgaaaaggggcccaccgagagcgcttttccaaacatgtgcacactcaatggggaatggggcacgccctctgtaggggcatataaagcgcggggggtggggggtttacgcacagtgtcacttatactttgtggagccctatagccccctcctttttctttttt

SEQ ID NO: 136985 - DNA, 365 bp, Glycine max
  Clone ID: PAT_MRT3847_94707C.1
gagactacaattgcactaagcctggaatgaacaccggatttgattttactattgattcaatggacccgaaaacgagcggatgacaaacggacttgcggtcaacataatcactgcactcacttagagctgaacctatacctactccatcgatctactttgacgacgccgacgacatgatgttctttatcaacgagaacaaatagaacgagtgccaaatgcacaagcctatagtcaccacacttcactacttattgacccctaatatcttcaaactacttcttctcaagaggacatatcttcaccacaaagaaatcaacatctgcagtcgtggtacaaatcactgctagagccttgaacatgccatc

SEQ ID NO: 136986 - DNA, 282 bp, Glycine max
  Clone ID: PAT_MRT3847_94708C.1
cctttaagatctagaattataacgggtctagtgactccttcccctatcctccgtattccaggtcctcgtttttacgccaaggcgtcgattaatccaggagcgcggagtgctaggcttatgagggcgcttcgcctcatgcgaaggatgagtcggcgtccctcatatggattaatgagtaggccggagagtctttgcgctttatcgcgggcggatcggagagtctctccaaggaggtactatggtaacggtaaccgtaatggttttaataatgcttatacttaa

SEQ ID NO: 136987 - DNA, 453 bp, Glycine max
  Clone ID: PAT_MRT3847_94709C.1
cccacgcgtccggaaacaaacgctcactcactcactcactcctttgtttgttcttttctcccttggcttcctcatccatcaacgctatcattagcaattaagaaaccaaggtacataactcacacctccaccaccacctcttcaaagtttgattttttcttcacaattcaacttcccccaaaggacacgatgagctactagtactagtgcgtggtggtagctagtagtatttctcaagaaaaaaaacctaagcttttatagtttatataatagttttgtgctactactactactacacgttctcttgtccctttccttcttttcctctttttttttttttttttctgccttagatcttgcactcactcaccaccttgcagttttcagacatggggtttctcttcttcttcttcttcttcttctcctccttctttttcttctctccaaccactt

SEQ ID NO: 136988 - DNA, 897 bp, Glycine max
  Clone ID: PAT_MRT3847_9470C.1
tggggtcgacgtttctattactgccctttcgttgactctcttgttctcactgatccgcattgccggtcaaagtggtcttatttgaaaaacacttgggcgttggtgcaaatgtttgcttcggtaattttctctggggacaacaggctcactgagaaaacaatttttacttgcagagatttggacatcttggttgttgattatacactagcaactcaatttagaaaatgcctaccgcattacattagggggcatctgtataccttgttgatttacattctcccatcttggctgactgctgaaatgaaatataagcgggatctaagtaagatttatatttccggcttattttacgacggcagatacaaattgtggactaaacacgagaaaaatcttgctttgacagaagaggaaaagatggaagtgattagaaacaaaggcattcctgctgatgttcttgcaaagcgagctcatgaatttgaaaaacatgttgctcacgaaagccttaaggatcaaattcctgctgttgacaagttgtattctactaaggttaataagtttgtaaaatttatgaaccttatacaaagtgttgttggtgatcttaaacttcttactgatgggaagtttgtttagggtaagcatattcctgtatctaatattagtgcaagggagaatcattgtagtttaaatacccttaattggcacatgaggaaaatctgtcttcttatgcaagtgattttagaaccgctatggtgaattaaaaatatcatgcctcaagcttcttgacatgcatgtgggagcttttgtaaattaataattgattgttttttaagtcctgacctttaacataaatggttccaaggctcttgtttgaacctataataccaatcctaaattcat

SEQ ID NO: 136989 - DNA, 261 bp, Glycine max
  unsure (1)..(261): unsure at all n locations
  Clone ID: PAT_MRT3847_94710C.1
tgcaggggtgtcaacttggtctacccaatccnnctgtcactgtgaaccccggcattannaccactgcaaggggagtttcggaccccagtctgtgtatcttcaaactaacgtacaatagcctgggaccgaaaccaattgtgatttactggtgttggnnaccgtttgttggaagctgcggttggcttgcaatctaccatcaatacattncttagaggttctgcaatcaaagctcttggatccttcaggagcaacgcttaatta

SEQ ID NO: 136990 - DNA, 393 bp, Glycine max
  Clone ID: PAT_MRT3847_94711C.1
ctaattaggctgcggacgtccttcctttataccttttgatggatgatatggttgagtacttccgtgaacaattgccaggctttgccttcaccgtttatgggtggcagcaaccctatggattccgttgagtgaaaactcccaatgactaccgcgtggtgaggcaacccaaagtcttccccgtcttctggtcatctctggctcagagctttaccaagcgcccaatgaagggaatgcttaccggtactgttaccaatttgaactggccctctgttacacatttgcaaactatagcggtgagcaccttcctcatgcttctgtggatcaaggacgaattggtagaccttgttaaggttagcctcaccgtattacacattgtgtaagttggtttgagag

SEQ ID NO: 136991 - DNA, 254 bp, Glycine max
  Clone ID: PAT_MRT3847_94712C.1
caaaaggaaactatttttttgcaaagggaaacaccaacacgtcctttgaattggatgcaaaaatgagcagacttgcgttcaatcacagtatgctcagcattatcaagggttctagagtaaatatgatgtccaaaacgaattacaaactagaatacgcactgtctgaccaaccatggcttgataggctaacctagcacgagagcgtctcaacttttgttaaatgtttgaaaatctacaatatcagcagggcaggg

SEQ ID NO: 136992 - DNA, 323 bp, Glycine max
  Clone ID: PAT_MRT3847_94713C.1
ccaaggaaagcgccctttttaaacttaaaaaaaaatcaattcaaaatttattccacccaatttactggcaattcatccccaacaattgttacagccccgcttgttgcaattttaacagttaatgggagtttccccttatttaaaccaacccaaccctccatatgtaatattctttccatggcccttaacatttttttgttgccccaatgttcaaccccagctccattttttgaattctctttgaaaaccctcaacttaaaattttttttctcccacattaaaaggataacaaacaaacttttcccatgttcctcccccccccc

SEQ ID NO: 136993 - DNA, 387 bp, Glycine max
  Clone ID: PAT_MRT3847_94714C.1
ttttttttttttttttttttttttttttttttttttttttttttttttttttttttttttgaaccaaactaaggggttcgtaccttttacctaaaaaagcaaatttttggaaaacaagttgggggggggcataaatttgagtaaatatccaaggtagcaccttttccaatccaccaccaaaacctaaggtctccgaggagttgggggaccatcacctttctccctgcgggagttcccctacttgcccagggctttcccctatttataacaaggggtttggccccctttttgggggaggacccaggacccccttccttccaagggaagctaaaaaaacaacctttggggccttttatccgattttgccgggaaaaacccccccagggc

SEQ ID NO: 136994 - DNA, 223 bp, Glycine max
  Clone ID: PAT_MRT3847_94715C.1
ggaaaaaccaagatgttcccattagggcttcaaaagaaattgagccaaccaaacctgtttcgtatgggctttgccaacaactttaacacttgctttaaaaagagtccaaccaccccaattattaaaagcccatttaacttgaaaccacctttaataaaattggggatttactataaccactaaaccctaacagccctccaaaaaaatgggcctcgtggggttt

SEQ ID NO: 136995 - DNA, 466 bp, Glycine max
  Clone ID: PAT_MRT3847_94716C.1
caaaaaagattatgttctttttattggcataaaaaaaatccttttggtttataataaaacaggaaaaaaatggaaccatcaccttaaatttcacagtaaagagaacgttaaaactaaaactccccaattatgtttacatattaaaaaaggcctttttcttttttaaaaaaaggccccccatttgccaaccattctatatacccccttaggcttactctcttgcgccacatgacctgcccccttcacaagggcgaaagttaggggaaactcactttttttggattcctcggcatatcaataaaaaagaaatcgcatgtttgtgtttgtaaaattatgaaggtattgaaccacccttggaacgtcccatgtttatgcagccctgccattgcatcgatggaagggatcttttgttccctctctaacttgaagagccttctgaacatgtggatcatttgcccataattct

SEQ ID NO: 136996 - DNA, 253 bp, Glycine max
  Clone ID: PAT_MRT3847_94717C.1
gaaacccgaaaaaggagggaggattatgaaaacataaatggaacactgatactaacaaaaattgaatatgggggaaaaaaaaatacaaaaaaaaggcattataaacgctactaacaaaaaacgcattatatttaatcttaattaaactactctatcttgatgtcctgagaattagcctcggcaccgttcacaggggacagaacatcattaactttagctgcatcctagtcagagataaatccaagcttgaaca

SEQ ID NO: 136997 - DNA, 445 bp, Glycine max
  Clone ID: PAT_MRT3847_94718C.1
gatgtgagggtccagttgtctcattctcattttttgtaatattattttcaaatggctcaagactacaaacctttcctgaggctttaaagaacatgtccgcaaagccttgttctttttcctttcctttcctcggtctacgagcttttttactcctgcccaaggcccctcattaggaacttgttcattatccccaatattctctattgcatccttctgaggtggtttctctccattccatgtgttgggtttgtctttgtcagggcaaccctccatgtagtgtcctaatcttccacaagtaaggaaaagaaaatgaagctcttcatattcaattttgcagtacatgttgttcaattcaaaaagagctaataagggttgtgtgagatcaacctctacacatagtctagcacatttccctctttcctgatacagagtggttcgtcaacac

SEQ ID NO: 136998 - DNA, 405 bp, Glycine max
  Clone ID: PAT_MRT3847_94719C.1
gacaacacatcacatcacagcacacttacacacgactaagggtgctcagttacgcattgctacgcgatggacaaaatggaactggctgagacacctatacctttgctttcactaaaccacgtttcttttgcatgtaagagtgtgagcgagtcagtgaaattctattaggatgtccttggatataagctcatcaagatgtcatcttctttcaaatttgaaagggcctagttattcaattatgtcatatgcattcacctgttagagtcagaaaaggtttctgagaaaaataagagagatcaacccaaatgataatcatatatcgaattcaatgcttagacatgaaagttatgatgcataaacttgatgcaatgaacattgagtatgtgacagcagttgctgaataaa

SEQ ID NO: 136999 - DNA, 438 bp, Glycine max
  Clone ID: PAT_MRT3847_9471C.1
ggcattaaaaaggaggcccaaaaagccatcgcacctttatttaaaaagaacctggaaaaaaacaaaacaaaaacccaagggggggccaacccgggcggcacccaaatgatttagggaacaaaaattccaatccttatataaaaaaaaaaaagcccaaaaaaagcccccttaaaatttgggccttggtataaaaaacctccaaaggcccaaggggcacaggtagcccatgcccttggcacaaaaatttgggggcttggtgaacggggacttttaaaaagggaaaaaaacccccggttccaaattaacaagggcccaattttctttgaattcagaaaaaaccattccccccccaataaacacaaaaaaaattcttggctaccaaaaaaaccccatttttttggggaccataccccacaagggggaaaacctgatttaatt

SEQ ID NO: 137000 - DNA, 961 bp, Glycine max
  unsure (1)..(961): unsure at all n locations
  Clone ID: PAT_MRT3847_94720C.1
aaaacgtaactctcaatttcttagcccccttcccttcctttccctcgttgactttgtaacataatatctttcagtagccaaaaaaacaaccaatacttcattcctagggaatctcattctcatccatcaccatggctaacataaacacttttttcaacccctttcaatccaaaacaatcttctagcaagcactttttcatggtttcatcatcatcaagatgaacaacacaaccgattccggattcctcggctccaacaacaagtggctttggcatggggataggaatctcaattgggattcttctcctcatcacaaccatcacactcacctcctacttctgcacaagatcacaagtgccaactcctccaaggagaagaacaacaagtaattccaacccacaattccttgagccacaccacacaatagttgatgttggcctagatgaagccacaatcatgaactaccccaagatgctctactctgaagccaaactaaggaaatttgattccacttcaacaagctgctccatatgtcttggagattacaaaggttctgattttctaagggtgttgcctgattgtgaccatgtcttccaccttaagtgcattgacccttggttgaggctgcatccaacatgtcctctctgcagaacatctccaattccaacacctctgtcaactcctctggctgaagtggtccctttagcaaccaggcgagattaattcatagtttgaaatgttcgttttaggtctagcatctcttgatggaggcaatcctgttcgagcctgatataatcaccatgggatagtttgaaatgtttttgcgttgtagtattagtacactaagtttgaggtttatcaaaatttcataaagtactctattgattgattctatattgtaaattcttctcttgtatcntttttaaaaanaacaaaaaaaatgttccacccccnacccccc

SEQ ID NO: 137001 - DNA, 513 bp, Glycine max
  Clone ID: PAT_MRT3847_94721C.1
tcttggtgcctatttgattggtaacatgacagctttgatagtcaagggatcaaagactgaaaagtttagggacaagatgacagaccttatgaaatatatgaacagaaataggctcggaagggatatccgtgaacaaataaaaggtcatgtgcggttctttatgagagtagctacactgaggcttctgtcattcaggatatccctatttctattcgagctaagatatcccaaacattatatttgccgtacattgaaaaggtttctctttttaaaggatgctcttcagaattcatcaatcagattgttattaggctccatgaggagttctttcttccaggggaagttataatggaacaaggaaatgttgtagatcaactatattttgtatgtcatggagtactggaggaagtaggcatagctgaagatgggactgaagaaactgtttcacttctgcagcctaacagttcattcggagaaatatctattctttgcaacattcctcagccatatact

SEQ ID NO: 137002 - DNA, 729 bp, Glycine max
  Clone ID: PAT_MRT3847_94722C.1
ctcgagccgcgcgaggcacgtggaaactagagagaacgtcgccatcaagattctcgacaaggagaaactactcaaacacaaaatgattgcgcagataaaacgagaaatatcaacaatgaaactgattagacacccaaatgtcatacgcatgtatgaggtaatggctagcaaaacaaagatatacattgtattggaatttgtgactggtggggagctgtttgataaaattgcacgcagtgggaggttgaaagaagatgaagcaagaaaatactttcaacagcttatatgtgctgtggattactgtcatagtaaggatgttagcaatttaacaatttattagtggtggtgttatgttgatttgaacgtttttgtacccttttggatggttttaacaacgtttggtaattacttgttatgtttcataaatattatgtttggtttcataaatattattaattcattatgtttcaaatggtgggaggagtttaattgctgatcagtgattattttttatcggctattacttgttagtgttaccaaaaggatagtacgaagtttcttcggtactagagtttctaaaaaggtttcatttggcatcacttatagaacaatagtattatttaagaatttaattatacaaggagcgagatacattaaaagataagtagataatggatagtggctgccgtaaaataattttttaattttcgacaatgtttattgaggttg

SEQ ID NO: 137003 - DNA, 346 bp, Glycine max
  unsure (1)..(346): unsure at all n locations
  Clone ID: PAT_MRT3847_94723C.1
taaggatgctagcaaatctaacaatttattantggtggcgttatgttgatttgaacgtttttgtgccctttgcgatggttttaacaacgtttggcaatacttgttatggttcataaatattatgtttggcttcataaatattattaattcattatgcttcaaatggcgggaggaggtttaattgctgatcagtgattattttttatcggctattacttgttagtggtaccaaaaggatagtaccaaattttctcggtactagagtttctaaaaaggtttcatttggcattacttatagaacaatagtaatatttaacaatttaattatacaatgagcgagatacat

SEQ ID NO: 137004 - DNA, 252 bp, Glycine max
  Clone ID: PAT_MRT3847_94724C.1
gaaacatggcttccttaagctccttagtgctgctccttgcagctctaattctatcccctcaagttcttgcaaactatgagaatcccccagtgcacaagccgcccactgcgaaaccacctgtttatacgcccccaggtgagaagcctcctgtttacaaacctacagatgaaaacacctcaaaatacaagcctacagctgagaagccacctgactacatgcccacacttgagaagcgcacagtgcacaagcccc

SEQ ID NO: 137005 - DNA, 1320 bp, Glycine max
  Clone ID: PAT_MRT3847_94725C.1
ccacgcgtccggaagttgtgagcatagctttcttgatcacttcatagtaagcactatagaaaaaacgacattcattcatctatggctacccttattgctcccagcaaccactctccccaagaagacgctgaggctctcagaaaggcttttgaaggatgggggactgatgagaaaactgtcatagtaatattgggtcatagaactgtttatcagaggcagcaaatcagaagagtctatgaggaaattttccaggaggatcttgtgaaacgcctagagtctgagatcaaaggagactttgagaaaagccgtgtaccgatggatactagaacctgcagatcgtgatgctgttttggccaatgttgccatcaagaatggcaaaaactacaatgtcattgtggaaatcgccactatcctctccccggaagagcttttggccgtgagacgtgcttatctcaaccgctacaagcactccttggaagaagatgttgcagctcatacctctggccatctacgccagcttttagtggggttggtgacctcatataggtatgttggtgatgagatcaatccaaaattggcacaaactgaggctgaaattcttcatgatgctgtgaaagagaagaagggtagctatgaagagaccattagggtcttgaccacaaggagcaggacccaacttgttgcaactttcaactgctacagagagatccatggcacttccatctctaagaaactggtggatgaaggatctgatgagtttcaaagggcattgtacactgccattcgtggcatcaaggatcctattaagtactacgaaaaggtggtgcggaatgcaatcaaaaaggttggaactgatgaggatgcactcacccgtgtggtcgtgagccgggctgagaaggacttgaagataatctcagaggtttactacaagagaaacagtgttcttcttgagcatgctattgccaaggaaacctctggggactacaagaagttccttctcacactgttgggaaaagaagactaaaaacttttcttcgagggcatttgtgattatgagtttaggacagtaagctatacttgtgtgtgatggtttcatgtgtgttggttttccttgagtctgttttcaattttccttgatcatgagaacttggagttttatcttatagagtattaatatgatagctgctttgtggcttttaaattgaacaggctcaaaataaatgatatctcagtgcccattttattttaaaaaattgatttgagttaaacaatgttgagatgtacgtctaatttaatttaaactataaagctttacattgg

SEQ ID NO: 137006 - DNA, 571 bp, Glycine max
  unsure (1)..(571): unsure at all n locations
  Clone ID: PAT_MRT3847_94726C.1
gtgactgtgaaaaggaaagaaaatcaaagtaataataaattgtctgaaaaaagctacaaaccttatcatcggatttcaaggcatgaattggtacatagctttcttcatccctgtacccaatagaaaaattacagcatgtaaccatacaagtatacgctattgtagtataaatagagaacttgtgaccatagctttcttcatcacaacatcatagtaagcactatagtaaaaaaaggacattcattcatctatggctacccttattgctcccagcaaccactctccccaagaagatgctgaagctctcagaaaggcttttgaaggatggggaactgatgagaacactgtcatagtaattttgggtcatagaactgtgtatcagaggcagcaaatcagaagagtttatgaggaaatttaccaggaggatcttgtgaagcgcctagagtctgagatcaaaggagactttgagaaagccgtgtaccgatggatactggaacctgcagatcgtgatgctgttttggccantggtggcntggngagggggggaaactacgagggggttggggggggg

SEQ ID NO: 137007 - DNA, 2336 bp, Glycine max
  Clone ID: PAT_MRT3847_94727C.1
tgggactgcgggtatgacagcggataagcaaaataacgttaacttaagaaagagaagtagtagcagtagcagtaggaagaggatgatcggcgtcggaagcatcgagcagttcattaactccctgtaagcactatagaaaaaacgacattcattcatctatggctacccttattgctcccagcaaccactctccccaagaagacgctgaggactctacaaaaaagatggacaattcattcatctatggcgacccttattgctcccagcaaccactctccccaagaagatgctgaagctctcagaaaggcttttgaaggatggggaactgatgagaacactgtcatagtaattttgggtcatagaactgtgtatcagaggcagcaaatcagaagagtttatgaggaaatttaccaggaggatcttgtgaagcgcctagagtctgagatcaaaggagactttgagaaagccgtgtaccgatggatactggaacctgcagatcgtgatgctgttttggccaatgttgccatcaagagtggcaaaaactacaatgtcattgtggaaattgccactatcctctccccggaagagcttttggcggttagacgcgcctatctcaaccgctacaagcactccttggaagaagatgttgcagctcatacctctggccatctacgccagcttttagtggggttggtgaccgcattcaggcatgttggtgatgagatcaatccaaaattggcacaatctgaggctgaaattcttcatgatgctgtaaaagagaagaagggtagctatgaagagaccattagggtcttgactacaaggagcaggacccaacttgttgcaactttcaaccgctacagagagatccatggcacttccatctctaagaaattggtggatgaaggatctgatgagtttcagagggcattgtacactgccattcgtgccatcaatgatcctattaagtactatgaaaaggtggtgcgcaatgcaatcaaaaaggttggaaccgatgaggatgcactcactcgcgtggttgtgagccgggccgagaaggacctgaagataatctcagaggtttactacaagagaaacagcgttcttcttgagcatgctattgccaaggaaatctcaggggactacaagaagttccttctcactctgttggggaaagaagactaaatattttttctctgagggcatttgtgattacgagtttaggacaccaagctatacttgtgtgtgtgtgatggttgatggtgttaatctgtgttgattttgcttgagtctgttttcagttttccttgatcatgagaacttggagttctatcttatagagtggtaatatgatagctgtttggtggcttataaattattattaacaggctcaaaataaaagatatctcagtggccatttgaatttttaaaaaaactgattttgagctaaacaatgttgagatgtactatgtttaatttaatttaaagtacaaagctttacattggaacgtgttttacaagcccctcaccaagggcaggctcgaggttagtttgagtgcattcgcgttcttgttctcggagcttgttcagtacaaccaaacgcaggtcgacaacattggcgagctcgcacgaagactggaggatgctggatatgcggttggggctcgagttcttgagctgctttgccacagagataagggaaacagaagagagacacggctgttgaatattctttcttttgtacacagtacagtgtggaaagtattatttggaaaggtagctgattcactggagaaaggaactgaacatgaagatgaatacatgatcagtgaaaaggagctcctagtaaacaaattcatttctatcccaaaggacatgggaacgtttaactgtggagcatttgttgctggaatagtacggggcgttttggatggtgccgggtttccagctgttgtaacagctcattttgtccccatggaaggtcaacaacgaccacggacaacaattttgataaaatttgctgaagaggtgttacgaagagaagcaagattaggctgatgcttataccaagaattttcaattaaaaatattttaatgctgtacaccaatatagaaagaagtggaacttgcacctatggatgtgaaaaagtaatttaggattttcaccagcctaccctattgatttgtcaattgaactcatgcttttcattctaatgtatgttctgctttggagtcggggagttgttctttctgatttacattgtacaaaaaatctcgtgttgttaatttccatttgtctcactcctaatataattgagcatcaaactgaggaattg

SEQ ID NO: 137008 - DNA, 384 bp, Glycine max
  Clone ID: PAT_MRT3847_94728C.1
gtctcattcatcaccactacttgaactatataagtcgacacattcttcacattatgccttctccattccaccagaaatattcttcccaaagccacaaggtcttcggagacaatacagtaccagctatgcctgaagcacccaaggacgatgctgagagacgaggctccgacgcttctgtaacccgctcttcttatgatggccgtcgacgatcctccgccgcacaaagattcggtaatcttgaggcactcaagcgccctcaagatgaacaaagcgctgcccgtcgtgcatccctccacgactcgtacggcaaggtcggattcattgggtcaatgtggaacaacttcactcgtggtcctgctcccaagatgcaatcaccacccaaag

SEQ ID NO: 137009 - DNA, 416 bp, Glycine max
  Clone ID: PAT_MRT3847_94729C.1
ggttattctttttttaatttttttttgcttttttaacaaacaaaaaaatctttttttacaactccgatatctgtttctgaacccaaagaatgaaatccatctgaaatgatggtagcatgcatgcatgcacttgggtttgagaaattcatgaatttgccccaaaaaacaaaagggctaaacggttaactgtctaccctgcctgttggcaagttatggaacacataatactgtaataccccttttgcgggaatcttcccaaatgacacaaggccccccgacccaaggaatcaggaccttcaaaatgtcccaaagggggtggttctatttgtggccagaaagatcaattgtactcaaagacacaggtgaggcctcccctggcaaaataaatgtcccatcaatcaatctagggttcttgc

SEQ ID NO: 137010 - DNA, 752 bp, Glycine max
  Clone ID: PAT_MRT3847_9472C.1
ccacgcgtacactcactcactggtcattttatgttttttctctctaccctcattcattctcagtctcaattttgttcaacactctcagagcccttttctgctcccacgcatatgcataccgcacaaccacgatcacctttcgagtaatatggagatcacgagcagccataacagcggcagcatgatgtggtttttcaaagataagggctttgatgacaacagtgcacaaggaatgttccgaaagtgccggcgcctcgagggtgtgcaccaagaaagagcaagtgagaattgggactatttgagaagcattggcattgaggaaaggaagctaccctcaattgtttcaaaatgccccaaaattcttgcattggatctttatgagaagattgtgcccactgttgagtgtctcaggacattaggaacaaaacctaatgaggttgcttctgccatagccaaatttcctcacatactgtcgaacagcgtggaagagaagctttgtccccttttggcgttctttcagactctaggtatccctgaaaagcaaattgggaaaatgatactgctcaaccctaggcttgttagctacagcattgcaacgaagctgacggaaattgtgaacttccttgccaaccttggtctcaataaggatggaatgatcggaaaagttatagtcagagacccatatattatgggttatagtgtcgataagaggctccgccctacttcggagtttctcaagtcaatagggctga

SEQ ID NO: 137011 - DNA, 332 bp, Glycine max
  Clone ID: PAT_MRT3847_94730C.1
gcagcttgctctccgtagacaacgaatcaaagtcttcttcttcttctttctattcttcactcaagttctttcattgttcgttagggttagggatgcgtcggaacagccctgcatactacagtcctccgcggcgaggatacggcggtggtggccgaggaggaggaggaggaggaggaggaggagggtccggcaggagggggttcggtggaggcaggcgcagggacagcaatgggagcctcttggttcgtaacattcccctcgattgcagacccgaggagcttcgcgtccctttcgagcgatttggacctgttcgtgacgtttacatacccaag

SEQ ID NO: 137012 - DNA, 789 bp, Glycine max
  Clone ID: PAT_MRT3847_94731C.1
acacgaataaacaagaagacattaaaatggtgtgttggtcctagggtttaaaatcgggttgctctccgaagacaagaaacgaatcgaagtctttttcttcttcttcctcctcttacgaactcgcgagatttctttgtcctcactcaagggttagggatgcggcggaacagtccagcatactacagtcctccgcggcgaggatacggtggcggtggccgaggaggagggtccggcaggaggggattcggtggaggcaggcgcagggacagctatgggagcctcttggttcgtaacattcccctcgattgcagacccgaggagcttcgcgtccctttcgaacgattcgggcctgttcgtgatgtttacatacccaaggattattattctggagaacctcgaggctttgcatttgtgcagtttgtggatccttatgatgcctcagaggcacagtaccatatgaacagacagatttttgctggaagggaaatatctgtagttgtggctgaagagacaagaaaaagaccagaggagatgcgccacaggactagtaggttcagaggaccagcaagctatggaggccgaaggtcttctcattacgggcgttctcgatctcgctcaattaccagatcacgctcgccaccttatcactctggttctagaaatcgatatcgctcaaggcaagattctttgaagtgtcttcatgttattgtccactgaagcatgtaatcatgcttttaattgatatttgccaggtcctattcttctgctccaagacgacaaagcgattac

SEQ ID NO: 137013 - DNA, 247 bp, Glycine max
  Clone ID: PAT_MRT3847_94732C.1
aggcgacgcaccgacaccggacccatctccggcgacatttaacggacttcgggcgaatccccggtcccaacttttttccttcgaaaggaatcccgagtttgataatctgttcaggctccttctaatggaagactctggggttggtaaataatgccttcttttgagattggctgatgattcgtccatcgggggctccataggcaccatgggagtggattttaaaatccgtcctgtggaccaggatgga

SEQ ID NO: 137014 - DNA, 260 bp, Glycine max
  Clone ID: PAT_MRT3847_94733C.1
ttcttgcgtacggaaatggccgaatgcttgagggggaccatatctgataacccatgcatggcgttgcgtggaactgctcaaaactgctagaggcgggctgattttctacattgtgaaaatagatccaagaggtattgttggagctgtcaaccagggtgtactctaaggatctcgcgaacgatctaaaagctcctgatacatcatgaaacagaatctggcagctctacacagaaaggaatgcgcgcacaaagagctctcca

SEQ ID NO: 137015 - DNA, 1370 bp, Glycine max
  Clone ID: PAT_MRT3847_94734C.1
ggctcgagccgcactgatacaaatacgaataaacaagacgacattaaaatggcgtctttgatcctagctagggtttaaaagcagcttgctctccgtagacaacgaatcaaagtcttcttcttcttctttctattcctcactcaagggttagggatgcgtcggaacagccctgcatactacagtcctccgcggcgaggatacggcggtggtggccgaggaggaggaggaggaggaggaggaggagggtccggcaggagggggttcggtggaggcaggcgcagggacagcaatgggagcctcttggttcgtaacattcccctcgattgcagacccgaggagcttcgcgtccctttcgagcgatttggacctgttcgtgacgtttacatacccaaggattattactctggagaacctcgaggctttgcctttgtgcagtttgtggatccttatgatgcctcagaggcacagtaccatatgaacagacagatttttgctggaagggaaatatctgtagttgtggctgaagagacaagaaaaagaccagaggagatgcgccacaggactagtaggttaagaggaccagcaagctatggaggccgaaggtcttctcattacgggcgttctcgatctcgctcaattaccagatcacgctcaccaccttatcactctggttctaggaatcgatatcgctcaaggtcctattctcctgctccaagacgacaaagcgattactctgtttcccctgggaggcaagctgagcaccccagatcaccaagaggtcctcccagggagaaggatggtgatcaaaagcgtaggtcttattctcctgcttatggcaatggtatcgaacagaatcaaagcaatggatatgctgagaaatctatgtacaagtctgatgctgatcgtagtcagtggaagtcatcgagatcaccccctggatctagatcaagatctgctgaattgtcaccaaggcgtggaagatgaggttgcaggtagctggcaatgtgctgttaggcttctgtacatttcctgtaacttatcgtgacatttgcaaaatcctgtattttgcttgaagtttgcgaatatgatggatgaatgtataataattgatttgatgtgcgggttttatatttggatattttgaacttttagaacttaccgtgaatgatgaattgttgagtttgttttatgacaatatgttttcaatttgaaaaaaaaaaaaaaagtgcgattagcttgtcaccagtacaaattgcaaactaaattgttatctggtaacaaaaaaaaaaaaaagggggggccgccgattattgacctcgtcgcccggggatttatttcgggccgggtccttgcaggggtaccagtttccc

SEQ ID NO: 137016 - DNA, 858 bp, Glycine max
  Clone ID: PAT_MRT3847_94735C.1
cacgcgtccgtacggctgcgagaagacgacagaagggggtgtttggaggtggaaacttagggtatgatttctgattccccttccttctcgctcgttctctgctttaatccatcagctatccttctaactcatatttcttcactgattcaagatacgatcaagtttccttatcatttgctcctaattacgtttaccctatacacacttttccagttattcaccaaaaccaacaaataacaaatttcaggttgttggagaaattgttctgttggggggatatgatgtcgatggagaaggaagcttcaagctccacacctacgcgcaaattgtcgtgcactgcatgcttcgacgctgtctatttctgctactcgccggttcatcaaatgcagcagtattacaggcttggtaaatttgacaattgttccggcaaatggaaagcgatggttgattgcttaatgctcaagaccaaacccacatctcaagtccaggaagttctggatactgaagagaaatcaaagtttaagtcacatatctggacttttcggacaccagaagaagcttcttactactggcaagaactttatggtcatttggatgagcctgaagagtgaaaatcaaattgtgcaaataaatattatgtattgccttctgattttgctaatgattaggattttgaggaaggggctattagaaaccaaagaaagttcatatcaaattgaagatcctagttagcttgagttttcttattttcttttttgtgtagtcatcactttgaatattgcgttcgaatgacttagcacattgggtttgtaataatcttttaaaattttaatgactgttttaatggttctttcttct

SEQ ID NO: 137017 - DNA, 157 bp, Glycine max
  Clone ID: PAT_MRT3847_94736C.1
ggctcgagctctaatgcaacctactacgaaactttaaatacgaaacacagaccaccacaaatgacaggacggcgcataatccagaaccaccccccagcagacatagccacgaccccgacaacacagctcaacaacagctaggaaggcacattatgca

SEQ ID NO: 137018 - DNA, 302 bp, Glycine max
  Clone ID: PAT_MRT3847_94737C.1
gatgcggtgacttttttctttttcgcggaggcaaaccgagagaccccgagaacggacaagtgtgtccaactacagattaatagaagctcttggatggcgggggagcagggcaaagggaacataagccgtgaactgggagcggcataagggcgtggccaggcaggtgagcaagaacggcggaggactccccggaggagagcggtggcaacctggaagataatgcagcggcggcaaaaaagggcgcggacgaggagaaggctgcctgggccaacagggaagaacgcgagtgcagaggagaggcc

SEQ ID NO: 137019 - DNA, 352 bp, Glycine max
  Clone ID: PAT_MRT3847_94738C.1
atccaacagccgaattggacgtaaacttcaacagcataacttggtgtataaggttaaaacttgcgccgaaggcagcaattcacaaaattgacaatataatcaagaaccgacaatgtaacagctacgttacgctgagaaatgcaacaccatactgtacaatgatattttagacgtaaattatccacacagtaataactcccgcaagacccttatttatccttagtagcacaccatctatggtatttaggtgtctgagctctacaagaaactccattgtcaacaaaagacatccatggaatgttgcttcaaagtagtgagcaaagatggtccaaaaactttccaggatcatttc

SEQ ID NO: 137020 - DNA, 923 bp, Glycine max
  unsure (1)..(923): unsure at all n locations
  Clone ID: PAT_MRT3847_94739C.1
taacttcacacctacaaagctgaattcaaccacactttccattagcccttccaatgatatcatcaagtctctatcagctagtgagattgaactatctgaggactacacttgtgtgatttcccatggccccaatcccaaaacaactcacatttttggggattgcattttggagactcattctaatgcatttaaaacccatttcaagaatgaagagaaggagcatggagtgaagccattgggtagcaacaagttagggagtcctaagccatatccctctagtgacttcttaagtttctgccaccattgcaacaagaaacttgaagaggggaaagacatttatatttatgggggtgaaaaggcattttgcagtttaacttgccgtgccatggagatcatgattgatgaggaactagagaaatccaacaccaaccctccttgtgaaagctctccaaagccaaaacttggtgagctgctttttgaaacaggaattctcacagctacataaagaggctttatttgtcacatgcacaccactttgtccatgagaaatggtacacgcacctgatcatctgttcacaattggagctgttttatgtgcatctattagcagccatggatgatgatcgttttgtacatcattgcgtttgcctggaattggtctttaagctatgtcatggtcttttttggtgaattgtggctttcattaagctagttttttttctctccatataaatagagatatatgttatcaaaccattgatagccctgcagaaaattaaagggttgaggcctatttttctggcttccccttttggattttctttgcaattatctctatattgtgtcaatgtatacaacccaaaaaaaaaaaaagttttttgacttcaaaaaaaaaaaaaaaaaaaaaaaaaaaaaaaanaaag

SEQ ID NO: 137021 - DNA, 660 bp, Glycine max
  Clone ID: PAT_MRT3847_9473C.1
gcacgaggctttaggaacgcctttctccctcgtcatggaaccattgcgggaaagtccttcaccttagacctgccgaagcccatgttagtgacctgagatcaaagagttatcgttgtccatgccggagaacatgcttcactgtcgcactcgcttatcatcacaatgtcaccataatgaacgaagaagttgttgtggtttgcttttaacatgcctctctctatagcatctaattaatcttcaaccattgcggggaagtcctccaccttagacccgccgtagctcatgttagtgacttgagatcagagagttgttgctgcccatgctggagaacatgcttcactgtcgcactcactcatcatcacaatgtcacataatgaacgaaggagttgttgtggtttgtttttaatatgtctctgtaccatttaattaatcttctctgcattttgttggtggtggtgtttgaagcaaaatcgttgagaatcttggtgtttttcttcctcctttgtctttctttgtgcttgtttttcttccccttttaaagctgctcaacaataggagcaaaatcttggattacgtttcaaggtagggattgaggcttcaatggggtaattgtaataattttttatggaaatttttgttgctaccttgagtgaatgttaa

SEQ ID NO: 137022 - DNA, 300 bp, Glycine max
  Clone ID: PAT_MRT3847_94740C.1
cccactcgttcggcaagtgttttttgcagacttttttgatcattttgggaccaactttgaacccggtgcctttatttgagtaatttgcccaccaagttgccatctttgcttccatactttgttgttcattttggtgtccccttcactttcacttttttgtttagttttaaggcgggctttaaagctgctgatggctttcatctttactatatttgttacgattttggtttggatcttttattcttcccaataacctattcaacaatctatcaacgcttttctgcgtactggtgggagttt

SEQ ID NO: 137023 - DNA, 326 bp, Glycine max
  Clone ID: PAT_MRT3847_94741C.1
aagagaatggccactttctgattgcatttgaatcgtctatgtaaaatatactacatttattatcccttagattggtaatggacttctacctactggggctgcctttttttttaaatctctattttatacacactcatgtatatccatatcaaagggtcattaacaataaatcatattctttgtcccatcgcggagtacaaacctactaaatcatctggctgccatgatgccgacatccttcaagcattctataaatccatcacagattattttgacgttatttccaattccttggcacctgtcagtatcgatcaccacaactattt

SEQ ID NO: 137024 - DNA, 340 bp, Glycine max
  Clone ID: PAT_MRT3847_94742C.1
cgcacgcgttcgtggatttgagccatcacttttccgaactggacagatggttgggattgggaatcagtatagctagatcttcattatgagaaagaacgacaagcaatgaacgttgacaaggcacacatccactcattcagcattgctaaagtcacagatagaacccgggaccacatacatgcaaaatcaggatactagcaatatgacgagcacactgcacaatccaggaaccataaaatcgtcaaactagcgtactgagatcaccgaatattcaagagcaaattaaactactcgttgcaatataccatcaattgcactaccacaatatgtaatagaaaag

SEQ ID NO: 137025 - DNA, 370 bp, Glycine max
  Clone ID: PAT_MRT3847_94743C.1
catcggctcgaggttgggagactggcattatgggcctttagcgcggctaaggcgcggaagcaacttcatccaccgctttttctcctctttcttcctaagctcaacataggcaaactctcgcagggggtaactgctgctggctctgatcttccagagagtgctgccacgtgctgcccaacccctacacccatgattgtgccatggaagagccagtacagtcatcacgattctgtgtgagacatccgaaccatctggggaacctgctcctttaggacaaaagacgcggaaccatgacagcatgttggtgaatgcctccatgactacctatggacgtacaatggagaacgttcatgatccaccatcatgaaca

SEQ ID NO: 137026 - DNA, 544 bp, Glycine max
  Clone ID: PAT_MRT3847_94744C.1
gagggagggatactgtatctagaaagcgatcgacaccagagtgcagatgccaaatgacaatacagatgccgtatttgacgaggctttcgatagtttcttcatcaagactggagctggaaaacacctgccacccgcagtgattgaagatcttaaacccactgctattgatgaggtgataaccggaaattaccgccagcttttccacccagatcacctcatcaactttaaacaagatgccgacaacaactttacccatagccattataccattgtgaaacacattgtagatctgggcttggaccgcatcagaaagcttgctgacaattgcactggagtccaaggggtattggccgtctatgccgttggtggacgaactgtgtctggacttgcctcccttctcgtggagagattctccgttgattatggcaagaaatccaatcttggtgtcacagcctacccctctgctcaagagtacacctctgttgctaagccatataacagggacctctccaaccattctctcttggagcacaacgatgtcgct

SEQ ID NO: 137027 - DNA, 184 bp, Glycine max
  Clone ID: PAT_MRT3847_94745C.1
ctacgttgttccaactctccccacgcgccattcaacgttactagcttcgaccccctatttcaactgacctcttcgatgaccgaagttgcccaaatctaaactaaacatattgtcactgccgcacttttgtatactttcactaccacctgcttttacaaagtcgtttctttcacacacgaaaact

SEQ ID NO: 137028 - DNA, 549 bp, Glycine max
  Clone ID: PAT_MRT3847_94746C.1
aaaggaggaaatctacgggtttttttttttcctaaattttaaaaccccaattgtttttgcctaaaattcccagaagatagataaagtttatttttttttaaaaaaaaatcctggcaagggttgggccccccctccttccttttggggggggcatttttgactcacgggattagtccaatcaaaacccaaagcgggaaactggaaattgaccctaaaccaagggcagggaagcgccccaaataagctttagccacaaaagccccaatcacgggggcaaatttgggggcggcaaaccaaaaaaacataatttggggtgttttcaaaactcggagcctggaatcccctataaaaaacaaaaccatgttgggcataagcccaaccctaccccgcttagctggggcctcatttgctataatgaaaggcatggtaatgaacccacccttgccccttaatacatggggattcatgggtggcggggccgtctcccatgaactaaagcagcctccatttccttttccatggttagcttaaacttggggggaaaaaccc

SEQ ID NO: 137029 - DNA, 139 bp, Glycine max
  unsure (1)..(139): unsure at all n locations
  Clone ID: PAT_MRT3847_94747C.1
agcgaagtattcaccgcagcggcgttggggagtgagcaatgaggtggatagatatgttaagcactgggaagtaggaattactaattggaattgttgtgttttgcaatggggaattcgagtttttagtntgaaaaaaaaa

SEQ ID NO: 137030 - DNA, 171 bp, Glycine max
  Clone ID: PAT_MRT3847_94748C.1
ctcactttctgcatctacgcaacatttctctgcgggatctatccataaacctcaggactagtatggcatggccaacgagcctcgaattcacaaccataccatacagaatctctatgcactcggctctccgcatgccagaaatacctttcacacgcattttaaaggggagaa

SEQ ID NO: 137031 - DNA, 219 bp, Glycine max
  Clone ID: PAT_MRT3847_94749C.1
gccacacatacgtccacacattcgaaatttaaagcgcttgcatcatagggctccgaacacatgcttatgtgaaggactgaacaatgcttatcacttcactcactgccactatattctttagcctctctatagtaaatagttaaacatcaaaacggtatgctttattaggcatatccattagagaattatcctttattgcaccctattaatagtctataa

SEQ ID NO: 137032 - DNA, 1535 bp, Glycine max
  Clone ID: PAT_MRT3847_9474C.1
attgtcatgggaagaattatacagaaaagggtaaatgaatagaagggtaatatcaattttcttagaagaaagaagagaaatatcatgttgaattttctccatatgcttatcttggagcgtattatgtcgggcaaacaaagacggaacaattgcattgggccagagtgccatctatgctgctgttttctataagcttcataagattcaggtagctcacattggcactcaacatcattgaggaaaataaatttccagccatgaagatgggcacgtacagcgatatccatatcctccactgtggtcctctccaaccaaccaccagcatcctcaaggctggaaatttattttcctcaatgatgttgagtgccaatgtgagctacctgaatcttatgaagcttatagaaaacagcagcatagatggcactctggcccaatgcaattgttccgtctttgtttgcccgacataatacgctccaagataagcatatggaaaaaattcaacatgatatttctcttctttcttctaagaaaattgatattacccttctattcatttacccttttctgtataattcttcccatgacaatgtttgtaccggaggccgagcttcctgctttggttgtttgttacatccctgccaccatgtcgatacttaacatccttccagcccccaaatccttccctttcattgtcccttaccttctcttcgaaaacaccatgtcggttaccaaattcaatgccatgatctccggtcttttccatctcggaagtgcatacgagtgggttgtcaccaagaaatccggccgttcctctgagggtgaccttgtttccttgattgagaaaggaccaaagcatcatcaaagaggctcctcagcgcctgatcttgcggaaataaaagaagaaatccagctacaagagaaaaaggtggggtcaaagaagaagcataacagaatatacatgaaggagcttgctttggcctttctacttctaacagcttcagcaaggagtctcctttctgctcagggaatccacttctacttcttgttattccagggcatatcattccttttagttggtctagacttgattggtgaacaggttgattgaatctgaaaggtaaaaaaaaaaaaacaagaaaaagataagactctatagcttgtagagagatacattcaccaattatttacacaaaaaacaaaggtggacaagcttgtaccctatgaatcattggaaacagtcacgaggactctgcagaggatttaaagcgcatattttcttcaccatgctacatccactagaccccattatgttactatggacagatggaaaagaggacttgaatttgaatcgggtacaattgaagccggttatggctcctcaatgtgtaagttgaccattttttccccttttcattttgtaactttatgtcgattctttacttgttggattaattcttttgtaagaaaaattgtggattaaatttcaaaccaaaattggcaacatattagaaaaaaaaaaaaaaaaaaaaaaaaaa

SEQ ID NO: 137033 - DNA, 220 bp, Glycine max
  Clone ID: PAT_MRT3847_94750C.1
ggagtagtcatggacaaattgagaaagagaaaaaaaaaaagagagaaaaagaaatagtaatcattgatttcaaaatcagcacatctattgattcaaatttacttagggacctgtgaaaaatctttctctttcacatggtaaaatccatcaactaactaaacatgcctaatcatttctattttgtcatcatctttcaccacttttaaaattgccttttcca

SEQ ID NO: 137034 - DNA, 657 bp, Glycine max
  unsure (1)..(657): unsure at all n locations
  Clone ID: PAT_MRT3847_94751C.1
ctgccgacgaaaaacagaggctcctggcatgggtgtctgcttctcctctggcccgacacagcactcttcttccctcgatcgacctcactattcaggttcagcaagcactaactgcaaaaacgtgggaatcaccaaaaccacgagcagcagcaccgaaaatagacagtttaccgtgattgcgagtggaagcatcgacgacgaagaatctattcattatcttcttcgtcgtgtatatcatcgtccccttcgtcttcctcttcctccaccggatggtcagattctgaaatggccaaacttgaaggttttcgattttgaggagttgaaatctgccacaaacaatttcagctctgacacattgctgggtgaaggtggctttggcagagtttacaagggatggttggatggggataccctcgcccctaccaaagcaggctccggaatggtcgtagccataaaatggttgaacccccaaagcacgcaagggtttgaccagtggcagacagaactaaacattatgagaaaggttctctcaccccaaacctggtcaatntaattgggttaactgttggggacgaatgatgagcactcttcttgtgtatgagttcatgccaaagagaagcttagacaatcatctattcaaaagaaatcgtaacttaa

SEQ ID NO: 137035 - DNA, 387 bp, Glycine max
  unsure (1)..(387): unsure at all n locations
  Clone ID: PAT_MRT3847_94752C.1
gggcaaaaaaaaaaacattttataaataagttttcccccagccattttttggttccaaaggggggttccattaaatttttttttttttaaccaaccgggggaaaaaaaaaaaaaggttgccaagttggtttttccacgaaacgagaaaaaacccccactttgttagttttcacaaaagtttccggaagaaagggaccttttttttttaaactatttcctatttgtggctgtngctgagggggttgtaacccaggatccccgggataactgccatactttgttgggatcctgtccagcagcgggggcttccccttatttttaataaccttgggcagcttacccttagtttccaccaccaaaaccagccccccctttccactggtttgg

SEQ ID NO: 137036 - DNA, 1281 bp, Glycine max
  Clone ID: PAT_MRT3847_94753C.1
actctgtcttcttttttatttctcccccccctcgtgtgtgattttagttttgttccgtgcctctgcctgaaaagagtggaaaaaaagaaaaagcaactccaaagctattagcaatctatctatttatctaactatccatcttcaaatctttctctcaagggaagaagcagcaacaacaatggtggtgaagaagccacggattgtgataattggagcaggaatggcaggtctcacagctgccaacaagctctacactgccactgcctcaaaggacttgtttgagctgtgtgttgtggagggtggaacaaggattggtggcagaatcaacacctcagagtttggtggtgaccgcattgagatgggagctacatggatccatggaattggtggcagccctattcacaagattgcccaagagatccactcactccactcagaccaaccttgggagtgcatggatggcaacactgatgaggccatcaccattgctgaaggtggctttcacctccacccttccattgttgaccccatcacgaagctcttcaacaccctcatggaatattctcaaggtaagaagaacctcactgaggccacttcaaagggtgctgaacttgaaagctatcacaagctggctgctttggctgctaagcttgcttctgcttctgcttctgcttacaacaacaacaaccttagtgttggttctttcctcagacaaggccttgaggcataccaggtttcaaaggagcaagaggaggtgaaagggtgtgggaactggagcaggaagctgcttgaagaagcaatctttgcaatgcatgagaacaaccagaggacatatacttcagctgatgaccttttgactctggattatggtgctgagagtgagtacagaatgttcccaggtgaagaaatcactattgctaaagggtacttgagcataattgagtccttggcttctgtgttgccacctggttttgtccagttaggtaggaaggtcacaaggattgagtggcagcttgatgatgagaagaggaagggtgctgtggaaaatggatgttgctcttctaggcctgtgaagctgcatttttgtgatggctcagttatgtctgctgatcatgtcattgtcacagtttcacttggagtgttaaaagctgctattagtgatgatgatgatgattcaggtatgttctgtcctcctcttcccccttccaagactgaggctatttcaaggcttggttttggtgttgttaacaagttgtttatgcaattgagtccaacacacgg

SEQ ID NO: 137037 - DNA, 712 bp, Glycine max
  unsure (1)..(712): unsure at all n locations
  Clone ID: PAT_MRT3847_94754C.1
nctgcgttactcaaaaaaagcttttaagccaaaaagaggcagtggctaccaagcaacaatcgattggagtgaaagatgagtagcatgaaattttgccgccgctgcaacaacgttctgtaccctacggaggataaggaggagaagctacttctctatgcttgccgcaactgcaatcacgaggagattgccgatagtaacgttgtgtatagaaataagatacatcattctgttcaacggcgcactcgagagctggaaaatgtagctgcagatccaacacttcctcgcaccaagtctgttcgctgctctcaatgcaatcatggagaagctgtctttttcaaggcaccagtaaaaggggaagaaggcatggccctcatttttgtttgctgcaacccaacttgtggctaccgttggagagactaggactcttaatagtcaaggttcaacattggggagttgagcatatcaaattcttcactcttggatggatgagaaactttatttgtatatataaaacttggctagtgtgaggacgttcataattaagtagttgtgatcactgtttaatctccctaaacaattatgttgacgcagttaatggtccaatcctttagtttatgggttatgaaagaaattcgcatttcttatttgagctcccagacatttatgaaagggcaatccttagcatttaaaaaaaaaaaaaaaaggcccccta

SEQ ID NO: 137038 - DNA, 270 bp, Glycine max
  Clone ID: PAT_MRT3847_94755C.1
atgccggggaaattttctttcatactgagactccccctcatgctgagagaatggctactgtcatatctggaggagctggtgcaaagaatgcatgatctggaatttgcgccaattttcgcttgttcgtttcgagaattttcgtggagatcttcgccatgaccctcttgatgagtatgctctccctatttaaaaatccccacacttctttatatcattgtgaaaattggtgaagtgtgtgtctattttaaaaaacataattacatcaatact

SEQ ID NO: 137039 - DNA, 290 bp, Glycine max
  Clone ID: PAT_MRT3847_94756C.1
cccaatggtccgccccgcccgaaacagaagcgaggggggatattttaaacccaaaggcgtggctacttcactggtggaccaatgagcctgcgacctggcttaatcactcgtttcgacctaaggtcacccaatgagccggagaacaatccacagagttaaaaaccgattcaattcccaggacttcgaccagaaagcgaatggatctcaacccggtccccaatcaaacaccaaagagcaacattgatgcacacctagagaaccttaaaattcacaacctgttccaacctttg

SEQ ID NO: 137040 - DNA, 400 bp, Glycine max
  Clone ID: PAT_MRT3847_94757C.1
gtttgggtttagatattttgtgagatgactctagttactgatcgcttgatggtaggtggaaggcgccactcccagcaatgcaagataagccaaaggaagacgccacaagggtgatggattgcccctgataagttcaaacgggttcagtttggaacctagagaatactctcacaatacacaagtatttgtctgaaaattcaagtctgtccattccattgcaattttgtgtacatatagacagctagcctttaattattctaaatgcaccattaactgcaattatgaaggcaaggcttttaatttcccagtggtgcacatgaaaagacaccagaattatcagcccctttaaatagtaaaaaaaaaaaaaaaaaaaaaaaaaaaaaaaaaaaaaaaaaaaaaa

SEQ ID NO: 137041 - DNA, 1833 bp, Glycine max
  Clone ID: PAT_MRT3847_94758C.1
atgctaggtgcacttagcaacactcaagaaagaatcacaccaacgatgagaatcacgttggagccgagctcggagccgagcccaagccgctcccaaactcccaaagaagaactccagtgggtcccacttcccaaacaccctctcttcaccgctcacggcggtgccaccaccgccgctgattcccggaacctccttgcctgggacggagcctcgcgcctctacttatgggactcaaacaaccgctgcctccaccgcctctctctccgtctcggcgaccccgatccctcttccgtcctcgccgcttctccctctaaggtgttgcaagcggacgcggtgcttgatttcgatgtccgcaaaatctcaatcaacaggaacagaacagcgatactccttttcggttccgagacactctctgttatgtacctctacggacgcgcctctaagaaggacgtgaacttgatttgcaggactattactgttggttctcagatgtattccaccggtggcaatgatattcgtgtgctacaagcattatggtacccttacagtgatactcatttgggaatcctttcttctgactccgttttccgacttttcaactttgccgtggatcctttgcaacctgagcaagaatattatttacagcctgttgagcctggtagatctagaaatgcctcatcattgtgtccagttgatttttcttttgggggagaccacttatgggaccggttcagtgtttttattttgtttatggggctttctatgtactttgcccagttgttccatttggaagatatttctaaattcgtgactgttttctctgcttatccacagtctcttcaaatgagacggcctgtctttgctaaagctcatgcttatgctttatttgatgcacctcttgtcttgcagggacctctgcgaagagtaggtcagggtgggaatgaagattcagttggtcgtagtgcagaatgtgaaggtcgtgcagttagttttctctacaatttagtcagcaaagactctattttggtgactgcctggagtggggggaaattacagattgatgctctagccgatgagatccaacctgtctggagtgttggtagtccacctcgtcttcgtgttgattcccatgaccaaattcttggccttgctatgatttgtgagtcaattgccagcagcagtttgtggaagcttgatcataatgcctggttgggtaattcaccccctttgctgagactggctattgttgatttggctctgccacaaagagcagaaagtggttatattatttcattgttcattgatacacttatgccagaaagaatatattcccttcatgacggaaggattgactcaatagttttacattttcttccatttacaagtcagacaaatggcaaggatgatacaatgaaaacaccatctgtgcaccctgttctaaatacttgccagagtggattcacctcagaaccgtcactttgtggctttgtgtcattatcagattcatttggatattcatggattgtagctattactctttctctagagtgtgttgtgcttgagatgaaaagctggaacctcttgcttccagtaagcattgatatggagaagaaaaccatttcatcagagggggaaccaaaagagagagatataccaacaataattagcaaggaactacttagagggaccagggaggtacttgttcctcaggcctctccaagtttacaatctgttgcagctgattcaattgaaggtcgatcaacattacatcagtatttcaagctgtttcatgaaacctatgtggagtatgcacataaggtaggactatcataa

SEQ ID NO: 137042 - DNA, 3011 bp, Glycine max
  unsure (1)..(3011): unsure at all n locations
  Clone ID: PAT_MRT3847_94759C.1
gtacgacctcgcaggntatctcggtnccggnnaattcccgggnnntcgacccacgaaatactaggtgcacttagcaagaaggaagaaaaatcacagcaacgatgagaatcacgttggagccgagctcggagccaagcccaagcccaagccgttcccaaactccgaaagaagaagtcgaatgggtcccacttcccaagcaccctctcttcaccgcacacggcggagccaccaccgccgccgcttcccggaacctcctggcctgggacggagcctcgcgcctctacttctgggactcaaacaaacgctgcctccaccgcctctctctccgtctcggcgaccccgatccctcttccgttctcgccgcttccccctctaaggtgttgcaatcggacgcggtgctcgatttcgatgtccgcaaaatctccatcaacaggaaaggaacagcgatactccttttcggttccgagacactctctgttatgtacctctacggacgcgcctctaagtatgacgtagagcgcttgcaacaattaaggaacttgatttgcgtgcacaaaaaaccactgtccagagcagagcgaaagtttaaatctgagcttgatcactttaggactattactattggttctcagacatattgcactggtggcaatgatattcgtgtgttacaagcattatggcacccttacagtgatactcatttgggaatcctttcttctgactctgttttccgacttttcaacctggccgtggatcctttgcaacctgagcaagaatattatttacagcctgttgagcctggtagaactagaaatgcctcatcattgtgtccagttgatttttcttttgggggagaccacttatgggaccggttcagtgtttttattttgtttatggggctttctatgtactttgcccagttgttcctatttggaagtctcttcaaatgtgagtctttggtagaaatattcaatgatgctcacacatttggaataatatcaatcaactctgttgcggcaagtaattcaaagttggccatctcctggagacggcctgtctttgctaaagctcatgcttatgctttatttgatgcacctcaagtctttcagggaactctgctaagagtaattaaggatggtaatgaagattcagttggtcgtcgggtagaatgtgaagatcgtgcaaagagttttctctagaatttagtcagcaaagactctattttggtgactgcctggagtggggggaaattacagattgatgctctagccgatgagatccaacctgtctggagtgttggtagtccacctcgtcttcgtgttgattcccatgaccaaattcttggccttgctatgatttgtgagtcaattgccagcagcagtttgtggaagcttgatcataatgcctggttgggtaattcaccccctttgctgagactggctattgttgatttggctctgccacaaagagcagaaagtggttatattatttcattgttcattgatacacttatgccagaaagaatatattcccttcatgacggaaggattgactcaatagttttacattttcttccatttacaagtcagacaaatggcaaggatgatacaatgaaaacaccatctgtgcaccctgttctaaatacttgccagagtggattcacctcagaaccgtcactttgtggctttgtgtcattatcagattcatttggaggctcatggattgtagctattactctttctctagagtgtgttgtgcttgagatgaaaagctggaacctcttgcttccagtaagcattgatatggagaagaaaaccatttcatcagagggggaaccaaaagagagagatataccaacaataattagcaaggaactacttagagggaccagggaggtacttgttcctcaggcctctccaagtttacaatctgttgcagctgattcaattgaaggtcgatcaacattacatcagtatttcaagctgtttcatgaaacctatgtggagtatgcacataaggtgtacctggagctcaagcatcacgcacctcagttgaagaaaatcattaatgaccaacattctcgattaggtgatgcacaaaagaaacttttgaaaattgaggagcaagaggctatattaccgaaaaggatagatcgtgcaattcaaactcaattctttggaagagcgcttgcaacatttaaggaacttaccttatgctcacaaaaaaccactgtccagagcagagcgacatctctagctctctcttttcctgtacctgatacaccattccccattccgcttcatctattgccatttctatctactgagaatttctttcaaaagcacttaatcacacctttttttccagaccattttaaggaagttgagttggatgctttgcattcttctgttgatgcgctaagtgcaaggctgagaaggcacttgcaagcttcaaaagctaatcaccaacaacagaaaacaccagggaagaaaagttgtgcaggagatgatcagatgtccatgctcaaatcatcgcttgaaaaactttcacttgtaaatactgaaaattcaaagaaagttaaacttgtggagtctacattgagaaacaaagaaagaagcagcagagaatcaagcctgcctattctctaaaagcatcctatgctatattttatttctgtagtagaactggtgtggtttgaactatgatcctacttgcactcccactaatttagtcactttaattgtctcgccaaaattagggattttcatagaaagaagttgggagtgcggttaacatatttacattattaaaagcttaatgtcaaggtccccaggaagaagaaagtagccaacttttttggacgctaaaaccaaacccccttttcaaatatggcaaaatccgaaaagaaaagcccagaaagaaaaaaccttggtatttccattccgtttagaaaaaaaaaaaacccggggccaggcttttcaattgttttgcccggggctcccattgcccct

SEQ ID NO: 137043 - DNA, 1362 bp, Glycine max
  Clone ID: PAT_MRT3847_9475C.1
catgcacgagagatcggagctccggctcgagcaccatcaatactaatacgagtgtcaggggttgtaagtgctgtaatgggaggattcatgatatgcatcataatttgttgttttagatacaagttattaatccaaccaatcaaactttgttcgaccacaaagagtgatcaagacattgaagcattcttaaaaaataaaggagctgtagcacaaaaaagatacaaattttcagaagtcaagaaaatgaccaattcctttaaagttaaactgggtcaagggggttttggtgccgtatacaaaggacagctacccactggttgtcctgtggctgttaaattattgaactcatccaaaggaaatggtgaagaatttaccaatgaggttgctagcatcagtagaacctctcatgttaacattgtgacccttcttggattttgtttgaaaggccgcaaaaaagctcttatctatgagtttatggccaatggttcgttggacaagtttatctacaacagaggaccagaaaccattgcatctttgagatggcagaatttgtatcaaatctcaatagggatagcgcgaggattggagtacttgcataggggatgcaacactcgaattctacattttgacataaaaccacataatattcttttggatgagaatttttgccccaagatatcagattttgggctagcaaagctctgtcccagaaaagagagcattatttccatgtcagatactagagggacactggggtatgtagctccagaaatgtggaatagacatttcggtggagtttcacataagtctgatgtttatagctatgggatgatgttgctagaaatggtaggagggaggaagaacattgatgctgaagccagtcgcacaagtgagatatacttcccgcatttggcatacaagaggctagagttggacaatgatttaagaccagatgaggttatgaccacagaagaaaatgagattgcaaagagaatgaccatagtgggtttatggtgcattcaaacatttccaaatgatcgacctataatgagtagagtgatagaaatgttggaaggcagcatgaattccttggaaatgccaccaaaacctatgctttcttctcctactagatcggcaacagagtcttcctcttgaaattagttacattgcattttgagcaaatctgaatggatcactgtacatatttgttttgtactttttaatcgtcctgaaaatcaaatggatctcacatatgtgataaattgccgctacattgattgcaaaaatcagaccaatttcttgtaacaagccaaatcaaagtagataatactgaaaatagatttacattctagtcttattagg

SEQ ID NO: 137044 - DNA, 647 bp, Glycine max
  Clone ID: PAT_MRT3847_94760C.1
aaaggatagatcgtgcaattcaaatgcacaattctttggaagagcgcttgcaacaattaaggaacttaccttgcgtgcacaaaaaaccactgtccagagcagagcgaaagtttaaatctgagcttgatcactttaaggaagttgagttggatgctttgcattcttctgttgatgcggtaagtgcaaggctgagaaggcacttgcaagcttcgaaagctaatcaccaacagcaaaaaacaccagggaagaaaagttatgcaggagatgatcagatgtccttgctcaaatcatcgcttgaaaaactttcacttttaaatactgaaaattcaaagaaagtcgaacttgtggagtcttcattgagaaacaaagaaagaagcagtagagaatcaagcctgcctatgccatgaaagcatcctatgctatattttatttctgtagtagaactggtgtggtttgaactatgatcctacttgcactccctctaatttagtcactttaattgtctcgccaaaattagggattttcatagaaagaagttgggagtacggttaacatatttacattattaaaagcttaatgtcaaggtcaacaggaagaagaaagtagcaaaaaaaaaaaaaaaaaaaaaaaaaaaaaaaaaaaaagag

SEQ ID NO: 137045 - DNA, 595 bp, Glycine max
  unsure (1)..(595): unsure at all n locations
  Clone ID: PAT_MRT3847_94761C.1
cacgcgtccggatcctttgcaacctgagcagaatatttttacagcctgttgagcctggtagaactagaaaggcctcatcattgtgtccagttgatttttcttttggaggagaccacttctgggaccggttcagtgtttttcttttgttcagtaatggggctatctatgtactttgcccagttgttccatttggaagtctcttcaaatgtgagtctctggtagaaatatacaatgatgctcacacatttggaaaaatatcagccaactctgttgcggcaaataattcaaagttggccatctcctggttagaagcagcttttccggagttacagaaccaagaaactaaaggagacagcttgtctttgctaaaagctcattcttatgctttatttgatgcatctcttgtcttgcagggacctctgcgaagagtaggtcaggatgggaatgaagaattcagttggtcgtagtgcagaatgntgaagagtcgtgctggtaagttttctctacaatttagtcagcaaagattcttattttggtgactngcctgnagtggtggggcagttacagatagatgctctagccgatgagatccaac

SEQ ID NO: 137046 - DNA, 425 bp, Glycine max
  unsure (1)..(425): unsure at all n locations
  Clone ID: PAT_MRT3847_94762C.1
ggggagcggnttttgtcgatctctaactaaaaaaaatcgactgtaatacgccctgctctatgtaattttctaaagatagtactcaaaaaaaccaacatccaatttacgctgcaataacaaaatatatcatattcaacatttgtgtttttcccttcctaccaaaaaacttaacatgtaaaacgatctatttttcttatctatatcaatagatctatctgtattctatcatttacagtttaatatatacatatttcaatatttatcaacattttttcatttaatctcagacatatattaaaaaaactataaaaaaaaacaaactctttataccttttttgtgataaatgttatttcttaaatacgcataaataaaccattgaaaaatctaatctactctttttgtaatacaagcaatcttttcatac

SEQ ID NO: 137047 - DNA, 195 bp, Glycine max
  Clone ID: PAT_MRT3847_94763C.1
ggtttgtgttttttttcagctaaaatggaaaacattttttttatagccctgaattggaatacttaaaaggggaatatgaaagcaaattagccccaaaccggggaaataattactctatgatgactcggaagcacattaagttattcaacttaagaacaaagatgcagctctaattgatcaccaattaattattta

SEQ ID NO: 137048 - DNA, 318 bp, Glycine max
  Clone ID: PAT_MRT3847_94764C.1
accgagaataccgttgctttcatataggtcgtatatcctcaatacatatatcgatggctcaggggatacgtgtacctaatgcgggttagaaaactaatccttacggattaggactttatggtctcatattcgatagcgtaatctgttatatccgaagactgtattcatgttcacaaacataactaaaatgacatcatgccttgcagtgatgaccaactattgcgcatgatcttgattaactgtgtctagtataactctatgtacatgactcttgtacacactcatacgcaggtcggtcattctataagattcaagctt

SEQ ID NO: 137049 - DNA, 323 bp, Glycine max
  Clone ID: PAT_MRT3847_94765C.1
agtgaaagcagcaaacataaagcctttgagaagatgcaaaaacatgtcagtaaagacggggctaataagtgggtcagcgtacttcataaatttacaggaaagtcacaagcaacaacggattgcacaagattccattggcagtcactctgagcctagcagagtgaatgatgattcatcagatgtatgggacatagaacctatgaggcatggtccacaaggcgttccaaaggatatgtttgccatgcttcatcttttctgtgcaacctattctcacctgcttttagttcttgatgacatagagttctatgagaaacaggttccat

SEQ ID NO: 137050 - DNA, 395 bp, Glycine max
  Clone ID: PAT_MRT3847_94766C.1
acgcgtccgggcttattatcatatgaaaattataaagcttaacaacttattttaagatgaatatataaatcctaattatctatttaaacttttgtcatgttgaaaacacataggacacagggacatgacatatatattttcaacatgacaaaagtttaaatagataattaggatttatatattcatgtccctgtgtcctatgtgtcttacttagttgtatcccggtgtccgtgttggagcctgtgctgcatagcttgttacaatcatattgacactcattaccatgcctggacaaaacatatgaacttccctatcatgctctattccgcttctaattgggaagaagaatatttatgggtgctcttcattatttgtctcttaaaaaattattttat

SEQ ID NO: 137051 - DNA, 281 bp, Glycine max
  unsure (1)..(281): unsure at all n locations
  Clone ID: PAT_MRT3847_94767C.1
ttggagaactgtaagantctcaaatatctggttgatgagtgtcnntttgcatntgtgaactagtatgtaatattttantcactcgataaagcgcttacccatgtgcatgagtgtgttnaaatatcnaacaaatncnaanattanngttaccacactgnntttntcagatnancatccanccnataanagagnnntccatnatagaaattncgattgtaaaanacaatcaaaattggattcgatnctaaacataacatagatatccatatngatagacaanc

SEQ ID NO: 137052 - DNA, 361 bp, Glycine max
  Clone ID: PAT_MRT3847_94768C.1
actttgcctcctaccccagccaaacgcactcaacggacacggcctgaggcactatcacccagacccagcaacccggctattggctgctcgcaaggcttcagaccccaaaaaggacccccccgccgacgacaaagctggaacagcagagaacaaagcacccaaagaagaaacgtcacctaaagaccccccagcagcacaaagagctactacagccacaccaggaccagcaaccgggctcccaggcaacccctcagaaaccactgcaacgcccgggccgcacaatgacccaagacacaaggaaccggcgcgaacagaccgcaaaagacccaccacaaaacccgagggcagagccagcacagaa

SEQ ID NO: 137053 - DNA, 661 bp, Glycine max
  unsure (1)..(661): unsure at all n locations
  Clone ID: PAT_MRT3847_94769C.1
ttttttttttttttttttttttttttttngggatagtactaagtagtagctcttgtactcgaagttctgttgccattacattagaaagagttcatgaaaaattaacaaccatatataattaaggagcaacttttcagcaactcaaatttaccattcacaagttggaaacacatagtcacaaaagaatgaaagaatgccaaaatagtctgtttaaaatacaaaaaaaaaaaaaaaaaaaactgctccataaattacattttacagggatggcaaaatcaatgaaaaagggtaaaatgaaaaaaaaaaaaaaaggtacaacaacttttcacctttgagacatttacaaattgtactaattgacgatgttgtgataacagacaaattgtttgttactgtgctaacgaagtggtggtggtggtggttggaacaaccacagtagtggttgaggaagcaaccatggtggtagttgtcgggaacccttcattttcgccaccgtcgagccccgccgcccaccgccgcagaatcctcaacagcgtcgccgccttccgccgccccctgacacttcccaccgccataagctcccaaatgatcctctccacgccgggcaccgacgccatatccgccacaacctccgaccccccttttcgacacaatgtcacca

SEQ ID NO: 137054 - DNA, 384 bp, Glycine max
  Clone ID: PAT_MRT3847_9476C.1
gggaaaaaaaaaaagaaaatttaatgggggggaaaaaaaaaggccccaaggacaaaaagaaatggggttttttaacccccaagggcttaaaaccatttgggggggcattcagggggggattacccccggggacccccctaaaaacacccagtaaaagcccaagcgaccaaccccagagaagtaaaacacccgtgcaccggtttggaatttggggacgaaaacccttgggccttaaacctgacctggccccttaggaaaaggggattcaaaggcaccaggggaaggcccacccttgttcccaaaaaccatgggaaaccacccggggacaattgtgaaaaaccacatggcccttggggcatcttcccggggatggccccccaaaac

SEQ ID NO: 137055 - DNA, 379 bp, Glycine max
  Clone ID: PAT_MRT3847_94770C.1
tataccatgggcagtaaataattattgtacacggtatagcgaaaatgaaactgaatagaaactgagatgcatagcctatacctaggtacattcaccactacactcattactggtagacattacagacacagacaccatggcaataaaaagggttatctttcctctctagtgaacaccacttctgatactcggactgacacaaagaacctgcaagatcatcaccagtctgtactctacatacagtcgaatgatcatcgtattcaagatactatctcttgacgctctatgcaccaacgaggggtgtattacctcgtggctgtagctcaacttcaaggcacatttgtgccgtgcaagatcactctcctacagaagcgcatgc

SEQ ID NO: 137056 - DNA, 629 bp, Glycine max
  unsure (1)..(629): unsure at all n locations
  Clone ID: PAT_MRT3847_94771C.1
aatatacaaaaccagcgnagaaaaaaaaaaaaaaatttacaaaaaaaaaaaaaaaaaaaaaaaaaaaaaaaaaaaaaaaaaaaaaaaaaaaatttctttggccccaaacatttaataaaaaaaccgaaaatttaaaaaaaaatttgggtggtttccccggaaaacaaaaaggtttgggggagaaccccttccaaacatttcagggaaaaattcccccaaaacggggtggggttcacccttccaaaacgggaaaaacccccggcagaaagggacttgttcccttttcaaaaaaagggggaaggccccccaaacccaaactccccggcccaggttgaaaagttttttgcttgggggggggacccccggggccactttaaacaaagggaaacggggggggtggagccccccctggtttcggtccttgcccaaaaagaggccccggacccccagtccgggggggtaaaaaaaccccggttgaaaacaaaaagggcagcattggggaacaatgggggggccaatttgacccgggttgggaaaaaaccctacaagaattgggcccccctttttaaaaggccatatttgttccctttggccgaaaggggaaaaaaaaaaaccttgttcccctaaaa

SEQ ID NO: 137057 - DNA, 274 bp, Glycine max
  Clone ID: PAT_MRT3847_94772C.1
gggaatgcaatatgtgcttcagtggaagaaatgaaacaacttgaatcacttaatatcactgcaatagctcaagatgaaatcattgacttgaactctatatcatccctaccccaacttcgacgacttcatttgaaagcaagactggagaagatgcctaattggatttcaacacttgagtttcttgttaaaataaggctggctttatccaatttgaaagatgatccgttgagatcgctagaaaagttgccaggttggtgaaaggtaataattggga

SEQ ID NO: 137058 - DNA, 279 bp, Glycine max
  unsure (1)..(279): unsure at all n locations
  Clone ID: PAT_MRT3847_94773C.1
ccgatgngtaaaattnctcagaacatgggntngattcacactccatgttctgagaaatatttaccntccggtggaacacattaatgcgcggtcgggctagtgggtccaaggtaccgcccgcgttctttctgcgttggggcgggggggccgttttttctgtgaccggtacggtgcccggtggtttccctagttatttacggacacgccccgccgcgtccngcgggggaattgaantgccgcgctttggctgtgatgtttgcatgcccatatttacaggac

SEQ ID NO: 137059 - DNA, 1756 bp, Glycine max
  Clone ID: PAT_MRT3847_94774C.1
gccaagctcgcgtctcacttctctctcttatattaatcactcccgcacacagagcataattcacctttcttttccgaccaaaggttcgccagaaaatgctgatattcttaaaaagcaagagtatcatccccggttctagtccatacgtcacaatcacacatccttaccggaattcccgggcagcgtctctctgtctcaactttccttcattttctctcttcctctcaccgagtcacgcactcggctcgactcgtacgaactccgatccccccccgagtcacactcaaccagcaccaccgcccgatccgacgatgtctcgcgcctcctccgccgcagattccgccgcctccggtgagatcatactgttcggggtcagagtcgtcgtcgattccatgaggaagagcgtcagcatgagcaacctctcacagtacgagcatcctcaagacgccaccaacaacaaagacgccctcgccgccggctacgcctccgccgacgacgccgctcctcagaactccggccgcctccgggagcgcgagcgaaagcgaggagttccgtggacggaggaagaacacaagctgtttttggttggattgcagaaggtagggaaaggtgattggagaggaatctccaaaaactacgtcaaaacgcgaacgccaacgcaggttgcgagccatgctcagaagtactttctccgacgaagcaacctcaatcgccgtcgccgtagatccagcctctttgacatcaccaccgacacggtctctgcaattccgatggagggagaacaggtccagaatcaagacacgctgtgtcattcacaacaacaatcacccgtgttccctgctgaaactagcaaaatcaatgggtttccagcgatgccagtgtatcagtttggggttggttcttctggagtgatttcagtccaaggtgcactggaaacccaatggaagaactcactctgggacaaggaaacgtggaaaaacacaatgtgccaaacaaggcctctacagtgtctggtatcatcacccccggttcttctagttctgccattgacccaccaccgacactgtccctggggctatccttctcatctgaccaaagacagacatcatcaagacattcagctttacatgccatgcaatgtttcagcaatggagatagcatcattagtgttgcttgagaatatggtccttggattcacagattaattacatatattaatatttctctagtttcctgtctttttggtgggagaaagagaaagaggttgaaggaaagggcgatggattagagaaggcaagaagaagttttaacagactgaatttgatccttctgttccttgtacagaccccagaaaaggtcctgtcctgtttcttcttgtttgcttatgttaattaatgtcatgactttagattcttgtttatttggccgtttacgtttgtagtagttgatgtaactgaaaataacaaagtactctctgtttttatgctgataatgtattaacgttcgatatgaactttcactgatgaaaaaaaaaagtggctcctttggggggatattatcaagttggtagtctgtttcattcatgttaggtgttagtagttggccacgtttttcttttctcataaatttgcgtatttactaaaagggaaaaaaaaaaaaaaaggcggccctggtagctgcagtagtatcataattgttttcgagcaaatgtaaatgttggtcgattcacatgtgaagttataaatttgtttaaaaa

SEQ ID NO: 137060 - DNA, 511 bp, Glycine max
  Clone ID: PAT_MRT3847_94775C.1
cccacgcgtccgtacggctgcgagaagacgacagaaggggcaattaagggttttggggaagcatagaccttaagacagccaaattttgagtctgagaatcttctcttcccgttccttcatctttaaagaatgacttgtatataattgttaatcatttgttcatcaatttaaagtggcatatagtgaatccaggagggccattatttgcgagcatagaaattggattatatctgatgtgcctttttcatgttgcagtctgatgttaacactgtctgctttgctgatgaatctggccatctaatatattccggtagtgatgatagttttatcaaggtaacattcataatttggttatgttgaatttgttaatatccactaatatctatgttggcagcaatatttttatttaatgtatgtctttattccattattggcaagttaagtttacagtactgatcatggcattagagctctggtgaaagggtagttgatgcaatttgatcttagttga

SEQ ID NO: 137061 - DNA, 2184 bp, Glycine max
  Clone ID: PAT_MRT3847_94776C.1
ccggctcgacccacgcgtcagcggacgcgtgggcggacgcgtggggatgcaattgcattcctcacctcactctcattctgagacactgtgctccctctcttctctattctatttctatgtgacactctctctcaaaccctatccctccaatccccaatcaatggcgatcctctctcaatccaccgccagcttctccttctccttctccttcgtctccactcggaccgattccactcgcctaactcgcttcccctcccgcgtcaccttccgagcccgctcgccccctcgccgccacgccctcgtctcttcgcgcctcaactcctccaggtcccccgacgccggcggctccctgtcgccggacaacggcagcggtgacgtcgcctaccagctccaccacgacttctctccgcggcgccggcgccgcggctcgccggtgttcgtcacgctgccggtgaattccgtcggccgggagggccgtgtcgcgcggcccaaggcgatgatgttctcactcaaggctctcgccacggccggcgtggaaggcgtggttattgaaatttggtggggattggtcgagaagaacaaacctagggtttacgattggagagggtatgaggaactcgtcgcgatggcgtgcaagtgtggccttaaggttcgagtggttctcgcctttcatcagcatggcacgggacctgatgatcccaattggtaggtattttcctagtcatgagcctcatactgtggaagtttgtcccccttgtgtaggatacctcttcctctatgggtgcttgatgagatacagaaagatatagagttagcgtattgtgacaggtttggaagaagaaatattgaatacatttcccttggatgtgatattcttcctgtgctacatgggcgttcacctattcaagcgtatgcagattttatgaggaattttagggacactttcgggtctttgcttggtgttatcatcacaggtgtacagattggcatgggtcctggtggtgaactaagatatccttcattctcttcacaggagccaaatttggcttggcctcatgaacttggagagtttcagtgctatgataagtatatgcttgcttctctgaatgcctctgcaagaaatattggaaagcgtgaatggggaaatggtggtccatttggtagtggaagtttgatgcaaaatccggagcatactgattttttcaaaaatgacggtggctcttgggacacaccatatggtaaatttttccttgaatggtactcagatatgttgctgctgcatggggagaggatttgtagggaagctgaaactatatttaggggttcggaagtccatatatcagcaaaattggctgccattcactggcactatgtcacgcaatcccatccatcagagttaacagctggttattataatacttctaacagggatggatacttacccattgctcgcatgtttagcaagtatggattttcaatgtgctgctcttgttttgaaatgcaagatgctgtaatgcagaagatcaatccagatggtagtcctgaaggttttcttagacagcttttgctggctgctaggctctgtgatatatcactcgaaggtcaaaatttttcaactaatttggatgatggtgcattcacccaggtgcttaagatgtcaaaattttactcagatgggattgagaagcgatctttctcattcaactttgtaagaatggacaaaagattgtttgaatcccgaaattgggatcggtttactcgttttgtgagacaaatgtctaatggaaacatttttcgagccagattaaattctgttcgtgacgtacggttgaagaccacaccagtggtagcagcagtgggactattgtatcacctatatcagcactcttgaaactagtgttggccttttttctttaggcatatgtagtatttatgcgatcgatgcaagaaagtatgatgacctccggtcgaatgttgttaaatgtgtagtaactgctgattcttcaaatgattcttttattgctttttggcaagaagttacttccccaaggtaacacattacattgccttccagtttttttttttgatatgggtggcatgttatccacttgtacctgtatttccagtagacagagatatagtttaaaaccagttactgttgagatcttggttcttcacagcccc

SEQ ID NO: 137062 - DNA, 262 bp, Glycine max
  unsure (1)..(262): unsure at all n locations
  Clone ID: PAT_MRT3847_94777C.1
ggctgaacaaaacgagaaacttgttctgaagcaaccaaaagagtttatcaacacaaataagactgtggaagcacagagacctggaagacgtggcaaccgcttttggaactccatagggcttggatttaagactcccatggagccatcgaatgaacctatattgacgangagtgaccacttcactgaccatgtttacatccgtggtccgatcttggctggaacatgtcacagtgctaagatgaaccagactattattgttaaa

SEQ ID NO: 137063 - DNA, 164 bp, Glycine max
  Clone ID: PAT_MRT3847_94778C.1
aagacattgagatgatatggtgccagtagcctgttccaaagttttccttctcatctggtgattcctagcaacaccttgccaccattccaattatatctagatggaactgccccgagcatggctgttgtgtccagtacttgataaaatttgtttatttgcttaaa

SEQ ID NO: 137064 - DNA, 547 bp, Glycine max
  Clone ID: PAT_MRT3847_94779C.1
attcggctcgaggccagatctggaacgactctggcaaggtcatcggtcgctgcgagctcattccagctgaggagcgtgaacaaaaggtcgagggaccatttgctggtctccagggtcttcgcgtcatcgctgatggtaaggttgctgacgaggatgagaacgttgttggcgagattgtcgagggtaatgctaagcgccttgttggcatggcagttgatgaggatggtgatattctcgacaagtatggcaacgttaagggccacgctgagcccctacctgatgaggaggaagaggcccctgccgacctttcgatccttgatggactcaccttgaacaagcaaggttacctagtggatgccaacggaaaccctgttggtcgtctcgtcgaaggtaacgtcaaggatctcgctggacgcaagtctgacggcgagggtcaaattcacggagacaccggcaaggttgctggtcgctgtgagttaattcctgaccacgaacgcgtcagcaagcaagagggaccctttgctggtttcgaaggcctacgtgttgt

SEQ ID NO: 137065 - DNA, 442 bp, Glycine max
  Clone ID: PAT_MRT3847_9477C.1
gaccaaaaaaaatctttttaaaaatttccatttttttttctttttgttaaaaaccaaacaaacgcaagagggctatgatttttacatggacaagaccacagctggccatcaattttgccgggaggacaggaccatgaaaactcgggggaaacgaagaaaaaaatgtttccggagaggggccagctaatgtcactcccaacacaatccataaaattttcctagcacccctccaacaaaaaagggacaaaaacacgaaaaacgcccggaaaacggtccaaaaacatcttccccctaaaaacaaccaaggaacctttggggccacatccccctccagaactgcataaaaagatgggaaagaatgatctttttataacacgaaaggatggctcgggccaggcccggaccagcagaaaacccttggaaagcaaacaaagggcaaccc

SEQ ID NO: 137066 - DNA, 353 bp, Glycine max
  unsure (1)..(353): unsure at all n locations
  Clone ID: PAT_MRT3847_94780C.1
tcctctaaatctgccgcccttgtattggctttttgtaagacggcaaatatcctccttgatgacaaactcaccgcacaagttttagattttgggacatcaaaactggtgcctaatgatgagttcgagattgcaactctggngcaagggacatgtgggtacctaaacttttagtacctggggagatgtcanctgactaacaagagngatgtgaacagttttggggttgtgcttctggagcttctaaccacgaagaaggcactctacctcgggggatcaaaggaaaacaggggcggcgggcttgcttcctgacgggtcgggangcgaagggggaacataagtggcgaggaaccacc

SEQ ID NO: 137067 - DNA, 362 bp, Glycine max
  Clone ID: PAT_MRT3847_94781C.1
aaaaatggaaaggggaaggcctcattagggccccaagaaaaaaaaagggcccacaaaattggaaaaccccccccaaactttttaaaccaaaccccccatgggttataagggcccaaaaaacggggcccccattttgcccaatttgggggcccccagatttttttttccccaaaaaaaccgatttattcaaaaagggaccccttggaaagaaggggggaaaaaaaaaaccggttttctaaaaccaaaattttaacccaaaaaaatggccaacaaaatcccccccaagggcttcttgggcaaatcccccttataaaaaccccccaggggccctaaaaccagggtctttaaaaccaaccttcttt

SEQ ID NO: 137068 - DNA, 1748 bp, Glycine max
  Clone ID: PAT_MRT3847_94782C.1
agactacacagacaaactcaattatattctatcacagacatttgtttagaccacggacaaaaatggttgggttaaagtaaccaatcctttttttttttacagctgaaaaattgatttctgaatatcagagtttggacatcttagaatggaacaactacaatgaaaacgtatagcatttccctatacatagaaatcataaatccttcaaggaaatcttacaaagaacttctaattgtcaaaaaataacctaattctcaactaatgggatttatctcattttcacacaagctcaatcacaaagtcagtgaggccagcatagtatgttgtcgctgcatttctggcaagcacctctctctatataagcaaacaagtgcaacaaaatgtctgaaactctcatctctagtgttaggaaacactttcctgccaatagttgaaaccagagccataccaagaatagccaaattacaattgcctaagaatctgcccctcaaattcaaaaaaagaaagaggtatcttgggaggagatggtgttgttgccacacatttgaacttatgctgtttgtatttctctctcacagcttgcaaggaggcccctcgcgatctacggaggtacaagtcatgtaagtttagaacacattccttcaagtcagcaggtttatatctagtgagttgatggagtgccgaattccaaggatgtgtctttgtgctaaacataaatcttgctaggaatacaactgatgcagccaccaaagatggcaaaaactttatacaattataatccaacaaactgagctcggcaaggtagcagctaaggaactcaaactggagatcagaagtatcaacaccctcttgaccaactctggagaatctcctcaagaatgtcttcactgtaggaccacccaattcaaatttcaaagccttcaatatttcagcctccatgttcacaacctcttccttagagtatgtgttatccgtaatgtaacaaaaatcctccacctcgggcggcttaatctcttcgtatttcgaagcaatgagcattgaagcaacccccagcaattgcaacctctgtctcgacaaaatattcaacgacaaaaacctatcaatataagcaacagagaaataaagcgtgtccgaaacaagtttgtattcttctgcaacttccaccaaccaatccacaagaacaccgcgcatgttagcattaacatccctctgaatcttctgaacataatccatcaatggtctcttactaggatccacctccattccgcgaaggtattcgtatatatccgaaacgtagggcatacacagttgcgggtcgtgtctttcctctaccttctccggcgtggaaaccggccgcgccggttgctcgcgtttaacctttttctgtttctgaatttctttttccgtaacggcgacgtagtttgatgaaacgttagtgaggtcacccaaaacgacgcgtttcctcttggcggcgttgcggtgaagttcgcatattgcagctgctgctctcttcttggccacgcgttggggacgcgcgttgttgttctccgaagttgccatttggaaattattcgaatcggaaggaagagagtgcaatagaaagagagggggaatgaggggtttaagaagaagaagaacggaaaattaaaaaatattaacgctgtgtttgtggtttgaaattttagcggtgagtcttgttcccgcttcccataaaactcatatttttgggaaatctttgcggacgcggg

SEQ ID NO: 137069 - DNA, 177 bp, Glycine max
  unsure (1)..(177): unsure at all n locations
  Clone ID: PAT_MRT3847_94783C.1
gagtgggaggccatgaggagaagattctggtgttagtgaggctgaggcctttgagtgagaaggaaattgatgtgaatgaaacaggagattgggaatgcatcaatgacactaccatcttataccggaacacccttcgggaaggttccacattcccaagtgcctnnacctttgatagag

SEQ ID NO: 137070 - DNA, 413 bp, Glycine max
  Clone ID: PAT_MRT3847_94784C.1
gtaagcttggagttgggctcgagattttttgaacaaggacgttgtgtttaaaactgatgaagagtgcctgccagcttttcagactctgaaggaaaggcttgtgtctgctcccgtgatggtggcccttaattggagccaagagtttgagttactgtgtgacgccagtgactatgcaattggtgcagttctaggacaacaaaagaataatgtattcccttcaatttattatgctagcaaggtcctaaatgatgcacagttgaactatgcaaccactaaaaaagagttattggcatttgtatatacattggagaagctcaggtcatacttggttggctccaaggtcattatttttatcgatcatgcggcaatcaaacaccttctaacaaaggttgattctaagccaaggttgatta

SEQ ID NO: 137071 - DNA, 1026 bp, Glycine max
  Clone ID: PAT_MRT3847_94785C.1
aatactctaagtcaattagaaatgaagttattttactgagaatctgccaaatccctttttgtgcgtctataagatcaacacagtagcatcaggcgtagaaagaaaagaaagaaagaagcgaatagtacgtaggtaggtgtgtgaaaaaatgattgcagacagctcatccttaaacaccccatcagcgttaccaagtagctcccaaaacagaggcacaggagtgacaaacacaacactctcagcatttggcagcctcataaagcttctccctacaggtacagtcttcgtgttccaattcgtgaatcccgttttgaccaacagcggtgattgcaacgccaccagcaagtggctctgcagcattctcctcgttctctgtgggttcagctgcgccttttcttccttcaccgatagctacacaggcagtgacaaccagaggcactatggcatcgtaactaccaaggggttgtggccttcaccagcatccaacaccgttgacttgtcaacctacaaactcaagtttggagatttggtgcatgctgtgttatccttgtcagtgtttgcggttttagggctgttggacaccaacactgtgcactgtttctaccctggttttgagtcaactcagaagcgtctgcttcaggtgttgcccacagctattggggtatttgcgggtgggttgttcatgattttccccaatgatcgccatggaattggataccctttaacttctgattctaacgacacctccccaaaatccaatgataccaccgcctcacctccacaaaatattaatcccaatgacagtactactgtttagtattgctatagctagtgttttatttttttagtaactaaataatgatgtgctgtagcaactttttgtgcctctgaaataataggcgcaagctgctaactatatatgttaataatgttatgtatctagctacctgcatgcatgcatggtatgaaagtgttgttgaactaggcttttggctactgtatagtgaagaatcgtcttttttcttt

SEQ ID NO: 137072 - DNA, 493 bp, Glycine max
  Clone ID: PAT_MRT3847_94786C.1
ggctcgaggttacattggggaaggtctagtcacttccacaataggcctgatctgagatgtggcatctgtcatttggtggatcacactctctacatgaaaagcagaagccaccagaagatgttagcccatatagtgtgaacggaaaagtactaggttccgcagttgctctcatcctactggtgggtgtggaaaatggagaggatggtgtagatgaaagcccaatgggcgaggacaacgggcgtcactggacggcgaattgaaaaccagcttcagggccctgacagcgcagcggcaaggctaagacgaccagatactgtggcacgaggttctgtcatcttggaacggctcagacccgaacgagtacatcgaaaccgtggtgagagcctctatggacagcgtgatcaaagcgtataacatgagcgacaggctgtcggtaggacacggcatcagcagcgccgtaatgaagatggctctggaggatagccaagacttg

SEQ ID NO: 137073 - DNA, 627 bp, Glycine max
  Clone ID: PAT_MRT3847_94787C.1
ccagcgtccgaacagtacgagttggcgcaaaccaatcaaaacgaggaacagcacacgtcgttcaaatccgcataataacatctcagattacctcggcgtgcgtttcttcctctctttctttctacttttcgcagcaacagaaaaaaccatctttcacacaaccacgaaccctagcaattcccacacattcccaatttcagctgtagtttaccgtggagggagctagtgaatgctacagattacaatccagtgtttcatttttatagatggttaatttggccaagaattagcaatatgcaacaaatatgatttgatatgataagaactgaaggggggcacatgaattcactgcttattatgacttaagagaatgagatacgtgtgttattacaggttatcgttgcacataactaggattatctgttggtgtgaaatacagaagctggccagcaaagtggcttcctgatgtaatgccacactctcttaaggtcagagcggtggctatgtttgaagctgtacaggagattgccatatacattcataggtttcacaatcttgacctttttcagcagggatggtatcagattaaaatactatgagatgggaagatgatgaagatgtatcttt

SEQ ID NO: 137074 - DNA, 1236 bp, Glycine max
  Clone ID: PAT_MRT3847_94788C.1
ttacggctgcgagaagacgacagaagggggaagacgagctgtgatgaaaaaaaaatataaagaatggatacagaaagatatctgagtagtgagtattagccaatgaattggcacatggatccccaccctatctgtgccttttcctatgtttgcgaattaaatgaagtgtgccggtaccaaaagacggaagaaaactaggaaggaagaaaactaaggaaggaaggaagagtgagcgtgaaagatgccttgggcgaggctttcagggtctccaaggctcgacgttgctattgacatgggcaatccatttctcaatctcactgttgatggtttccttaagatcggagctgtcgcagccacgcgatcagctgctgaagatacttatcatattaatccaaaaggggaatatctcaagtcatgatttcgagaaaacgttgaagaagatgtgtaaagaaggtgtatattggggaactatagctggcgtttatgttggaatggaatatggggtagagaggatccgtggcaccagagattggaagaatgccatgattgggggtgcagtaactggggccctggtatctgcagccagcaacaacaagaaagacaaaattgcaatagatgccattactggggcagcaattgctactgctgcagagttcataaattaccttacctgaatgaatgaaagtggatgtcttgctggttttcttgcatgttttggaaagggattgcacactcagtctcttttgtcatactctgtaccggttccgtctttgatattggtgcagttacttctaagatatgctatttatttaactttctataaaacctatgttttgataaattgtattggccaatcggttttctgcatgttagtagctttgccttgcaattttgtcaagctagacttgtgcaattatgtcaaagcatgttcagttcgatttagtctttgggttttggaataatgaaggttctggatgaacaggttttcaaaaactctccacccagtgccatgcttgggatttctataaacaggggaatatcatcccttcctggtcaagctctgatgtcgaggagttcattgcttctgatcctgttcatggacccgtcctgaaaagtgctagagaagcagtgcaatttggcctcacaggaagtgctttgggagcattatttactgcaggctatgcctggaaatattcaaagagtttacatggcgcttgactgtcacttttagctgga

SEQ ID NO: 137075 - DNA, 743 bp, Glycine max
  Clone ID: PAT_MRT3847_94789C.1
gatatgaaacaatttttgcaataagaggtaacttcatcctagtgtctcatcttgctgcgaggggaagacgagctgtgatgaaaaaaaaatataaagaattaatacggaaggatatctgagtagtgagtattagccaatgaattggcacatggatccccaccctatctgtgccttttcctatgtgtgtgaatttaaatgataactgaagaaaactaaggaaggaaggaagagtgagcgtgaaagatgccttgggtgaggctttcagagtctccaaggctcgacgttgctattgacatgggtaatccatttctcaatctcactgttgatggtttccttaagatcggagctgtcgcagccacgcgatcagctgctgaagatacttatcatattatccaaaagggtaactaagcatttcaaaaattctctaccccattatctctttatgctattttcctttttttacggagcctaaagaggtaagctttgatttttataacgtttttttttttttaatttttattttccttgtttaaattcgggttatacaccaacgtgcaagcataaaataggttgtattgtagtaccgtattttactttgcttctgtggtggcatcggttcaatggtccttggtgttttgatttattttcatctgtgaaagcctttgtcagactaattcaacatgtctgttccagggaatatctcaagtcgtgatttcgagaaaactttgaagaagatgtgtaaa

SEQ ID NO: 137076 - DNA, 370 bp, Glycine max
  Clone ID: PAT_MRT3847_9478C.1
cctcatagtctcccacatgtgccgtatcatccgtgcactctccaaagtcaaagccacaatgcttgagattctcaaaggatcaaacaaccaatccaataacattcactctcaccacataaagaagcaaaagatgactaacaaactcatttttggctcgattaggctccacttcaactggtgctactaaaaatcttatcatgttatccctgttctcgcttgtgtttttgaagggtggccaaaagctggtgacatgatccattatcatgatgaacattatttgtctgaggattgccatgatgatgattttcaccttgcgggatacctacagtggcttgaatagaacgcccaagctcatgatgattgataaaag

SEQ ID NO: 137077 - DNA, 256 bp, Glycine max
  Clone ID: PAT_MRT3847_94790C.1
tgagtgggacagctgcagtaccaccggctggcatgcacgctccaatgcggataatccgtgtcaggccaccacctcgcatagggatctcgacatccatcgtgatcgcgcacatccggggcatcttgggtctgtgaagaatgcggccgttacggcctttgtctgtgtgtctaactcctaccacatcgctactcaaagatcaggacctttgagatctgctgttggaaccgtcgtagacaccgtttccaccgtgctgggt

SEQ ID NO: 137078 - DNA, 456 bp, Glycine max
  unsure (1)..(456): unsure at all n locations
  Clone ID: PAT_MRT3847_94791C.1
ggaaggttataccggcaggattcgaacccagtcattgtgtaagttaatatgcattagttgaacttaacctaaatcataattcaaaagaaggaaataggaagtatatatggaagattaatttaagatacaaaattgtgaaacaatctttcaaatgtattgggaagattgagacttgaaaatgggagggagatttcttgagccttatgaccttaattgaaactgaaaaatcggaggatgtgcttgagatttaatggccaaatgtgaaattagatatgtgataattggggcttgatatgaaatgtagctttgatgatttctgtgttctttttggaaaattgaaatgcattgtttgggtcttgatgatgctatctgtgattgcaatttgatgatgctggaactttgagaaccttngatgcactganagatgaatgttttgataacttttggaaaatcgat

SEQ ID NO: 137079 - DNA, 346 bp, Glycine max
  Clone ID: PAT_MRT3847_94792C.1
aattcggctcgagctacgtaccctgcctccttcaaggacggttactccaacgtatccgtctatagccggggcgattatcccgtcgttgccgaatctatagctgcagatgacgctctcgaactaactctctctcctgaaactgtctcttacgtctcaacctgaggaccaatacctgatcatgctgatgcatgtatacatgttgagaatactgaaacagtgaacgatgccttcgatggctctaaaagcgtcagcatattgctacaaaccaccaaaggcaatgagatacgcccagtgggagtcgatattgagaaagatgcagcagtctcgacatctggagaaaggttag

SEQ ID NO: 137080 - DNA, 646 bp, Glycine max
  unsure (1)..(646): unsure at all n locations
  Clone ID: PAT_MRT3847_94793C.1
gtttatttgttggttgttcaataatcttgtttttgtcaaactgcagacagatgaaataaacagattaaatggactttacaagcggatgttatccaattggggggttaaattatttgaaggtgagggaaagatagttggtccaaatgaagttgaggtgacacaattggatggcactaaactgtcctactcagcaaagcacatattgattgcaactggcggtagagctcaacgtccaaatattccaggacaggtgaatttgcctgttttgaaatatcattgcaaaatgttcctacttacatgattgttacagtttgagtataatatgcaatatgtacatgttaagaattgcaagttaaggattatgataggagcaaaataacaaatagagaccatgaactataagatgctaaatttgtatggcgtgtaataataataataatgtgataaaaaaattctaatacttttggttctatttgttggaaaagttgtcttaattgcagacaccccttagcctgccttagtagggaaaaggcatgaaatataacaaaatcaagaaacaacttcttaaattgcttnctgatttaaatgagntaattgaatctacagtagattncaagataatgtaaatatatttttattatattct

SEQ ID NO: 137081 - DNA, 173 bp, Glycine max
  Clone ID: PAT_MRT3847_94794C.1
aagcatccattaataacgggaaggaaccgtagcttcctcaaaaaagctttctctccgatttggcttctcaatttcggttgtcatcgtccgggtgaaacataggttgaacccacagtcagattattgccattttcccaaaagtcagatatcatatcaaaggtcaagtaccagga

SEQ ID NO: 137082 - DNA, 426 bp, Glycine max
  Clone ID: PAT_MRT3847_94795C.1
tcaaactcaaaagggaaaactgatgactgtggacagaagtctgagtctgttaatgaaaaaattgatgaaaagactcaaaacctcaattcaagccatgaaagtcaagaggtagctgttgagcatggaagcaccgataggacatcaagtccttcggataatggattactctgcaacaatgcccctgcatctgttaaggccaatgatcggaatagtgaaaggtctacttctgcagactctgtctctaaaaatttaacccaaggtgtggatatcatccaagattcacagccagcaaggtccattgaaatatctgctccaaggggtacagattctaccagaaatgctaaggaatttaagctcaatccagctgccaaaaccttctctccatcttttgtgaatcctatatcagcaacttctgctgcaaacatg

SEQ ID NO: 137083 - DNA, 559 bp, Glycine max
  unsure (1)..(559): unsure at all n locations
  Clone ID: PAT_MRT3847_94796C.1
gtccaggaagattaagagtgtaaaatgtcattcggtacctttttgggtggaccgtggcctaaatgtacctgctactgactttctcttctaaacttctgaaattatgtctcaatttctcataactttgttaaaatactttgttaacggtttgtaagagatttactctgaaaaaatgaggttgtcattgacttgttatgataacgactattgctgtgcttggaaagtttagaatggacatcttggttcgagaagaattatcagtttattgagtagtcacttgagaaaaacaccaaattgatattctgcatctgcacctgctacattatgngaaggtggtcaaagcaattgctaagcacgaacctacagttcctgaagagtgttgctatcagagctgatcagaagagttatagttacaagcaactttgtctcatcggcacagaagatatccaatctcttgtgtggcaagtgatgcacagacaggaatcttcggtggacctcgagtaggaaattgtagccaaaccctccgctgaaatttgttgctggaatcttggggatttgc

SEQ ID NO: 137084 - DNA, 227 bp, Glycine max
  Clone ID: PAT_MRT3847_94797C.1
ttgtttttatttaaggatgcaggaacaagtgcgtggacacaacagagggatacctcactttaattgataaaaaccacccttgggcattcacaccgggtcataccaaagagtgaatattttttttgttttcaccgtttccaattcacaatgctagaacatagcacccccactagcgcggatacttgacatggaatcaactatttacaggcacgcgcgaaattctaacg

SEQ ID NO: 137085 - DNA, 197 bp, Glycine max
  unsure (1)..(197): unsure at all n locations
  Clone ID: PAT_MRT3847_94798C.1
ataaataatatgatcattgatcatcacatcgtaccacaagatattataatgtcttctcttccttantgtttcttttttttgnnttactancacaattacgatgacaattaggaaaccgtcgacgatgatgaggacgatgacgacgatgacaaggaagatgacgcccaaggtggtgctgagggtgggacgcagagcag

SEQ ID NO: 137086 - DNA, 248 bp, Glycine max
  unsure (1)..(248): unsure at all n locations
  Clone ID: PAT_MRT3847_94799C.1
cagattttaaangaagncactagncaagggnccccctggcaaaagctctgcgaatgagaagaaccatctcgacctcagcaaggaggatctatatgccgactgcgactccgcgtcgagtacactaatcaggctctttgaggaggcatctgacaccaccccccctgaaaggttgatgaagaaggactcaaacaagcctttgattgagcgaatatcaagacagggtgacaacaacaactgggcagctggaa

SEQ ID NO: 137087 - DNA, 432 bp, Glycine max
  Clone ID: PAT_MRT3847_947C.1
aactgtccaaggtcctgtcactactaggtgtaatattgttgtttgtatgtatgtagtaagcctagtaataagagtactaagccttagcagtaatcttaaagctcgtaatttaaagggttttaattttattacgtgtcgattagtaaaattggtttggtaccgtaattggttaaacccgttgaagactctgtatttcaaaatattagatgggttatgctcatactaagtctaccagtaagaggtataatttgtccaattgcgtcatcttgtgggtcttcggtaataaagacgttgatagagtacaacgtcataattctccgtccatatgcggctgcttagaaggttctagacccccggtcggaataggctatctcctgaattatcaatttagcttatattaactccagagcccgcccctgcctctgcctgctg

SEQ ID NO: 137088 - DNA, 468 bp, Glycine max
  Clone ID: PAT_MRT3847_94800C.1
ttccggctcgaccccgcgtccgaatttttctcctcttctgtaaacttggtccatccatgtcaatgttttttggatctcagtcaccaccgttccctttccatcgccaattaatccccccctcaatttttacttccctctcatctgccatacatacacgtctctataaacatcatccagaaaaaggtgcattgcattgattgttttctttatcgaatatatatatatatatatatatatatatatatatatatatatttgcattgtaatttgtagggtttgtgagatgtcggatgcgccaccgagcccgactcatgagagtggtggcgagcagagcccgcgcggttcgtcttccgtcgcgaggcagcaggaccgtgacctaccgattgccaacatcaggcgcattatgaagaaggctctgcctcccaacggggggattggggaggatgccagagacaccgtgcaggaatg

SEQ ID NO: 137089 - DNA, 609 bp, Glycine max
  unsure (1)..(609): unsure at all n locations
  Clone ID: PAT_MRT3847_94801C.1
ggttggcctggctggtccagtctaagttttataacactgcacacaagatcccttgggtcttgaatcacagacagtgcattgccccatttaccttgggctgaaattcaaccttttattaaaagaccgaagacagcacgttttgaaccggacgcgtgggcggacgcgtgggcagatggtgctctctgggatattttttggagacaggatgtccctaagttgcaggaatatctgaagaagaatttcagagagtttaggatgattgacttttggatgtataggtctttgcgcctttatcttattctgcaatgactctgtgagagaggaagaataaaagggaatggaagtttggaaaattttagactagaagaaagccaacttagagttgagctttttaagaacaaattctatctcaaaatcaattataagatgaacaagatttttaaaatttaaataaccaaatggtctagatctaaaaataagctctatttcacctagatatctagctttgatggttgccaccttagattttgggaaatttaattcatgtgccatangaaaaagaagaaaattattcatttgccaggttatttctaggtggtatgtttatct

SEQ ID NO: 137090 - DNA, 468 bp, Glycine max
  Clone ID: PAT_MRT3847_94802C.1
ggatgcaactgcggccggatgcagttccttcttaaaggcttctaaaaaagtaccgaagcacaaaaaaataaaggttaaggataatgaattggggcagacaggctgagatttgtaacgaaaaaccctagcgcacgggaaaaacatatgtccttatagggacaataattatcctatgagggctttaaactgggcagactacataggagtcggggcgcaacacttatactagactccgacccaatcttcctctagagcacattctattggcaaaaaacccatctttgggggagactttctctaggaaattggaagccctgatttctcgacccagcttatttaactcttggatggaatggggcttcagggtttcctgtggtgacctggggatcttaaaggggcttcatgctttgtccacactctccttagtcaaagccgaatcaatgggaatcgttttaggcaaaaacttta

SEQ ID NO: 137091 - DNA, 324 bp, Glycine max
  Clone ID: PAT_MRT3847_94803C.1
aacaaacaagcatactttttttttgaaattccttagaaggaaccccaaaaatgaaaaattttttttatttttttcgcgtagaatacatttgcttttaaaatttcaattaaccatacataaaacttaccccgttattttttttaacctaacttgggaaaaaaatgttgtttgggatgcttttgctcaacatttaccaatttaagctccttttggggaagaaacaagaccattttttttttttccaacctctttctttgtttttgaagattatttttttccatttccctttccttcttgggggtaaaccccgcccactttaaacgg

SEQ ID NO: 137092 - DNA, 1344 bp, Glycine max
  Clone ID: PAT_MRT3847_94804C.1
gtcggcctgcattccacctcttcagcggcatatgcaacacctttttgtcgatcatttcttcaccggggacctcgagcttctccctggtccacaaaacttctccgacctttctccgaaatacttgatgatttgcaactcaatgaccctttcatacggaattggattgacctcctctcattcttgcttgctggggtcaaggctaatgccgtactctcagcagagatgatttacatgtttgcagagtggtacaaaccgggatgctgtcttgagtacccccttcatggaagtgcagctattattgatgctcttgtgcgagggctagagaaatttggtggaagaatttctcttcaaagtcatgtggaaaacattgttgttgaaaatgacagagccattggagtcaagctgggaagtggtcaattcatacgtgctaaaaaggctgttgtcagcaatgcatcgatgtgggacactttaaaattgctacccaaagaagttgttccaaagtcctactcagatagggttaacacgactcctcaatgtgattcattcatgcatctccatttgggatttgatgctgagggtatacgcagtgatctgggaattcatcatatagttgtaaatgactggaaaagaggagttgatgccgaccagaatgttgtgttgatatcaatacctagtgtacttagtcctaatctggcaccgcacgggaaacacgtgttacatgcttatatgccaggaactgaaccatttgagttgtgggaaggacttgatcgtaggagtgctgaatacagaaatctcaaagctgaaagatcagaggtaatgtggaaagctgtggagagagcagtaggcacaggtttcagcagggagaaatgtgaagtgaagttggttgggagtccactaacacatgaaaggtttcttcggaggaacagaggaacatatggaccagccgtgcaagctggttcagatgcctttcctggacattcaactcccattgcacagctttattgttgcggagactccacctttcctggcattggagtcccagcagttgctgccagtggtgcaattgtagcaaattcattagtctcggtatctcaacattccaagctgctcgatgcaattggcatataaaaccaaggtttcatcttcatgtccccacgttttcacactggaaaagattgaatcttttctacttctcgtgcaaaaactacatcttggtcaataacttatgtgtggcttttcacatctagcatgttttacctagctctcttcattcaattttcacttgtaattattactagactaaatgttacctttttaatgattcacaaaaaattgttggaaaaa

SEQ ID NO: 137093 - DNA, 480 bp, Glycine max
  Clone ID: PAT_MRT3847_94805C.1
acgggctgtccttttttttttagaatataaatctttgctatttggtacatttcaatgcctgtacttaggcgttactacattagaagccgttgcggacacagtatttcattggaccacacaagagggttaaaaaaaagtaccggcctgaacagggtaagatcaaggagtgatttcagcgccagctcctaaggacaagccataagaatgccatatacataattcacccgtgctaaatcaaatctattgatctaaaaaagaagagcaaaaacatgattgggtttatttaaaaaaaatacaaagagattgtagccataatgggtcggtctaggcattatgagctaatggagttgggagaagatcgtatggagcccataaggcatacaagggacaagggcggttgatgtataagtcggcccaatgctcgcccttgacactccaatggaagaggctgaccgggcccggaagctagtctatgcaaaa

SEQ ID NO: 137094 - DNA, 491 bp, Glycine max
  Clone ID: PAT_MRT3847_94806C.1
aataaagaagatttgtgttggttcaatatggcagcagactcaacccctttccacaacctttcatatgctaacaaagcaagaatcagatttgctccaggttgccaaattaaatgataagcagcctttgaatgaagtagggaacacttggagaaaaggactaggagcagagaatgaagacataggaggttgtgaattgtcattgtcaatcacattgccacaaccccatccttcctcacagaaaagtaatacttcttcagtcagtgagaccagtgaggcattttcattgtgccctgagtttagcaacaacgttatcatgggctgttctagttcttccaatgtcccaaaaacaattaatttggacctttctttggccatttgaatgttagtattaaggactaatttactcgatctaattactctattcattttagaggaatcaaatcagatattaacatgtcaagaaatgtgctatctattggaagggcagtgtc

SEQ ID NO: 137095 - DNA, 262 bp, Glycine max
  Clone ID: PAT_MRT3847_94807C.1
ctccttttctttccttcgaacgaaaaagagaacaaaaaccagaaaccctttccccgtgaaaacatctacctcaaacctcaaaccctcatcactctcattcattcatcatactaatcctcgttcctttcacttttctatataccccaaagcaaaaaaagaaaaaaaagtcacataaacctcacttcctcaacctcaatccaacacaacaacaaaaaaaatcaaaaacaaaaaacctcactttgatcacacagatcacacacac

SEQ ID NO: 137096 - DNA, 330 bp, Glycine max
  unsure (1)..(330): unsure at all n locations
  Clone ID: PAT_MRT3847_94808C.1
acatagtagtcatgcgctgcgcgtgcagcttttctcttggagagaaaagctccaaagtgcccaaatagccagatctttataaagaaactagaggaggctcaatggtatctgagcgcatgcaacttttgtcttggagagaaaagctccaaagtgcccaaatagccggatctttataaagaaactagaggaggctcaatggtatctgagaagcttgccttgtgttacaccatatntttttttttgctagttaaattggctatgttcccattgcctgtgggatgtggactacattcggaaagtggattgtgctttaaagtgtagtccaattga

SEQ ID NO: 137097 - DNA, 982 bp, Glycine max
  Clone ID: PAT_MRT3847_94809C.1
taaaaaaaagactttattttattatataaaggtgaattgcgtatagagcattgaatgattgtaattctacaaccagatatacttattttttgctacatgtacttaaaaatatttatattattacatctcttatattttcacccaccacaggtagcacttcttttcttagcttttgcctttgattacacaccaaggacttcaactaataaatagtctatgctatattacagtgaaaatctgcataccaattccaaggactatctatcatgttcatccctcaaaccaaataatccttcacttatttttccacatgaagatgctgaatgttggtgtctgctatgcgctggtcttttgagaattaatggtgtcactaaagtctgctctgaactgatagctggagcttcatttgatccctcattactctcctcagtattttgttggaagatgttcgaggaaagtctggcacaattttaacaaggcttaccttaaacaaagggttaaggttgctttgaatagctttagtgaatttcatctttagagtttctgcacttgaattgtatccttcctttaaaactacaaatataaccagttgttctgggcctctatttgcaattgcaacaccaactgcagctgtctccagaatgcattcatccgctccatcacagacacgctcaatttctactgaacttgtctttattccaccaagattcatggtgtcatcagccctcccttgcacaacaatatatccatcaactgttctttttattatatctccgtgcctcctaagaatcttctccttataaatgggcattcccttaaagtaaaccttctcatgatcagcattaagcaatctgtcagatgctcccagagagagaggaaataagcccacttccccaacacaagcaacatcatctggataaggaactccattttcgtctaaaatgacaaaaccagttgtcattgatgctgtgctaaatctcgt

SEQ ID NO: 137098 - DNA, 236 bp, Glycine max
  Clone ID: PAT_MRT3847_9480C.1
ctttgtttttgttttttttttgctttttttttttttggggggcggttgtggttgctccaggtgtaagtgggtccttgttttgtgcgggtgagcctcgcagccggggggtctgccggtgtagtccgtggcgggggggggctctcctagggccctattctggggggggggggggggtccgattcttttgggcgtcccagggggttgccctggccctggttccccccgtgcccggggct

SEQ ID NO: 137099 - DNA, 375 bp, Glycine max
  Clone ID: PAT_MRT3847_94810C.1
gggtggaaacaactaattgaaccttcttaaacaaagggattacacccccccttttggataacagccctcaactggggtcatgacatagggttactttttttcccctaaggggaaaattggcctctctaggggcgtttcccagatcgaaagagggtgattttgggggcgggggggcaaaaaaaaagggtttctttttccttaaaaaacccccgagggggggggttagctctttaaggatcaaaactttcgcatttgagtctatagggggggccaaaataaaaactggttttatccacccttaatttgaaaccccctttaatcttacccactttttaaatttccaaaactgtccaaacccaccaatttttttttagt

SEQ ID NO: 137100 - DNA, 250 bp, Glycine max
  Clone ID: PAT_MRT3847_94811C.1
tggatattcaatccacagcggagtgccactaaagacattcagacactggctagattcgcaacgagatgagaacattcaccctactttgtgtaaaaaaatttctttatatgtggctatgtctcatatgtaaaagttactcgcagaaggagacgacgatgagaagcagttttgattcggataatgccttattcgaaaaggacaaactcgacggaccagagctggacacccttggacatgccttgcacaaagt

SEQ ID NO: 137101 - DNA, 771 bp, Glycine max
  Clone ID: PAT_MRT3847_94812C.1
ggctcgaggcaacgttgaaaacagagtctctgtttctctgaagctgaccaaagaccattctcctgtctaatttgctggcattattgccgtcttgttgtttttgcacccaaattcccttcccttgcataacaagtttcaatatttccaattttaagattccaaacacacccccccttcctcttttttttatcccttttctgctttgttctctgtagagtaacagatctttgcattctctggttataattccgagccgggtttcttgttagcactgttaacttcctctaatggctcatcgctacgatagtaatcccttcgacgaagaagaagtcaaccccttctccgaaccagctgtaaggggaaaaacatcaagccaatcaagttatagcgggggtgcattttacactacaaatcctggaagtgttgcccctgccacaaattcaaggctatctcctcttaatcctgaacccgctgattataactatggctttggtgcgacagttgatatacctcttgatccatcaacggatttgaaaaaaaaggaaaaggaactccaagccaaggaggctgaattgagaaaaagggaacaggaagtcagacggaaagaagaagctgctgcacgagctggaattgttcttgaggagaagaattggccgccatttttcccaattatccatcatgatattgctaatgaaataccaattcatcttcaaagattgcagtatgttgcatttacttcattgttaggattggcattgggcctcacatgga

SEQ ID NO: 137102 - DNA, 551 bp, Glycine max
  Clone ID: PAT_MRT3847_94813C.1
attctcctgtctaatttgctggcattattgccttcttgttgtttttgctgccaattcccttcccttgcatgacaagtttcaatatttccaatttcaagattccaaaaccccttattattatttgtttatttttatctcttttgtactttgttctctgtagagtaccagatctttgcattccctggttataattccgaggctggtttcttgttaggaccgttaacttcttctcatggctcatcgctacgatagtaaccccttcgacgaagaagaagtcaatcccttctctgaaccagctgtaaggggaaaaacatcaagccaatcaagttatagcgggggtgcattttacactacaaatcctggaagtgttgcccctgccacaaattcaaggctatctcctcttaatcctgaacccgctgattataactacggctttggtgcgacagttgatatacgtcttgatccatcaatggatttgaaaaagaaggagaaagaactccaagccaaggagaatgaattgagaaaaagggaacaggaagtcagacggaaag

SEQ ID NO: 137103 - DNA, 538 bp, Glycine max
  Clone ID: PAT_MRT3847_94814C.1
gctgcgaaagacgacagaagggggaggcgaatcacttcatccttgggcaataaaaagctgattggatcatttgatctaaaaaagcttcaaccatcatattgttaattacttccaattaatatgggctgtgctatcattaaccttctcctaataatttttatatatgaagccagcgccgacacacaaactgcaacagaaccagaagtggtcagaacttcacaagacttccactactgctgtgattataagcaggctagaggaaactacgcagccaacagcccctatcagaccaacctcaacacccttttgtccactctcacttccaatacagatattgactacggtttctacaatttcacaaccggcgaaaaccccgacaaagtgtacgccattgggctgtgcagaggagatattaatccagatgaatgccgtaactgcctcaaactttccagagccaatctcacagagctctgtccagttcagaaggatgcaattgggtggtacgaggacgacaaatgcatgttgcgctactcagact

SEQ ID NO: 137104 - DNA, 249 bp, Glycine max
  unsure (1)..(249): unsure at all n locations
  Clone ID: PAT_MRT3847_94815C.1
gnnncaatccaatttaaggccggcacgagcatggaatttttattctaacattttctgggcaataagttcattggggaccaataaaacacaagtggagcaccgaaaaacaccccctttttatccaaaccccggagtcccaaaggattgcttttccctttggcacaaaaaaagccttttctttaacccaacttgtaggggggaaagacccccccccatttaaagtgggcttggcaaaaaaggggccttttt

SEQ ID NO: 137105 - DNA, 242 bp, Glycine max
  Clone ID: PAT_MRT3847_94816C.1
catccaaatcagttggttctttttttttctaattttggtcaagatgtctagaaaattcagtataaattttagctcaaaattcgtagtgaccaattcccagtaatttttacaagtttggatgttcaagctgccaacaccaacgatttcaacctagaaatcaagagtagtgtttatgttgcttaaggcttggatagttacaatttgtgtttgcttatgctcaactgtcttgaataacacaattc

SEQ ID NO: 137106 - DNA, 465 bp, Glycine max
  Clone ID: PAT_MRT3847_94817C.1
ccggaaacccggtcgacccacgcgtccgcttagtatacctcaaacagcataatcagttgcttttccgttactctcgctgtgaccaaacccaagaagccctccacctctttgtctcactttatcgttctggtttatcccctgatagctataccatgtcttgtgttttgagtgtttgtgccggttcctttaatgggacggtgggtgaacaagtgcattggcagtgtgtcaagtgtggacttgtgcaccatcttagcgtaggaaactctcttgtcgatatgtacacgaaaacggggaatgttagagatgggaggagagtttttgatgaaatgggtgacagagacgtggtgtcttggaattccttgctcacgggttattcatggaatagatttaatgatcaggtgtgggaattggtgtgtctggtgcgtggtgggggatgcggacctggctgttgtgctgtgggtgctg

SEQ ID NO: 137107 - DNA, 739 bp, Glycine max
  unsure (1)..(739): unsure at all n locations
  Clone ID: PAT_MRT3847_94818C.1
ctttttttttttttttgcatgaatacattgtaaaattggcgtcgtcattaagatttgcaattgatctaaaagatatttttacatcaattttcaaacaaccttgtaaaagacacaatcggtataaccatatttatttacataatttctgtcaatcaacctagcggtactaatgtaaaaaatcagattgattgtagtattttttaaaaaatttaaaaacctaattaaattttttaataattaaaatattcaattgaacttttaattataattaagaaacctgtattataatcaagtcttattttttgaaaaaataaaataatttttttaacataatattattccgtgggcttaatgtcccttttaatcaattaagttatattttaattttgttttgttacattgaatttttaaaaaattattttaattctttatattcttaaaatatattttttggttttctgtttaaaacgtttaactcatagtattttaaattttaaaataattaatttaatatactgatcgttaaaaatcatcactgtatttattttattttaaaaattaataaacactctaaccccacaaacaccaacagtcaccctaatcccctgtacgcaccgttgctggagcgcaccaccaccatcttctcccattccggcgaccgtccaaatgaaagaaagaaaggaaacttgaacgaagacagacttgcttncactattatagattgctactttttaattac

SEQ ID NO: 137108 - DNA, 525 bp, Glycine max
  unsure (1)..(525): unsure at all n locations
  Clone ID: PAT_MRT3847_94819C.1
tgggacggctgggggttggggccggaatccggggggggagggtccggaaattagggctatgatacgggggggggggggggggtcacatnaagataggggggggggggggtncaaaaaaaggggggggggggcttccaacgaatctctggcacacaacagagaactctgaacatataatcaacctaagaccctgctttgattctnaactataaaggggggatggggggggtttngnnatnnnngttnnngcaccnaaanaaaaaaaaaaaanaaaattgttantaaccccggggggggggggcttntannactttanatncattnngtgggggggaggtaagaaaaaaaaaaacaattacnaaggttggccggtgattggtcntgtcactgagtaaataatttntttttagggggaaacttctaagaangacccaacttcangtggggtccatttatacctggagcctggacaagatattggtccttacactcattaccaaatattgggaaagaatncatggcatg

SEQ ID NO: 137109 - DNA, 359 bp, Glycine max
  Clone ID: PAT_MRT3847_9481C.1
gtcttatctcttatttttggagatttcgattggggatctttttggaagcaagccaaaagtataggtgccccaagttaggatcctcttattaaaaccctcatcttaaactggaacaaaactcccaattactttaactcctataacccgggaaaataaaccgctgtttaaagggttacttccctttcaaagggaataaatctatgcatgtcccaatggcaaatggtttttgtttttctctacaaataaggggaccaatctttaacccctttggaacaaaccccttggaaatactggtaaatctgaagggcccccataaaataatagctatattttgcaccatttgcccaatggctactggg

SEQ ID NO: 137110 - DNA, 433 bp, Glycine max
  Clone ID: PAT_MRT3847_94820C.1
ttttagcataaattggtcttatcggagataaatcttgattacaagtaaataaaatcttattcgctgagtcttacgatcgtaacatcttgactttctcatttcactacaattttaccctcttttttgttttccttttcatttaacgtacattacattaccttattcccagacggatcaaaccatagccccttatacattgtctgatgtattgtttaagtaaaaacctacttaaaactatgtagaaagttgcttgacaaacgtgaacatacatataaaacaattagtggcactgcgaatcacacgattctgcgtgaacatacactgtcaactgttgtatttgcggttgcggttcttgctccttggtttcttcagcttcttggactaacttgaccacacgattctgcatttccatgctcttaccccatagaagaat

SEQ ID NO: 137111 - DNA, 198 bp, Glycine max
  unsure (1)..(198): unsure at all n locations
  Clone ID: PAT_MRT3847_94821C.1
cnncagaagtnaatgtaatggggcatagtatcgatgctcaagggcnaatttatcagggagtaagtttgtgctttccagatgaaccantggngcatgccacagggnatagaatagaacatgncaaattttaantttatgattagnttatatttagnagaatatttgcctgaacnttaaatattgnaattttcnnnnttt

SEQ ID NO: 137112 - DNA, 211 bp, Glycine max
  unsure (1)..(211): unsure at all n locations
  Clone ID: PAT_MRT3847_94822C.1
taagtccatgaccagccaccaataaaaccatgaaaactattatttgacgggctttatagcagtaaaatactacgaggggcaaatggagcccataacacatcactactgtaggtggaagattctgcactccttccacagggtgtggcgctgtactattaacaaaaaaacttnaaattactttagagtggttgggcaggtgggaagggcggaa

SEQ ID NO: 137113 - DNA, 164 bp, Glycine max
  Clone ID: PAT_MRT3847_94823C.1
ggctcgagctcgaactcttgaatgcttgacctgtggtctaactaaattcgatgatcagctacccaggacgaggcaatggaggtcgccgtagtgcagctggactcacttgagagacgcataacgtccatagcacactacggtgctgttcccacagatctcagaag

SEQ ID NO: 137114 - DNA, 187 bp, Glycine max
  Clone ID: PAT_MRT3847_94824C.1
aattcggctcgagggcattgaaaaggaagtgacggaagagtttattgtagttgaagtgaccgatgagaagatggacgctgaagtgatagttgaagacaagaaggtagttgaagtgactgaagagaactaaggaagtggcagtgaccccaggacataaacaagtggaagtgatcgacgagaataagga

SEQ ID NO: 137115 - DNA, 195 bp, Glycine max
  Clone ID: PAT_MRT3847_94825C.1
gggtgtttaaaattaaaaccgagcctctgggccaaatgagagacagagcgagagataatcgtaacaaaagctgtatctggaagtagatcgacatacgattttagccatttgatcaacaacaccctaataccgatcataatatgctattgctcgtatggcaaacctcagcactattcttttcacggccgatgccgc

SEQ ID NO: 137116 - DNA, 475 bp, Glycine max
  Clone ID: PAT_MRT3847_94826C.1
cttcaatccctcgccttccgccctcaagccgaacccgacccaattgacctcgccgtcaattaccctccgccgagtttcacccgtcgttcgacctccccgagttaatcgaagatggccccggccctgcaggcctcgacggccatgctcgcgcgccgccagctcacctccagctccctggtggccgcgagactctttgtcgcccagcagcgaggatacgcaacgccccaggggcccccccccgccaacttccggacgagcaggcaggtgcagtggacgtgggataaggagagcaccctggaccgcgtgggcaagtttttcctcatgacggagatggcgaggggcatgtatgtgctgctcgagcagttcttccgaccaccctacaccatctactaccccttcgagaagggccccatctccccccgattccgaggcgagcacgccctccgacgatacccctctggtgaggagcgatgca

SEQ ID NO: 137117 - DNA, 295 bp, Glycine max
  Clone ID: PAT_MRT3847_94827C.1
tttttttttttttttttttttttttttgtttgggttttttttttttttttttttgggcacaaggacagttttatattttgcctttttgacagcccaagaaggaagggtccattcctaatcagatgttatcggtttgaaaaacatcaatctattacattgggaagcaacctgggggcattccaacaagaaaaatttgaattcccctaaatccattcccttgggggcacattaccctacttcttttagaggttaatttacacacattctcaaattaaaaaattttgccccacccccc

SEQ ID NO: 137118 - DNA, 622 bp, Glycine max
  unsure (1)..(622): unsure at all n locations
  Clone ID: PAT_MRT3847_94828C.1
tgcacgcgggggggaggtaagaattnggttggagatcaataagggcaaaggaagaattgaagagacacacaaaaatattatttgctcaagtgaatggagccacgccttctgacaatattctttgtggttctttcattctcaccatttgttcagtccttggtgcgtcattacaagtttagtgtggtcttgaagaataccactaagctttgctccacaaaatcatttgtcacggtcaatggacaatgtccagggcctactctctatgcaagagaggatgatacggttattgtaaaggtcactaaccacgttaagtacaatattacaatccactggcatggaatcaaacagcttcgaactggttggtctgatgggccagcatatgttacacaatgtccgattcagccagggcagagctatgtctacaacttcaccatcaatggtcaaagaggcacacttctctggcatgcacacatcacgtggctaagagccacggtgtatggtggcattgtcatattgcctaaacgaggcatttcttatccatttcctaaacctgacaaagaaaagataatcattctaggtgagtggtggaaatcagatgttgaagcaattctcaatcaggctg

SEQ ID NO: 137119 - DNA, 521 bp, Glycine max
  unsure (1)..(521): unsure at all n locations
  Clone ID: PAT_MRT3847_94829C.1
ggtacttgtccgaattcccttttacccacgcaaatggcacttcaatgactctatctctccgacacagaaccataacctcctccaacgttcgacctttaactttgttcctacgccaccacacagattcacaattaccttatggcccctgctgcgtcttctccaccaccaagcttcgctctctccatcagagacgaccaccgcaaagacgaggagagcaagtgcgcttaccttgtggtagctctctgcccttgtctcgtttgcttcgttcttctcttaattgcactttccatcattctcgttgtcaaattccatttcttttgccacacccctctccactccttactctacaaaaaaaactgctgattccccatctcgccactttttccgccttaccctcttccccttttcatgaaaagtttccgtttttgaatagtcctaggacatttgctagtaatgctgattctggggttgagaatgatgatgatgatgatgatggtggtgatggtgataagggntatgat

SEQ ID NO: 137120 - DNA, 148 bp, Glycine max
  Clone ID: PAT_MRT3847_9482C.1
caagcagaagcctatttggatgatgaaacctgaacagattacgaaggaagaatatgctgctttctaggagagtcttaccaatgacggggaacagcatttggctgtgaagcactttgctgttgagggtcagctcgagtttaaggctgtc

SEQ ID NO: 137121 - DNA, 380 bp, Glycine max
  Clone ID: PAT_MRT3847_94830C.1
aaaaattaatttttttaagcatgctcaaagaaattacacaggtggggacaactcaaaataattaatccgcaccaaaaccaaaccttgaacatatacaaggctgaaccctaaccttatttttgatcaggcaacatgttctaccgcctaatggaaggaccaaactgacacgaacataagatagtgctaaacgattgcgctactgccgtaagatgcctcggagtcttaaggatacaaacttgttgggacttaagctcttgatgtagaaatccctggattaacagtccatgccaacttaggggccccgcaaggtaaaatccaataattcattccaacgtcttaataacccttgtcaggcgaccaaagattacaaaggcggggac

SEQ ID NO: 137122 - DNA, 612 bp, Glycine max
  Clone ID: PAT_MRT3847_94831C.1
ccacgccgtccgatctgcttctctcgaacagacgtgattgagagagacgtgctcactgtactaagtactacgctgctactcatgtgggcatgctccgctcgccatgtgtcttcctctactacagaccacagtgagaagaacatcaactacgatgtgaaccacgaccctgtcttctcaccatcgttagaacactctatacatctgcataaaaagcactcagtaaacagtgggcaggctcgccaaagcctacggccccgtagagcgtttcaccataggccactcaaccaccatacaactctcctcattagatgccacacaccaggatctccatacccatgactcattattctcgagacagaacaggccccgacctcacatacctcgcactaccacaaccgacacagctatgggtgttctgcctgtctcacccctctggcatgaactaagagaaatctggcacggagcactcgtttccggccgagactcttgacacaagcacggaccttaggcgcatgaacatgaaggagcttcttaccgatgtccgacactggaacctcacggcgaagcggtagacactggaagagcgccttcatgacacgcagtaactattta

SEQ ID NO: 137123 - DNA, 480 bp, Glycine max
  Clone ID: PAT_MRT3847_94832C.1
atttttgtgaattgtctttatcctgtaagtcaattaccttcagaagctgtcgttgtaaatgttacatgtggtagtggacgtggtggtttacccaccactgcttgtactaccgatgatcttaacaaacgcttcttatatattaacaaaaggtttcgcacaagacttgggaaaggtaagaaaaccggttttcttactatagtttatctctttgccagttatttttactgtcttgttcttttcgccttttatagaaaggatatttctcagttttttaccccctcttatatcctattttttcctcctacctcttatgatatacctgtaataaagtcctttaaattatcttgcatgtattgtgcaactctttttttccatttttgtcttcctatttttttccttattttttttttactttttattttaaggcgcttttacatttgttcttaataggtgttttttatatatttttcattaattttt

SEQ ID NO: 137124 - DNA, 349 bp, Glycine max
  unsure (1)..(349): unsure at all n locations
  Clone ID: PAT_MRT3847_94833C.1
accggaccgatgatatcggtcgacaccacccgnccggaacgtacaatctttattttcccctgaaaattgaatggcatgtgattctttctatttaactcgtgtttgaatgcatccttgtagcaaacctttccttgatgttacatccaaaattgtgagcnnanaaaaaaaaaaaaaaaaaaaaaaaaaaaaaaaaaaaaaaaaaaaaaaaaaaaaaaaaaaaaaaaaaaaaaaaaaaaaaaaaaaaaaaaaaaaaaaaaaaaaaaaaaaaaaaaaaaaaaaanggggggggccgtttaaaaggatcaaagtttacttccccgggcttgcaaagataaaatttttttttggg

SEQ ID NO: 137125 - DNA, 229 bp, Glycine max
  Clone ID: PAT_MRT3847_94834C.1
agacagaagcaatcgcggaggagcctattgaactggggggaggaggaatgatagcggacaaaaacagagatggacaacactagaaaaataggccgatacagcacgaagagagatgacgcgcgcaacaagaggtgcacggaaaaaacgtgagtctggagacgcagatgaaaaagagcgggggggctggacagacaagtgttttaacaaacacaacagaccgagcaacatg

SEQ ID NO: 137126 - DNA, 195 bp, Glycine max
  unsure (1)..(195): unsure at all n locations
  Clone ID: PAT_MRT3847_94835C.1
agntnggggcagtagcncgagattcacgtgnagttgacaaaaatgaagacgattctttaccaacacgagaccatgannacnntacctcggaacggacgtgnagcatacaagagttcatgccaaaggtacatncganagttgcaggggcccccgncggagaaaattggtgacgnagaanttacaagacatttggac

SEQ ID NO: 137127 - DNA, 705 bp, Glycine max
  Clone ID: PAT_MRT3847_94836C.1
cggacgcgtgggtttttttgtcatggatatagagaaggaccaacaaattacaatcattctaggaagatcctacatgagaataaatcatgtaaccatgaatattcgtaaaggaatgtacacacttagagagggcaagcaacaaatgttctactacattcaaggcattgaagattttcccaacaaatcggctcaccaaaaacaccatgacagtccacatgccatacatcaagctattgacgttaaagaaacgcttattaggaggcaacctggcattctaactttaactttttctttttgcattttaaattcttaggatagtttaaatttaaatttattgcattttaattcttagtataggttataactttaagtttggagttaaaaaaaaaatagtagcatagcactagcattttttttgagttttgttcatcatatgcagccttattaatggttagctcatttggaggaccacgtactcgctgtccaaggaggtggcaagactgcaatggataagaggagatgttgaggactctttagccctaaatgaagtcttctctacccctcttttttaactttttgttaatttcactttattagtttagttgtttagtgtatgtgtgggagtttaggaaatggtttattgttaggaagataaaggaacacaggtgattaagaagcatcaccattttcttgcaaacccaccat

SEQ ID NO: 137128 - DNA, 141 bp, Glycine max
  Clone ID: PAT_MRT3847_94837C.1
tgctctctctctcccgattacagtggactcttttctctgcatcgggtcacgttcacctgaaaagataaaacgcttgtattttggccaccttgattcaccattcagctagacagaacaccatacacagttgaaactcctcca

SEQ ID NO: 137129 - DNA, 586 bp, Glycine max
  Clone ID: PAT_MRT3847_94838C.1
acttctatccaaaagttttaatttagtaatatacgtataatttatcacttgcacaatgactaatgaggatttatctcttgcataattaaaaaagcatatacctaatatccaaaagtaggcaatgctttaagaaattacatagcatatacattttctcaattccgcggctaatgtgtatacatcaaataattaagagaagacaatttaagttaacatacaggtttctggcaagttttaacaagtttggggcattttatcagattactatagcttggtatagcacaaccaatcttcttcaattcttgaaatgcttgtatggtctcaagatcaaagccacctgcaaactgaaaggctggtgcactctgaatgcaaacttaactccttgtacaaaaaggttatcttcctgcaaaagttcatttgacactaattccttggtcatccgtttcatgaattcctttgccatcttcaatgaacttagcttcatctgaccaataatgcctatgtccagcatccattcccaagggatatggaaattcctgtatctcttgctagtactctccctcatcctctctttagcactcacact

SEQ ID NO: 137130 - DNA, 514 bp, Glycine max
  Clone ID: PAT_MRT3847_94839C.1
gaaaaacaaggcttaatgcatctcattgtggcgtgactgtaatactacgagatggtgtctagatatcactcgctctacgtctcgccatcgataatggagcgatttgtgctgatccgcagctacttgtcactggagtttattccattgaattttcccgaacataaagacctttgttttttgctgccgacccctgaattgcaggcctgcacgattaatatcctaacagttgctgtctacagatatcgctatgccgcaaccacgtgtggaacttcccatcggacaagttctctggtggccactgtgctgttcaaagactggggaactgcagtggcactatttgttttctaactagatcctcgatccaaggtgtggctcctatgttatttgacttcggggctgaaaagagccctgccattcaccccggaatttatgtctgcaacgatccgtttctccaaccctactgccgataggcgtttttgtctaccgttaaaaatcttacaccttgatttttgga

SEQ ID NO: 137131 - DNA, 146 bp, Glycine max
  Clone ID: PAT_MRT3847_9483C.1
tcggacaaacccatatgtagagagagaaactggcagtcgcatacatgacttacttcgatgccttcgcggacgacttgaacatcgactcttcgttcactcgccatcacgacgatgacgaggacaacttctctggctacggcagctac

SEQ ID NO: 137132 - DNA, 258 bp, Glycine max
  Clone ID: PAT_MRT3847_94840C.1
cgcacgcgtgggtcggaataatctctcgcgcaagaggcacgcatcgtggaatatcgcatcaccgctatggtggggaagcacacttcaggcatcgacttcgcacacgccgtatttaacggcgctttttacggcgcactgcaccgctgggacaaggagagcggcgctattaaacagacaatgaagactggtaacgcctgttacggcggtccatattctcgggccacatccagcatgctcgtgacaaacggtacgctgtgc

SEQ ID NO: 137133 - DNA, 427 bp, Glycine max
  Clone ID: PAT_MRT3847_94841C.1
aaataggtagattatataagatggatctatcgtatacttatgcaaagaacacaggggcagaggaagtggaagaacatgcgcttccatattattaactgacctactctattaaaacagcttggctgatcatttggctaaagccagttaggggtgcctcacagaaaaagagtatctttgacgttaaagcgcctggatctgcacgtggtgagcagggagccaacagaccatatgtgttttgcttcatcgcagactatctattacttggatggcagccaacctggtgactatggcttcgaccctacttggtctttaagacccacaaggtgctggaggattcattgagccaagatggctagcatactgtgagaacaagaactggcggtttgccatgttgtctgcatctggagctattgatcctgtggtttta

SEQ ID NO: 137134 - DNA, 1090 bp, Glycine max
  unsure (1)..(1090): unsure at all n locations
  Clone ID: PAT_MRT3847_94842C.1
ggcagaagagatgaatttgttatcatcgccttccagtgccgcttctacttctctatcaccttcctgttttcttccttgctaccctcatcatggtttcacttctctctctctctctctctctctctctctctctctgacatgggtttctggtttggttagcagggttctcttctggtaccttcaaattctccaagaaagagagtagatgtataaggaaagctggaagtatcactgcaaagttcgagttgaagccaccaccatatccactgaattctttggagccaattatgagtgaggagacaatcgaataccattgggggaagcatcacaggacttatgtagataatctgaacaggcaaattgatggaacagatctagatgggaattcacttgaggacactatggttattttgtacaataagcaacacattcttccagtttcacttttgcatcgctttatgcagcatgccttctcctgggagatttcgaaaccgatatgttgttgcgagcattatgtgagtaatagaagagcaggtaacaccattctaacattctctttccaatatctctagtatctgttgaaatttatgtggacctcaccaattcagaaatgagatccacatatttagtgagacccantatgaattttatccaacaaaagaatgtgccccaaaaagggtgccaaagagtgtgttactagcacttttcataccgttattagcgagagttgtgtccaatagataaatttaattatgaattgagacttttttgttatctttccagaaccggcgtcctgattatatatcagtgttcatggataagcttgtttcctgggatgcagtgagctctagacttgaacaagctaaggctttaattaccagtgcatgatgctgaattaaatgcagaataagtgatttatcctgatagtgatgatgaattggatggcgtcatgcggaatagtgaattatttttatctagaaagtgtaagcaggcacatcttttgtactttaaataggtgttgtggtatcagggctaaatctacttcattcctgcaggtcgactctagaggatccccgggtcaaagctgaat

SEQ ID NO: 137135 - DNA, 489 bp, Glycine max
  Clone ID: PAT_MRT3847_94843C.1
cgaacatatactatttatgcggccggagttttttttgggccgtatagcgcacactttctctctcactacactatagcatcctttgcttctattacaccgacacctaagttctcaccctccccctctcgcggggagaagaccttattccttcaagcccgaccaatgtactttatgagattcaccaaggcccaccagctgatgctgtttaacgaaacggaccccgtgacacctgagaaaggaagaagaaaggccactaagaagggggttacacaggcaaagaaaacggtggagtaccagaaaggggtggatgtgaacgggatgaatgtcttcatcaggaaactggcaccaccacccactagataacaggcaaatcatactagactactcctaatttctccacagccattacaacaatgtaatatttcattaaaagcggggccaaagtcattatttacatcaactaggtgctgtcaaaaggcgtctgtacca

SEQ ID NO: 137136 - DNA, 564 bp, Glycine max
  Clone ID: PAT_MRT3847_94844C.1
tagtctgcggccgccctttattttttttttttttactacggccaaattttttattccagatactataaattaatatttatgggggcaaatcttgcaataaaatcacatccttacatacaaatataatcacaacctcaaccataggatcaaatccgtccaaaatacaggagatggataccaccatccattgcgtaatgcacctcccccaacaaagctccaacattatcacatatcaagccagatgctgtcttatgtgaacaccaccattgctctcttggacgaccattaggcattacaggaagaaggaccattcactcattctatcctaccattcgatcaatccaatttccttgacacatctccaaaagctcagcaacctcatcagaatccgtcgacctatgatctccgaagccaccactactgtcataagcattatcgatgtcattaaacgcctcatgattcattaaactatgaatatcctctaacccgtcttattaccctaaaccacttgcatcttctaatgctaacactacctgtcatgctagcttcaactatcctgctaac

SEQ ID NO: 137137 - DNA, 384 bp, Glycine max
  Clone ID: PAT_MRT3847_94845C.1
gtgataaattattttgctctgttctgaaaacactcctaactctctctctatatagaaaatattataggagatatcctttcatgaaaatttaatctcttatctttcgatttatcattctcgttttattttattaaagaaaattctaatattaaaatgaaaattagtcaatattattaataaaattagtaagaaacaagaatctacttaaatatagcttaatgtaacaacatcccaatgaagtttgttaggatgatggctcatgctattgcaagaacatccattgatcatatcttatgtcttctccttttgtgttttttggtggtggtggttttaagtttactttattgtattggtgatttgattatgaatgaagtaatctaagtc

SEQ ID NO: 137138 - DNA, 216 bp, Glycine max
  Clone ID: PAT_MRT3847_94846C.1
ggatgacagcgttgtaatacctactactattactgcctgcgctgttatgggctgctacaagcctgctttcatacataaagaccacttgggtagtcgtcgtaataaggaaaatgcaactcagcttattccagaaggagctcatgcgatgcgatgattaatctttgataaaagacccaagggctgcggcccttaccaacataggcagtaaattgcccc

SEQ ID NO: 137139 - DNA, 227 bp, Glycine max
  Clone ID: PAT_MRT3847_94847C.1
gggctaattgcccacaccaactgagggagattggcgatcttaaaccgctagcttatcgtgatataaaatggcactgaagtatttgccggggtgacatagtataaaacaccttaatggcaattctggcccgtattacaaaaaccgaattattaatgtccgtgtttttagtactgagacaacatctggggggaaaaacctgagctacccgttcctaagaggaaattttc

SEQ ID NO: 137140 - DNA, 358 bp, Glycine max
  Clone ID: PAT_MRT3847_94848C.1
ttccctttctttaaatgctccctcctattttttttgttctctgtctcgttttttgaagacgaacattaaacaaccgttaagtagcttttaaagcaaactgctatacgcttaacatttgaagctaattcaaaaaacatcatcgagtataagtcatctttttgcggacattgtgtttgttttctaaaaagaatggaaactgtgtgtgtaaaatctgggaaggatcccactatctctattagtgggtcggtggacgcacgcgccaatccttctgagttgagcacggcggtgctcgccgccatggataaaccgccgtaaaggtctgcgttttcaaggtattcctttaggtaccctttggaat

SEQ ID NO: 137141 - DNA, 595 bp, Glycine max
  Clone ID: PAT_MRT3847_94849C.1
atttccaaatgcatcactcgaagactatgccatactgaatagagtaaacgtggagcatgatgatggtgcaatttgtaatgataaatatgtagataacgagggtgaagtttgtgaagatgaagataacagtgatgatgaagataccagtgataatgaagattgtgatgaagatggtaacagtgagaatgaagattgtgatgatgaagatggtaacaatgagaacgaagattgtgatgagaatgatgacaaaaatgatgaaaacattcctgatcataccaatgccaaaaatgaatgattcaggacatgagtatttcagtttcctttagaagttcaaattacaattctgatttctttgcagactgttttcggcgtatttggggttgaatgcaaattttggttaagttgtatctttagtttgttcgcctatgggtgggtgcctcttgtttcattgtatttaacttttgaagtataatctttgttattaattttttatccactcaatgctacctgattcctgctctgttctgccgagcatgcccatcagtttattattaagaaaaaaaaaaaaaaaaaaaaaaaaaaaaaaaaaaaagaa

SEQ ID NO: 137142 - DNA, 353 bp, Glycine max
  Clone ID: PAT_MRT3847_9484C.1
cccacgcgtccggtcgcaagcaaattgaatgaatcccacgcgaggataaagatgggggggaaggagcaggatgtgttgtttggagcgaacaaattccccgagagacatccaattgggacggcggctcacagccaatactacggcaaggactaccatgagccggcgccggcgccgatggttgacccgaccgagtttacgtcatggtcgttttacagagcaaggatagcatatgttgtggccacttttctgtttctctacattactgtcttaaccgttatgggagtagtcggtgctaagtctatgtgtagtaccgttgggattcaaagaatcgcttggggctttggtggcatgat

SEQ ID NO: 137143 - DNA, 414 bp, Glycine max
  Clone ID: PAT_MRT3847_94850C.1
aagctcggaatccgactcgagcgcgcacaacaaaaaacgacatcccagagagcacatcttacttaactctcttttcttaaaacccacatttctaatcctctatcttcgggtgtgtctattattcgatcttcgatcttcatccctcaaaatgaaataacccatttcattccacatctcccaacccacaattcagattataaactccttcatttagctttactacctctaaccactgttttattctcactgacaaactccaactaacatcaccatcccttaattttattattcttataacaccttcttcattaaaacctattctataacacactttcccacccctatttttataaatcctcatcccactcccatttattatattattacttccacatacctacaactatttcattc

SEQ ID NO: 137144 - DNA, 296 bp, Glycine max
  Clone ID: PAT_MRT3847_94851C.1
taaaggggcataagttactctgttgatcgagattacaaacaaagtgttatcaacattaaggtccttgtcttcttcgttgctacaattttggtagcatggctatgccatacgtacgatatgtaccctcgccgaatgaacactggccatagtgcctctactcctgaggtaaaattcccaagttgtacgcttgctctagaagcacacaacatctttggctttgagaccaatcctaacgagtgcgttgaagcaacaaacgaatatatccatggcgaaccatatagatcatactccagaac

SEQ ID NO: 137145 - DNA, 451 bp, Glycine max
  unsure (1)..(451): unsure at all n locations
  Clone ID: PAT_MRT3847_94852C.1
aattaggctcgaggttatcacatttgggtccctgacacaaagggtatttctattgaagaaatgcaatggtgtcacacttgagatatctgagaggtagctgctggttttattgtggtcctttcacaanctgatttaagaatttcacattttaatgtatctgggattatcgagtgatccaagtattataatatgaagaacatttttatggagctttccagtacctgcgcatagttcattgatgtgtctttgtaagacttggctttatgaatattcacttaatctagtgctactggttgttgtatcttgaatggtatcttattattttaatttttttttatgttataaattatatatttttggttttttgtttttttatttttttgttttttctttgtattttatttttgtattcgttttctttatttaattcatttcttttattattttgttt

SEQ ID NO: 137146 - DNA, 914 bp, Glycine max
  Clone ID: PAT_MRT3847_94853C.1
gtttgtccattgtctctactcttagaacgcgcgcttctaaagagaagagacaatggatcacttgagattcaacaaaaccacccttgtcctcatcggaaccctctcttgcctcctcctgtccatcactgccgtcccctcaactcgcgtcttggaactcgctcccagcgaagcccccaccgcggagcctatagcctccggcatcagcctcttcgacaatcttcttgccaaggaatcaagccccatgattctgaaattctgcaccggcaccgagaaccccaccctctgcgccgaaaccattgcaccatacctaaccggcacattcgacccgatccaggcgctagagaccgagatcaacgcgaccctggagaaggcggaggagatcgccggcaacatcaagaagatgctagacgacccgaccacgacgaagaacgccatggacgcgttgggcatctgccagtcgcagtacgataacattctagataacataaaggagactgtggagttggtggggaaccagaacgtggtggatgcttggtacaggttcagctctgtcctttcgtacaaagaagcatgcgaggatgctttcaaagagtctcccggggtcgacatgcccttccctgaagataacaccaagctgttccagttgagcggcaattgcctcgccgtcatggacggcattgttaacaatcacaagatgtaaattgtcgtgtgagagagacagtgggtgagatctagagaacaataggtccttattattactattattaaccacacgcgttgattaacaactctgtgtgtgcatgcatgcaacattgtttcttgtttctgatgagacagtactgttattttcgtcaatacgtaccacctatctgttttgcaactttggataacatataaattattaatccctcccc

SEQ ID NO: 137147 - DNA, 424 bp, Glycine max
  unsure (1)..(424): unsure at all n locations
  Clone ID: PAT_MRT3847_94854C.1
attcccggngtcgacccacgcgtccgctcaatacctgtacttacctctcgagctttaactttaaccacggaacatgtaaggaccacatagggtctgagaccattggccgctttctatcactctaataaggactaaccttatccacctttcgggtggactgctctatagtgaaattaataactggtgcaaacttttgctcatacctatacacactgtcttgttaacacatcactttctgcctggaaatctgcatacccaccataagatttgcacggccataaaaattctagattggaccttgaactatatcactatacttccacattcattctaataggtcttatccacatcttcactttcatgtgaaaaaaaagcagaggtattttatgatgagcctccgagcagagccaactcagggaacgtg

SEQ ID NO: 137148 - DNA, 367 bp, Glycine max
  Clone ID: PAT_MRT3847_94855C.1
cgtttttccaccatctggcaagatcaaattttttactctttcctaccttccataccttgatgatgcacatttgtcgaaagaagtacaataccttcttaagaagggatggattacttgcttggaattccacttggacctcagtcttcaagtcccgtgagcacccctatgtctccacccatactacgatggacgctactggaccatgtggaagctgcctatgtttgcctgcactgctgcttctcatgtgttgacagaacttaaagatgctaagactgcataccccaactgctgcatccgtatcatcagattcgacatctttcgccaagagcagtgcatcaccttcatcttctacgagcccccaagcttc

SEQ ID NO: 137149 - DNA, 235 bp, Glycine max
  Clone ID: PAT_MRT3847_94856C.1
cttcctttgacagttgcattgtgctgtttttttttttttccccttttcagggggtttctctgctttccttcgggcggattcaggggtcatgtgaacccctttgaaaaaactggcaagtggttaccaaataagtgaactccccctctcttgcttcggggttctcctgcttggtttcgcgagcagggggcgcggcttaagtgccaggttcaaggctgaaagccctccacgcaagggt

SEQ ID NO: 137150 - DNA, 550 bp, Glycine max
  Clone ID: PAT_MRT3847_94857C.1
tgtatgtcgacctccctgcttggggggggggggggggcgagaagttgagtcacaacaagagcgaggaatagccaagaaaaggcaagatacctggttgcaaatctactaacgctgctaggctaaaattaacggcagaggattgggtaaatgggtaggtcaatcaatcaatgttcagaaaaacaacataacaaaaagtaaggaaaaaaaagcccgcaaagtacatgtccagctataggctgccttacctgtttagaaaacggagcttattcatcgagcgactacgaagctcgtactgggtgggtttcgggcactaagttaaaggtggcggctgcaacctttctactacgtaacgagttataccctactaaaggttgtacaaagatgaaaagtagtgtacggggcggtccaagcgcggcacatggctatattgagtatgggccgcgtagctgggtgtggctggtgatgctcttcccagtgcccgcagggccgttggcgacaccctggcgggcgtgctgtggcgcgcttacggaaaaggggggtaggcaagccc

SEQ ID NO: 137151 - DNA, 412 bp, Glycine max
  Clone ID: PAT_MRT3847_94858C.1
gtttacatacgtttccgtgaatggaaatggagcacagagtgattccgttttccacgagagggtggaggaggacttatgatgttttcctcagttttagaggagaggatacccgtcttggtttcactggtcatctatacaacactttacgtcatatagggatcaacactttcatggatgatgaggcgcttgagagaggagaacaaatatcagaagccattttcaatgcatttgaagagtctgggatagccatcgttgtgttctcgaaaaactatgcatactcaacatggtgccttgaataacttgtcaaaatcctcatttgtatcgaaatctaaggaacttaaagtttatccactattttacaacgaggatccatctgaggtacggtaccagagagcaagttatggtcagcaat

SEQ ID NO: 137152 - DNA, 529 bp, Glycine max
  Clone ID: PAT_MRT3847_94859C.1
atggacaatattattctttgagtaccatctccagcagatcaggaactgctggcctttactaagagactccaacataagagtgattgacagatatcttgggcctggaaggagcgacaggagcctaagaagatcatgcagacccagttgccatggtgtggttccaaaaaatctatcgacggctctgacggcccttattgaccctgattatgctgtctagcgaaggaatctgtgctattttaatagctaccatagcatgaataactggaggatgtgtctcctaaatacctgaagtcgtgatccgcaccgtgggtctctgtgacaaacagcgcattctggatctctataccgctgtccacaggacctacatgactgtggctatgtatctctgtatgccaaaacttcagattgttggactgacagttttcatagttgcttgagcagttatcacaccgcatggatgctacgatccttatgtttttgcctgacctggatactcacattgtcagaagataaatgggttgcattccat

SEQ ID NO: 137153 - DNA, 315 bp, Glycine max
  Clone ID: PAT_MRT3847_9485C.1
gcttaaaatttagcgggttatgttgtgatttttaaatttagtaattgtaaaggtggaaacacaaaattacagccggccccaggccaaaaaaacccgaacacgaaaaggaggcccggaccaggggcacccgccgaaagaagaggataacacacattggctacacgaaaacgacaaacaaaggcccggcagagccaaacagagacgtgacgcaaaaaaaagggggcacctaacaaataataactgcaaatggcggccaaaaaggaaggggaacgcaccctgaagaccgaactacacctccagttgtagcgaaaagag

SEQ ID NO: 137154 - DNA, 415 bp, Glycine max
  Clone ID: PAT_MRT3847_94860C.1
ggctcgaggaaagagattgagaggatgagagttgaagctgaggcaaagagaggagaaatggagcttaagagaactgaaatcattgccaatacacaactagagattgctaagatctttgcaagtgtcaataaaggtgttgattcttcactaagaattggaagaagttaattaagggtatattatgggaggtgatcacatgtttggtatgtgtacaaattttatagtcaacataatatagattgaatgagagggaaaattgtaacaagtatgtaatatgtaattggcctaaccagtgaaagagagctccatatatacgggagggataataattatctctcctaactgtaattatatacttctaattgtaaccttctctttcattaattataagaaatgaagggatacttcttctatt

SEQ ID NO: 137155 - DNA, 1909 bp, Glycine max
  Clone ID: PAT_MRT3847_94861C.1
ctttctctctttcttctcttctcttctctgcaacacaatctctctccatctggttcaaacactgtcattcttctcctgcaggaaaaaaaaatcagatctaccctctcacaatgttgcaggagatgtggaatgctcctcccggtctcagaccctccaagtctgcaccttgttctccggcaaagcctcttggggtcgttccaagaacgcgttctgagtccttccacgtggctcacaaggtcccagttggtgacactccttatgtcagagccaaaaacgttcagttggtggataaggatccggagagagcgattccgctgttctgggcagccattaatgcgggagatagagtggacagtgctttgaaagatatggctattgttatgaaacagcaaaatcgggccgaagaagccatcgaagccattaaatcgcttcgaagtagatgttcggatcaagcacaagaatctctcgataacatcctcttggatctctacaagagatgtgggagacttgatgatcaaattggtctactgaagcacaagttgtacttgattcaacaaggattggctttcaatggaaagcgaacaaagactgcaagatctcaaggaaagaagtttcaagtctctgtggagcaagaagccactagattgctgggaaacttgggatgggcactgatgcaacagaacaattacatagaagcagaagacgcctaccgtcgcgcgctttcgatagccccagataacaacaagatgtgcaatctgggcatttgcttgatgaagcaagggagaattggcgaggcgaaggagacactgtaccgggtaaagcctgcagtgatggatggccctagaggctcagattctcacctgaaagcctatgaaagggcacagcaaatgctgaaagaccttgagtctgagatgatgaacaagggagttgataggattgaacaaagcaggctctttgaggcctttttgggttcttcatcaatttggcaaccacagccttgcaaggatcaccaccacaccacaaccttgctggcaacaacaacaataaattcagccaaaattcatgatgagtttgctgatgagaacatcaattccaacataatgttaacaaatcacacagcactgccaccatctaagggtagcaacaacaacaacagcaactagttggtgccattttggggaactcactcaatgttgcagcccctccattctatgcatcatcaaaatcatctatgttgagcgactcgagccgctcgagccgctctgagacacttaagagaacaaggtctggaaatgctgcagggtccatgagagtagtgagtgatgtgagggatgccaacaacaacaacaacaacaagaagttgcatgtggaattaggtgtgccagtgccgcagaacaaaacaagaaggctctcatcagaagatgctgagaagaacaagttaacagacttctgttgcccgacgacgacgaattcgaagaggccattcttgctgcaattttgggagccccaaatgaatcagataaagcttattatgacacaggtagtaccacctccaggatgttgagacttaaggtttttcaggacatcacattatctctgagtccaagggcctgaagggaaccaccaatataatctaataaagggaattatcaataacatagtgtcttaggttggagatgaacttgctctccactcgtttaaactcattttatgcagagggaagaagtatgctacttactgatagggaatagctgcacgactattactattggcatggcattagtccccactcaattaattgtctttatttgatactactatctctttatttgttaatgccttgtaagttgtaaacgaggcacatcattgacttaataaattgatgagctttatgttccttgaatcgaaa

SEQ ID NO: 137156 - DNA, 503 bp, Glycine max
  Clone ID: PAT_MRT3847_94862C.1
tcgacccacgcgtccgctttcttccccacaacaaagctctcaccttccaaactaagctctggttcaatcactgtcattcttctcctgcagagcaatctcagatctattattcatcatctatcacaaaacacaatgttgcaagacatgtggaatgctcctcccggtttcagaccctccaagtctgcaccttcttctccggcgaagcctcttgggatggttcccagaacgcgttctgagaccttccacgtggctcacaaggtccccatcggtgacactccttatgtgagagcaaaaaacgttcagttggtggataaggacccggagagagcgattccgctgttctgggcagccattaatgcgggagatagagtggacagtgcctttgaaagatatggctattgttatgaagcagcaaaatcgggccgaagaagcccattgaggccattaaatcgcttccgaagtagatgttcagatccagccccaggaatctctcgataattttt

SEQ ID NO: 137157 - DNA, 307 bp, Glycine max
  Clone ID: PAT_MRT3847_94863C.1
aagctggagcgataccactcgttcggagggcccgtcgcacctaccaaggtgattgggccgcctatcacccaggcttttattgagaagtactgtgcccagagacagggtgagggtgatgctccacaagccgcaggcgcgcccccaccacctcattatgcgggccaggctggggcattctacatggagcagtatttacgacatttggtttggcagcagggaggcaaccaccgagcacatgtacggacccatgattgtgtgtaccacatgagccttatcatgcagaggcaggggtttgctccttttttat

SEQ ID NO: 137158 - DNA, 516 bp, Glycine max
  Clone ID: PAT_MRT3847_94864C.1
aaaaaaaaaaaaaccgccaacttttttaaagaaacaaagtccggtttaccctaaacaggcaaaacctacaccagcacctggaaaacccattattacccttttttaaaacaggatatacactcacctcttacggccatgggccaaacattaataaaaagggggcgggggagcaaattgaacaaacccggtttgggtaaacacaacctgggggaccctcaacctttaaatgggaaatcaaagttcaaaaggctccccaggacccaggtcttgtttaaggacctaaaaaaaggaacccggttaaggttaaccccgactgggggacccttaaacttaaaattggaaaacataccttcaaatgcttccaaggaaccagttgtttttttttaaaataccaccaccttaaaattctaaagatgggtaacggagtagggaaatccacccctggcacagttggcaatatggaaatcccggaaaaacaaaaaccaccaaggccctcgggaaaactcgaaaggctta

SEQ ID NO: 137159 - DNA, 328 bp, Glycine max
  Clone ID: PAT_MRT3847_94865C.1
ggaaaccaccaaaacttttttaatttgcgggtaaggctttttttaatatattaacatttaatttggttatagccaccctgttgttattaacattttttacaagacattacacatgctttttttaccatgcttttagggaatttacgacttggaccacctgctttaataagcttaggccttttggcattttgttcatcaaattaaaatgctagggacttttctttgttaactaaagttttattttcgagactcgttttgggagtcaaatcaaatttttgaggggttactgaattcattttattccggaatggggaatgagattcaaccc

SEQ ID NO: 137160 - DNA, 255 bp, Glycine max
  Clone ID: PAT_MRT3847_94866C.1
gacaagtggaaataatatatgcgttaaccacctacacgctcgatccttaaatcttacaattggaacttcacattattcgtgttctgtcatcggggtatgtgattcctcacggagggtagtgcacacacttcacatcacgctgtcacgtcgatgacggagatcatacgctgcacgactccaaacacgcctttcagtcaaggccctccatacagatttacatagtagactcttacggaaacaatgtctggcttcccg

SEQ ID NO: 137161 - DNA, 579 bp, Glycine max
  Clone ID: PAT_MRT3847_94867C.1
tttgtgacgggtcttacaaacaaaatggaagagcgccaccataccaaatggttggtgaagaagaagaaagttgtgccaaggagtgaaccaaatttaaatcctagagcagcagtgggtcctgttgtatccaagaggaaagctatgcaagctacaacgacaaggctgatcaatagaatatggggagagtattactcaaaccacttgccagaggatgcaaaagagggaattgctagtgagttaaaggatgaggatgaagtggaggaacaagaagaaaatgaagatgatgacaatgaggagacaatacttttggagggaaccccaaaggcacattcagcttcaaagcaaaccaaaaaattttctgctgaaacagaaataaggtgggaaggggaacctgaagggaagactagttctggatatcctgtttataaacaggcaattattcgtggggaagttatttctgtaggaagatctgtgttggtggaggttgatgaaacagatgaatttccagacatatattatgttgaatatatgtttgaatcaaagatcggaagaaaaatgttccatggtaggatgatgcag

SEQ ID NO: 137162 - DNA, 210 bp, Glycine max
  Clone ID: PAT_MRT3847_94868C.1
aatagatacggggatacgaaaaaatgataaagctgctcctacataacttcccggtacggaatgtgacagacaacagtgcgctcctgctcgtcatatgcctacactaggttaaagctgccagatgccaactcacaggtcgtgctctattaattcagcaatcgtcattaaactggttctaacaaattacatcttgtcatacccaaccgctct

SEQ ID NO: 137163 - DNA, 330 bp, Glycine max
  Clone ID: PAT_MRT3847_94869C.1
cagcttataactgtgctatagtgaacgtctaaattcaattatctggccgtctatttacaattcaatgactgtgaaaatacctggtgttgcctagcattaatcgctttgctgcacatccttacatttcgcctagctggcattactagctaagacgccagcaccttatagaccttccagaacagttgacacagccctgtttggaaaattgggacctcccctgtgtagtctgaatgattacagcgctttagtagggatggaggtatactacgcagcgttgactcggtacactcagccaagtatgatagcgcaccagcttctataagcttctta

SEQ ID NO: 137164 - DNA, 381 bp, Glycine max
  Clone ID: PAT_MRT3847_9486C.1
tgtttttttataaatcttaattacttcatcactagcggggattatcactacgactgggcgcaacaccaattattactcttaagaagaattaatacatcatcatcacaattacatgatgatctcacgaattaactcttggtgcttagcaacctttcgaagacttattcaataccttgaaataccaataacatatactacaatactcatgctttaaaatcagctcaacaccatctcataaaccatgttcgctcattctatcaagctaacacactttctttttctgctacaaactccacaacactaaaacattcaactgcaaaccattctgattagtccctcacaactgtcatactcttaatctgttttatcccctactaaata

SEQ ID NO: 137165 - DNA, 338 bp, Glycine max
  Clone ID: PAT_MRT3847_94870C.1
gagacatagcgtcaccgtcagttgaatgaaaactgggctcgctgacactgcagaagcggctcgccgcgagcatgctcaagtgtggcaaaggaaaggtttggcttcacaccaatgaagtcaacaacatctccatgaccaattctcatgattacatagtgaagctggttaatgataagtttaacatcaggaaccacaccacgattcagactctctcacgtacacgtcgaatgaatgagtccaacacgaaaggacgtcactctggatacagtactcgtaacggtacaacggaagcaaggcttcccactaaacttccatggatgatgaaaacgcgtgtgctc

SEQ ID NO: 137166 - DNA, 562 bp, Glycine max
  Clone ID: PAT_MRT3847_94871C.1
tttctttttttactcacatattgacgacagtttacttatcacctggaaaaccgtaaacccaactgggaccgcgaaaccaaaccaaaaaattgcatccgaatccgccctctcctagcttaaatccctgtatgtctaataaaacattggggctacctccgattacttccatatgaggcctattaactctaacgaactaatatacgacccagccggctatgccgtgaaacccattgtactgaagctaacgatcactaagacccgctgcatgaataacgacatccttgggatccaatatctctgaccacaccacgctttactgtgtctctggcgtaaacgcgcagtgatctctactaaacaatggcctaagtgggatctccgagaccatatgtgagtgccctgaccaccaatatctgcagccaggggggtcgccccatctatgttcgagaccgaggaaaacttcagctgattacaatcacttgaacacatgatctctaaagacacataaaggaacttggcgcgttaactcattgtagagattgacaacatgtgaagacacttaagc

SEQ ID NO: 137167 - DNA, 277 bp, Glycine max
  Clone ID: PAT_MRT3847_94872C.1
gtccatgccgcgtcgtacctcggaattctgctcgagcgacaccaggtggaatgacggttcacactaacatattcagaaccggctgcctgaaagggtgtgacagtcaggaggacgtccattgtggctcaactttagctgcacaataatgagagttagacgccgatctagtacactgagttgaggtaaaagcagcgtctgacgagagctcagaagtgtagtgcacgacgacaattcatggacggcagtgaagatcttgatgcgtgttgcagatcatcct

SEQ ID NO: 137168 - DNA, 472 bp, Glycine max
  Clone ID: PAT_MRT3847_94873C.1
ggaaaaaaaacgagggatttttaaaaaaaaaaccgcgggccctcaaagggggaaacaaccccaaagaacgggttttttacttttaactaaaaaacttaaaggcttagcaaaaaaacccttaaggggttcccaccctgggggggagggggttttcaaaacccaaaaaacagttcctagcccaaggaacaaaattctcatcacgggaaattttagggccatgggccataggggaaaaaaaaccccccacaaacctgtttggggaaggaaaagggggacctttgggaaaaggggtaaccttttccaggggtgggagtcaaacccccacgggggagccagaaacacaaccaattttaggccccgcccggggggaccatttatggaaaagggggggccccaatggggaggatttgggaccctttttggaatggatttttggaaaaaaggtttttttgggcaaataagtttttggact

SEQ ID NO: 137169 - DNA, 426 bp, Glycine max
  Clone ID: PAT_MRT3847_94874C.1
caccggtttattgtttgatggttataagtgtacctgtagggatggccgtccgtgagtgacgaattggacagtctaagtggcaactaacatctatcaatgtttggaaggtagaattgcggaaatgcaaaaggcttattgtggcaatctcggaaaggaggtactgagactggtcatagcactgatcagacgaagctgaacaattgagagggagggctctctctcttatagaatggatgtagatagctgttgtacctaccataccacacattgaagaaattcgttcgatgcataggatgatgaatgctcctgattgacacgagaatacagacctacagaagagcatcgatttggggagatcacaaagagcccgaaaagattgtccacacatgagggcatctgatgataagctagtgttggctagcacac

SEQ ID NO: 137170 - DNA, 307 bp, Glycine max
  Clone ID: PAT_MRT3847_94875C.1
tgcacagcgtaccgtaaagcttagagcatcggagattcaggtacgagtcccacctactcctaaatgctaatttttcttcatttcctaaaagcttaaagagtcgggcatgacggagaacttggactacttatatcatctctcaagaggtggtgtgcttgaacaccaagctataagcctacagctataatcgaggctaggaatgcactccacctgaccatcataaacgtataacatgtggcactgagccaacagatgggcgaatctttctgggctcggggacacagacagagttcactatacacatggc

SEQ ID NO: 137171 - DNA, 468 bp, Glycine max
  Clone ID: PAT_MRT3847_94876C.1
gggggcaggggcatattggcttctgtaaacattgcagtgtttctatttgaaatagcaagtcctataaggaactctgatttagagctgttttctattccactactatatggagcaaagataaatcatttgatcatggttggagaatggtggaggcttgtaacaccaatgtttctggtacaagattgagaattgggtctgtgtttccattctgcagatatagagcattgtttacatgacactcatcatcgtttgtcaaaattacatgctttaatttctggtgtttgatttaatttccgggttaaatgtttttagtccctgcaaatatggtgaattttggtgatatgcatctaggcaagtcacattagcgactactctgagatgacatgtgggaagacaagtctagatgcatgtcatgtcatcagtaaatggtgataagaaccatttttagaacttaatttatgaggacct

SEQ ID NO: 137172 - DNA, 356 bp, Glycine max
  Clone ID: PAT_MRT3847_94877C.1
tttttgaagggacaaagaacaaggcaaatactgctattcaccaatattcctaattttgtacaaatgttattttcttttaaaatcaaatacatagaaaaagaatgggtgttgtaacatccacttaacggtaaggggcaaatactgacgaactatctttatatgaaagcaatctgcggaaagctagatttacatggccctgggacccaatgtaacgtgtgggaacacaaatacttgggctttttctaaggggagcagcaaccatgcttctggattactggctggacttgaatttgaactggtggaggcctggcattgttcactgggtggcttggcattctgtttttaatttgagcagc

SEQ ID NO: 137173 - DNA, 637 bp, Glycine max
  Clone ID: PAT_MRT3847_94878C.1
gcgtaagtaagcttggatactctaaagcggccgcttttttttttttttttttttttttttttttttgtaaactgaacatttattgaaaatggatgtaattataaatttagttatacaccacattggccgccaggaccaccaaagagaaaagcttgcctaaattgagccccttgatctccatgatacaacaaatcatagcaatctgaactggtgtcacaatatgacttcatgtctataggattcacatcaagttccctaaattttgaatccacaatttgaagtcttgcaaaaaaacctgagttaggaaatgaagtctttggcaattttccagtacccattggaggacttccaatattagggggtccataagcttcacctccaaatttaatcaaagatgatcctttgcgtaagtgagtgaatatttcctttggccaatacccaacatcttcacttccatcacttccttctacatgcaaccaccaatggcctgatactgaatcctgtgtcactttgatagcaatatagtctttgccatctaatccacctgtaaatgagggttcaatggtttgtcctaaggtaatacgaggatgcacttgcacaaaacctgggcagatagcatcaaaacatcccggttttt

SEQ ID NO: 137174 - DNA, 132 bp, Glycine max
  unsure (1)..(132): unsure at all n locations
  Clone ID: PAT_MRT3847_94879C.1
gcggtnggtgagtgaccgangaagcatggctactacggctacggcttccgcgtcnttggaagnacttgacgctgaantnaaattgatccgcaacgagtacaccgtcanagtctgcnccgacgacaccgtggg

SEQ ID NO: 137175 - DNA, 462 bp, Glycine max
  Clone ID: PAT_MRT3847_9487C.1
aaagaaaaaaaggcccttggtcaccccccttggtaaggaaaataaatgggctggggggggaaacaatttacccctagggaaaaaaataatgggggggtcttttcattcaaaaaccggttggatttccccattacaatcaaaggaatagaatcctgccctcccggagggaaaaaaataatgggggggttttgaacgacgggggatatgtttgactttttgggatggaaccccttttggttttagcttaaaagcttttaaaatttccctaggggagttacttgggaactcttttccacttggttagaattcaacaaaggttttacaaatcataagcaaacaatccaggggtcaagcccaaaggggataaactaaaaatcccaaataaaaaaaacttttatttaaaacttaactaaggggaacccaagcaaagctcaaaagcataaggggggggggaaaacttcc

SEQ ID NO: 137176 - DNA, 489 bp, Glycine max
  unsure (1)..(489): unsure at all n locations
  Clone ID: PAT_MRT3847_94880C.1
ggctcgaggccgcgtgtgaatgaaccatccggacggacagccgaaattttacatgtggcgttcaaaatctgatgcaatagtagtgaaccaattgtatctgtaaacatggctgataacgaagattcggtgttcgatcctagccttctgaaaaagaagaagaagaagaagaccacagcatttgatatggatgcggctatggctgaaggttctcctgcggatgcatccgacaacactgacaaagagaacacggaacccgcatcaaacgtggataatatggacatggatgatttagaaagttttggaaaaaagaagaaaaagaagaagaaggctttcaatttggaagaattagacagtgctctaccaactgacacaacggcagacgaacccagttgaaccctgcangaagatatggttgatgatagctttgactatgatatggacttcagcanngacgaaaagaanaagaagaagaagagggcctagatgatt

SEQ ID NO: 137177 - DNA, 260 bp, Glycine max
  Clone ID: PAT_MRT3847_94881C.1
agaaaacaaagcatatgtggtctgaaatgctcaaatggacggaggaattcggagctgacacgatcacggaggacttcgaattcaaagaacttgatgaagtcttgcactattatcctcaaggccatgatggactggaccaagatggaagacctgtgtacatagagagattatgccaattcgatgccacgaatatgatgcatgtcacatccatggatcgctacgtcacataccacgcaaaggagcttgagaggacatttgat

SEQ ID NO: 137178 - DNA, 563 bp, Glycine max
  Clone ID: PAT_MRT3847_94882C.1
aaaaccaaaccccccctaatatatgggttttacttctaaaaattttggcaacaaaacccctttgggaggggcccaaacttgaacaaggaaggggagggtaacagactggtcacccgtttgaaaaggggtaaaatcaaaataaacaagaaaacttaaattttggggaaggcaaaaatggcacagctttggatatacccgggggaggggtaaactggaaagcgttcctaaaaaagggggtccacgggtccaagggcataaaaaataggcataatgatctggaactttttgaccccatatcccaaaggaaccagttgggatgctccccaaaaaaaaccaggcttttaaaaactggggaaagttttttccaattttttaatggggggcttattatcccaagggttaacattgaaaaggacaaaaaacttgccactttttttttttttggaaggttttttaaaaacccccctttccttgggggcctttttattttccttgggctaaacaccaaagaagaaaagatcattattttttttttaaacaggggcaaccgttttggcaggggc

SEQ ID NO: 137179 - DNA, 1376 bp, Glycine max
  Clone ID: PAT_MRT3847_94883C.1
tacggctgcgagaagacgacagaagggggagccactaagtaatatggtttgttattcaccactctttatatagagaggaatcgaaattggttttgaagaccatgttcaggacgcaacgggggtgatggcatcatggttattacagaataaatgatcgaagagtgatggaaggttcttgcttttgtttgtatatatacatactattattgctaggaaattgaagacctaagatacaatagagatggcaaagctatttttgaaacaggcaaagcaatacgcagatgcaagaccaagctatcctccacaactcttccaattcattgcttccaagactccctctcactacctcgcttgggacgtcggcactgggagcggccaagctgccaaatctttagctgcaatatacaagaatgtgatagccacagatgctagtgacaaacaacttgaatttgcagccaagctcccaaatgtgagataccaacacaccccttcaaccatgtcgacggccgagcttgaacaaatggtggcatctaagggaaccatagaccttgtgaccatagcacaagccctgcattggtttgaccgcccaaccttctacgaacaagtgaagtgggttctcaagaaacctcatggaatcattgctgcttggtgttactatttgccaagagttagtgatgcatttgacactgtctttgaccaattctattccactaatgtaagcccttattgggacccagctcgtaaatgggttgatgacaattatagaagcattgattttccatttgagcccgtggatggagctgatcacacaggaccctttgagtttgtgacggaaacaatgatggatttggatgatttcttgacctacataagatcatggtcagcatatcagacggctaaggagaaaggagtggagcttctcgcggaggatgtggttgaaaaattcaagcttgcttggggtgaagatgctaaaaaagttgtcaagtttccaatttatttgagaattggaagaacaggggattcctaaagatatatgcaaatggttgcttttactgtgtgggagatgtgacgagtaccaacttttatgagtttatccattgattgaataatgtaattttattgaattgcgttcatgttaagaagtcaaaagcttttaaattcgaagggtacaattcctacttatctggaaagagttgagccttagtttgctatgttaattttgtaatttggtattgataaattttgttgtgtgtgtcaaccaaatttttgatagaaaagtacttgtagtaaatacttgataatttattttaatgatgttaaattaaggtatttgctggattcaggttatagtaaaattaatattttattcgccagcc

SEQ ID NO: 137180 - DNA, 333 bp, Glycine max
  Clone ID: PAT_MRT3847_94884C.1
ccgttcggctgctgtaggcatgacatcaagttacactccaactccattgttggaatttggtctgcaaaaagacagagggtttattgtggaatattacggaaggatgtctcacgttgctcataacgttcatcagccccaagagaatgaatctgcggagggaaaatttctcctttgattattaaatctcgctctagattggaaaaagtctccttttcaaaagcacaatttgttagtggaaaaacctttaaaatttgataataatcggcgcctggttcacattctataaaagtattctcctgacaaggaagatcaattaaaaaccccaaaagattg

SEQ ID NO: 137181 - DNA, 1128 bp, Glycine max
  Clone ID: PAT_MRT3847_94885C.1
tttttttttttttttttttttttaacaagaactgtatcaatgacgtgaatcacaaacaaaagacttcaaactacataagacgaagggtatgagaaagataaaacaaatgacttaaaatacttgtaactgagtataacaatttcttcaaaattttgaacatgtcttcaacaacaaacattgcatacaagaaaaactaggcactaagctaatatgaattactcctccagcgtataacttttcaagcaacagggacctcaatatcattagcagccaaaactggagcaggctggatgtattcttctgcaagggcagcagcactcaacattgtccccacttcaacaggagcagcaaaggcagtggcccttgtcctcccaaccctcaaaggcaaactcaatggcattgcactccgtgtgccaacaccgaacgtctcagtggtggacctcgtcgttcaggtctcaaagaagacctttgcagaagaagtgaatgcagcattcagagagagtgcagacaatgagctcaagggaatcctctctgtgtgtgatgagccacttgtgtccgttgacttcaggtgcactgatgtgtcctcaaccctcaaaggcaaactcaatggcattgcactccgtgtgccaacaccaaacgtctcagtggtggacctcgtcgttcaggtctcaaagaagacgtttgcagaagaagtgaatgcagcattcagagagagtgcagacaatgagctccagggaatcctctctgtgtgtgatgagccacttgtgtctgttgacttcaggtgcactgatgtgtcctcaaccgttgactcatcgttgaccatggtcatgggagatgacatggttaaggtgattgcttggtatgacaatgagtggggctactcccaaagggttgtggatttggctgacattgttgccaacaagtggaagtgagagccatcaaattctgaattggtaattcaattattatatgtatgtaccatgccattgtagttttgtatgcttactactactactactaccactacaaacacttgttgcttcatttttcattctaaaacttgtactgagaaacagaaccatcaattttctctgccttctcattgtgcaataaaattcttaccttgaa

SEQ ID NO: 137182 - DNA, 317 bp, Glycine max
  unsure (1)..(317): unsure at all n locations
  Clone ID: PAT_MRT3847_94886C.1
cccacgcgnncgaccacgcgaacggaggggtttgtgagngancggngancactngaccctggagaagtcgtcatcatcatcatgatcatcaccgacgattgaagaagacgccgatcagaaacatcgccatacgaaggcctgaagaggctactcaccccgacacgtagaaagcggcgttggctgagaacatctacaccttgatcttcacgttcgcccggtcaggttccggcatcgcctacaacaagctcaccgacaacggcgccggcactaccgccggactcatctgcgcgttcatcgaccatgcttacgccctcttc

SEQ ID NO: 137183 - DNA, 673 bp, Glycine max
  Clone ID: PAT_MRT3847_94887C.1
gacgctattccagctcctaaataaatcaataaattatcattgcatttagtttgacacaatttaaactatattcgaaagttgggggttttgtctataagagaaattcatctcaaactaccatgtcagcttctttcaaagttgatgggatccccacatccaatcgcatgggggatttatattgttctagtaaggctgcaccaacttgaatgcacatgtccactactcaggcgcctggccataaaaattcctaagctctcgctctagtggttcgtttacatcaggaacatgccacacaaatctgggtggaatcaaatcatccagaattactgactgctaaccatgctacccattgcattgttggtgtttatgagctccacaattttaagctttgtgatcctgggaaccgacatgaatttcagggcaatatccacaaacactcacattgtacagcctcattagtctcttcgcacctttcctcgtccgttcccatgctaggatagtttccacagcaagagggactacttcattgtctaatggagctactatttctgaatcaggtgtttcagctggtaacggttttaaagggccctctgaaattttatctggtaagtcactttcatcagcatcgatgaattccttccctcccaatacgatgataggctttcttctcctt

SEQ ID NO: 137184 - DNA, 631 bp, Glycine max
  Clone ID: PAT_MRT3847_94888C.1
tacgaagacgacagaagggggaatgaagagtgagtagtgtagtgtgcacctaacaagagagaaagaagcaatcgctgccatgtttcctttcccagtgaagttgaaaattgagatcaatcaattttttattattttatctttcatcattttgtagagcgaattctgtgttgaagggccttccttattgattgtaaaagaacaatcttggccattgaaattggtgggccatgcttgtgattgcctatcatattctccggatctcaatgttttgactatatatttagaaccacaagacaaaaaattagagaagaagaagaaaaatgggaaattttgttctacagtttccaaatactttgatgagtttcactgtgtctgcttccttcaacttcaacggaactcctcctgatggttatggaagcagacttggtgggggtgggggccctgtaatattgcaacttcctctagataagatcagaaggtctttgatgaggaccagatcaaatgatcaaaacatatgtctggaattaatggatagaatcatggaaattgatctttaagtgcctattgatgtcctcgaggtcgctggactatattatggtatctccggctgtcaccgttatgaggcttatca

SEQ ID NO: 137185 - DNA, 317 bp, Glycine max
  Clone ID: PAT_MRT3847_94889C.1
gcagaacacgaatttcacgtgtgttctgcgtgatgagataccccttcagccatcttcccaatccgacagcgaggagatcgagaacctcatcaatgccagggttcaccaatcagtcccgtcggcgagacgcgtcagaccttcacgcacctcgatccccgtcaccgtctgcgtcaccaatggcccttcccgcttcatcgcttccaattgcactccgctcactcttctacacaaaacctcagtcgccgccgtcactcggtcaccatggggggctcaccccgggatctccatcacagggtttggtctcgccccaaagacgc

SEQ ID NO: 137186 - DNA, 1034 bp, Glycine max
  Clone ID: PAT_MRT3847_9488C.1
atagttcatgcacattgcccccaacactatttaaggcatctcacacacacatatatatatcggccatggtgccttaagagtgagtatatatagtttctagcaaactaatatcgatcaatctatttatctatttgcgtgtgttttcggtgagcgatggagaattggaggggtgctcggatgatggtggtggcgagtgcggtggcggcgatggggtggctttcggtggtggccatgggaagtccggtgcttcacaaggtgggagggtccaaaggttggatcaatcaagacgtgaactacactgaatggtctgctcaagagcatatctatgttggggattggctcatcttcaagttcgacaaacgatacttcaacgttctggaggtgaacaagacaagctacgagaactgcatagacagagacttcataaaaaacatcactcgaggtggtcgtgacgtggtgcaaatgacggatgcaaggacctactactacctctccggtggaggttactgttttcatggcatgagagtggccgtgcaagttcaacaagaggaccaagatccggcactcgcaatggcggcgccaccggctccgtcccccgtcgcgtatggttcttcttctcccttgccctcggtgtgcacatgcatttggatcatcattgttgctaatgttgtggtttttgtgaattaggttttaatataatggacattttgtaagtgattggtgatggtgctttgtttttgttcaaagttagaattgcttaattagatattatatattgttggttactttttttttacagggtttggtgcatgcatgttatactcttaattaagtcccatcatccttggttgatttggtctatggtaaatgaaaaatttagctgcagcattattatatattttacaacaaccttataaatattctttaatatattttgccacgtctattttgcccccgtacaaattcatacaaggggttatgctcattgtgttacattttattttattttctgaaatattattttgtttctttta

SEQ ID NO: 137187 - DNA, 1068 bp, Glycine max
  Clone ID: PAT_MRT3847_94890C.1
gcgaatcggagagggcgtcaatgaggtacttagcattccaatcgaggaaggtaattcattaagtgtactgatgggaaaggaaaatggtgagattgtagaaacagatagtgaagagattgttgagattgagatggatgtcaacaaaatgcatgaccttccagttgaggaagatggtacaaagagtgtactgaaggacagaatgaatgcatatatacgctcagatgtgagaaatgctctagaaacaatagagagggttatttcagtggttagagaatgtggatttcattccctcgggtccactttaaactctgctggtgaagagttccactgcatggaaaatggtggcacagttgattcagattctgcaaaagttattgaagtatgtttgaaaaatgaggttagtgtcaaagtatcaagcagcaatatgctggaggaaaatttagaagaacctgggacgatacaaagcttcagacacacaggaacaaatgctaacaaggaagtaaactataagaaagtagtaccagcttcaccagagcagaatctttcaagaccaatggaagcaaaccaggctgattcatattctttgaaaaatgggacaactctggaccaaacaatatatgataacaagcaattaaacagtgatgcagtccaagatatgtcttcagatgacctgaaaaagtcaaccagggagataaagtatcgatactgttgttttatgcattaactaagaagagaaaagtgtgaaagccaataacaagaaaatagggtatttagaggcatgaggtccacttgccaacaggtttggtgaatattttgtatttatccgaagatcacttgtataatggtcatatatgttggactagttttgtcccttattctatcagaaatataatatatgtaatgtcaaattactgttattattttttttatgctcagtctatctctagaattaagtttatttagaaatgtatgattgattagttaaggtagactgcgtagtctatgaatgttataattataattaactaagttttattttgttcctagcaaaaaaaaaaaaaaacacac

SEQ ID NO: 137188 - DNA, 309 bp, Glycine max
  Clone ID: PAT_MRT3847_94891C.1
gtttcatgttacaccatatcacttgtaatacctatatttctctctgattagtagagggtgtccactaatcttatcttttccaattattaaggaataccaaccatgccaatacccttggcctattccaaagaccttattgggattccagggacctatattgaattccttcccttgactaatggaaccctattgactggtcaagaaaaccccgggcctgatgaaattattggggaaattaaagggaccttattttaaggtcaaaccggacaaccggtgattcaagaaggtattaattattaccaagaacct

SEQ ID NO: 137189 - DNA, 241 bp, Glycine max
  Clone ID: PAT_MRT3847_94892C.1
acataaaaaaaaaaaagccggcactgtttatccggggggccgaccgcacccagattgggacaacgtgttactggacatttccccctcgcaattaaaaaacccgacgaatgccatccataaataaattgtacccactccctaccccttgaaaaggctccactgccccacgaaaaaaaacgacccccacttactaagggttgcagacccttcatggtaaagccgcaagctttgaattaaaaag

SEQ ID NO: 137190 - DNA, 370 bp, Glycine max
  unsure (1)..(370): unsure at all n locations
  Clone ID: PAT_MRT3847_94893C.1
tgtcggagagtgatcgtnacatcagcagtgtcctctcntgatacttggtagangttatgnnccatcttctggcagaactaatgtcaccacctgcaattgcnggtggtgacatttagttctgccagaaggatggctcattanacttaaatggtaganccaacctngncacatttngccaaancanttctctanctcggggttttncccctnctttttcgggttnggccnggtttttgnccattgggggctttaaaaggggaaaanccatttgaaattanaanttaagggggaanggaacccggatttggnccntcccccaanntttnnncnnggccccctttnccnantnnccccnaaangggnnnctttc

SEQ ID NO: 137191 - DNA, 264 bp, Glycine max
  Clone ID: PAT_MRT3847_94894C.1
gaaaacatactagctacaaacattttacaaaactttttccattatttttggctaaataccatctggtgtgattctcgatggctgcaggggatcctccaccatatgtattacctttagattctctttcgcccactggtggatccttatttccccaagtaaatatcgccttgtctattgtaaacacttacaatgtcatataagaagcatatttgacttgaaatggtcacatcagaactcacaatgcttctgtaacggagaaaacta

SEQ ID NO: 137192 - DNA, 430 bp, Glycine max
  Clone ID: PAT_MRT3847_94895C.1
tacaggtgtgagaagactacagaaggaggacacaatgagagtttggaaagaagctttgagggaagaaagtaccacgagctgagtgggaccactcttactctgggttggggcaccacattggtgattcaaaaccatgcttaacaacatgcgctcactcttgactcagccaatggaaacagaatggacagggacatcaacaggactcactcccttgactatgaggcaggaatcttgcaccgaccaacgatacacgtttctctctttcttcgaggaacacaacacatgcacgcccctgcacctacacatgctgattctgttgagtctgacatagctcacttgaactgaacctcccaacaatactgaagccttcatgaattacattcttgatgcacatgcgaactttatgtctgatgaagaggaacattctcaa

SEQ ID NO: 137193 - DNA, 387 bp, Glycine max
  Clone ID: PAT_MRT3847_94896C.1
cagcacgtcctgcgtgctgctagtaattctgctgcagctccaatctaggcactgtctcctttgaacgaccatggagaacatgatccattctaggttccgtatactcactcttgaatccttgcagttctgaacactctatacttactggcattgctactattagtggcctttcaagcgtttcaatttgcattgcactggctctggttaaagatatgcactcacagaatgatgttgtgccatgatgggcccacacgaggcctatgttaacatagagcctggatcccagggactccattatagtgacagctcacatgcaccgcttttgtattattgttgacacgataatgcctgcgagggagaatccgccaccttatattacaagacctt

SEQ ID NO: 137194 - DNA, 448 bp, Glycine max
  Clone ID: PAT_MRT3847_94897C.1
aaaaaaaaaggaaccccatcgagcaacactttcccccccagaagggcaacaatggggggccgcgaaaaaaaacccccccacccgggaaattgcttttaaaaaaaaaacaacgggggggggggggaccaaaaaaaaccccggggggaggttttttttttatgacccggccccaagaatttgaaaagcaagaaaaaaaagccccgggaaaaagttctccaaaacaaaaaccttaaaaggcccccccgaaaaaagccgaaaaaaaatggccgaaaattttaaaccccggggggcgcccctgaaaacaaaaattctcttcagcaaggggagatttccttggggggggttaaaaaagggggggggggggaaatcccctctgggggacaagggcccgatttcaaaattttaaaccaaccctccccccgcaaaatcccctcaaaaaaaaaaaata

SEQ ID NO: 137195 - DNA, 861 bp, Glycine max
  unsure (1)..(861): unsure at all n locations
  Clone ID: PAT_MRT3847_94898C.1
gtcgcangcacgcgtacgtnagctcggaattcggctcgaggagggaaagaagctgaaggaaaagctgaagcccctgatgaaggtcgtggagagtgaggactacagccagcagctggagatcgtatgcctcatcgacccaggctgcttcagagaaattgacgagctgataaaaaaggaaacgaaaggcaagggttctctggaagtgctcagtctgaaagacgtggaggagggagatgagaagtttgaatgacaccgagtaggtcctcagcgcagcacaacagcgggcgtccgtctgtcctagcagcagcagcagcagcagcagcagtgcgtttctgggacctgccaaaagccctctggagcaatgtgccactttccatcctgtgttaaacattggcctgggtgcctggtatttttgttgtcaattggggtttccagccaaaatgaaaagaataacccaaaatacagagtccagaacagctgttcactgatgtgtatgcctttctggttccacagggaagaccagaggcagcgctggataagaaggtagatttagtacgtgacagatgactggagagggtctgtataacaaagggggacgcctgctgggaaggaagatgtgttctgcgtaatgaagtccaggtctggggtgtgagcttggagagatctttctgtctccctacgaataggtgtgtaatgaatgactggggagaaattgaatttttagttttcaacaaacatggtaccacaacttagatgattcttgggaaaatatataaagtcatttaatactaatcttaaaagtttataatatatgttaggatagttaaaaattatatgtaatcaataaaacttatttttcct

SEQ ID NO: 137196 - DNA, 386 bp, Glycine max
  Clone ID: PAT_MRT3847_94899C.1
ggctcgaggaaactgagaaccccatctaccacggctggcagattgatccctatctccgtgtcaggcaaatactaacactggctttcctgtgttggttggcacaaaactttactgaagcatgacagtacttccacacttggagagaccgacgcacagcgcatggcagcaaccacgcacggcaccctgcgggcgcgtggtttattctgtcaccatcctgatcatctagcaagagggcccttgaaaatggagcagcgcatcccatggcggttagtgattcaacaaccccgggatgctccaaaacacatactctctgtgggactcatagcccaggtcgacagagtcatcaccgtggcccagattgaggatcggatgcttgacaaagtttc

SEQ ID NO: 137197 - DNA, 1841 bp, Glycine max
  unsure (1)..(1841): unsure at all n locations
  Clone ID: PAT_MRT3847_9489C.1
atagctcatgccattgcccccaacactatttaaggatctcacacacacatatatatatggccatggtgcttaagagtgagtatatatagtttctagcaaactaatatcgatcaatctatttatctatttgcgtagtagctccggctgcgagaagacgacagaaggggaaccaaaaacaatggccacttgttcactcatttccacactcttcccttctccttcttcttcttctttttcactctctcgttcttcctcaaacaccaccaaaccaaccaccattcacctctccaaatccctccatctccaaactcccatcctcttcctccttcgccccccaaacccaaaaccgacacttccaataatacccctcttccccaaactcaccattcccaactcccttctccttctctgcacctccctcgctctctccttcactctcctcctctcccccgccgactccgccgccgcctttgttgtcacctccccaaggaagctccagtccgatgaactcgccaccgtccgcctcttccaagagaacactccctccgttgtctacataaccaaccttgctgtcaagcaggatgcgtttacattggacgtgttggaggttcctcaggggtcaggatctggctttgtttgggataaggagggtcatattgtgaccaattatcacgttatccgtggtgcctctgatctcaaggtcactcttgctgaccagtcaacttacgatgccaacgttgttggttttgaccaagacaaggatgttgcggtgctgcgtgttgacgcacctaaagacaagctcaggcctatacctattggggtctctgctgacctgcttgttggtcagaaggtttatgctattgggaacccgtttggacttgaccacacactcacaactggtgtcattagtggacttcggcgagaaattagttctgctgcaactggtcgtccaattcaagatgttatacagacagatgcagcaattaatcctggcaacagtggagggcctctcttagatagttctggaaacctcattgggataaatacagcaatatattccccatctggtgcatcctctggtgttggattttctattccagtggacactgtaaatggtattgttgaccagttggtgaagtttgggaaggttacaagacctattttagggattaagtttgcccctgatcagtctgtggagcagttgggagtaagtggagtgcttgtcttagatgctcctgccaatggtcctgctgggaaagcaggcttgcaatcaacaaagcgtgactcttatggtagactcattttaggtgacatcataacatctgtgaatgataagaaggttactaatggaagtgatttatacagaattcttgaccagtgtaaagtgggtgataaggtgattgtggaggtgttgagaggtgaccacaaggagaagatacccgtcattctggagccaaagcctgatgaatcatgatgatatgcaattcattatccatccatccatcctatactgcatgtatatacatttcatatgccaggaatgaatgcagctgtgtatgtgtattcttaggttgtatcttgcttcataaaaacaggtccaagtgtacatatgtactatgggactgccagctcatcatccttttaactttctcattattaaacttaatataatttgccacgtctattttgcccccatacaaattcatacaaggggttaaaaaaaaaaaaaaaaaaaaaaaaaaaaaaaaaaaaaaaaaaaaaaaaaaaaaaaaaaaaaaaaaaaaaaaaaaaaaaaaaaaaaaaaaaaaaaaaaaaaaaaaaaaannaaagggggccccccc

SEQ ID NO: 137198 - DNA, 837 bp, Glycine max
  Clone ID: PAT_MRT3847_948C.1
ggaataattagtataatttactcttcctctatatcatctaatatagatatttaaagttcatgtaaatgtaacaaccaaagagatcgcaaaatgacagacaaatggagcgcttatgagtgcaggaaaccgcgtttctttatcttacgtcaagaaagcgtttaatttcattttaaactttgactaaagtggatttgagggtagatagagagagaagcaaagcaaaaccaaacctaagaagctggagacatcatctgctgaaattcgttgaaatcaaggaagccattgccgtcaagatcgaatgcttgaatcatggccgcacactcgtcgtgggacttgacgtctcctagttggcgcaacatttgttgcaagcccttgggcgttatgcacccacaccctttctcaacctcgaacatctcgaacgcgcttctcagaacatcctccaattcctcactgtcctcttgcttcatcagtttctcaaagtctccgaaatcgagtaactcgtcaccatcggagtcaaactcgtttatcactctctctgccactttatggctcagggactcacccacggacgcgaaataatccattaactcgctgctcgaaatctttccatctttgtcaatgtccaagtgatcaaaaacgtctttgagcctctcatcgtcgtcttttgggcccgaaggcccaattagaggaggtggtgtagtggtgtcaccgtctattgccggtaatgatttgggcctgggaggagttatgcatggaaacgttattatcttgaataaccatttagctgatgccatggcgtgctagcttcttgtaattgtaattacagctacgagtaca

SEQ ID NO: 137199 - DNA, 254 bp, Glycine max
  Clone ID: PAT_MRT3847_94900C.1
cgcatgcacacgctcgtaatctcgctatacgactcaagcatcttaatattcccactttcttgtttgaccggggctcttggggcttgttttgctgatccaaacttgccagtcgccatatttcgacctgcatatctcgaggatacatctaaccaagcatgcctatcataacttgcgaatgccaaatacacctttcctcgtgatgatcatgggaaccttccctatctttgcatggatcttatataccactatacact

SEQ ID NO: 137200 - DNA, 1028 bp, Glycine max
  Clone ID: PAT_MRT3847_94901C.1
tgctcgtggcccttcccttcatttggagacacattattgttctttcttccctctcgcctttctccccatccctctcttctctgcaaaaacacccttcattcagtttgtgacatgtctcacaagaggctaggaaaaaagcttcaacctgccaagaaggcatggaagagcttctccaacacagtccaacacaaactccacaaactcaacattcccaattccatgaaaaccacccttcaacgcctccttcaatcccctcactcccgtggcactgtcatacactctagacttcatcgttcattcaccaccataaggccacgtggtggtactgccacttctaattactaccatgttccatgctcgctccgtgcaccctgccgccttgctcacctatgtcccctctggcctcatggctctgccggggccctgcctgccccccaccaggccagggccccgcgcgccacacgtgcgcggggggacacgcccaggcgcagagagagcagagcatggtatttacaagggtaataattttgttggtgagtgtcgcaaccagcagggtcacggcggtgagagtagtagtagtggcttgaaccccatagaggatgcatggaaggttgtggttgccaagtctccacaactacacgtggatcaaaaggcagaagaattcataagcaagtttcgtgaagatatgaggcttcagaaagagaggtcaatgcttgaatttcaggagatgctagcacgcagtacctgattttttttttttatctcaaggactattcattttctaatttgacatatggagtgcacattaaagtgatatatacatatggggcatgatggtttgatatatatatttttttcattttcattttggattctattgaaattaaaacaaagtcagcacatatttgtttaagtattgtgagtgtgaagatgtataggaaattaggcttttgcattgagagggattcttggtttttttttttttccaaaccattatttgaattccttcttttggttgacagcaagta

SEQ ID NO: 137201 - DNA, 484 bp, Glycine max
  Clone ID: PAT_MRT3847_94902C.1
ttcggtttcactatcatcaagcaagtcggagacttagcatgaccgcagattcgcctctacttcctatattcccatggacccgggtataggtcccttaataactcgctgtgtgagcaaaaaataaacaaatatttatcaatgcatatattaaataaacaactacacaaaatacaaaagcattaaaagagttacatgaatacaagaatgtaaaagaaggaaagggaaacaaacaaagaggaagtcataataaaaaatgcacatagattaaatggcttaactctctaaaaaaactcccaagtggagtcgccaactgtcacaacctacccttcggcagaagggcgacgtgagactcatgggtgtgtcttccaaggaaggaaaatacacggagtcgccaccaacatttatttgaggaaaacgttagaaaaaccaaaaagcggtctatgaatttaaaggatcaaaggttcgagaattgtttacgtgtggg

SEQ ID NO: 137202 - DNA, 485 bp, Glycine max
  Clone ID: PAT_MRT3847_94903C.1
gctttggctaatctttggtcagatttggaggaaggtgaattctgggttattggtcaaagggatactgtgaatgtttggaggactaaatgggtggatagagatataaaattgatgagcatggctcataatgttcctgatcaattctgagttgaaagtcaattagctgcttaaagaggatggtaggtgggattctgattttattagaatgcttatgcctgaagttattgctcagagaatttttgctattatgcctccctcagctcaagctgattctgataaacggttgtggccagttgataggatgagggatttcagtctctagtgcttatagtaagatcaattatattcctaattcgcattctgatgatatatggaagcaaatatggaaaattaaatctcctgagagaataaagtttttatatggttagttcctcataatagactaactaccaacatacgtatagctagatggggtggacggactc

SEQ ID NO: 137203 - DNA, 463 bp, Glycine max
  Clone ID: PAT_MRT3847_94904C.1
tgagctcggaattcggctcgagctacaaagctgtctgatttttcatctgagaggactgcttcttagtctgtatacccgtcaatccagaacttgtcctcagaaatggctgccggtaaaaccagatttacaatgtgagccaggtccagggtcttggtattccgactatactagtgcatctgtgtctgttccagatcaaaagatagcagaacatgggttcaactgtagaaattatggacagaatctcgtgaaagggagtgaaaatcctcataggtattacaagtgcactcatgctaattgctcagtgaacaagacagtggagaagactttggaaggacaaatgactgaagtagtatataagggccatcataaccaccctaaactgcagtctactagaagaacaaactctcaatcaatgaataaaccttcttcatcgtgcacaaattcatggatatctgatcaatca

SEQ ID NO: 137204 - DNA, 313 bp, Glycine max
  unsure (1)..(313): unsure at all n locations
  Clone ID: PAT_MRT3847_94905C.1
gcangcgtagtaagctcggaattcggntcgngnttcnngcggntngaggttcncaacannggnatngggtatgnctgnagtctgtganatctcanctttagatagtggnnggatagcattatttnnagcagtgagtacttgtncatgggctaccntatcnagcnatgngcctttgggaatgaatttcngnnaaancctgtngaattcnnaattnanngcnttcctnttttncaanngcacccanaagcatagctagcttcaggatatgganaantccgccttgtggntctcaggttggnactgttggaggcgg

SEQ ID NO: 137205 - DNA, 447 bp, Glycine max
  Clone ID: PAT_MRT3847_94906C.1
cccacgcgtccggtttgtccatatccatatcaagactttaaaattgtgaagtaacaagaaatgtgtttattatccaaccaagagaaaaatgataatatttttccctaatgctgttatggataatttatcttgttggttttttgtgtagtaagtatatttgtaaatgaacgagatgtataatgtttagaagcttcattaatattttattcttgggctctatatatagagcataagtgcaatacaaaaattcaaatactaacattatgctaatcttataatcagactgataatttcctaaatctaaatgataagatcatatccttgtctttatctaaacagtatcttaaaacaacctaaattcctaaaaataaattcaaattcaaattacagtcatttaggcatatgttttcattatataatttacaattacttgaatgccattgggct

SEQ ID NO: 137206 - DNA, 373 bp, Glycine max
  Clone ID: PAT_MRT3847_94907C.1
tttcattctttcgcacaacacacacccccaaagcttcacacaatgtttttgacggtattacaaaaggaaagacacaatggaagctactacggcacttactaccttgctcagcaacttggtccgccacgtcgcctccagacgcgccatctgcggtgctgtctaagtcgatgtcaaatactacctcatccactgcctggtccaatgcctggtcgattacttcgtctctgacggagtctaccccggcgacaaacccggcctcaccttcgccatcaccatccagatcgccgtcatgttcgtagtcgtgattctagctggagttacagctggagccacaaactcgccgtacacatcggatgacacagagttagactta

SEQ ID NO: 137207 - DNA, 719 bp, Glycine max
  Clone ID: PAT_MRT3847_94908C.1
gtgccaaaatgggttgcattgattccgggaaggagtgtcatgctcaggccacgaagaatggggttgactctgttttgccggtgcagaactctttgattcacatgtatgcttgttacggggatgttcagcttgctagggtgttgtttgatggaatgttgagtagggatttggtttcgcggaactcgatcattgatgggattatgatggttggtgagttgaatgctgcacaccgactgcttaatgaaatgcctgataggaatttggttacttggaatgtcatgattagtgggtatttgaagggtaggaaccccggttatgcgatgaagttgtttcgcgaaatgggcaggttgggattgagggggaatgctaggactatggtctgtgtggctacagcttgtgttttatttccgctctttgatgcgtgggtttttccccaacagctacaccttcgtgccactcgttgcttcgtgtgccaaaatgggttgcattggttctgggaaggagtgtcatgctcaggccacgaagaatggggttgattctgttttgccggtgcagaactctttgattcacatgtatgtttgttgcgggggtgttcagcttgctagggtgttgtttgatggaatgttgagtagggatttggtttcttggaactcgatcattaatgggcatatgatggttggtgagttgaatgctgcacaccgactgtttgataaaatgcc

SEQ ID NO: 137208 - DNA, 567 bp, Glycine max
  Clone ID: PAT_MRT3847_94909C.1
tcccgatcatgcactggtattgacgctcgctcctgtcgtttggggggttggggggaaggtttcccgtaaggactgttagtcgtcctccttctttgggggggggggggggggccttgaaggaaaaataatggcaatgagcagaagaagcagataacgtaagcgtgaacacgacgggccttagtgaaaaaacgccgctagcgtgtttggggtgacgataatggataggaatcgttagttgatataggagctaaatttatatgtagggggaccaaactgttaaacgtatgaacatagaaagcacgcatggtgacagctggggtggatgtatgaaggaagttagacacctacgcctacaaattgaagaggtaaggtacaagacgttagcaataaaataatacaggttattaagccataccaacgcagccgcgcaccaaattataccaattagtgcattgaggcgggcatagccgtttgagtattactagccataagttaagccttcctataatttaacggaaaagaacctaactacggcacacggcttgaggccaacaacttggtgaaatg

SEQ ID NO: 137209 - DNA, 266 bp, Glycine max
  unsure (1)..(266): unsure at all n locations
  Clone ID: PAT_MRT3847_9490C.1
tgaataaatgtgtgtgctgttatccatacgangnttacattatntngntatttgtatngccaaanacatggnaatnnccattntccatacatattccttaatngccacaggngcagtccgtgcaagtgcanttagtnccacannngcacttcccatcangcncannngcnggaacatccatgacaaangtctngatgttccagcagctgagcatgatgggaagtgcaagtgtngccattaaggaatatgtatgaaaatgtaattgc

SEQ ID NO: 137210 - DNA, 485 bp, Glycine max
  Clone ID: PAT_MRT3847_94910C.1
agaagggtggccagttataacaacacccaccttatcatgatcaaagcaaaacatttgctatacacttttataaaatacttcagtcgtattgagctgttgttttaagtaagatgtctttgccaagctgatcgaaccaaaaagagattccattttcttccaaaatggacccgaacaagcacggatgcttgcattactagcagctttggcggttttatataatgctccgagaccatcatcagggtgacctccaaaatcaggagaactaacggtcagctgtttgcctacacgagtcagaattgggcgctctttctgctttttggaaggaggacgcccaaacgcggtgctactttaatctttaggctgaatgtattgtactggcttcattgatgggacatgttctgacttctccctcccagacaggagggctggccttactattgataaaggccttccactaattccttgtttatggacactatctccag

SEQ ID NO: 137211 - DNA, 426 bp, Glycine max
  Clone ID: PAT_MRT3847_94911C.1
cggctcgagaagatggcgacggcgatggattggttgccgtggtctttactgcttttctccctgatgtgtgaaacaagcgccttctatgtgcctggggtcgcgcctatcaacttccaccagaacgatcccgtagaaatcaaggctgtgaagctcaccagctctcgaacccagctaccttatgaatactattcactgcccttctgccagcccagcaagataacctacaaggcagagaatctgggagaggtgctgagaggggaccggattgtcaacacccctttccaggttctcatgaacagcgagaagaagtgtgaagttctgtgcagccagtccaacaagccagtgaccctgacagtggagcagagccgactcgtggccgagcggatcacagaagactactacgtccacctcgggggatccactagt

SEQ ID NO: 137212 - DNA, 398 bp, Glycine max
  Clone ID: PAT_MRT3847_94912C.1
cccacgcgttcgggcgtggcagttgactcacaacagcgtcatcatgaaaataatcaaatgacctattgcggaaacctaaacactacctggggatacatcaacagaccattgctccttgcatgtcatatctaattacacgaaatcaaccttaagcttccagttgaacatcttaccccaaccttactggagtttcgattgaagcctggcagttacaaggaaacagcgacccttgcactatcccacttcaggctctagggcatgaacttaactctctccgagtgctatgggtgcccgccacgcgctggcttagggggtcggagaggctacaacgacgttttctcgatgggggaccccacccgggacatggccagaggcgggattgaagatcgccccgagaa

SEQ ID NO: 137213 - DNA, 751 bp, Glycine max
  unsure (1)..(751): unsure at all n locations
  Clone ID: PAT_MRT3847_94913C.1
gttaaagggaaaaaaacccacccttgctttcttgttcttgaaaaagtaagaggcgactagctctctacctctcttttcatccgctgcacaccatcctgctcggttaattcaaatcgcttcgattttttccacacttaaattcccggctgtcgcaatcccgccgtatccggcgaatctctgacgcctcctccgtcgcttaaccattcagaatcttacccgccagcagcacttctttttcgccggagttccaatattctcgcctcgctcttctcgatactctccgccggatattcggtttccggcgatccctcgacggcgaaggtgcgcacgattgctagcctgtgccccgcggttcctctgtttcgcctaatcgcttgaactctgtctcgcgcgcttcctgctggtggaagactttgtagagacggagatacttgaatgagcaggtgacatataaccaggcttttaactatctntaattgctcttacagtgaggagattgaatgaagtaaaggaaaatttgaaggtactccagcatgacaggatgactttctttaagcacttttcccatgagttagtttcacatggtgtcatggaagataagggccaaggacagaatgctgatggatcacgtgggttggtagataatggatttgcttatgcaacttctagtgaaaaataatttgatatgaaaatggaggtacagtatgggagttacagtgaaccagatgtagcaggctgcagaaggaggcac

SEQ ID NO: 137214 - DNA, 331 bp, Glycine max
  Clone ID: PAT_MRT3847_94914C.1
ggctcgagaggcagaggatgagaacgatggcgctgagcattggggaaactcctcacattaatgacaaccttagggctcgtggaatgattacttggctaaagaaccatatcggtctaacggataaatgatgcctgtgaattgcattgattgactaaatgatgactgaacgggcgtgctgaaaagaatgctaacatctgctgctttaggaggagctggctaatgtgaagcccggctgctagcattaggaagcggctatgtcacattcactggagggggttggctcgtcgccttggctgacggctgaggagcggatgaggagacctgactacag

SEQ ID NO: 137215 - DNA, 338 bp, Glycine max
  unsure (1)..(338): unsure at all n locations
  Clone ID: PAT_MRT3847_94915C.1
gaataaaacaacgacggcgggaccngaggaaacaggagaactccggcggaggaaacggcggcagaaacaaacacaggaccaaacacgggaaaaaacgggcggagacagaagaggaaaagaaggaagagacaggccacaaaggcagccccgccgaagggcaagcaacgcgagcccatgaaaccgaaaaacaggtcgccaaagaaagccccaaggaacaaacacctggtgaggacaagaagcatccaacaaagggaaataagcgcgggaaaacaatgaaccgaagacaaaggcggggaggagaacccaaacaccccacagaagggaagtggcaggagggg

SEQ ID NO: 137216 - DNA, 163 bp, Glycine max
  unsure (1)..(163): unsure at all n locations
  Clone ID: PAT_MRT3847_94916C.1
ngcnngnngcgnacgtnagctcggaatncggntcgaganaanngctcnngnttcttcaagtganancannggnntccngnttanagctagacatcngggagttntcagataccanggacaacnncnatgnctttgnggnaattcanngnncngntgaggnttg

SEQ ID NO: 137217 - DNA, 285 bp, Glycine max
  Clone ID: PAT_MRT3847_94917C.1
aattcgcctcgagattacccttatttgtcttcctctcactctctctctctttttctatctatttatagttcccccactcttggacgtttactcgaatatctagcgggggactgttcaataattcacattcagtctctcttcattcaacaaatccaatgtaactcccctttttatttggttttattaactcaattcgttcaactcattaattattaacttctgcggtgtttatttcacccaaaaacaaaacaacttctcgagagtctccaacgacctattgtctct

SEQ ID NO: 137218 - DNA, 207 bp, Glycine max
  unsure (1)..(207): unsure at all n locations
  Clone ID: PAT_MRT3847_94918C.1
nacncgtangcnngctcggaattccgancttggatcctctanaagcggacgacgnctantgagnncnncnnnccgggaattanttccggaccggnacctgcagnngnnccagttttnccctatnntgantcgnnnnanngnttggngtgatcatggtcatngctgtcctnntgngtganattnttatnngcncanaattncncannn

SEQ ID NO: 137219 - DNA, 397 bp, Glycine max
  Clone ID: PAT_MRT3847_94919C.1
tccattttcttgtgttctgcctccatcgagtaccaagaaaacagaacaaactaaaaatgggactcttttcttgtacaaaactgcttccaattgtggtgctgttttctcttcttttcacatcttatgccacaaattcagctgaaaacaactttgttcactgccttgtgaaccattctgagccctctcaccccatatccgcagcaattttcacacaaaacagttcctcattctcttcagtgctgcaagcctacatcagaaaccttcgtttcaacacctccacaacccgaaaaccattcctcatagtgaccccatttcatgtttcccatgtgcaagcatccattgtttgtgccaaaaagcacaacttgctgatgaaaatccgaagtgggggacatgacta

SEQ ID NO: 137220 - DNA, 287 bp, Glycine max
  Clone ID: PAT_MRT3847_9491C.1
ttttatttttaaacacacttattggacattgggaggggccttatttaaggggataaaatattacattcctggtcaccaatgccaaagggcccctcttaacccaatttttgggacccctacaggtcctaagaaagcgcggtaacattaggataggggggtttgaaccccaaatttcatttttaacccccaaaagaacaagccgtgaaggctccgggaaagggtccactcttgtgaggaaaacaatatttttaccctttccaaggggcggggggatttttttggtggta

SEQ ID NO: 137221 - DNA, 367 bp, Glycine max
  Clone ID: PAT_MRT3847_94920C.1
tgtcaccgtccgataccgctgatcctcgtaatctccactatgtcttcccctcatgcttcttctttcttcctctgcgattggccggttcggcggctcgtttccgatctgattggctcgtctttagtgcgaaattcctccttctgaaaattcttcgttcatcgcgctccgaatcttcctctcttgttattccgaaaccgatttggcggcgccacttttcgcacgtgtgctcaaatcgttgcacttttttttttggatccgcaacgagaattccagatctctgaaacgcaccgtttttggcggttatggaggatcgggacgcgaagcggatggcgacgaggttatcgaatgtggttctggactgcgtgat

SEQ ID NO: 137222 - DNA, 280 bp, Glycine max
  unsure (1)..(280): unsure at all n locations
  Clone ID: PAT_MRT3847_94921C.1
atccctgcatgaagcggcgtatgtngctaaagaacttttgatntgggttgctttgaactctcacttggggacccacttggagttggtactcccggttctgacttancttnatgtctttctttttnaaaactttnttcttttctccnncctnntaatatcatcctggggggggccttcccttttttttcctttgtcttccccctcttttttcttnnccttcccctcttnctcacctttcctctcctttntnttnatcctcctcttcctcttcctttttttt

SEQ ID NO: 137223 - DNA, 359 bp, Glycine max
  Clone ID: PAT_MRT3847_94922C.1
tccacgcaatctgttgaataagaaagagctaggtcagattggggctacagctttggtagcatattaatgtcatggctgacactactagaaagcctctttacagatgaaaactgggtccggagggcaatacaccaatgacgtggcacgtgccagtaggaggcttgccatatactcaaaaaacgcaatcagtggcatactgtttctgcagcgtgcggagagtacatatactgactccagttctcggagacttatttagatcaaatgacataacagttaagctacaagctgattactatgctgacactgtcacactcaactacatatatgtctatggctcggactgtgacgacactgacctc

SEQ ID NO: 137224 - DNA, 239 bp, Glycine max
  unsure (1)..(239): unsure at all n locations
  Clone ID: PAT_MRT3847_94923C.1
naaggagagtngatcgtcanggtngtacngaanngtaaacncgnnannnnnannagatgngngtaggaatncanaggaatnnngnantnnnnnnngngaanngnnagtaggganccntggaanagcngcctgtnaaatnantaganntngnntnaanagnagtcnnatncngaangnnagtgcngatatcncnacaagtagataaggcanntgncagcagcagcnctagggcngtagna

SEQ ID NO: 137225 - DNA, 2527 bp, Glycine max
  Clone ID: PAT_MRT3847_94924C.1
agcttgcgatctggtctcgaaaatggagacccatggcgtcgaccgctggcttccgccgcccgttctcgaattgctcgtgacgccctctgaggtgcgtgcattctgggctgccagggggcaagttgcgaccggttcggctcttgtgccacgtggccgctgggccgatggcatcatccttggggcgcttgatccttgcccagtgtgtcctggcctgctgcgtttctccggtcccgtgcccccgggccagggatgctttcccgtgtgggccagctgtccgttctccacctgggtcccttctcgtcttccacggatgtggagggtcccggatgactctaagtcccagtaccttaaaaagtggttcaaatctcaaaaagggaagaaaccagttaggatattgcctcttccatcaccaaggaaatctgctgaaagtcaaatgattgctagtcagcatcatcattcatcaaatagtggaaatttgcgagatttgaaagttgctatctgtggattacctaatgactcaattgcagaatggaaacgcaaaattgatggcataggtggggtgtttcatgcaaaagtaaataaggatactaactgcttggtggttgttggatcactcaatgatgaagctgagatgcggaaggcaaggaggatgaaaaaaccaatagtcagagaggactatttgattgactgcatagaaagaaagaaaagacttccatttgatatgtacaaggttgaaatgattggtgagacttctagcatggtcaccattaaagtgaagggacgtagtgctgttcatgaggcttctggcctacaggattccggccacatacttgaggaagggaaaagcatatataacacaactttgaatatgtctgatttgtctactggtactaacagctactacattctccagataatcgaggaagataaggggtccgattgctttgtgtttcgtaaatggggtcgagttggaaatgacaagattggaggaacaaagctggaggaaatgtcaaaatctgatgcaatatgtgaattcaaacgattattctatgagaagactggaaacccttgggaggcgtgggaacaaaagactatccagaagcaacctggaagattttttccattggatattgactatggagttaacaaacaggtcccaaaaaataaaaaaaatgatgctgacagcaaattacctcctccattaatagaattgatgaagatgctcttcaatgtggaaacatacagagctgccatgatggaatttgagatcaatatgtctgaaatgccacttgggaaactgagcaaaagcaacatccaaaaggggtttgaagcattgacagagatacaaaatctgttaaaaattagcaatcccgatccatcagtcaaggaaagcttacttattaatgccagcaatcggttcttcaccatgatcccttctgttcatccacatattattagggatgaggatgactttaagtccccacgcgtccggttagaagcccttcaagacattgaaatagcctcaagattagttggatttgatgctaacaatgatgattccattgatgataattataagaagcttcactgtgatatatctccacttcctcatgatagtgaagagttttgcttaattgaaaagtttctccagaatactcatgcccccacacatacggactggagtcttgagctagaagaagttttttcacttgaaagggaaggtgaatctgataagtttgctccttacagggataaacttggaaacagaatgctcctatggcatggttctaggttgacaaactttgtgggcattcttaaccaaggactcagaattgcacctcctgaagccccggctactggctatatgtttggcaaaggggtttactttgctgacctggtcagcaaaagtgctcagtattgcttcactgataagaaaaatcctgttggtctaatgcttttgagtgaagttgcgcttggaaatgtctatgagctcaagaaagctaagtatatggataaacctcccgaaggaaagcactctactaaaggactgggcaagaaaatgccacaggaatcggaatatgtaaagtggaggggcaatgtcactgttccttgtggcaaaccagtgccatcaaatgtcaagagttctgagctcatgtacaatgagtatattgtttataatactgctcaagttaagatgcaattcttattgaaggtgaggtttcatcacaagagatgaggactagagagaagtttcttgttctggggtgtcatctacactaagcagttttttgaccatgactagtacgtagtacatcttggattctctagaattatcttgataatgtctcattttgagttgactagagatatttcaacgggttttttgtagggcatgctagtgcagggatgtattagttgaaacccgtcacttagaccaaaaacatctcatccaatttgtgatctggttatctgtatagaactgctattttaatctcaaactttttattgagctcttccataaaaaaga

SEQ ID NO: 137226 - DNA, 297 bp, Glycine max
  unsure (1)..(297): unsure at all n locations
  Clone ID: PAT_MRT3847_94925C.1
ctatgtcgatcgaactgtccaaggtcctgtcactgtcacttcaagtcctgtcactcctgtcacccaaaacggatccggcgcacgatcaccaacgacggcggcagcaccgatgcccaaattccaccactaccggctaccggtgctgtaatcacctgtacgtcggctgggtccacgggggtggggtccaggaggggttcttgagacaaacgcccggcagacacgcatcccaaggtgagcgccntgggagaaaatcggtaccacggccatgtgcgtgatcaatcaggtagtgagcagtat

SEQ ID NO: 137227 - DNA, 449 bp, Glycine max
  unsure (1)..(449): unsure at all n locations
  Clone ID: PAT_MRT3847_94926C.1
gaaattttgctagagttccagacgatgagaaagatggaagggaaggatacatgatgagtatctgggagcgagcatatggcccaggagacaatcgattgggacagtagcgcatatccaagactaccagcgaggactaccaccagccgatgcctgcgcctttttttgacccaacctacttaaccacaccaaggggggggggggggggtgtggcaaaacttatnnccacttttctgtttctctacatcaccgacttaaccgatatggtagtctcccaggctaaatctaattgtaataccgttgggatgtaaggaatcgtttgggccttcggtggcatgatcttcgccctcgtattactgcaccgctggcatctcagggggacacataaacccggcgatgacatttgggctgtttgtggcgaggaaattgtcgttgtccagggcgatttttta

SEQ ID NO: 137228 - DNA, 1464 bp, Glycine max
  Clone ID: PAT_MRT3847_94927C.1
gatgcatctgaatggaagaaaagaggcgacgcggtggtgatggcgttgtgtggctcaatgctcaccccttcgaatacaaagtcgtcggaaaatattcttattagtattaattcattaataattatgagacgagtgcttggcttcttattcttgatctgtgagtttgccacttttttcctttcattcattattcttctcggtccgtgaattccctcgacccactccgagaaacagtcacacttcagtccgctataacccattccctcccctttctctttctcttctcttcttcttactccctctccctgcataacaacgatgggcaatgccaatgggagagacgatgtgaacggtactccatccggaaccgaaggagaagaagaagaagaagaagaagaagaagaagaagaagaagaagacgacggagaagaaggtggttctgacagtgtcaccgattgcatgtcttccaatccttctcaccatgcgccctcggagttgatgggtcattctccccctgctagccctagagctacccaatctccattcatgttcaccccacaagttccggtggttccgctacaaaaacctgatgagatgcatgctccaagcccttcctggatgcagactacgtcagtttatgaggatatgtactgtgaactgggaattccaacgatgattacttggagctatgatgggaaggaagttgccgtggagggttcgtgggataattggaaaacaagaatgcctttacagagatcagggaaggacttcacaataatgaaggtgctgccatctggtgtataccaatttagatttattgtggatggacagtggaggtacgcacctgacttgccttgggctcaagatgatgctggggatgcttacaacatcttggacttgcaggattatgttcctgaagacattggaagcatttctagttttgagcctcctcaatcaccagactcgagttatgataacttatatcttagttctgaagattatgctaaggagccacctttagttcctccactcttgcaaatgacactgctaaatgtgcctgcaacaaatatgaaaatccaacctcctatgtcaagacctcgacatggagtgctgaatcatctttacgcacagaaaggaaagagcagtccttcagtggttggccttggtacaactcatcggtttctagccaaatatgtcactgttgtgctgtacaagtcgttgcaaggtaaaccataaacgtaaatgacaaggagcacagttttaacgccttctattagtttgtttatagagcgtcacgtagtatagttataggagagaaatgagaagctacataagtatcattacaagtaagtcaagattgtattatatataatgcattgcttgatggacaatcatctgacaattcagttccaattcttacatagttggtgatgcttttcaataggaattttggttgggtgattc

SEQ ID NO: 137229 - DNA, 1543 bp, Glycine max
  unsure (1)..(1543): unsure at all n locations
  Clone ID: PAT_MRT3847_94928C.1
cataatcctgcaagtccaaaatgttgtatgcattcccagcatcatcttgagcncaaggcaagtcaggtgcgtacctccactgcccatccacaataaatctaaattggtatacaccagatggcagcaccttcattattgtgaagtccttccctgatctctgtaaagccattcttgttttccaattatcccacgaaccctccacagcaacttccttcccatcatagccccaagtaatcatcgttggaatccctagttcacagtacatatcctcatatcctgatgtagtctgcatccaggaagggcttggagcatgcatctcatcaggtttttgtagcggaaccaccggaacttgtggggtgaacatgaatggagattgggttgctctagggctagcagggggagaatgacccatcaactcggaaggcgcacgatggccagggttggaagacatgcaatcggcgacactgtcagaaccaccctattctccggcttcttcttcttctccttcggttcccgatggagtaccattaacatcgtctctcccattgacattgcccatcgttgttgttatgcagggagagagggggagggagtaagaagagaagaagaaaaaagaaaaaaaaaccggggggtgggataattggaaaacaagaatggctttacagagatcagggaaggacttcacaataatgaaggtgctgccatctggtgtataccaatttagatttattgtggatgggcagtggaggtacgcacctgacttgccttgggctcaagatgatgcagggaatgcatacaacattttggacttgcaggattatgttcctgaagacattggaagcatttctagttttgaacctcctcaatcaccagactctagctataacaacttgcaacttagttctgaagattatgcaaaggagccgccattggttcctccatatttacaaatgacgcttcttaacgttccgtcaacaaatatggaagtccaacctcttacatccagacctcagcatgtagtgctcaatcatctttacatgcagaaaggaaagggtagcccttcagtggttgcccttggtacgactcatcggtttgtagccaaatatgtgactgtggtgctgtacaagtctttgcagaggtaaacaacataaattacatggactgtgtagtcttttaaacttgaagttaatatagcttcgagcagtacggttatgagtgagaaattctgagcatcataaggatcattacatgaaagtgaagattgtggtacatataatgcaattgcttgatggccattcatcatgcaattcagtttccattcttacatcatttgatgatgctattctctaggaatgttttttggtacattttgatttttttgggacatatttccaggaattttgattaaccccccctaaaataaaaggaaataaatttttatttttatttttacccttgccaaatgacgttgtgagatcaatgtaattaacctcccttagtggggtaaaggctttgctgttattgttgttgttgttattgttgt

SEQ ID NO: 137230 - DNA, 331 bp, Glycine max
  Clone ID: PAT_MRT3847_94929C.1
ttgccgggaagtcgacgaatgctgcccatctgggttggaagtcattaatagtgaagagacaaaccgtgatattgagatttgacatgttcggcttggacaggccacggatgatgctcaaagtgtaccatccttgtgatcttaactcacagtatggtttccctgttggggctgtgatgaaatataacaggattcttaaatacctaacctgccaagatcatatattgtctgcatgcaaaaagttgactacaacttgtgtcttggcacactgtggatggcggcataatcttttgtggcaagcattcaatctgctctgtcatggaaactgggatac

SEQ ID NO: 137231 - DNA, 735 bp, Glycine max
  Clone ID: PAT_MRT3847_9492C.1
gttcactgattacaacaatttttaattgcagagatttggacatcttggctgcagagaatacaaaagcaactcaattgagaaaattactaccacattacattaggcggcatgtgcatacctggctgatctacattcttgcatcttttctcactgctgaaattgaatataatgcggaatcagagtaatattcaaattttcggcttattgtacgacggctgatacaaattctggactaaacacgagaaaaatcttgctttgacagaagaagaaaagatggaggctcttataaatagaggcatgactgctgctggtcttgcaaagcgtgctcatgaatttgaaaaacatgttgctcatgaaagtctcaaggatcaaattcctgctgatgacaagtggtattctactaagggttattaagtttgcaaaaattatgaaccttacacaaagtgttgttggtgatcttaaacttcttactgatgggaagttgtatgagggtaagcatattcctgtatctaatattagtgcatgggaaaatcatgttgttcaaatacccctaatggcacaggaggaaattctgtcttttaatgccagggatttcataactgcaatggtgaggtaaaatagcaagccttaagctactgcaatgcctgtgggagctttagaaaccatctttgactcgttctcaagtcctgcctgccacatagttggggccatgctttttggtgatactttatatac

SEQ ID NO: 137232 - DNA, 1100 bp, Glycine max
  Clone ID: PAT_MRT3847_94930C.1
tttttatcatgaaaaattatacgtaaaattatgttaaattacaaatggattgaagttctttacagcaaggaaaggtgagaattatcgatggcatgcaaatatatccatgccatgagatgggcgtgcgcatttttcccaaaaagcatgttgagtacttcaacagtgcaaacttcacttcacaatgatatccaaaacaggacaagaaccctgtttaatgcatttataatcatatatattataattaaagctaggagaagacagcaactttagtttcacatcacggcaaattactaaggatccacataaacaccacctgtttctttcacgccagagtagacatggcaacatggttccaagaagataacacatgatgaaatagcccaaatcagaagataacaacaaggtctgtaagcaccggaactcacaaaagtgaaggagcattttcaaccattcattctagttctctaaaactacaatttcattaaaacaactctgctcatgttccaacattagaaaacatctgactaataagccatggttgttgctcacttctgacattctttgaatcttatctatcacaatgcaaatgcacgaatgagcaactgtcattgcaactgagttacctcatataagagcaactttacaaaaagacaagaagggtctagaagataggcagacagtggacagaaaagagtatcacacctatgcctttagctaaactatataccaaacttcacaacctaaagtttttatcatatgccaacgaggacacacatgatcatgaagacatcaactagctgtatattcccaccattttcgtattttagcatgtttggtacaagcttaaatctagatataataatagaatatttttagaagactcaacatttaacaaaaataaacgattattgcttcaaaataaattaagccaaacacacacaaactataactttaagggcaacatcatcaagtgaagcacaaaaacatttacttacattacatgttattaaaagtgcaaatcttgaggtcagtttgaataaacaaacttatcaaaacaaaaagtactctgtagaagaaaataaaaacaaaatgaatgaaac

SEQ ID NO: 137233 - DNA, 311 bp, Glycine max
  Clone ID: PAT_MRT3847_94931C.1
ggtaccttcaaattcacatttactccttattctggttcgaggcacgagctacggtgtatttatggtctcctttctcactgcaacatcgatcgcgaaatgcaggctatgtcatcgttcacaggccggaacgatttccggctccacttcgcgttcttcgtcggtctacaatccactcttccaagtctcactcgtgacacatttcacgttttcgctctgagacgcgttccacatactgatctcactcatcatcagcacactaccgaggttctcacaatgaatcatctgtctcagaaattcgtcaaggtcctgac

SEQ ID NO: 137234 - DNA, 247 bp, Glycine max
  Clone ID: PAT_MRT3847_94932C.1
ggctcgagccgtagcggacaccacacaacgatcctattcccgaggagccaagaaagcaggctgcccatgcccatttgggtgcttcaaaaagaaagccccactcctatacgatgcctgtctggacacatcccgaactactgtccattcctgactcgagcatggccacgagacaaccattgacatctggctgatggcacccgccaaggctcctcgactatcggcatacctgggcctacactgtactttg

SEQ ID NO: 137235 - DNA, 109 bp, Glycine max
  Clone ID: PAT_MRT3847_94933C.1
agggaacaagtttaagcgcttatatacttaaatactctgggccatttcaagtttatcctattccaattacttgaagtttgattatgaagggcggggtttaaatgaccaa

SEQ ID NO: 137236 - DNA, 599 bp, Glycine max
  Clone ID: PAT_MRT3847_94934C.1
agccaccaaatcctaaaccccccccaccgcctccggcgtcggcaccaccaccaccaccaccaccatcaccaccaatagaagagctctgcacgattcgagatctcgataacgggaaagagttcgtcgtgaacgaattggagaatctgcgcgaggttgctacggggcggcaattgacgatggaagaattcgaaatgacggtggggcattcccccatcgttcaggaactgatgcggcggcagaatgttgaagaggcgaacgttgattccaatgcgggtggttccaaagcgaagaagaaggggaccgggtggttgaagagtatcaagagtgtggcgagttcggtggcggggtatagggatcgccggagtagcgacgagagggacacgtcgtcggagaagggcgggaggcggtcgagctccgccaccgacgacagccaggagggagggggcgcgtttcacgggtcggagagggtgagagtgaagcagtatgggaagagttgcaaggaggtgactgctttgtacaagagtcaagagattcaggcgcatagtgggagcatttggagcattatagttagtttggatgggaagtatttggcgagtgct

SEQ ID NO: 137237 - DNA, 254 bp, Glycine max
  Clone ID: PAT_MRT3847_94935C.1
gtatatccactttttaagttcttgtcactaaagtcacaggcccaaatattcattacaggggaaaccccacatgtaaaagcttaggactttaacggcctgccaatctaccgatatcaaataaagattaccgggcactaagatcacatttacctaggagtttactgggcatatgctaacagaccaatacaaaattatccatgaccagtgatgatccctgatgacataaacctatcatacaaagtaggcgcattacc

SEQ ID NO: 137238 - DNA, 420 bp, Glycine max
  Clone ID: PAT_MRT3847_94936C.1
tttcaaatttgattaaatcgtccgttgatgatgttgaaactcctaaagggtccatgtcggatcttaaaatttctcaacctaaaattgcacttcgcaaatacacaggtggaggaaccattccgcgtagcgatctattggcaaagtttttgacagagggcatttttagagcaagggttgatttgcagcgctctcatcgtattaaaggaatgatctaaatggcggccacagttggtattcctgagaatacaggtatagcattgtcctgggctatgaatagttcttttagggggcgtgccagttctgatatccacactatctgctctcaagactgagacattatggcatcctgcttgcacaagagcgatgactatgtgatacaatgcaaacccgtgtgctgatgcatggagcttggaatttctg

SEQ ID NO: 137239 - DNA, 256 bp, Glycine max
  Clone ID: PAT_MRT3847_94937C.1
cgagaacaaaaaaaaaaaaaaaaaaaattccgggatcggccctcctctgggaaaggggaaacccagaagtccgaccgaaagagaagagcgttttaaaggtgaaaaaaaagggggttgccgtccacaaagctgttcaccaggttttttccgaaaagggaattgaggttcctaatggaaggccccaatcctgcgggaagaccacccaccttgtacaacctcaactttgaaaaattggcccccatatcccccccctggg

SEQ ID NO: 137240 - DNA, 272 bp, Glycine max
  Clone ID: PAT_MRT3847_94938C.1
ccaagcccctagtcttagagataccctctgagacagagagccaagctaatgtggtagtgaaaatcgaggaagcacctctcagcccctcagagaatgatcaccctgaattcattgtctcagtgaaggaagaacctgtagagatgacctcgttccggagctgggtatctcaaatctgctttcatccagccactgcccaaagccatcttcctgcctactggatgcttacagtgactgtggatacgggggttccctttccccattcagtgacatgt

SEQ ID NO: 137241 - DNA, 435 bp, Glycine max
  Clone ID: PAT_MRT3847_94939C.1
tttctttttatttttttcttttttttttttttctaattttttttggtctctttttgggaaaaattaaaatcccctttttaattatttttaaaatccaaaaaaaaatttttaaacccccttttcagaaatccaacatcaatcacttattctcctcaaattcccacttttaatgaatcttaattctaaaattttacccgaaaataaattccaccacccccaaaaattttttaggtattttaaaatctttcttaactatagccttaactaaatttcacttgacacatactaaaatctgtgctaaattaaaaattttttaccccctctatataagtatcatctttgaccccctaataattctttcccaaaccccttaataaaagccctatccttcattacacccaccaatggttcctccatcaatccttccccaaaatt

SEQ ID NO: 137242 - DNA, 940 bp, Glycine max
  Clone ID: PAT_MRT3847_9493C.1
cccggacttcctggctcgattcattcatgcggtttggtatcgcgcgctcatgaattggaaaaacatggggctcactgaaagcctcaaggctcaaatccctgctgttgacaagctgaattctactaaggttaataagttggcaaaaattatgaaccttagacaaagtgttgttggtgatcttaaacttcttactgatgggaagttggatgagggtaagcatattcctgtatctaatattagtgcaggggagaatcatgtacttcaaatacccctaatggcacaggaggaaattctgtcttctattgcaagtgatttcagaactgcaatggtgagtaaaaatagcacgcctcaagctactgcaatgcatgtgggagctatagaaattatcattgatagtttcgcaagtcctgactgcaacatagctggtgcaatgcttgtggttgatacttatcataccaatcctgttaatgcagttcgcagtatttttgttgcgcctttcagaggcggtaggcccattcgggttgttacattttcgaataccattgtgcagattgaaccagacatgaattcaaggtttcagcttttgagtaccactaccaatggtgattttgttcaagggaaagatctctcaatggttaaagttaatgtagcatgtgctgctgttggcttgacatcaagttacactccaacttcattgttggaatctggtttgcaaaaagacagagggttaattgtggagtattttggaaggatgttttactgttgctcataacgttaatacagccccaatagaaagatttgttggagggaaatttttcctttgatttaaaatctcgctctaatttggaaaagttttctttacaaaagctcaatttgtttgtgtgaaaacctttaaattttaaataattggtgctggttcacattctttagaagaattttc

SEQ ID NO: 137243 - DNA, 641 bp, Glycine max
  unsure (1)..(641): unsure at all n locations
  Clone ID: PAT_MRT3847_94940C.1
cacgcgtccggaaaagattcatcagttttgtcatgtcttgcacagtgttcttcaaatcttaaaactattgtgagctttggaagtgtttctaccacacaaaagaaagaagctgaggggcatggcgcgtcctgcttctcatggggagagtttctccagctgggatgtctggattgggatctaccatcaaaaaagaagactgacatttgcacaataatgtacacaagtggaacaactggagatcccaaaggtgtcgttattaagaatgaggctttcatggctgaagtgttgtctgttgaccacataattatgttaacagacagagtggcaggagaagacgatgtgtacttttcctttcttcctcttgctcatgtatatgaccaaataatggagacgtattgcatctccaagggctcatcaataggattttggcaaggcgatgtcaggttcttgctggaagatattcaggaactgaaaccaactatattttngtggagttccctagagtttttngacccgtatttaatgcaggtatcaaaagcaanagtattcttctgcaggaccactgcagagtacattgntttcagtgcgcttacactacaagttaaaatatctggagaaagggtcttccgcacacaaagcag

SEQ ID NO: 137244 - DNA, 280 bp, Glycine max
  unsure (1)..(280): unsure at all n locations
  Clone ID: PAT_MRT3847_94941C.1
tcagttntctagtgggacgagatttcagattaagataatggctgcccacttgcccagaatattggttgggggatcctatttagataaccttactttgaaggttaattcccgttcgctgtcaaccaagaatagcagatttagacgtttgagcacgattttgaggaatcgtgtaaaagtaagcatgagattgaaaaaccatcagcagccagataacactgccatttatggatatataatttataatgctgccaagacctggtgtaattctcatccttacatg

SEQ ID NO: 137245 - DNA, 123 bp, Glycine max
  Clone ID: PAT_MRT3847_94942C.1
gtgtcattatgtgctcagcggatggaaagatcttcagaccaaagatgaaagtgaaagttaatccaaagcttttgcagctatcaagaagtggacttcaaaatgtggagggaaaatggattcatg

SEQ ID NO: 137246 - DNA, 386 bp, Glycine max
  Clone ID: PAT_MRT3847_94943C.1
ggttttgcatggagacaaagaatccatgggaacttcaacggcctcacgggtttctctgacggcgaacgggaagagttcacacggatcgagagctgcggaacatcgatccgctagcgagtgcctgaacgagtcgacgacatgggcgatgcgaaaagcgagagtcatcactcacgacggtttcaccccattcgtcatcgtcaacgatatgaactctgaccccaagcccccactttcatcagcatcacaaccccgtctgatccatctcttcaattcatccatcatcaacgcgacatcattctcattgtcctcgtattttgcccccattcatacatatgcaactttcgttatggatcaattttcacttgcacatcgcacgtagcatggtg

SEQ ID NO: 137247 - DNA, 197 bp, Glycine max
  Clone ID: PAT_MRT3847_94944C.1
ggctcgaggtctaatgctttttatgcagccacccaaagtcctcgaaaggcgtcgggtgccagacaatgcttcagtcagtatcacactcgtgttgatcactgcctttattgtccaaggtcaggtatacaaccgcctctaactccacaagcctgcataatacaacccgacgcactgaaacatcccactcgtcttctgaa

SEQ ID NO: 137248 - DNA, 747 bp, Glycine max
  unsure (1)..(747): unsure at all n locations
  Clone ID: PAT_MRT3847_94945C.1
aannntnattgacgtaataattaaactgagatttgtgttgtaaaacactgcaaactgaagacgataattaagatgaagaagaaaagggttcaagagcgaacgacgtcgctgagcacagcagtggtagtagtgtaagcagaagaaactttagcctcagaaccctgcacatgagcttcacagtccttgctcatttgacaaagccaatgatgagaggatccaaccttagacaacgctttctctccactcactttcagctccttaaccttcttcctcataccaaaaccttcttcatccaccatcactcttctcaccagctccgctacctgttctcttctcacaactcctccctcctccgccacccgcaccgccaccccaagctcctccgacagcataaacgcgttcattttctgctccgcgtaaagcggccacgccaccatgggaaccccgttcagaacgctctccaaaacagaattccaaccacagtgcgtcacgaaaccacccgtcgctggatgtcccagaatctccgcctgcggggcccacatggggaccacaacccccaccgcttccgttcttttcacgaacccctccggcaagtaattcagcgccacgtcaccaccattcgatacttcaaaaaacgagccactcgcgtcgccctcgcacgnnnnnnnnaccacccnaacaaacctctgttgactcagcnnnnngcccaacgccactnnnctcatttgaacctctgacattgtccna

SEQ ID NO: 137249 - DNA, 478 bp, Glycine max
  Clone ID: PAT_MRT3847_94946C.1
gcttctccgagggctcaccagaagaatctaaaagatacacatgcgatggtaatgtttgtgttctgaaaaccccaaagaaggaaaaccttgggaagccacaaacattatcccatagcaagaaatcaaagcatggccttcatatttcgtttccccctcgtgccaaaaggtctcatagttgttagagagagagcctcaggttctgcacggtgccatcaacacaacaggttaccttttatggcttcatcgtatcactgtcattcttcgatcgcttttttttttttttttttttttttccgtttacaatataattgtatttattccttgtcgttaaaattagagttaatcttggaggatatatattctcgtgtataaatcctatctagtcgtcaatcttaaggagatttgaactttgatttttaatgcaattattaatgacttttaattagaactaataaattagtgtaccaaaaaaaaaaaa

SEQ ID NO: 137250 - DNA, 298 bp, Glycine max
  unsure (1)..(298): unsure at all n locations
  Clone ID: PAT_MRT3847_94947C.1
gaaaaagaaatgggaagacgtgataacagaagcagcacccccatcaaggttcctggaagaagacctaaacatctttcanacccccatccccacctctccccaaaacctttccttcancttnccaacacaataaacaaangnctcaaaccctctcttctcatccatngcnctgttccccctcttccctcgntctcttcaacnaaaccntanccctaaccctaanccnantngcntccctcattntccnggaantccccttttcctcctngacaacaagntttcaatctncccctttccg

SEQ ID NO: 137251 - DNA, 354 bp, Glycine max
  Clone ID: PAT_MRT3847_94948C.1
aaacagggcagtaattcactagttgtattccaaaagacggatgggaactttttattcagggaaacaaacattggtacatcctcgggtaggtaacaatattctgtttttctccatttaattgaggccatactacaggtttaaaccaaattccgtgctacaacaaaggggcttccccaccccatgactactccaacatgccttgtctggctattaggaacaaccaccctttttctccaccacatgaatctaatactggggggtttacaacaaacctccccccttttttgttgggcgggctccaacaattcccttaatgcttaattacaacaaaaccctttttttgatacaacaatg

SEQ ID NO: 137252 - DNA, 294 bp, Glycine max
  unsure (1)..(294): unsure at all n locations
  Clone ID: PAT_MRT3847_94949C.1
aantatttanaaattctatttttactctctcaattntcattgtccnattttantctctatttttttaaaagtaattttagtctcccacgtnaaataanaactatcaagtnnttatatgtctgacaaaattacatgtcnacaacaaaataataggtaaaaannaaattaattttgtananttancttcatgtnatcattantttattacattanaagattttnttttcgcttacaatggaaataagtttttttcaagtggncatagaatgctcanatttgagtgggacaaaaata

SEQ ID NO: 137253 - DNA, 993 bp, Glycine max
  Clone ID: PAT_MRT3847_9494C.1
ctcgccccgaccggaactaccgggtccgcccacgcgcacttccttgcgaccgaaaatttctcaatctaaaattgcacttcccaaaaacacagttggaggaaccattctgcgtagtgatttattggcaaatctcccgacagagggcaatttcagagcaagcgttgattagccgcgcactcatcgtattaaaggaatgatcaaaatggtggccacagttggtattcctgagaatacaggcatagcattggcctgcgctatgaatagctcttttagggggcgcgccagttctgatatttacaccatctgctctcaagactgtgaatcatggaatcctgcctgcacaaaagcaatgactatgtcattgaatccaaacccctgcactgtagcagggaggttggagattctgaagcgctctggaatgcagcggagcagcattagggccacctggaggactgccaccccaatgcaagatgttcaagttacaattgattggtttattccctctcaagaatgtgttcccaagacctatagcgttgtaaatccacaaaatcctttagtgttaaataggaggatgggaaaattgactttaccccaaggcacttcccgaagtgttaagataatgcctctttctataaggggaggagctggtgcaaagaatgctattctcatgaatatgccaaatgctgttctttcaatggggagatattctgttggagatctcgtctttgaagttgctaagatgacttctccctacattaaatgtacagtctctctcttcatagcatttggaaattgggctgatgataccatcaattgtgaggcttttgcccacatgctggagcatgttggatagattcaagaaaaagttgtatagaaatttgcacaagatgaatgtcttacagcttggtcaactgatgtgcgtactgcaacaactctgatggctgatgggtgtccatatttgtatgcagtggtgcatgatacttcattgtctac

SEQ ID NO: 137254 - DNA, 395 bp, Glycine max
  unsure (1)..(395): unsure at all n locations
  Clone ID: PAT_MRT3847_94950C.1
ctcgagccgcctcagcttcagaggactgccagacggactcctgacgggtgctccttccctccccctccctggctggcgtgcgccgcgtggctcctcacatctcacattgcttttctaagacctggctcaatctgccctgtcctcagatcctcgcagaccttcgcggatgcccctctgagctttgttgctggtggtggctgggacgccgccgaattgggctgcttcggcctcaggctctgagctctcagacgtgtctggtcgggtgcccaacgtgccgtggggcctgctgcccgctgcggatgcgcgcctgctggagtcctggcctgcactgctgatggcgcggacccttggaaggaggattccncggatctgactgcacggccgtggtctgcact

SEQ ID NO: 137255 - DNA, 810 bp, Glycine max
  Clone ID: PAT_MRT3847_94951C.1
gtaagctcgaacctcggctctggccttcatatgcatttgatatgtaaattgtttcattgtttatgattttgatgaggtatgtcaatttgcagaaacaatatcaaagtttggctcgggcatgtttcttcttgttcaagtcatgctcttgttggattttgttcatggatggaatgacaaatgggttggatatgatgaacaattctggtacattgctctatttgttgtttcccttgtttgttatgtggcaacatttgcattctcaggagttctctttcacttcttcacgccatctggacaagactgtggactcaatgtctttttcattactatgaccatgattcttgcatttgtttttgccatagtggcattgcatcctgcagtaagtttgttatttgattttcattgtagctaaccactattaatttgttttcctggtttttaatttgcaaaatgtaaattttccaaatttgtctcttctatgatattgtacaatgcttgaaaattgctgttgatgcatttttcatttgtttttacttaaatactttgttaaaatgttactatgtaggagttcatatataatctgttatttattaaatctaatttcttttcttctatctccgttatcatggttcaatttttctgatggaatgtaagttagtagagctggcattaaaaggtatatttattcctgtcagcctgggatgtgactgacattttctaagtttgttctgaaggataaattgctgaaatttattttgtttagttgggaacaggttttatccttgtgtactgtagatcattcattacttt

SEQ ID NO: 137256 - DNA, 750 bp, Glycine max
  Clone ID: PAT_MRT3847_94952C.1
gaattcgagctcggtacccggggatcctctagagtcgacctgcaggatgcaatgccactatggcgaaaataaatgcgagaatcaaggtcatagtaataaaaaagacattgagtccacagtcatgtccagatggcgtgaagaagtgaaagagaacccctgagaatgcaaatgttgccacataacaaacaagtgaaacaacaaatagagcaatgtacctgtataaataaacaggtaaatactgaaattctcgttcaaaaatatgtcaacttatcaagtaaaggaaatgacgttacagaagtaaaatagaaaagcaaagcctaaaactaaccagaattgttcgtcaaatccaacccatttgtcattccatccatgaacaaaatccaacaagagcatgacttgaacaagaagaaacatgcctgagccaaactttgatattgtttctgcaaattgacatacctcatcaaaaccataaacaatacaaacaataatttgatcacgagaagtaatcccaaattcgaagcaatagctcaacaaaaaaggtaattgtatattatattattatttaaagaatctaaggtttattacagtaatcttttattccagctgggacttctatcatccaataattattgtgcccaccaaatttcccaatagctttctttttcctttcacatgataccattttttataatttactatgtaaaagattttttgttattggcattggcatatccaaacgaatatcttaaa

SEQ ID NO: 137257 - DNA, 281 bp, Glycine max
  Clone ID: PAT_MRT3847_94953C.1
agaagaaaaacggggggggggtagaaacaaaacaaaagccattttttttgccgttgtgtacccattttatctgtacattgctaccaacaccttggcaagaaatcttactagggaatctccttaaacaaaggctgggcatctgacaaaaacaatgttaggaatccaccctctaccaatgaagaaaacatcgttcccccaaggttaaaaaatttggggttttactgcaaatttaatagaaaattttcctataatgtgtctgacatcatgcccatgagggggcc

SEQ ID NO: 137258 - DNA, 257 bp, Glycine max
  Clone ID: PAT_MRT3847_94954C.1
cgaccacgcgtgcatctgtatcgaacccttctccaaatttccgatcccaccgcagtcgcgtcctgctctgtgctgtaccctcggtgtgcgaaggccgcactacgaccggcacccccctgaaagcatcctgaagggcctggactctccccgcctcggctgcaccctgactccccgggcggacagtccttgaggccctcagcagacgcgttccgaacccccccccatggtgtcacgcgggaactggtttcgggtgctga

SEQ ID NO: 137259 - DNA, 373 bp, Glycine max
  Clone ID: PAT_MRT3847_94955C.1
tattgtttattaattattttattttttaattaaaatataattaataacgcaatattttattttttaaaaaaatatatgaataattaaaaaaaattatattaacatcggtttttcaagcaaccgatgttaatgcatacacgttaacattggttttcaaaaaccaatgttaacgtgtatgcattaacatcgatttttttggaaaatcgatgttaacatatcatacgttaacatcggtttttcaaaaatcgatgttaactaatgatgttaacatcggtttttgaaaaaccgatgttaatgtctatgcattaacatcggttttcttgaaaatcgatgttcagaaggatattttatttacaaatataccaccgcattt

SEQ ID NO: 137260 - DNA, 437 bp, Glycine max
  Clone ID: PAT_MRT3847_94956C.1
cggctcgaggaggggggattttttctctctatttgaaggctgcggagtgtggtagagttatcaactctcacgctcacgcggacaaactcagtttgatcatctccatcaacatttttccagattcactctccaacaaataaaaaaaaatatccctttaccctattttctcgaatcttgtttgctatctcctgagtccggttaaatccgtgcctcttttaattcctccgtcgacaaggcaacttcccaacttcaatctcacacttatccatcacaccccatgtgacaactttctgtctctctttgagctttttcttcaaacacacaacaacaactttctggaattagttagctagttctactcccaaaaagggcttcatttattagtattttggtcggttctatatccttccttttcttattttgtcttctttccattt

SEQ ID NO: 137261 - DNA, 420 bp, Glycine max
  Clone ID: PAT_MRT3847_94957C.1
cccagcttgtaaaatccatcatttcagatccgactccacctctccctggtaatccaagtcggccttttgtcaatttaattaattccctgttggtaaaagatccagctgaaagaatacagtggcctgagctttgtggacatgccttttggagaaccaaatttactctgttgcctctgcctgctcaacctgcctttgatgatatgatagagctacatgctaaaccatgcttatcagaacgtaatggagataaatcttcgcataacaggacccctaccaaatatcgtgaaaaagatgtcaaaggggcgtggagaaaggatgagaactctgttttaggatctagaggcattgagacaccagcaagggcaacaccaattggccacagaactcagacaaagggttctggcagactacatgaggtaa

SEQ ID NO: 137262 - DNA, 317 bp, Glycine max
  Clone ID: PAT_MRT3847_94958C.1
tgttcgccttctcgtacgtcaattgtaaagaagggggtaaagcattttgggaaggctttcacgagggaccttgccggccgtggatctcttcattgtcttgctcttaaaacggctcgagatatgctgagactgtgctcaaatcaaccctcgactctgctgaaggatgagatgaatgttgatattggtagcaataacacaggcgaactctcagaaccatcctcatggcctgcagatggtttcagatcccaatctagctcccccagattccatggcacatcccatcgtacaaacacatttagaaactgatggtcacaata

SEQ ID NO: 137263 - DNA, 247 bp, Glycine max
  Clone ID: PAT_MRT3847_94959C.1
aggcaagaaccggacttcttagtgagtcagagggtcttgcaggtggctgagagggatggagggatgccatccccatgtagatccaagtgctctaactcacatgatggaaaaagacaggcctgggatgcggacgctcatcactattgcacgcagagtcatgaatatgtcactgtcaagggcttcaagatacggactgacaactgtgactccttgagcgatacgaactgtacttagacactcaatgcac

SEQ ID NO: 137264 - DNA, 388 bp, Glycine max
  Clone ID: PAT_MRT3847_9495C.1
ggctcgaggaaaactgagttggatggtgaggaacaagaccacatatggggggctgacgctctagtggaatttgaagggcccgtgtctgactcaaccctgtcaatggtgtcaagcacattggtaggattggatgctgtgagcgaagggtggtgtggtggatctactggcggttggtgctcgtgtgcgacatgataatacggtaaaatgaggtgcacgttaaggggagagagaatgaaatcaaacaaacaactgcagtcaaaaaaaacttctgtagctagagaagcaatttatgatgaagattgctcttgctatgaacaacagccgaccatagtctgactgacatttaattgatactgattgaggtgaaagtgtactataagtacttcta

SEQ ID NO: 137265 - DNA, 184 bp, Glycine max
  Clone ID: PAT_MRT3847_94960C.1
gacaaaatatgaatgttaaaatgattgaatttgcacaaccgaagacgaagcgggggaggaagtaactggaaccatgacaaggagaataaggcggatactggctatcgctataaaataaataggaaaaaagaatccaaaggggagtggggcgttaaaagtaacataaacaaagagaaactacaaa

SEQ ID NO: 137266 - DNA, 491 bp, Glycine max
  Clone ID: PAT_MRT3847_94961C.1
gtctcgtgcagatctcgagagcaggattatgtggctggaatgggccagtttcaccccttgaggttttctactgcttaggattatgatttagtaatatgtatatatcctatcagatggtttctttagattctgttgtaatttcaggtgtcatcaacagttagtttattgctgcacataaatggaacatatagagctcactgggcagaacggttgggattttgtaaaattgccggtcctcctttggctttcagatgcataaaaagcaatggtggtctagtaccacaaactttggctggaattacccgcatatatcccattctttacatggaaaggttaagcagtgggaggtctgttgtcatgtcagagaggatggagaataaaatgatggagctgtacaatcagagacgctctgctgttgtagatggcatcatttcagagtatcagaaggaaaggccacatatttattatgacagtgatagtgaaggtgctaa

SEQ ID NO: 137267 - DNA, 384 bp, Glycine max
  Clone ID: PAT_MRT3847_94962C.1
agcccaacaaaaccaaaacgggaaaaaaaaggagacaccaaccaccaggggctaacaaaggccaatggggggggaaaagaacattccttaaaggacaacaagcaacaaggctaaaaacaaaaaacaacccccacaaatcattcagctttcggaaaacccctcttttcttcccccaaaccacaaaaaaacctggcaaaaaaagaaacatggccgggggggtggaccaaaacccctacccgggcctttaaacaaaattcttccacggacctggggggggaaaacccacccccgataaaataataaacgagaaccccaacttggaacccactaacaaaaaaagaaaagtggcccaaaccacccctatggggggtcctaaccggaagc

SEQ ID NO: 137268 - DNA, 241 bp, Glycine max
  Clone ID: PAT_MRT3847_94963C.1
gcctccgaacattacagatttcttctagtaaagaagatcctggagaggggttatgcagctctcgtgggttcagatatagggacttgacacacccatggtcattggtacatatgccgtcgccgaccctacacgcctattcttgcaaaatagaagccagacatccatatgaggttggccggcgacgcacatattgacaccaagaactttttttcgaacggagcgtatcatcttgaagcaccgc

SEQ ID NO: 137269 - DNA, 485 bp, Glycine max
  Clone ID: PAT_MRT3847_94964C.1
tttttgtctataggtaaattcctgtaaaattgatttgtggtgacatctgttactttatgatcagaatcagaccatagaatagaatacaccatttttatgcataaaaaatatgtatgaggaaaaatgttcccatcatcccttgttcctaacactaggaaactttaacataagcaaggaaaatagaaagtgcaactgacaactcatagagcagaaagagatgctgtggtaacggtaggtggtgttggagtataaaactcatcatctgtccaatttgtctctccccagtgccgcaacatgcttttccagttgcacaaattatctatacatttcttcaagcgcctatctttaactttaatttgccaatgcccgtccgtgtagtttgctatttcagcctgcctacgatcccactccaactgtgccttctgctttgacttcaacaggcaaaactgctgcaaaagctcgggcattgcatcatgtaccttcca

SEQ ID NO: 137270 - DNA, 1595 bp, Glycine max
  Clone ID: PAT_MRT3847_94965C.1
ccaaaggttgttgtttgatttactcacatcatcaagaagggagagccaacttttagtgtccttgtgtcaagattcttgctcggaaaagcattcccaataccagtttatctgtcactgctgccaattattggtggtggtgcactagctgcagtgactaagctcaatttcaacatgattggcttcacgggggctatgatatcaaatttggaatttgtctattgcaatatattctcaaagaaggggatgaagggaatgtctattagtggaatgaacaactattcttgtttttccataatgttactgtcaattctcacaacttttgccattgttgttgaggaccccaaggtttgggctgcaggctggcaaacaaatgtgtctcaaattggtcccaattttgtatggtgggtagctgctcagagcgtcttctaccacctgtacaatcaagtcccatacacgtctcttgatcagatttctcccttaacatttagcattggaaacacaatgaagaggattttggtcattgtttcttccatccttatctttcccacgcttgtttagcctatcaatgttcttggtatcgccattgcaattcttggtaccttcctctattcacaggtgcattctcctctccctctaaattgactatgttttttgtactccgagaatcctaagtgagaatcctaagggacaacatgctttgtgcactgacattattattttttgtttctttttccatctatatctatttttatataaagtaaattaaaaggattatagaaatgagtttttttggtggtggatccatcgtgggattatgatgtaagtgttgttcttgtccttttactgataggttgatttatgtttagtatgattaaattatgaggtaaaccaatgctacgacatttccttcaggaattaaggctctggctgattatgttcacaacaaaggtttactttttttcttctgactttcgagtgaagaaagaaaagtcactaaatacttcattggccttccttcctttactttttgttttatttttggaaaattagtgctttcactatacttatcattattattgttttacttgtatcccattaggatcgtacaacttgtgtttggagacttccagatctagtatcattagttgtatttaaagggcataaaagaggaatttggtcaatagatatgcatatgtggggatttctttccccttctcccaagggttaaaagagtttgcaatcttgtctggtccaaaaatgtcaatgaactagtaagcacacatggctattcccagaactacataattgtttggagatacccctccatgtcaaaggtgatggcaccatccttaacgctcgaaaggcataagttcatggccaatttgaggaaaatgtttcatgaggttgttgttgttactagtgatggaactaatgatggccctacatagcagcaactgaggtttatgtctcttgtgtgctattatgataattctggcagttacgagttgttttagttttgttaattgtcatgtatatcattaatgctttatattgactttattcatatttttatgagatcaaattataattttgat

SEQ ID NO: 137271 - DNA, 222 bp, Glycine max
  Clone ID: PAT_MRT3847_94966C.1
atgaaaaactggacccaatttaatcggaaacactctcaacaaaaagggtttctatcctggggatacagccttactccaatcaaaagagtccccctgctttcctagaaacattcttacatgggggggggaccactaaggggcgggcaacctttctcaggttttgcctctacggaccaactgaaggcctgcttacagggtacccgttggcaccacatgccctaa

SEQ ID NO: 137272 - DNA, 351 bp, Glycine max
  Clone ID: PAT_MRT3847_94967C.1
ctttcgtttgcttccacgcgagcgtccaaagcaagcttggattgaatcaaatttgacgcgtggtgtgcaccaatgttagattgcctgtgaagacactttttcattccttgcccaccatggccaagttttctttcaaccagatgcaatatcttctaagaaccttgaacgaagtcaacttttgagtccattttacatcaactttgtcagtgtgcggaatttggaactactgggcgcatttcgctgcttaaaacttgcttggatcagtatggttatgccagaagagatattaaggtcattcagcgtgagccaattgttggggcagtgattaagtacctgttgggcaaaccaaac

SEQ ID NO: 137273 - DNA, 705 bp, Glycine max
  Clone ID: PAT_MRT3847_94968C.1
tcctctagagcggccgcttttttttttttttttttttttttttttttgacaatgactaatcaatttgtataacgttttctcgaagttgatgatgggaagttccagtccgcagcggaaagagcacattgtatgtggatgtgctggttacattagtttccactagttaccaaatcatgatgggttaaaaaatatactataaataaaatgtgaatataacccaagaagcctaaagattctctagagtgagttcaaattaaattcccattttcagttcttcgtgtcctcggtcatcataatctccatatcccgtatatctcgcttcagaacattgcctagtcttgcaatggcctccagctgctgctgtaaaacctcttgtagatcaccaagactctgttcatgaattttggttgaccctggaagataaacggagctaccaaatccattgctattagctttaacacgagatacaattagtagattttgtactcttctagacagttccgctccagatcctttcagctttctagttattgtggctaatttctcagcaagttcagcttccccttttgttaagggtatacgacagcctttttcctccaatgcctccactattctcattactcttaaaagatgttgctggagaatttgttctttttgtttcagtcccctcgtcgtcttctcaaagccgtacggacgcgtgggtcg

SEQ ID NO: 137274 - DNA, 762 bp, Glycine max
  unsure (1)..(762): unsure at all n locations
  Clone ID: PAT_MRT3847_94969C.1
gaaattttatttaagagagaacccatgaattgaaattctctacaacaatgtgagactttcaatttctttgtaattcctctctacggtcggtctcgttcatcactctcgacctacacctcacttgctcttactcattcctctccacccacacactctcccttgcgacttcgagaccctcattctcactctcagtcatgacaaccttcgtttagatcgcacactctcggtggctattacctcgttcagatcgcacactctcatggtggctacgaccttcgttttctgttgattcaaatcgcacactctcttcttacaagtcacatgaagaggtcaaacgatttcgattcaaagtcattcctaattgggatgatattatagacctatgtgcaaaggatagagctactggactcggaaaagaaaatgcattagatgtagatgatatcatgagcaaagaagcaaatgaagaggaagcaattcacaatgtgaatattgatttagagggatcaagttctgcctcaaggaaaaacattcgcccaagtaagagtggagagaaagaagggatcatttcctcaatgaaagaagtagccgagtcattaaagcggtgaatgagctagataatatacctaattttaatggtgcactttgacataaaacaatcgtttggttgagaaaaaatatcattatgttcgcaactataaaagctctttcattggatgagaaggaattacatctcgtcttttatgccttgatgccaatgcnaaa

SEQ ID NO: 137275 - DNA, 602 bp, Glycine max
  Clone ID: PAT_MRT3847_9496C.1
cggccgctcaggcggcgggggccggaactagtctattgggctcgagggacaagatcgatgaagactcttcactttctcctagtttctttctttgctttccaggcgttgttgcttggttctagtcctacagaagctacacgtttgcggacactgtcactgggctattcttcaagtactggagcaactctgaagaaagtgagtttaaggccaccaacacatccacgacgacactcgcctccaccaccaactcctggctattctcctgaacccggtccaggacgaactcgaagatctcctccgactccaagacctttcatcgttgtaccagcaaataattctgatccttctgctgcatcagcatgattatcgtaatttaggagctggatgcgttgccttatattatatgtgtgtgttttactctacgtgcttcaccaaaattaaagtcttttaagtccttcgctttcattgtgtgctttaagaaagaaaaacttcatgtgaattatttatgttctgtttgcttgtatatgtgtattcaaatatttgttggagacttgagttgatgatcctattcatgagtcctaatttagttgatatttaactgg

SEQ ID NO: 137276 - DNA, 146 bp, Glycine max
  Clone ID: PAT_MRT3847_94970C.1
taataataaacctatattctaaagccggccaaataccaaaaggaataacagcacatgtctggaaaggtaattatctcggctgattctctcatcctggtgcttagagtagccatatgtatagttctgaccgtcaacaatacgggcga

SEQ ID NO: 137277 - DNA, 530 bp, Glycine max
  Clone ID: PAT_MRT3847_94971C.1
ataagaatcaattggtgctgcacaaaagctcacatcagagaccaagatgaggtgtacagagctctattcttccaagcacttcccacatccttattgcgcactctcccttctttccctccatatcatttattaccattatgtataattatacggataaaaagaaattgcaacgaggattaaaaagaaatatccaattgttggttcttcattcgtaaaagagatggcccacctctcgcttggttgttacagcaatgatatcgcgacggacccctgagagcagttgagccccctaacatcggaaccccatgctccactctgacttgtggagtacatatccatctggcaatttccacctcaagacctgaataagatgagctcctcgcccattcaagggcgtatagccccaacacaattccggggccaggatcttggacccgacccgaatggaatgaacttccaagatgctccccttgaaatcgggcatgctccggtttaaggaacccatgcgggcttaaaagtttgcgggttcc

SEQ ID NO: 137278 - DNA, 255 bp, Glycine max
  Clone ID: PAT_MRT3847_94972C.1
ggacgaccgccccccctttttttgaccggagttttttaaattttaccgacaacaacaaccaacaaagccagggggaggggggagtactcacgagacaaacaccaccacacacaagcaacatgtggatggcacaaccctcaagacagcaagatagagagcctcatccacaaatataccacaccctggcaaaaaaacaaagcgagcaaaacgttacccaaaaccagaacacaaagtgatcctaaaccccagcaccaa

SEQ ID NO: 137279 - DNA, 894 bp, Glycine max
  unsure (1)..(894): unsure at all n locations
  Clone ID: PAT_MRT3847_94973C.1
atttattggaccgtttaatttgtgattcacattaatttctcaagcaccagagtttttagattcactcttctgaatgtggttgtagtgagagagaaaaaaaagaggccaagcgtccggttagaattgtttgtttgtttgtttgtcgagtaagggttttgctttgggttatggctgaatcatcggcgtgtcttgttcgatccttctcctctcccgcagaagctacttgttgcgacggtaaccctattcttgcgcttggagaatctatctcttttgggaggtttatgacagaaggcctggattgggagaaatggtcaacattttcacacaatcgctatgtagaagaagctgagaaatattccaagccgggttctgttgccgcgaagaaagcctactttgaggctcattacaagagaaaggctgcagagcgagcagctgctgtgatccaagaagcaaacgctcaggctaatggaacttttgaggcacaagttcatgaaggaaactgtgccgattcatcctttgggacaagttcaaatgtggcaaatgttgtggccgccaatgaacagctggataatgaaactgctaattaccaagttgttgaatgtgctgatactgaccaacataaatgtgatgccggacaaagtgatttggacatttctaatgtgaaaggagcagaggatgtgccacatcctcgcactgatacagatcttaacgtggaaagttgcacatttgttgctaattcttattctaaccagcttcatcatgttgaggacaatacatatattgctgtccctgcagaagagaagacacctgatcatggtgctgttggtcagggagttttaactttgtctgtcaagggaagagagcanactcttctccgaattatcaaccaaaact

SEQ ID NO: 137280 - DNA, 520 bp, Glycine max
  Clone ID: PAT_MRT3847_94974C.1
ccacgcgtccggggggttacgcgtgcgaaagagaatgagagaatttgaaaaccctaatcttacaaagatcggtgatgactaacctctcaaggatcgagagaactttgtttacattgccatacttgtctatctggctgtgcgtttctaagagatggcggaatcaatgagaagcgctgctaatatccccatccgaactgacgagcggaggagcggaacttgctctctgtagagcacaagactgcgactagcgctcgcacagagacctgaaggatcctgacgtgcattgagcaaaagggagaaacaaaagggaactagttgtatgcaacatggactaaggactcccgacaagaaggcgaatcgaagctatcgaacatctgatgaggtaggatgagagcgagcgatgaacactttatcactgctggtgtacgtggggaatccactgcgttgaactattagacgacaggagagtatgactgggatcgagctgaatgcaaatcgagcaaagagaagaaggaagctg

SEQ ID NO: 137281 - DNA, 1562 bp, Glycine max
  Clone ID: PAT_MRT3847_94975C.1
ggagacttcacagtgtggataagcttttcggttgtgccttgttttcattccaacacgtttgaaagcaatgcagagtcacctatgatttttgtccttcgtagaaggacactttctcatagccacgatctctctctctctctctctctctcttgcgttgcatttccatttccagtttccacccatggctgctctcacttctctctctttctcagcagtgactcattgctcagaaagaaaagtaaccctttcctccactcgttttctcgcttcctcttcagatatatttgggttccgaaccgatttctcgtaccactatgttggtgttcgagcttctaattctgtgtctagaatcgttgttcaatgcatgtcttctgccactggtgttcctagacctacagttatgaaaatacaatttttattcaatacatttcatcggccagaaacatcaatctgaaggtttctgagacaaaaattaaatttcctcaaggcatataagcgaccaatccctagtatctacaatactgctgtggttcctctcgaatagttcagtatatatgaaaaacttatggaagggtatcctagtgatgaggaccgagatgccatcttccaagcctacattaaggcattgaaggaagatccagaacaatacagaatagacgcacgaaagttggaagagtgggctcgagttcaaaagccaacttcccttgttgagttttcatccaaagaaggagaagttgagggaattttaaaggacattgcagaaagagctggaggaaaaggagaattcagttatagtcgtttttttgcagttggactgtttcgtcttctggagttggcaaatgccacggaaccaacgattttggacaagctttgtgtggctttgaacatcaacaaaagaagtgttgatcgggacttggatgtgtatcgcatcctgctttcaaagttggttcaagcaaaagagctgctgaaggagtatattgacagggagaaaaagaaaagggatgaaagggctgaaccacaaaaggctaatgaggccatcacaacatgtttgggacaacaattgcctggtctgtagttatggtcttctgaaacaatctcctactcaagatagacttcttatctttacatgttttcttgttgatccttgagttggataaggcaagtcggaacttctatcatcttgattttgcaggatttgaatcatctaaagtgcagagtacatttcaaaggataaaatatactaaaaataaaaattgttatcaatgattgagattttaataaaaatatgtgtaaaataaattaaattttattataatctcaatcgttgattaatcagcaattatcattctctactttattctatgtagtgtacaatttagagtaaacaaatccttgtacttgctgcaaattgtaatcttttgtcatgatggtgatccacctaaatcttgtttaactaaattcaattaatttatccgtccaactccgctcgttgtcacctgcacaaatgtattttgtggttctcaaacgcgagactgatagcctatgttgttgtatctatccct

SEQ ID NO: 137282 - DNA, 215 bp, Glycine max
  Clone ID: PAT_MRT3847_94976C.1
tagcttcgagatttcgttttggaaacccgaccaccttaaaggggaggggtcgaacttaagagaggcgaggacaacactaaaccaaccttagaagtggctgtacatcctaagaattgtcctacaaactgaaaacacagacgcttctattgttcacatcactgaattaccatacatgctggacctgataatcaatagataatattaccatagcctta

SEQ ID NO: 137283 - DNA, 187 bp, Glycine max
  Clone ID: PAT_MRT3847_94977C.1
ctaatacatctcaattccttcttcttctattacaacatttcccgcaaccattaccatttctgcaatcgcactcctgttaggggctctattccagagggggggggatcctcctaccacttcattatttcttttcatttcttatttcatatgaaactatgccacgattgggactaaaatatgaatgatt

SEQ ID NO: 137284 - DNA, 407 bp, Glycine max
  Clone ID: PAT_MRT3847_94978C.1
gggggggggggggtagattctgctctttttttagaaagttagaacataagtgctggtggctggattgctagcatgtgaataaaggtcagtttgggtaaacagcttgattaacagcttattgaattaatgcttatctgataagtacttatgtataactcgcttctacaattgaagaggaaatagcgttacatcgttttcattatctatgctggagagcttgcttaaattagatgaaaacagcttatggacataatataatctattattctattttcataagctatatcaaacagcatagttaaatcgccgctatagcactattgcataagcgaattacttgcatcttggggaagcaactctgcttactattgcaactgctatgggtgtagaggttgtggcatgcattt

SEQ ID NO: 137285 - DNA, 168 bp, Glycine max
  Clone ID: PAT_MRT3847_94979C.1
gaagcctccgaatcggaatgctgagatctgttccagcaccaacggcggcggaatcggagagaaagagcgcggcgacccggttagggtttccggcgatgatgacggagacggtcagacgatgaaggagttcatagatcttgaattgcggagaggtagaccacagggaga

SEQ ID NO: 137286 - DNA, 669 bp, Glycine max
  Clone ID: PAT_MRT3847_9497C.1
gtctggttatgcagcagtcaaaaggagtgattgggggtcattggtacaagtgtctttcatgaatgtggtcccacggactattgtgtttttaatgcctaaagctccttgtgtgttaatacggtggttgggaaaatggactttcccccagggcccttcccgaggggttaaaagatggcctttttttttaggggggggagctggtccaaggaatgcttttttaatgattatgccaaatgctgttctttcaatgtggagatattttgttggagatctcgtctttgaagtttctaagatgacttctccctacattaaatgttcagtttttttcttcatagtatttggaaatttggctgatgacaccattaattttgaggctttttcccacaagctgttgcagtttggagagattcaggaaaaagttgtattgaaattttcacaagaggaattttttacagcttggtcaacttaggtgcttactgcaacaactctgttggctgatgggtgtccatatttgtatgctatggtgcatgatagttcactgtctacaataccaggggatttttgtcattggtgctaagttggcaaccataaacaatttgtgtgcatttgggcttaattcctggtatttaaggatctcgttttttgggcaccatttcttaagcccatttc

SEQ ID NO: 137287 - DNA, 410 bp, Glycine max
  Clone ID: PAT_MRT3847_94980C.1
caattgaagaagttattattgatgagattgtaggggcatcaaagaatgcagtgaaccttacgtaacatatggacataatgatgagtgagactataatctagtatgtacaagacatgaacgggaactaaattgttccaatttgtttgcacattaatgcatcctgaagaacattatgatggctggtgacttcctgctacctaacagcactcccttcgacagaaacagaatgtcgaatggaggagatcaagatcacttgcttttagcatctatgaacatggctcgagtgcagtgctcaacattctcactgtgcgatggtgggggaggaaatgtgggatgctaaacgatatgctatactggagctaagcactcatggtttgagagagaatcaggggcttatggagaactagccg

SEQ ID NO: 137288 - DNA, 489 bp, Glycine max
  unsure (1)..(489): unsure at all n locations
  Clone ID: PAT_MRT3847_94981C.1
cccacgcgtccgctttaaacagattataaaaatgaataacgtaactcatcaaaaggttactcttaaacaaagtccaaattataatattcataaaatgtatagtataattaataatacactcaataatttcattggtaaataatgatttaaacaatattttaaattatcagttaatattaacccgcgtattttaattaaattcaacaactttgtctaattaccgtcaaggcatgatagagaataaaatggaagtaaacgcttaatctttaaatggaatagaaggaaaataaccttggtagtcattcttttgtttgaatattttaggttaagaaaagcatgtaggatcatgattttgtgtatgtgtgtataaggtactatccaagtagagagtggcatattcttgtacgaagcaaagacacgaagatgaaggaggcatgagagacctgngaagaggactattactccaatggaaagatttcacattatcac

SEQ ID NO: 137289 - DNA, 338 bp, Glycine max
  Clone ID: PAT_MRT3847_94982C.1
taccgtcccaatgaccgggtctaaccacacgttcctacctgttctaaaaaaccacatatgggtcacgccaagagtatctccacgttctgtaacattgtaaactatcgcattcacaagttactgttctatatcctccatataccatacaacatttacacaaccctcaatacatgcttcaagcttttgagcgatataaaactttctgattcctataacatcattcttatttctccacacttaattattttgaaagactcattatccattccacagtttgtcaacaaaactggcttgactctacccctttgtatatatatatagagtattcatctactatt

SEQ ID NO: 137290 - DNA, 355 bp, Glycine max
  Clone ID: PAT_MRT3847_94983C.1
aattctgaaaaatacttccttgacaactgctcaaagacattactattgtcaaacaaaacctagggtatgatacctataatccacctttgttacttaacaattacccatgcataaaatataaacacctatgttattctttccagggccaaaatctgcatgcccaaaagtgagagggcaccgcatgtggcttaatcaagtggctagtggtaaggccaccgcatgcaaagacaggtgctgggctgcttatgtcaattacttgatgcagccagagggcttagcacactccatccaaggcacactgtgctgtcaatccatatcgagggggggaaggaatagacaatcattcccggcaagc

SEQ ID NO: 137291 - DNA, 953 bp, Glycine max
  Clone ID: PAT_MRT3847_94984C.1
cctcgtgccgaattcggacgaggcctcgtgccgaatttcggcacgaggaagatatttatggaagttagtacataggaggcggtgtccgcgcgatatcgaaatctaagaagtctgctctgaatttatctgagagctgaagagagggaacgagtttgtgaagtaaagttgactcagtggaaactcggttgaactcggtgtgtgtagaaatggcgaaacttgaagcgaagctaggaatgatcgtggactcggtggggcagttcttctccggcaaagaccatcttccttattgtgactctgacgtcgtcgctggatgtgaaagagaggtattggaggctgaaaaacaatcatctgaagagcatatgcaggactgtctcctgcgtttatcatgggctcttgttcactccaaacacccacaagatgtgcaccgtgggatagccatgcttgaagcatctttgcctgctacaaaggacccactgcagcaaagggagaagctttatcttctggctgttggatactatagaaacgctgattattcaaggagtagggatctcgtcgacaggtgcctcgcgcttgcacccgactggaggcaggcagtgacactcaagaagacgatcgaggataagatcactaaagatggtgtcattggcctgggcattgccgctactgctgtaggacttatagcaggtgggattgcagcagctgtgtctagaaaaaagtgatagaatcatttctataaaacacacatgatctgatatgtaagaggcaaacatctataatactgtgaatttgctgcatcttactgcttttatgaaaagaagggcatgaacaataatgtgtacaaagcggtggaaatgatgtctcagtactagatgagagatgtattgcgtgtcttcatgtttaaaaaaaacatatacctctgtacttttatcatttctatgatttactttcttttt

SEQ ID NO: 137292 - DNA, 373 bp, Glycine max
  Clone ID: PAT_MRT3847_94985C.1
caaagttaatctccttttttaatgaacattgcttacgatcaaaaacacaaaaagttggggggctttaaggcaaaaaaaagggcttaaccctttaacaccttttttatattacaaaattatttgaccagccccccaaatcccaaaaaggggattcccaaatttttgtgtcatggaagctatcactcattttaaatcccaaacaatagcccttactcacgtccatgaactgaaaaggggaacactttggcccaccttttatgcgacacgccagagggcccaattttaccggagatttttcatttaaaaattttcttgaaggggcggaaataaataaacctgggggaggcactccctataaatttacttccccaaa

SEQ ID NO: 137293 - DNA, 447 bp, Glycine max
  Clone ID: PAT_MRT3847_94986C.1
acggctgcgagaagacgacagaagggggaccaatagcaggaccctgtatcaactcaaatagaagactagtcaaattgttctggaccagcccataacaaaattgggatggactgtgtctacatggttcatcttcaaacatgcttcttagtgtggaattctcgaatacacaacttagctcaactataatcatgtttgtggctcatcctcaattaatgtcatgtaaatactaaataagatgcccacaactatcttaagtatgtaagtcttccaatgtcattattctttattaaaatctagattgactaagtatgttggaatgcttctgaaagtcttgagtctgttccttggaactaccggaagagcaaccaccactgtttgtggtaagtcctacttatttggagccttggaggaatctagaacaactacagatcagtgatgcatatggac

SEQ ID NO: 137294 - DNA, 872 bp, Glycine max
  Clone ID: PAT_MRT3847_94987C.1
ggtccggattcccgggtcgacccacgcgtccggcagctacaagtccaaaatcgaagaggttgagaggccttagttaggttttttaaattgcttttggaaagggcggcaccaacaaccttccttcccgctcggatataaacccaaacacttggccttcactcatttccttcccgcaaatcacacaatgaaatacgtgctcatcagcggcggagtggtcagtggcctcggcaaaggcgtcaccgccagcagcataggcgtcgtgctcaaagcctgtggccttcgcgtcacttccatcaaaatcgatccgtacttgaacatcgacgctggcaccatgtctcccttcgagcacggtgaggtttttgttctcgacgacggcggagaggttgatttggatttgggaaattacgagcgcttcctcgatgtcacgcttaccaaagataacaacatcaccactggaaaaatttaccagtctgttcttgagaaggaacgtaaaggcgattatctcgggaaaactgttcaggtggtcccgcacatcactgatgctattaaagattggattgagtcggttgctgtgattcccgtggatggaaaggagggccctgcagatgtttgtgtgattgagctgggaggcactgtgggtgatattgaatctatgccgtttattgaggctctacggcaattgtcctttcaagtagggcctgataacttctgtctcatccatgttagcttgataccagtgttgggtgtagtgggcgagcaaaaaacaaagcctacacaacatagtgtcagggagctgcgagcattgggattgacacctcatcttttaacaagtcgctctgctgagcctcttctagaaagcactaaggaaaaac

SEQ ID NO: 137295 - DNA, 2486 bp, Glycine max
  Clone ID: PAT_MRT3847_94988C.1
gctggtcagcactgacctccgatgtttctcggcaggagccaatacaaaaatgcaataccatcaccaattaatcatcctaaaattaaccagaaataaaaaatagaaatattcctcgaaactaattttgtggagatttgtcttcgaagaaagttgcgaaaaatatcttttttacattagtggatctccttctcctctgtcagagagagagatggagagttgagcatagggggagaagctgaggagaagagaacggagtattaatatatgatagatatttgtgtgtttgatgggcaacagatggcgcgaatcttagaaagggaagcatattcagggcttcagccagcccgaagaccattccaagcgctccaccacccattctgatccctcctcaaccaagcagcaagacgacaacgacaacaacaacaacaacaacaacaacaacaacaacaacaacaacaacaataacaatcttcccttcaacgccaagagagaatccatcatgcgccgaggcctcgacaaccaagcctattatgtcctaggccataagactcccaacattcgtgatctatacactcttggtcgtaaattgggacagggccaatttggcaccacttatttatgcaccgagaattctacctccattgaatatgcctgcaaatccatctccaaaaggaagttgatttccaaggaggacgtcgaggacgttaggagggaaattcagataatgcatcatttagctggtcacaagaacattgtcaccatcaagggtgcttatgaggatcctctctatgttcatattgtcatggagctttgttccgggggtgagttgtttgatcgcatcatccagaggggccactataccgagaggaaggccgcggagttgaccaaaattattgttggggttgttgaggcttgccattcccttggggtcatgcatagagatctcaagcctgaaaactttctcttggtcaacaaagatgatgatttctctcttaaagcaattgactttggcctctctgtattcttcaaacccggtcaagttttcactgatgtagtcggcagcccatactatgttgctcctgaggttctcctcaagcattatgggcctgaagcagatgtgtggacagctggtgtcatactgtacatattgcttagtggcgtgccgccattttgggcagagacccagcagggtatatttgatgcagtattgaagggacatatagattttgactcagatccttggcctctaatatctgacagtggaaaagatctgattagaaagatgctgtgttctcagccttcagaacggttgactgctcatcaagtgttatgtcatccttggatatgtgagaatggagttgcccctgacagatcactggaccctgctgttctttctcgtctcaaacagttttctgcaatgaataagctaaagaagatggctctgcgagtgattgctgaaagtctatctgaagaggagattgctggtttgagagaaatgtttcaggctatggatactgataacagtggtgcaatcactttcgatgaactcaaagctggtctaagaagatatgggtctacccttaaggatatagaaatacgtgatcttatggaagcggctgatgtggacaaaagtggaaccatagattatggggagtttattgctgctacatttcatctcaacaaactagagcgtgaagaacatcttattgcagcattccaatattttgacaagtgatggtagtggatacattacagttgatgaacttcaacaagcttgtgcagaacataacatgactgatgcttttcttgaagatattattagagaagttgatcaagataatgatggaaggattgattatggtgaatttgctgccatgatgcaaaaaggcaacgctggaattggtaggaggactatgcgcaacagtctgaatttaagcatgagagatgcaccaagtgctcaatagcttatgattgtgctcattatgtacaggtttgtatgcagcaaagccagaaagagaaaaataaagtataaatctttccaaaaaattgttcatatcttgctgaccggtcctatccctgaagaacaatcaggattgtgggtgctctcgcatgaggattcatctagtgttacatttatgtgctgtatgagtggaaaaattgtttctcgctttgtaaaccttagtgttgggtgttacagctacttcaagttggtcttctatttttctgtgctttcatgtaggggcattctgtctatagtttaagtagaaggattttgatctttcaagttcttgatttcacggatgtaaagtttcacacgtatgacatgatgtattgggcgaactaagaagcctttgtggattatgtcggagcacatgcattgtgttaaagtgacagtgctgaagcattttatttctcagctggcttttctttccctaaacaaataccctgttattctagcagtacatttatttttttttttttattaa

SEQ ID NO: 137296 - DNA, 465 bp, Glycine max
  Clone ID: PAT_MRT3847_94989C.1
atgataaataaaggacttcagctatttttaaataacactggaaggctttctttattcgggctgatacaaggcaggttactatgcacgcccgctcactggcggagctgttacgggaacagaaattgagatgatacgtaatattagtctagcggacaatcttgttttttttataagcaatctatgggctataccgcaaaaccaaggggaggaaaatgatcagcgaactgcttaaattcctggacatgcttggcgttcaaccactgatagtacaacaactaatgaatagaaacctttaaggccttaccattttatgccttcgaagctgactagatcatggcacctaaaaccactggtgccttagaactatttgccctcataacctaaagatcctgcataatatctttagaagtgagatcaacagctccaattatcgatacaccagaaaccatagctgacacatgctcc

SEQ ID NO: 137297 - DNA, 633 bp, Glycine max
  Clone ID: PAT_MRT3847_9498C.1
cgaagctcggttttcggctcgagatctaatctatatccgagttttgtcgcatggagttaggaatccctgaagcgtaccggatttcattgagatatcatccgtgtctctggatggactgccactccaatgcaggatgttcaggctacaattgattggcttattccctctcaagaatgtgttcccaggacctattgtgttttaaatccacaaaatccttttgtgttaaataggtggatggggaaactgactttcccccagggcacttcccgaagtgttaaaagaatgcctctttctatagggggaggagctggtgcaaagaatgctatcctcatgaatatgccaaatgctgttctctcaatgtggagatattttgttggagatctagcttttgcagttgctaagatgacttctacctacattaaatgtacagtctctttcttcatagcattagcacagctggatgaccacaccatccacgttgaggcttcctcccacaagttggtgcactttggccagattcaggaaaaagatgtattgcaatcttcacaagaggaatgtgttacagctcggccacctcaagtgcgtcctgcaacaactctggcggttgacgggcgcacatatttgtatgctatg

SEQ ID NO: 137298 - DNA, 388 bp, Glycine max
  Clone ID: PAT_MRT3847_94990C.1
gacacagggtcctttcttacctgctaagattcagagtgctaagtgtgatacaatgaaaatgcctaagcctcaacttcgaaccccatttattgaatgtttcactgttttattaaccatcatcgacgttacctctgcatacgcgctctatggagcatccactcccgtgctatagctcactcactgtgacttcaagtccatggatctcaattcagatggagttgtgctcattgaatgctttgctccatggtgtggacactgtcaggctctgactgctatatgggataaggcatctactgacttgaacggtgtcgttactgtggcatcaatagatgctgatgctcacacatgtttggctcacgaatattgaatcagaggattttcaactatt

SEQ ID NO: 137299 - DNA, 967 bp, Glycine max
  Clone ID: PAT_MRT3847_94991C.1
aagagatcgagccatatttaaatggacgctgtatatatcttgttgatcagtctcttggaatgatgggctctggaaagacaactgttgggaagatattgtcacaagtgctttcttatttgttttttgatagtgatgcattggtggaggaggaggttgatggaacagccgtagctgatatattcaagcacaatggagagcctttttttcgtaataaggagactgaggtattgcggaagttgtcaatgatgcatagatatgtcatttctactggtggaggcgctgttgtgagacccatcaattggaaatatatgcagcaggggattagtgtttggttggatgtacctgtagaagccttggctcagagaataacagctgtaggaactgattctcgaccacttctacattatgaagaaggagatgcatacacaaagactttcatgcgtttgtctgccctttttaaagaaagaagtgaagcatatgcaaacgccaatgtgaaggtctccttggaaacttaatgtttttggtcttgagtttcgggtataaggtctttaaagattgtccaatgatatggcagcaaaattgggtagcagagatgagtcagatttatctccaactgctattgcaatggaggcgctcgaacagatcaaaggctttcttatgggtgaagatggctgttaagcacgtgctagcacaatcttcaacacaaacatgctttagcatggcaatgtggcgtatctttttgcttagaaaaagaatgatgcatgcatgatcaagatgcacatgttttagtttttatgcgtaatttgtgtaagcataatttgacgggtagatgtgatgtttgttgtataatcctcgggtagaatgtgacgtgtatatatatttttgttcttgtatatatacgggtagatgtgatgtttgttgtaatccgaactggatagatcagtttatgcattcttccttttaatgc

SEQ ID NO: 137300 - DNA, 238 bp, Glycine max
  Clone ID: PAT_MRT3847_94992C.1
gtacggtctagaattacggccaccacgctcataggctgcaaaacacaaagggaaaataacaataaagtggttagtttaccgcccacttggaatccctcccgtccaataaaacaaactgcccaaacaacacaatatcacaaactcaatttcccaattttcggcccctaaaaatgaaccttcaattcaatcccctcctcctaaggccccaacaattctggaacaagccaatcctttcccc

SEQ ID NO: 137301 - DNA, 301 bp, Glycine max
  Clone ID: PAT_MRT3847_94993C.1
atatgttagctggtaacacctactagttacaactttggcactgcaggtatgggtacttgggctttaaagtcttgaaccacattgcagcagagataaacggtgaatggtttgccattgctgaaatctccctcagctatgcaaggattgtcttatggggaagcaacaaagatatccatttctgatgaaaagcacttggagagcttcacaaatcctgcaattggttcattgtgaaatatgtgggctgattaagccaaccatcattagtaataaaaaaaaaaagaagcatctgattacttttaca

SEQ ID NO: 137302 - DNA, 799 bp, Glycine max
  unsure (1)..(799): unsure at all n locations
  Clone ID: PAT_MRT3847_94994C.1
ttcgggactgctctagcgaggtacaatggtctcgcaatcttatcttctgaatctaaacacttttcgtgttcatgcgggaatcagtggacggcaatgcaagccttcaatattcaaaccaagcaattttggctttagggtctggaaaagttcaaagtatcacactaaaagaaatgtcaatggcaattccggagtcatgcaatgttgctcatgctacacagaagttggagcttctgctggcataacaatatcctcactagtgaatgcagccaccacacatatatctcttaattcagatgtagacttgaatactctcaagctgagcatacaagaaacttcacccgcttccacagatttaatgacaagattggtgcttgcagatcttgaccctgatactgcaaagttggccattggatttctaggtcccttcctctcagtgtttggttttctctttatattgagaatagtcatgtcttggtacccaaaactcccagtgggaaaatttccatatgtaatagcgtatgctcccactgagccacttctcattcctacccgcaaagtgattcctcctcttgctggtgtggacgttactcctgtagtctggtttggattgatcagttttcttaatgaaatattagttagttcacaaggattactagttctccttttggtttagtcaattagcttacacatttgaaatatgtggatgaaataatttctttatcatcttgntagatggcatgtatacaaaattacatcgatatattgcatatattaagggggaaaaaagttttctctcccc

SEQ ID NO: 137303 - DNA, 166 bp, Glycine max
  Clone ID: PAT_MRT3847_94995C.1
cgcgccgactgatacatgcaccattcttgctacgctacagttggcccctttcactcgatctacgtatcttccaagcgagcgaagcattacgcctgggcaatgaaatcaatctaaaggatgttcttaccacctctgatctcatccagggagggcatgatatccaacc

SEQ ID NO: 137304 - DNA, 344 bp, Glycine max
  Clone ID: PAT_MRT3847_94996C.1
ttgggggggggggggggggggggggggggggggggggagagagaaggaggggggagaaagacaatatcataaccagaataaaacaacagacataacgacaaactagacgctacaaacgatttactgcattagtaaataaaaatgtaaagggttaatgctgggaaagttcgacttgatgcccggaaataaagccatatgctgtgtatcccatcttacaatcaataaaggattgtgatcataaacccctcaaaatgtacagcgtagcattccgagaagtgcaataaatcgccttctaaaacacccatgaacagtagtagcaaaatagttagctcctaaagagctta

SEQ ID NO: 137305 - DNA, 180 bp, Glycine max
  unsure (1)..(180): unsure at all n locations
  Clone ID: PAT_MRT3847_94997C.1
ggcaaattatcgtgtttnttccccttacntttaataattattacattgcatcagcattctcnttgnggtttcaggcngagagaancanatggagcgcgctatttccganttttcggaggagcangggagccggtncctccnngttcgcaatctccctccangaancgaacacaattgnng

SEQ ID NO: 137306 - DNA, 475 bp, Glycine max
  Clone ID: PAT_MRT3847_94998C.1
ttattctgagtaactactctttttattgaacatagttgtcgatagcaccaaattacaacgctatcgctaaatcgtgtcatggaacagatggagcatgctacgaaaattgaatagtgtcgcaatttgaagtaacggtcattgcagcagcaatagccgacaaaatcacagctggcacgggcattactgaagtgggtcacaaaaatcccattttaaccatgaagcggcataaagcagcatcgcctaggactgttttagaggatcgatttgggattccgacaccattgaatcagagctgaaccctaatttctcattcacttgtgtgcctctgttagtctgttatgaagtagggccaactgttctccttttcgacatacacccatccttccatgcaacatttccagcatttcccaacattttcttgccaatcgtgacatgtttgcttccttgctttgttccgtccctgcggacgcgtggg

SEQ ID NO: 137307 - DNA, 271 bp, Glycine max
  Clone ID: PAT_MRT3847_94999C.1
agactacggattgggggatacaatacgtgttcctacccaaaacaaaaattaaatgtgtggaacagttggaggagatcaataatttatataggtccatcgaccatagaagatacgataaacccaaggcaatgattatgcgggatcggacctatgggatactagcgtcgataggtctgatgcacatagaggcctagatctgatgctagggccttgatatacgctggcaaaactaccatgcttcacatgctcgatgatgagagattagtacagc

SEQ ID NO: 137308 - DNA, 339 bp, Glycine max
  Clone ID: PAT_MRT3847_9499C.1
ccttcactctctcttgcactgttccgattgccgccaaagtgtgctatttgaaaaacacttgggcgttggtgcaaatgtttgctttgtaattttctttggagacaacaggctctttgagaaaacatttttatttgcagagattggacatcttggttgttattattcaatagcaacttcaattagggaattttctacctcattaccttaggcggcatcggtattcctttgttgatctacatttctccatcttttttcactggttgaaattaaatataagcggaaatttgaggtaatattcatatttccggctttattttccgacgggagatacaaattctt

SEQ ID NO: 137309 - DNA, 539 bp, Glycine max
  Clone ID: PAT_MRT3847_949C.1
attcaaattgctatgacatgaagtctgcaaaaaatattaacttgaatgagatactttctaatgcttcatccaacaccttagtttcccagtcaggtcttggaatcatggatggagaacagaagcatgaggagcagcttgcagtgttgccttggcttagacccaagacaacatgtaagaatgtggcacaaaatgctggaggtttaaatgttttccaacttgcttcttcatctaacaaagatgaatctggaaaggggtctaatggaaaatttattcacaatgtaactacaggtttgtgttcaaatgatttagagccaaagaggagagaagttagtgacagctctagtaaaaggaaaattcttggggttcccatatttgacatatctcatatttctgctaaggagtcatcttcattcacctcttcgtctgtgtcagttcctaatccatctgatgtagaattagtgggaaataaccagagaaaacatatacttgatattaacttgccttgtgatgcttctgttcctgagtttgacaaacaagct

SEQ ID NO: 137310 - DNA, 509 bp, Glycine max
  Clone ID: PAT_MRT3847_94C.1
gcgagatatatgaccgctatggaatatacagagagagagagagactgacctagaagaaaagcacaactgatttttaggatagactactatgctgtagagtcaagtagcagtattgtatttgtcgttcaccgatggatgtatacgaagctacaagaattgtgggattacagatgcaaatctaggtccctgaaaatgcttgcgaaatcatgggtgtacttcttcttcccgaccatggtggaaacgaaatgataagactagcattcgttctagaagcacttgtgtagtctgtgattctcaaagccagtaaggaggtacgtttaccttttaactgtacgatcacagactcaactggtggttcttcttcaccctttatttataggcaaaacataaacactttttcatggatcaggggcaccggtttccctcctgctctaactatccctaaaccttcttcacggactaccctgtgttgactacaaactcctgaagattcgaagagtaccaaacat

SEQ ID NO: 137311 - DNA, 171 bp, Glycine max
  Clone ID: PAT_MRT3847_95000C.1
accccccccccctttttttttttttttgtttttttttttttttttcgaaccccttcttgagcccctttaatcaagatggaaaatactaaggggtgccggtccactcagccaaaaaaaaatacggaggttaagggccctgggtataataaaaccgcccaaggtagaaggcag

SEQ ID NO: 137312 - DNA, 370 bp, Glycine max
  unsure (1)..(370): unsure at all n locations
  Clone ID: PAT_MRT3847_95001C.1
catacttntnatnccaattatttaacacttataaaatatttttatcccggtaattttcaaaccacagaaacactattatttcacaaaactaattntcaatatttgatctttaaagtaccaattataaaataatttttctattcaaacattagctttttactttctgcccaatatcaaatcataaatctattatttaaaatattacttgtcttctttatatatatatatatataaacttgtttcttatttctaaaaatcttaaatattaccaatcattcttttttatttactaactagatatattacttatcacacaaataatctcaatttacaaaatattcatttttaatccatattaatatatattaca

SEQ ID NO: 137313 - DNA, 395 bp, Glycine max
  Clone ID: PAT_MRT3847_95002C.1
gaacatcgagtgaggtataaaaataaaagggttgcattgtctgtttttcgtaaaaaaaaaaagaaaaaaaaaaaagggaggaaagaaaaaaaaaaaaaaaaaaaaaaaaaaaaaaaaaaaaaaaaaaaaaaaaaaaaaaaaaaaaagggccgcccgtttaaaaggaccaaattttactaccccggccatccaacaaaaaacctttttaaaagggcacccaaaataaaattaatggcccgccttttaaaaacgcctgaattggaaaaaccttgcgttacccaaattaaaccccttggaaaaaaatccccttttgccaagttgcctaaaaaccaaaaaggccctacccaaccgcctttccaaaaatttcccaaccctaaatggcaatgggacccccc

SEQ ID NO: 137314 - DNA, 502 bp, Glycine max
  Clone ID: PAT_MRT3847_95003C.1
gaaaaagctagaaatagcattgaccgttttggggagatggtgagatcggttggattatgcaatattgattgtttcaggcccacagcgattcatgcataatgaagatggtggagcgtatatgcagagcttgtatttttctcattaattatttgattggctgcctttgccatggcctgcgtcatgccatggccttggaatgaggtagcctaccctggcctttaaccttttttgattcccccaatatatatatatgatcggttggtggggtgtctggggttaggtaaatgtttcgttgtacccgatttgttttctaaagaaatagataggaaagtaatttaaccatgttagatcatgtaccgctaaaatcaccctcgagttcaagttaataatctaagtctttctggacatgctaacatagatgccttgagtttgattctattcttcgggtatggacgtatgaacatgtaatttgctctacagcagtaatagttttttttttttt

SEQ ID NO: 137315 - DNA, 383 bp, Glycine max
  unsure (1)..(383): unsure at all n locations
  Clone ID: PAT_MRT3847_95004C.1
aaaaaaaaaaaaacgccgccctaacggccataancttcaaactaccactttttttatcaaacaaaccaatcctccccgtttttttaaaaaaacttccccccnccaaaacattttacttactaaccaaacaattccctcttatacactataacaaatcacccttttaaccaactcttctttcctatccttttaaaaacccctttattatcttcactatccaaaatcttctcctacactacccttttatccttcctcacattactctttaatttttcccccacaatttattctacccaaatttaaaaactttccaacttttatttatttctaataaaacttttctcctctttatatctcatttatcctttatttctccttttaca

SEQ ID NO: 137316 - DNA, 261 bp, Glycine max
  Clone ID: PAT_MRT3847_95005C.1
gctccagcacaggatagaaaattgatccttctttacagggtcttcattcacaagacttcagtccgcgattcttagccatcttggagtacgatagcttcgttcactgttgatcaacgtcaatagaccatccatcaggtcgctcatcatgacggtcggcatcgcacttattggcagccgcattttcgctaaggaagaacatcttcctgccattcaaaacacacaatccctcagtctgaaggcagtttactcacgctcactcaa

SEQ ID NO: 137317 - DNA, 219 bp, Glycine max
  Clone ID: PAT_MRT3847_95006C.1
tctggggcgcaaatcctgatttataaatgcctctcctctatttccccaccaccgccattttctatatcacagcaaactctttgcaatcaaatggcgccaacaaaaacacccttcaattttcataagctccaactatgcttttacaaaccttcaataaaccttctccgtggcggaattttagtgcacacaactgaacattctatcacacttattcaaacc

SEQ ID NO: 137318 - DNA, 379 bp, Glycine max
  Clone ID: PAT_MRT3847_95007C.1
gtgagaaataacacacacttcacacatgattaccacacttaaaagaggtgaggaaactatcagataggccgagcatactcaacaagagggtcatgcctaatatgctctctcggatcaaacaaacgaccaagcgaaagataacacaaattccagatcatgcagaggattcccaatcttcagaagatctggcaactgcctgtggaacagaaacagctggcataagagtattaccagccctctcaaaatctagggaaaatcccaagagaattgtaaaaactgcacacagtttgggattcggaataaggcaactcaaatgccctgaagtatgactggcccacttcagactccacatttccaaaccattcttaggaccacatac

SEQ ID NO: 137319 - DNA, 452 bp, Glycine max
  Clone ID: PAT_MRT3847_95008C.1
ctcggcggccgccctccctttttttttttgtctgagggtacatacactgccgagtatcggatatccctattaacatcgcgtataggctggtagaaactgcagaagagcgcctccacattctaacgcaggctagatagactccacattgccctacctcccctggggaaatggcttagtactggatgacaaccctccttaggcgacagctaacttattagctgcctaatgggaatgccatcactatggttgcggctcacgatttgaaatcgcctagaccagcttgctgatagcttccccaaaacgactgagcatccaacgtccaagagcactgggctgggttttaagcccattctattctctctagggacgatgaaagatgcaacctcctttatcatgttctcagaactctcatttaagggactctaggccgctattcatccgtatatgttgca

SEQ ID NO: 137320 - DNA, 360 bp, Glycine max
  Clone ID: PAT_MRT3847_95009C.1
gagggggaaaatatttttcctgggttagaaaaaggaggggccaaccccccgcccgggtggagggaaacccggccacccattaccacccctaccccggtttaaaatcccagcctttatttcctaaatcccccaaccatacctaataccagggagacccccccttggggggcctccagtccaggttggggttttttaccttaacaaccattggaaccccttccaccccaagaattggattccccccccttgtcccccgggacccctggggtcaccccggaatttccggcccggtcccgccaggggacccagttttccctttaggaggcccattaaaacctgggggaatccagggccaaaccg

SEQ ID NO: 137321 - DNA, 349 bp, Glycine max
  unsure (1)..(349): unsure at all n locations
  Clone ID: PAT_MRT3847_9500C.1
ttctgtcttatcacaccctttggcttctcaattccttccagcaatgaggccctacttacctactaggcaggggtttttttacggggggcagcaacaatccgtgagagataataccaacccaccatttctggttcaaggagagaacaagtgcatattcccctgaataccccnccccacccctgaatgaaaactgctngaagacgaaagccccctantgagcaggattctcaagaagaaccaaacaaagacccgatgagtagagggttatgcttggttcccgagtcccgcccgctgcacgcgggcaccgacaacggagcccactatagggcccctcgcccctggcggggga

SEQ ID NO: 137322 - DNA, 367 bp, Glycine max
  unsure (1)..(367): unsure at all n locations
  Clone ID: PAT_MRT3847_95010C.1
gcacacgcacgcaaacttgagcccggaaccgcgagcgcggccgctttttttttcatatattntttttttgttttccgattaggcagacagatatcccttttaaggaatcaacattcagaagggtggacaataagccctgtttgaaaacgatcaacccgcaaaaaataactacaataacgtatatttgatctaacctgacaggttattacattttatatcatcaaattaaccagtgaaactgactcccagcagggaaaacaaccgtaaaaaaccccaatgaattctacaaatcccatcgcatcattatactgattaaattaccctttatgcctacacgattctttttatgattgttaagtccactttt

SEQ ID NO: 137323 - DNA, 1435 bp, Glycine max
  Clone ID: PAT_MRT3847_95011C.1
gtcttgcacttccagtaaaattcctcgagccgcaaccacaacagtaccacggtcctgccttaccgatgatgccaaccccactccaagttcggaggaggcctgtctttgaatttgatgatgagcatcttcagaatcaaaagcccaccattccaatggaattgcagattgtcagttcccaacaacattttcgtcttcccgatggttgggtggtcgagaaaaagccccgtccctctcacgagtctcgttttgacaagtattactatgagccaggcaccggaaggaaatttcgttctttgttatctgttcagagacatctagcaggagaaacaagagactatgttgttgctaacacaatgatgtcaaaaaatgaaaacactaattttattgagtctgggtcaggacagaagttcggttccttgagagctcttgataatttcttatctgaagaaaatgcatgtacaacaacacctaagtctgcagtgaaatcaggcactggagagcaaagagcttgtggtgtgagaagtggccaaaaagctgtccataaaggctcttctgtaggagaagaagtacaaatcactccaaagtccttgaaacacactattcaatctgcactttctgagaaatcagattctcggaagaaaaccaagtcggagaaggacaacagagcttccatgcataacttaactgtaccaccaccagcaaaagtaagctgggttctgtctggttccggggggttctggagccctttccttgatgattccattgtaccagaacctgaaaagatgaaatggtccaaagcatttgtactatcaatccatgatgatggagttacttaatagctgagctttgcagggttcacaatggagatgactggaaatattgatgagcatgtgctgataccatgtagcttattttgtagatgggaatgggattatccaagtgacgtatgttaccctatatgcagatattgttctatttcactgattataatgatttaggttctatcacagggttcttcctcgaagcaacttgtgaaccagcgaactagtgccgtctgttcttcaccatctccccgctggccggagcctcgttgcaacttgccgtgtggtcctgactccttgcccgcgggctctgactcctcttgcacaaagagtggtgtgcaatctaaaacaacgttttttttttttgtcaaattttatttcgataatatccttgaacatgtggtttgattcaatatttctttaattaaaaaaaaaaaacacttaaggtgcaaaaaccaagcaaacaagttatttttggtttgacaattaataatgtggtggtatcaacatatatctgcttggtttgtcactatctgaatctaatatatgtatccttttcagtctccagtgccctcaggcaatgcccagcacagagcttgtggtgtcagaagcct

SEQ ID NO: 137324 - DNA, 127 bp, Glycine max
  Clone ID: PAT_MRT3847_95012C.1
gccatttaaagcagagacaataatatgtgtgtgggaatagagaatagagaagtttcttttaaggatgaattacactccatgtaacttctctggagttttaattcatcagttatttccacacaacata

SEQ ID NO: 137325 - DNA, 141 bp, Glycine max
  Clone ID: PAT_MRT3847_95013C.1
cgattaggctgagcctgcagcgaaaattttccgtgtaaagaggcggttgacgacgacgacgacgacgatgatgttgaccatctcgcccgcgtggtcaattctcctatatattccttttggatggtccaattgtcttaatat

SEQ ID NO: 137326 - DNA, 338 bp, Glycine max
  unsure (1)..(338): unsure at all n locations
  Clone ID: PAT_MRT3847_95014C.1
gaattcgagctctgtacccggggatcctctagagtcgacctgcagtatttcattagaacaatgagccaagaaaatagagtaaaaagttcataaacagaaaccatgtaaacttgtgaacacaaacaaacaagaggccgtgtgaggttattattgtagttgaccacgttaatttgattaaaatgatatttggaaaaacaccaaaatttaggacctgttaatttattatacaagcttgacaaatgtgttaaacagtgtcattctttagagataataatanaagacatgatctgattctcgtataatgatctatagccattacatctgcatgtaaaaactga

SEQ ID NO: 137327 - DNA, 1180 bp, Glycine max
  Clone ID: PAT_MRT3847_95015C.1
gagtagactaaccattgaaatgtcagcttttcattaacgggctagatcatacattctaatataaatacaagtttgcggcataaattgtgttttgtgtggcgggttagaacttagaatgtataatttgcatgttccacccactgaaagcttagcaccaacaatcaactgtagaatcataagaaccaacatcaaatcacacacattctgggtctttcattttattcattcatctttctccccctcattttacagagaaggagaagaaacaaactgtcttggtaaactaaaaagatctttcccttcaaatggagaactccactcccgggaaccagcagtagatgtctcagcagaagctactccaccatcttgcaatccaggcatgggagcattcatgctcccatttgtgggcactggtctcatagatgattgagcaacaactcctaaagcatttgagtcatacatctgagcactactactccttgaaaacggtgaaaatcctagccataaaccattcgaccttggtgaagctaaacttctgtccaaggaccagtctatgtttgtataatcaaactgcacggtcccaccagtgctccagtctactggagaagaagcccctgatgagcctgctgatcctagaccggaaaagagtcctagagaagtagcagcagcaagtggtgcagttgcatctgttctattccatatgctattcccttggtgatctactgaattgctgctgctgccaccaacaaactgatattgttgaggttgatactgaagttggtggtacatttgattagaattgagatagtttggactgaggcttctagtgctaggagcatgagatataaagccattattagatctgacagcatcagaactgttagttggataccaactagcagctattcgaggaggtgatgaactcatgcttgtggctggaacttgctttgcatttacagtttggggccgctgcatcatgattaattgttccctggcaactccagactgaaggttcttaaaatcacctccagctggcatatattgtgtttcggacttagcaggttggggtgacattcgcaacggtgatgccagtgaataagaaatggaaggattagattctgcacttggccaccttttatcagctggtacagtagcctgttggggctttgcccattcagac

SEQ ID NO: 137328 - DNA, 531 bp, Glycine max
  Clone ID: PAT_MRT3847_95016C.1
cctcccccccccccccccccccccccccccccccccctcctttttttttttttttttttttttttttttggaacccaaatctgatccttttaatactttggactaaacaacggtttactacttcatccgttttgccccatctttgccccggaaagcttgggacttgaaatttttttctaacctttccacaaaataataatttagctaattttacagaaatctgcccctttttttttttcccctggttaaacaatgcaatctccccattgcttctaaaaaattgacccgcccaaatttgaatattttttttcccattttattttggcggggaaaaaaattccccgatccctattcttggaacattttccttaaacttatgctacaacaaattcttttggcgggatgatccaaaatctaaatagtttgcaaatgctggcccatgaaatccggacatttccattactttttcatttgaaggcaatacaaaccccttacgtcccttgaagccctccaaaggggaacccccagggg

SEQ ID NO: 137329 - DNA, 1029 bp, Glycine max
  Clone ID: PAT_MRT3847_95017C.1
attcccggttttttcggtccactttcaagcggcagcttctccttctcaatcttgtaattctatttcctccaccataatgctgcgcaagcttgtgtcagggccacgcaagaacaagcctggcacagttcccgttcacctcaacgtctatgatctcaccccaatcaacggctatgcctattggcttggccttggagtctaccattctggggttcaagttcatggattggaatatggttttggtgcgcacgagcacgacacaacggggattttcgaagtccaacccaaacactgccctgggttcactttcagaaagtcaattttcatcggaacaacagatctgggtccgaaggatgttcgagcattcatggagaagctggctcaggattactccggcaacacctatcatctcatttccaagaattgcaaccatttctgtaacgatgtttgtctcaaattgaccggaaagtcaatccctcgttgggtcaaccggcttgctcgacttggtcttctgtgcaactgtgttctcccacctggcctaaatgacacaaaggtttcacaagctgcatcagacagggttcaagaaggtgaaaagaggaaaataagaagccagtcctgcaggtacgagggttcctccaatccttcatcgtcgcaacgttcagcaattaaaagtagtagtagccaaaggcattgccatcctccatcttcatctttgattaatgctgcttcagcttcaaccttaacagtgaagtaaaaagctttgacagaaactcaggttctgaaatataggggtttagaattatgtaagcaacccaagataagcaaaaggaagaaaaatggttgctttgttttgtctctgttcgttgtaaaatgctttctttagtaaatgggaagttcctttgtttctacattttttggactatgtattcttgaatcttgattaatgttacaatagtcgatgtagcatttagccgtgtatttgaaaatttaatggggtgtttgggagaaaggaaataaaaaaatattagagat

SEQ ID NO: 137330 - DNA, 544 bp, Glycine max
  unsure (1)..(544): unsure at all n locations
  Clone ID: PAT_MRT3847_95018C.1
cttggttttttttttttttttttttttttttttttttttttttttttttttntttttttttttttttttttttttttttgttttttttttttttttttttttttttttcccaggcttccccactagatagaggggtttctttggggcccaatcattttttttagggaaaaatcccccccgcgggggcgggagaggggggatttttaattttattataacccctttttttggggataaaccttttatttttgcccccaagccagggggggggttaaaccccctcccctttttttttttaaaggttttaaattaattccctttttttttaaattttaagaattttttttttaaaaagtttttttttaaatcccattactaaacaccctgaaaaaggccccccctgggtttcaattaaaaaaacccaataaagctttttccttttaaccccattccttggaaaaggccccctggagagggggggcttggtcctccaaaaaaaaattggaggcctcgggggggctaaaaaaaaggggcccctccattt

SEQ ID NO: 137331 - DNA, 308 bp, Glycine max
  unsure (1)..(308): unsure at all n locations
  Clone ID: PAT_MRT3847_95019C.1
ggaaccctcgaggccgcccccccccccccttgccggaggaaattgaagggaagatgaaagttttgagagaggagnaaacagnntgattggatagaattgaagnagaatatagggangagttggnagggttgagaagagatgcagaaagcaaggaggagaagttgggtgaanaatggggtggaaaagatttgcgccttactaagtttgtagaagaggtagggtgttttttttgggtgagtggaccagatggaagatggagggangggattgacagttgggaaatgtaggtgggtgtgactgatgatggg

SEQ ID NO: 137332 - DNA, 732 bp, Glycine max
  Clone ID: PAT_MRT3847_9501C.1
gaaaagatctcgcacaggataaagtcattgcagcatgcgctgctgtttgcccgacatcaagttacactccaactacattgttggaatctggctttgcaaaagacagagggttaattgtggagtattttggaaggatgtatcacgttgctcataacgctaatcagccccaagagaaagattcgttggagggaaattactgcttcgatattaaatctcgctctagattggaaaaagcttcctgtacagaagcacaactcgttagcggaaaaaccttcaaatactgatataatcggcgctggttcacattcttcagaagattttcctgacaaggaagatcaagaaaaacccaaaaagattgatgctagattgagacaaagaatagatcctcaatacaatgaggttcacgctcagatggaaacaaatttgattaaatcgtctctcgatgatgttgaaactcctaaagggtccatgttggatcttaaaatttctcaatctaaaattgcacttcccaaaaacacagttggaggaaccattctgcgtagtgatctattggcaaattttttgacagagggcaattttagagcaagtgttgatttgcagtgcactcatcgtattaaacgaatgattaaaatggatgccacaagtggtattacttagaatacaggtatagcattggcctgcgctataaatagttctttaatggggcgtgtcaagttttaaatttacactatc

SEQ ID NO: 137333 - DNA, 1292 bp, Glycine max
  Clone ID: PAT_MRT3847_95020C.1
attgaataattttctacttcctttttttattgagatcagttagctgcaatatcagtatggatgttttttcatatcagacaagtcttgggtacttttattactcttttaagagttgttgatgcagaattttgtctcaaaaaatattctggaagatttcgctatatagccctttttattaatgggtatcatataatggcttgtacatattttttttcagtttgtgtcattgtctgaatatttgttcttcctagaacttaaatgaaggagatgaaagggtgaaacctaaaatttaaaaatcctgagcaaacaagataagctcttcaactggtcgatagtcatttgttgagagcaccatgaaatacccttctagtgtcccagcatatgaacccctctaaaatacccttagttgagcaccataataagtctaagaatatggtctttagttaatataggattgaggacttttacgtcttaatttttcttttatcctaaaaagaaaactttaatcaaacagcttctttaatttaccactgtaaatttttattcatgtctttttaatcagcatacagggttaagaatcgtgaaccgtcagaactgaattttgtttactgttattatttttcatggtttaaatgttctttcagaagtctttgcttagactcacttgttttgcaggttgcagaacgagccctctttcttgtggaataacgagcatattgtgagcttaattgcccaaaacaggactgtgatactaccaataatatttcaagcatttgagaaaaatatttcgagtcactggaatcaggcggtgcacggactgaccatgaatgttcgcaaaatgttcctggaaatggacgcagaattgtttgaagagtgccagcggaagcacgcagagaaagaggctaaagccaaagaactagcagagcagcgggaacttaattggaagagactggcagacgcggctgcacagaatggagtggaggacatggtcacttagccttgttaatttactaccacaactggaggtgtgaattaaataggtgaaggatgatgaatgtgctcttatccattttggtgccattatttattggtttctttcttttcagcctaattttttttctcctcttctatcttattacatcagttggatcattagaattttaagaaatcagtgattgatctaacttattggaagttgtagcaatatctgcagattaagaatgtttcgtgaaatactttcttgtatttttctccttttataaagagaaatacggaagatttttccctttttt

SEQ ID NO: 137334 - DNA, 668 bp, Glycine max
  Clone ID: PAT_MRT3847_95021C.1
gcggagtttcaacgttgcatggttcctctttttagacagatttcgcgctgcctcaatagctctcactttcaggttgcagaacgagccctcttcttgtggaataacgagcatattgtgagcttaattgcccaaaacaggactgtgatactaccgataatatttgaagcatttgagaaaaatatttcgagtcattggaatcaggcagtgcatggactgaccgtgaatgttcgcaaaatgttcctggaaatggacgcagaattgtttgaagagtgccagcggaagcatgcagagaaagaggctaaagtcaaagaactagcagagcagcgggaacttaattggaagagactggcagatgtggctgcacagaacggagtggaggacatggtcacttagccttgttagtttactaccacaaggatggtgaatgtgctcttatccattttggtgccattatttattggtttctttcttttcagcctaatttttttatttttcctcttctatcttattatatcagttggatcattagcaattttaagaaatcagtgattaatgtaacttattggaagttgttagcaatgtctgcagattaagaatgttttgtgaaatactttcttgtatttttctccttttataaagagaaatacggaagatttttcccttttttt

SEQ ID NO: 137335 - DNA, 424 bp, Glycine max
  Clone ID: PAT_MRT3847_95022C.1
atcaactcaatggttgaaatttgacgatgaacgattatcaaaagtagatccaaagtgggtggtaggagaacaacatggcggtgctggacagttaccgactatacaagcctggctttaaccaccatccaattaaatggactcaacactctgaatgcgttattgctaatgtatgtacgtgtgacgagccaggattaaatattttcggatgccgattaaatgacattgctgaacaccttagaatgcgatttaagaaagaacaggatgaaatggagctgtacagggcagagaaggctgaggctcaattgtacaccaccataaaggatgcttgggatgaagatcttctcgaacacgattgggaagaacattccctctgatcttgcggattttgataaagttcgaagtttttttttttcaaatccaaatg

SEQ ID NO: 137336 - DNA, 292 bp, Glycine max
  Clone ID: PAT_MRT3847_95023C.1
gaagacctactgcaagagcaaggagtgcgggaagcacacactccacaaagtcacccaatacaagaagggcaaggacaacatcagcactcaaggaaaacaccattatgaccacaaacagtccagttacagaggccaaactaagcccattttccacaaaaaggccaaaaccaccaagaaaattgtgttgaagctccagtgtcaaggatacaatcatgtctcacagcacactatcaagaagtacaaacattttaagatcaatgataacaaaaaaggaaaaagaacctctctattc

SEQ ID NO: 137337 - DNA, 215 bp, Glycine max
  Clone ID: PAT_MRT3847_95024C.1
tcagcacactggcggtcgatactagtgcatgcgtactgcataacaaaactgacttaacacagattgaggttatcgcccaacttgccatgtgatactgcaaatgctaaacccttatataacggctgctcataccaaattacagcatacactataaaaaacacgatgatgatggttgatgacccactttagacaaaatcttgaagcatggtatgcct

SEQ ID NO: 137338 - DNA, 241 bp, Glycine max
  Clone ID: PAT_MRT3847_95025C.1
cggttactaatatcttttggatcttttggcatagggcctgcctaggacacaaagggcctctgccaattgaggggaaacagggaaataaaaatggaaccactcgttacttcattaggtggccacaccacacgctaaaggggattgattaacactcaccacaaggcaagaaatctctggtttatatgataaaaacaagggccttgagcgacatcatctgcatgcgtggcaatcgaatgtggat

SEQ ID NO: 137339 - DNA, 399 bp, Glycine max
  Clone ID: PAT_MRT3847_95026C.1
tgtgtgtgtatggtgatgataacttaattagtattcacgagtgatgtaaaaggttgtttgggtgtggtaataacacatacaattgtggtttagaccaaatttgtgccattaaattatgttgaaagctagacccttggaaccttactttcagaaactttatacccgatgatttatgtgtcgtgggtggcatccttccgacaaggccaaagatatggtcacaacttcatctttgttcgtgtagtaatatgcaaatgcatgatgcttatattggtaacctcctaaatgtgtcacgagaattgtatttgttcagaacagaggaagctcgtcaattgagaaggaaagctctttctcgtattgaatggctgcaaaaagctgatgtgcctaccatatcacagattt

SEQ ID NO: 137340 - DNA, 436 bp, Glycine max
  unsure (1)..(436): unsure at all n locations
  Clone ID: PAT_MRT3847_95027C.1
cacctttttttggtttttcttgggttgcttttttttctccctcttaggtctctcttctagggacaaaatatcaactcatcggtccatattggaccttgacctaaccaagctaccacacaaaaacaggtgtcttcactgttccaactatggaagggggggcgtggacaagactaccatacccacgaataaaacgctnngggacttgagagtttgaagaataacttgaactatatcatggacatgaatgcaaacagaaaatcaccccatcctcatcgttggggattgaacaaatttgctgacctcactcctcaagagttcagcaaaaagtacttgcaagctcccaaggatgagtcgcagcaaaccaaaatggcccacaagaaaatgaagaaggaacaatattttttgcgaccctccacctgcatcatgggattggaag

SEQ ID NO: 137341 - DNA, 320 bp, Glycine max
  Clone ID: PAT_MRT3847_95028C.1
agagatagactcgcgagcgtaacataagctaccagagaaataggcacggcccgacaaaatggaaggaagtcgaaaacatcgccttcttatggacctacaataaccgcgagcccctccaaaaagtaaactagtaaacggcacttcctctcacctacctaacccgacacggccccattacaccgcaaacatttcacccgaagaaagctcgatacacaacgtactcctttcatattccatcacgagcggctataacctcaaaaggatccgatagcgcatcccactccgcaataacttactctacatccacgtgaccacaccat

SEQ ID NO: 137342 - DNA, 485 bp, Glycine max
  Clone ID: PAT_MRT3847_95029C.1
ccaaaaacaggggcctttttaaaaaaaaatttttttcatccaaaaaaaaaggaccccctggggcccccccaaaaattggactttaccaatttttttttacaatatcccccaacaaatttttaaaggattaaggaaaaatggaggggatcaaacaaaacccccctcaaacgggggtagggcttcatttcttcttaccaaaaaaacgggggaagggtttattggggacgggttttaccttcccaccccacccattgggccagaaaacgggggttaaaccaaggcaaatcccccattgcccccaatttacccttttggggcaaaaaaattttttgaaaaccccacccctcccccccggagggatttttgttttcccaataaggccaaaaaacaacttgcccctgggaatgccttaaaaaacattccttttccccattttcctggcttggaactcatggaacccttgacaaaaaacaaaggggtgaaaa

SEQ ID NO: 137343 - DNA, 676 bp, Glycine max
  Clone ID: PAT_MRT3847_9502C.1
aaaattcctccacagagaaggtcaatagaaaattgacagaagctctgctggtagggttaaaattgaatggtgttacaaagttagccatttgaatccaaacagtttcgtgtaaattggactaaggattggtgccagaaggcgagagccggaaataccgggattgagcccatatgcacacatattgtttatggttgacaacttatcaccaatgacaaaatcacctggtattgtagacactgaactatatgtgtgcatatgggctcaatcctggtatttcaggttctcgtcttttgggcaccattcctcagtctatttcacagcaaactgtttggaatcaaatggctacagtgagaacaccattgaattttgattctagcaagcagagcttttgtcaattttctattgaccttcttggtggaggaatcttagtggacaaaactggagattggatcacacttatacaaaattctccaattagttacttgttgagagttgctgcttggaagaaaggctgattaatggttaagattgtaatgtctgggaatgcaagcagtcaaaaggagtgactgagcctcactggtaaaagtgttttaacaaacagtaacagttcagagcattttgatgcatgaaatggacaaaatctgaaccacatttctgggaattgatcttcccatag

SEQ ID NO: 137344 - DNA, 500 bp, Glycine max
  Clone ID: PAT_MRT3847_95030C.1
ctcactgacccgtgggcgtccttttttatcttttctccttccaccatgacggatcgtgaccgtgatcgagaccgacaccgaactcgcgacagagaaagagaactaagaacagatattgacgaccgcgatcgctaccgtgaccgagcacgcatcaagagatctcgttcgcgttcgcctgaccgtggccgctcgcgcctgctgcgctctccctataccaacgaacgctcccaccgccggcggcactcccggacgccgtccactgacccgacgcggaagctccaccggagagactcgacggaggaggagcacacggagactaagaaagcgctctcggacttcgcggacggaatcgtgacggagcagcagcagaagctgcacaacgattacggacacggaggaggagaaactgaggggaacgaggacaagttgcacatgatgaaaatgtttgggatttccaccggattttctccaccagggggaaaccggtaccggggctgtcg

SEQ ID NO: 137345 - DNA, 1075 bp, Glycine max
  Clone ID: PAT_MRT3847_95031C.1
gaagtaagtatctcagattctactaacaaagcaaagcaacatagttctaaccatcagtgaagaagtatctcagattctcttcaagcaacatagtctttgctagtcatcataacatgcagctcatttacagacacttacaccccatttttcatctcacaaatttctttctccaacaaggaccatgatcatgcgtctatagttttattttgggtgtttttgataatataaattaatgtcaagcaagcacagcagaaaaaaattcatatactttgagaattaaaatttttcagccctgatagttctgcaattatggtatgcatttcgagctgattcacttttttgcttgatatcttcatacatcttcaatgatgcctcagaaaatttggtcaggcgatcaagaacctttgttaatcttgcatgtatgcagctcaaattcgtggactcatcttcattctcttcattagttttgctctcggtttctgccatacttgcattgacagaattctgtttcttgagaagttggtcattatgctgctccgtctgcagatgaagatcagacaaaaagtttctgattgcctgacttagttcctcagagggtaaagccttgatcccagcagaccagtcacggcaaagaacaaatataggtggtgccagaactcggcgaggggagaatggtcttctgctcttggtacgctcccttggttgcagtatacagttttgtagccacgcattgacagcttccacgtatgcggcaccagtgttaatccagttagcaaaactcagaccaaagaactcaacttcttctagcagccgagtcattatctctctgagtgcatctccttgcaaggttcctggtgtgctccttgaatgatatgccaaggagatggtgatgtactgtgcatgatgacattcaagcatagccttccacatcctgatcaatctgcacaaccagtagtttcttaagttatattagttgttatagctgtaacactcaactggcaaggaatagattttaaagataacagagaaagttaagcttcaaggtaataagataaaaaaaaaaaaaaaaaaaaaa

SEQ ID NO: 137346 - DNA, 884 bp, Glycine max
  Clone ID: PAT_MRT3847_95032C.1
gggagggaattttctccccaaacacaaattcccagatcatataaataaacagtaaaaaaaatcatagtataaaagaaggaattggcgcttcacggtctccttcagtctctatttctcaaccctaaccaactcatgtagctccattgtcgttgaccaccgtgctcagattacagctaaggtcaccgcctatcaaccccttccagaagcatagaagaagtagttggcacttgatatggctatagagaagagcagtgctcgcaaaaagttgtttaggcgctagcagatggcaggggaagatcagaataaaggaaaagcttctagctgtcatccaacaaaaggctcgagtagacatctaccacgaatgactactcaaattccacagtatgctttgtcagatacagtatatcatccctctgatccacctgctaggacatctgatgtgacacctccaccttcaatacaaggggtacactcaccatgtacttcacaaccaacaaattcagatgcaggacgcacccttagatcatctattgcattagagacacagagcaatgatgggaagccaattctatgccttgatggacaaggattcttaccttcacgccctgctgctaatgggattacggatatcctcacgagtcattatattgacccctggccatcttggaagaagataccgattagctcaagggactcatggtttgaagaatttttgattaagttttctattagtccaccagattacaattgggcaaaaaagaattttgagatgcgaggttcaatattgctgacaaataagctaaataaggctcggaccacaatggataaaccaaattggattaaagatagtgtttgggagatattgtgcgatcattggagatctg

SEQ ID NO: 137347 - DNA, 522 bp, Glycine max
  Clone ID: PAT_MRT3847_95033C.1
aggacacgtggggctctttctgtgtagccgggcgttgcgtctatgttcaacacagttgcgaccaaaacgatacccattttggtgtgtgcattctagaaggacactggtgacacagagggagacaccagcaattgatgagagcaagggactactcgatgacaatgcacacttaagcatatatgatccacatgtgactgacgaccaacctcaaaaggatgcatggatgaacaagtttgatcggaaccacgctattcacttgcctccagctaatcctacagctgataagaaagatcctgcggtttgggatgcatactacgcagcacacgatgctgatggtgactgctttctcactgtgtgggatgagatcacgactcttgattaccataaagagcatgacaacatgagaaaaccagcatttgtttctgatggaaggaacattgatgctgtggagaagctacatgacattggtttcattgagtactcgattgagaagccactggatccatggattacggacctgcc

SEQ ID NO: 137348 - DNA, 189 bp, Glycine max
  Clone ID: PAT_MRT3847_95034C.1
ttaaaccttttttaaaccaaggccttggtctttctggcacccaaaaaggttctggggtaagttcttaagattgttcaccggtccaaccaaggaacccaatttgggccagtgaaactaacaagtgatcttggggggggctacttttgggtgaactgggaaaaaggctttgtctaatcaaccttaaaacca

SEQ ID NO: 137349 - DNA, 340 bp, Glycine max
  Clone ID: PAT_MRT3847_95035C.1
cccccccggctcgagtgagagtgtgcgcgcattttttcttcaaacgggagctactatccatagccgcactcaacattggtggctaccccactattcattgggtgtttttacaccaagactttaaccagcttctgatgcctgtctctctctgctctgttagaaactcaaaacgtaatgacgacatctcttatctcggcactgcacactcagatccacactgcgagtctgcttgcggcattctaattgactgaactaccaattctgaccgccgctcattgacatagcctatggagataaactaggactattgcgatctcgtggacacggttgctgaatgact

SEQ ID NO: 137350 - DNA, 586 bp, Glycine max
  Clone ID: PAT_MRT3847_95036C.1
caataataataataattatgacatgatacagttaaccacttaacagaatggctttcacttacttgactcgatcatttaacaaaggaaataatcaatctgtaaataataactttttatcatccaggtggggttggacacaattacattattattggtacaatagaaaaatcagttgcttaccgttttcatgcaccttctcctcagttgctactgctgaagcttttcttcttagaaggtcatctaccccttgctaggcctggaataaatatcctaattgtgtatttttgtttttttttcctcttctttttcattttccttttccttctttccaaggcttactaacccaaaatagttgcatcttgttgcaattttttgtttgtgtaatgtcaaaaaatattttgctcaaaaggggaacaattttacactaatccagggcagctttgcttctgcggccggatattgggaataggtaaaccatcaaagaataggtttcgaaatggctgcttgcaagtcaggtttcaagccccatattgcaggtggcccggctgctgctgaattgttcttttcctgctctctgaggcttgat

SEQ ID NO: 137351 - DNA, 298 bp, Glycine max
  Clone ID: PAT_MRT3847_95037C.1
acagagtttacttggaaacttcaatttttcaattcttaatgatactgttttgatatcttcaatgaattgaactgcctgcagttcaaaattgaactgcatgagttgcctttagccagtcatgttttacttcaatccagaaataaaatattttcttaaggctggggtgcttgctgttagaaagtaactggagaggatgttgatgccctggagacctttgttggtgaaacttgtagctgtcgagttttgcaattaggggtctgtttgaagatcgtgtcattgttagcatgatttgtgattc

SEQ ID NO: 137352 - DNA, 414 bp, Glycine max
  Clone ID: PAT_MRT3847_95038C.1
attgctggatgtatggaatgaggcattaattgtgtactatatgataattttgtacgtaattagctaagagggaagtacaaaagagactaattttaatgagctgttgattatactcaccatttttatgtcaattcctcaaatcaagagttaatatagataaactatactgccaagtcatgctgaagctgtgctcttatcaaattcctgtaaggcaagtgtagtccttaaccgcccaatagagagtactgatgaactgtgaggggaattttaatttggtcccttggatagttcagtgaactttgcgagggtggcggtaacgctggactcatcccatgttgctgcaaccttggcgttaaagacaccccgctctggttggtgtccccatagtgatcactacttccgtaagaaaccatg

SEQ ID NO: 137353 - DNA, 122 bp, Glycine max
  unsure (1)..(122): unsure at all n locations
  Clone ID: PAT_MRT3847_95039C.1
ttgactcannaattgaggagatattgtgataggatattacgtgactccgattctnacaggatgggacacnaggtatanttggccaacttttgcnagctggngagtatcggttgccaaaannc

SEQ ID NO: 137354 - DNA, 850 bp, Glycine max
  Clone ID: PAT_MRT3847_9503C.1
gcgaattttgtacttgccaaaaacacagctgggggaaccattctgcgtagagatctattggcaaattttatgacagagggcaattttatagcaagtgttgattatgcagagcactcatggtcttaaaggaatgatttaaaaggtggccacagttggtattcctgagaatacaggtatataattggcctgtgctatgaatagtactgttagggggcgtgccagatctgatatatacaccatctgctgtcaagactgtgaattatggaatcctgcttgcacaaaagcaatgactatgtcatttaatccaaatgcgtgttctgatgcatggagtttggaatgttagaagcgtaccggattacattgagatatcatttgtgtcactggatggactgccaccccaatgcaggatgttcaggttacaaatgattggcttatatactctcaggaatgtgtttccaggacctattgtgttttaaatccacaaaatccttttgtgttaaataggtggatggggaaactgactttcccccagggcactttccgaagtgttaaaagaatgcccctttttatagggggaggagctggtccaaaaatggcttttttatgaatttggcaaatggcgttcttttaatgtggagatattttgttggagatctcgcctttgaagtttctaagatgacttctccttacattaaatgtacaggctctttcttcatagcatttggaaatttggttgatgacaccatcaattttgaggctttttcccacaagctggttcattttggagagtttcaagaaaaaggttgattgtaattttcacatgaggaatttcttacagcttggtcaactc

SEQ ID NO: 137355 - DNA, 438 bp, Glycine max
  Clone ID: PAT_MRT3847_95040C.1
attcaattttgctttgtcaagggctaaaaaaaatgagtataccttcttccacctttcttgttgttttggatgatacgtaggattctggtgtccctgtccggagttatattgatagtttcacatatgcatctttgatcactatgtaaacctctagagctccttccacgtacatgtttttctttttcttgttcctttctgttaccctttagaccaaaatttaagatcaatattagttccgtataccaagactttcatggaagaaacatttgttcccttacgtgggatcaagaatgatctcaaagcaagaattccatgctacagacaagattggaccagtggattccaagctggaattagatggaagtctcactgctgtgcagactcttgcatcaacagcactctgcggtgttattcactcaatcattggaggacaacctc

SEQ ID NO: 137356 - DNA, 462 bp, Glycine max
  Clone ID: PAT_MRT3847_95041C.1
gttagacgctagccttcttgtggagagtgtccgactctttttggcaagtgtggctatatcataaattctcaaatattcttcgagtttctcttgaatatgtaaagccaagttctttttggtcaattactgacttggtcttttggtactcataacaatacatccaaaagttgttcataaattatttgaaatgtaaattctttccactggattcatttattcaattttgctttgtcaagggctaaaaaaaatgagtataccttcttccacctttcttgttgttgtggatgatacgtaggattctggtgtccctgtccggagttatattgatagtttcacatatgcatctttgatcactatgtaaacctctagagctccttccacgtacatgtttttagatttcttgttcctttctgttaccctttagaccaaaatttaagatcaatattcgttccgtataccaag

SEQ ID NO: 137357 - DNA, 713 bp, Glycine max
  Clone ID: PAT_MRT3847_95042C.1
cagcatgcagctttaattgagaccgtgcccttcaaaacggttgccatgtttaccttattccagacagcttacttgcttctctgctttggtctaacctggataccaattgctggggtccttttcccattgttaatcatgcttcttatcccagtacgccaatatttccttcccaagttttttaaaggagcccatcttcaagaattggatgctgcagcatacgaggaagcacctgctattagtttcaacttgtcattcgatgattcaggaagtcagacaacaacagtcaataataatagtggggaaattcttgacgaaattattacaaggagtcgtggggagatctgcctcaatcaaaaatcaaggtgttcaactccaaaatcatgtgaagacactgtacctgcttatggaaatatctcaaaggattcacagctctcgagtaactaaattcagaaggaaaagcagcctaggatcaaatcatgatcatggaggcgatcaagttcaagaagagtgctagtccacagccaaaatttcttggacaatattccaatggcttaccttcaagctaatatggcatccttaagtctgatgaaaatagttttaagtagttcactagaggtcgtgaacttggtttatgtaacagaagtcattttatagatgtttttgtctttgactcttcttcctttcaatatttaaccatattgtttacatacctt

SEQ ID NO: 137358 - DNA, 1470 bp, Glycine max
  Clone ID: PAT_MRT3847_95043C.1
tatataacttcacataaatccacgcgtccctctcatcctttacaaaaacctaaattctgcgaagcaccgttctctacatatccaaacgccaccgtttttctcttctctccgtcttccgaagcttcgagaatcatactgctgggatgtctggggaagtttttgatggacaagatgcaggctatgtgcctgagaaccctgagtttccacaaaaccattctgatgaacacgatggaggaaatgtgattgatgactctgggttcccgcagctgcagcctgatgaacatgatgctggagggtttccgcagctgcagctgcagcctgatgaacacgaaggcggcaatttggctgaggatgccaatcatcctgaacataattttgacgggaatgatgttgaaggtttgcctggacctgattttcctcctcaagagcatgcagaggaacaacatgttggaggagacgtgactgagaattttgcctctgaggaaaagcaggaacctgaggaggatttgaaaggaggtgaagtaaagaagtggccagggtggcctggagagaatgtttttaggatgttggttcccgtgcaaaaggttggcagcattattggacgaaaaggagagtttattaggaaaattactgaagagactaaggctcgtataaaaattcttgatggtcctcctgggactgcagaaagagctgtaattatactcgtcaagtacgagccaatctcgtggatacggctatgctgtgatattcactgagtcaagagccatataaatctgttgtgactatggtcacgcagcacatgcttcctttgtcctatgcagatgctgttattggagcatcaggggcaaacatcagctacatccgtcgagctagtggagcaagtattacaattcaggagaccaggggtgtgccaggagagatgactgttgagataagtggtactgcttcacaaatacaggctgcccaacagctagtacagagctgcatataggagttcattccaagtatcaggtagtcctggtaggcaccaatggctgcaatcattaccggtgtgatccactccatagacagaaggatgtgcatcttttcttagttgtgacagaagtgttatgtcaagtagataaacttgattcttcatgttcttcaacactttgttcactatgtttgctgctggaggtagacctgctggatatgttgacccagctaatggttcaagttctccactacaactctttcttggttgattccactcttgacctctataaaatgcattttaattaatgctattaactagcaatagaattttgagaatgttaagtttcactttcagctatttataaacttagaaagatgagcatagaatatcatgtgatgacatttttttttaataaacttatctgtaagtactaataagaaaaaaaaaaatgtaaggtatgtaaaaggaattaaatttctttcataagttataat

SEQ ID NO: 137359 - DNA, 366 bp, Glycine max
  unsure (1)..(366): unsure at all n locations
  Clone ID: PAT_MRT3847_95044C.1
aaaaaaccggaccgacccacacgtccgcccacccctccntcaaaattcttctttctttccctaccaattctttctctcaaccctgttgttttanttataaatcttcccaatcacaaaaaaatttgntaaatcaacaaaatcttttgcaccaaccccatcattctcttacaacatttcaaacaatcccgttaattttaaatccaacatatccttcaatttatcccaaaaccctgtaacaaactttttagataactatatattattccattcctttatatatttctccacaattactctcatattcaaaaataccctcttttcaaaaccctttttcacaaaaataaaaatttttttctttttataaaa

SEQ ID NO: 137360 - DNA, 2500 bp, Glycine max
  Clone ID: PAT_MRT3847_95045C.1
gaagaaacatttgttcccttacgtgggatcaagaatgatctcaaagcaagaattccatgctacagacaagattggaccagtggattccaagctggaattaggatccttgccccaactacatacatattttttgcttctgcaattcctgttatttcttttggggagcaactggagagaaacactgatggaagtctcactgctgtgcagactcttgcatcaacagcactctgcggtgttattcactcaatcattggaggacaacctctcctcatactgggtgtagctgagccaacagtcttgatgtatacattcatgtataactttgctaaggatcgcaaggatttgggacacaaactattcctaccttggactggatgggtgtgtgtttggactgccctgttgctgttcttgctggccgttcttggtgcatgttccataatcaatagattcacacgcatcgctggtgaattatttggtctgctaattgcaatgctctttatgcagcaggctataaagggtcttgtggaagagtttggtgcacccaagaaccagagagaaggtaccaatcaggttgcacttcagtcatcttggctgtttggtaatggaatgtttgctttagttttgtcatttggtcttctttttactggtcttcaaagccgcaaggctagatcctggcgttatggctcaggttggctacgaggattcatagctgattatggagtcccactaatggtcctcatatggactgccgtgtcttacataccagtcaatgaggttccaaggggaatccctaggcgacttttcagtccaaacccatggtctcctggtgcatactcaaattggactgttgtcaaggaaatgttgaatgtgccccccttatatattgttggagcatttataccagcaactatgattgctgtgctttactactttgatcacagtgttgcatcacaacttgctcagcaaaaggagttcaatctaagaaaaccctcatcttatcattatgacttgctgctcttaggatttttgaccatattgtgtggacttattggaatccctccttccaatggtgtgattccacaatctccaatgcatacgaagagcttggctactctaaaacatcagcttttacggaataagcttgtatctactgcacgaaaaagcatgcggagaaatgttaatttgagccagttataccaaaatatgaaagaagcatatgatgaaattcagactccattggttccccaaatgccaactacattggggctgaaagaactgaaggaatctactattgaactggcttcaagtcaaggatatattgatgcccctgttgatgagactgttttcgatgtagataaggatgttgatgaccttttgccagttgaagttaaagaacagcgcctcagcaatctgctgcaggcattgatggttgcagcttgtgttgctgctatgcctctcttgaagaagataccaacctcagtgctttggggttactttgctttcatggcaattgaaagcttgcccggaaaccagttttgggagagaatactatatcttttcactgctccaagtcgaagatacaaagtgatggaggaacaccatgcagcctttattgagaccgtgccattcaaaacggttgccatgtttaccttattccagacagcttacttgcttctctgctttggtctaacctggataccaattgctggggtcctattcccattgttaatcatgcttctaatcccagtacgccaatatttccttcccaagttttttaaaggagcccatcttcaagagttagatgctgcagcatacgaggaaacgcctgctattagtttcaacttgtcattcgatgattcaggaagtcagacaacaacagtcaataataatagtggggaaattccggtcgaaataattacaaggagtcctggagagatctgcctcaataaaaaatgaaggaattcaactccaacatcatgtggagacactatacctgcttatggaaatatctcaaaggattcacagctctcgagtaactcaattcagaggggaaagcagcctaggatcaatcatgatcattaaggagataaagttcaagaaaagtactagtccacagccatcatttctgggacaatattccaatggtttaccttcaagctaatatggtatccttaagtctgatgaaaatagttttaagtagtgcactagaggtcctgagcttgatttatgtaacagaagtcatcttatagatgtttttgtctttgagtttgactcttcttcctttcaatatttagcatattgactacattataccttaatacaaaatgagcatgggtattttcaagttgatggatagatggtattgaatctaaccgtcttaggtttatttatataaaaaaagcaatgaagggattcggaaacaaagattgtgataaatatttatgttattgtctttggctaaataaagcattgcatagctgctgtgaatcataaaaaaaaa

SEQ ID NO: 137361 - DNA, 961 bp, Glycine max
  Clone ID: PAT_MRT3847_95046C.1
acccgtttttcttttctctccgtcttccgaagcttcgacaatcatagatactgctgagatgtctggggaagtttttgatggacaagatgcaggctatgtgcctgagaaccctgagtttccgcaaaaccattctgacgaatacgatggaggaaatgtgattgatgactcagggtttccgcaactgcagcctgatgaacacgataatggagggtttccgcagctgcagcctgatgaatatgatgccggagggtttccgcagctgcagcctgatgaacacgatgctggagggtttctgcagctgcagcctgatgaacacaatgccggcaatttagctgaggatggcaatattcctgaacataattttgacgggaatgatgttgaagggttgcctggaaaccctgatttgccttctcaagagcatgctgaggaacaaaatattggaggagatgtgactgagaattttggctctgaggaaaagcggggacctgaggaggatttgaaaggaggtgaagtaaagaagtggccagggtggcctggagagaatgtttttaggatgttggttcctgtgcaaaaggttggcagtattattggccggaaaggtgagtttattaggaaaattaccgaagacactaaggctcgtataaaaattctcgatggtcctcctggaacttcagaaagagctgttgtcagctaatatgaatgactaaggtggcttcaaattgaagaaccaaacttcaagttgcagggaaacagcaatgagcatttacaatggctgaaatgttgttttttgacttaagaatcaaatagtctgtgcagattttggtggcaagaagcgttcactccctggtaatggtttctgcgaaagaagagccagattgcagcataccgcctgctgtggatggtttgtaagggttcataaacaagttgtcaatgtagaccctcattcttgagatagtgcatc

SEQ ID NO: 137362 - DNA, 325 bp, Glycine max
  Clone ID: PAT_MRT3847_95047C.1
tctttttcctctttaacatatcttaatatctttcaacatccaaaaacttctggtatcacccattccatattatctcgagacatttacaaaacactttctatttataactgttgatgacattaaaactcaaacatccaataaaattaactctattgtttttcctgttactaacttacttctcaaatccttacttgcaaaggaaaaaattgaatcactatgtgacctatcctttctagcaacatatgaatcaatcaaaacatttatctgctctcaacgaattgacatttctgaatcatttacacaagcttttgcctacataactacc

SEQ ID NO: 137363 - DNA, 285 bp, Glycine max
  unsure (1)..(285): unsure at all n locations
  Clone ID: PAT_MRT3847_95048C.1
caagattnttcccantaaactatgggtnacatcncacaaatcacctgntgattnngctgccattncgagaggggacgaangaganagcaacatatcatctcngaccanatcccgttcattcaggcagtgntcanttctctgcgcctcctgacttattcactcccaantccagaaccatcatcgtcnctatggcacaagcacacgcnctattttcactntcaatcctcgcttctncctgcttnctcncccattctccgaaggcgnttcttttcccttcnatngtcg

SEQ ID NO: 137364 - DNA, 302 bp, Glycine max
  Clone ID: PAT_MRT3847_95049C.1
cccacgcgtccgattaaccatggcttttattacttcatattcatcatttgcttccctcagtgtcggtgcatcctttcccatttatatttgctcttcttcttccatgtttccaccgcctcaaaaaccatgctttaaacctagagagggatattctgtcattcgtgtcttaagtgtccgtggttattttccttagacttaataaatccctctcatcttttactttcagcttaaaccaatatacattattcatataaatgttgcttaagagaatatagattgttggcggacattgctgcttgaaa

SEQ ID NO: 137365 - DNA, 563 bp, Glycine max
  Clone ID: PAT_MRT3847_9504C.1
cttcgcttcctgtgaaaatcatgtagaccaaatacccctattggcacaggaggaaatcctgtcttctagtgcaagtgatttcagaactgcaatggcgagcaaaaatagcaagcctcaagctactgcaatgcatgtgggagctatagaaattatcattgatagtttcgcaagtcccgactgcaacatagctggtgcaacgcttttggttgatacttatcataccaatcctgaaaatgcagttcgtaacattcttgatgcgcctttcagaggtggaaggcccattccggtggttacatttacgaataccatcgtgcagattgaactagagatgaatttaaggtttcagcttttgagtaccactagcaatggtgattttgttcaaggaaaagatctcgcaatggttaaagttaatgtagcatgtgctgctgttggcttgacatcaagttacactccaactccattgttggaatctggtttgcaaaaagccagagggttaattgtggagtactttccgaaggatgtcttaggttgcttataacgttatgtgagccacaatagaaaaa

SEQ ID NO: 137366 - DNA, 808 bp, Glycine max
  Clone ID: PAT_MRT3847_95050C.1
cccgcgtccgcccgtacttttctttctgctgcccaatctttttcttcacgtcaactcctccttcttattcttcttccactttctccatcttagatttttttctttcagattcgattcagattatgctttttcttcttcttcttcttctctctccttgtgcaaattgagataaaataaagagaaaattgggataataggatgaagagagggaacgaggaagagaagtcggcggggccaatgttcccaaggctgcatgtaaatgatgcagagaaaggagggccaagagcaccgccaaggaacaagatggccctctatgaacagttcagtattccatctcagaggttcaatccacacctgccacgaaaaccaaattcttcttctaacatagttcctccaccaacttcctcaactgagggaaatggccgtgagagaagttatatttctcgccaatctgatgatggagcaaggtcaaacacttcattggtgcaacttgaacggagaaaaaaagtagatgatggcattcatgtgtacacttgctcgaggattgatcaatccaatgataaaatgctggagagttttaatgggaaaaaattgactccttttggtgctaggaatttttgttattcagttgctgtgcaaaatggtggtgacaaggatacaacacaatttggcttccttcctgctgatatgagaaaagatgcgaggaaggggaatgaggcaaatacacatgtaagctcaagtagacagaaactaaaattgtctgtcaaacccaaatcaagtggagaaattattgacagtctagtgatgc

SEQ ID NO: 137367 - DNA, 397 bp, Glycine max
  Clone ID: PAT_MRT3847_95051C.1
gccgaaacaaaataaagggggatactttaaagtatatcatcacccacttcatccatgcatgacaaatatcatttaaaacaaacatatacccacagattctgcaacacactttcaaaatttaaatatataacttggaaacaagataacaagatcaaattgaactccaatttaatatatatagtaaaaactcaactcactcttgacaattctcataaataaatgcctacatattctatgagccaaaagaacttaatcatttcaataacacttctattacacttcaaagatagcttaaaacatgcttatacacaaaaatctaacacctgcacctatgaaaaaataactctctattaatcaaagcagcctactttgatgggataaatatcatgaccaacat

SEQ ID NO: 137368 - DNA, 408 bp, Glycine max
  Clone ID: PAT_MRT3847_95052C.1
accaaacgtccaaggcgtaaatagggacaaagttggcagacgatatcacgatatatggggcacatgatacaggtaccagcggatgtacacatgtctagagctgcactaaaaggatgggcgagcccatgctcaaatggaaaacaagcgctgaaacttactaaaagctgttggtacacacgtatgtatagccattaatggcaaaagaagtggtagctccattagcaagatgctctgcataatgctcaacgttatgacagaatgccacaggaagctgaacctcaggctattgaagtgtctaaacgctacgcacaagtaacagaaatgccacccagtgcacagaatactatgagattataagcacctggagctaagctacaagatctgtatagccacatgaccatactgggg

SEQ ID NO: 137369 - DNA, 354 bp, Glycine max
  Clone ID: PAT_MRT3847_95053C.1
aattcggctcgagatgactctgaaaaggatggttttttgaagaggcttttaagagatagcaaaggtgatgatgagttcggtcagaagattcgtgatgcttttctcttccgtaagtcatctgagaaatatgacgaagattctgaaaaggacaatatcttaaaaaggctcttgagggatggtagaggggatgatctagaatctgaaaaggatggtttctttaggaggctcttgagagacagtaaagctgaggatgaggatttggcctcaagttcagagggattttttaagagattgtttcgtgatagcaagaatgattctgatgataaaacaaacactaagacaatggaaaaaacc

SEQ ID NO: 137370 - DNA, 782 bp, Glycine max
  Clone ID: PAT_MRT3847_95054C.1
ccagcgtccgcagctatataattggctctcattcgacactcacaccttaattatcaacgacactgagcctcactctcactctcactctcgtgaaaagtgaaccaagtccccacccatggaagcctggttcataatcctagtcactctttgtgtctgcgtgctgataagagccatactattctctcttcacaagaaaaccataaccatccctccaggccctcctcacatcccaatcatctcaagcattctatggctccgaaaatccatatccgaactcgaagcagttgtgaaaacactccacgccaaatatggccccatcatcactctccgcattggcactgagcccaccatattcattgccgatcactccctcgcccaccaagccctaatccaacacggttccctcttcgccaaccgccctaaggatggcggctttaaaatcctcaccaacaaccgacaccaaatcaactcctcctcctacggcgccacgtggcgcaccctccgccgcaacctcgcctcccaaatgcttcacccttcccgtgtcaagtccttctccggaatccgcaaggaagtcctccacaccctcctcacccgcctcaaatcagattactgaatcaaacaagtccatagaagtcattcgatcacttccaatacgccatgtcctgcttgctcatcctcatgtgccttcgggaaccactcgatgagagggaaagtcagagaaaatcgacttcggctgcggaaattgcttctgcactttcagagagttcacatccttaatttct

SEQ ID NO: 137371 - DNA, 372 bp, Glycine max
  Clone ID: PAT_MRT3847_95055C.1
cttcggttcaccctcttctccccactctgtactcagccccataaaccttttttttaattagcgatgcaaagcttactttcaaattccccccaactttggctctttttctttcttaaaaaaaagtgttagaattgtaattatatagtactaagagcacttggtaaaacacagattctgctttaaatgtcaatccccatccctttaccacttgttatcattcacacatttcactggcaatctctattcaaaattcaattacccacaaacttaaacttatggctctggtttcaaatcaccgacactctttcgaagcgctcttgggctttctactcttccttggattcagaagggtttcaatttcaagggccacat

SEQ ID NO: 137372 - DNA, 264 bp, Glycine max
  unsure (1)..(264): unsure at all n locations
  Clone ID: PAT_MRT3847_95056C.1
attacttgttttagatgctttatgaagattagtctcttctctgcacacattgaatgctgtttggtgaaccttcctgtaagcttaaatgatggttaaaggagcatgagtgtcaaattccttaacatttagaaccaattatcccaaaggcttaagcagttcaataacatgaatgattttattacatctcttaacatttactatacaaacccaggctgcagtttacaagacaggngttgtagtgcggcttcctgctaacattgccac

SEQ ID NO: 137373 - DNA, 236 bp, Glycine max
  Clone ID: PAT_MRT3847_95057C.1
tctttctactgattataaaatactacataaagtgaccaacacttgtagccccaaattcaaaggggagggatatttcatgcttggggttggctctttaaaaaattcacaaaaaccaaatactactattgattaataacttttcttccaacttatgtaagatttaataaaattgcttaaactattcgcattaaattacttagcttacctttgtttcccttttaaacttttttttataa

SEQ ID NO: 137374 - DNA, 281 bp, Glycine max
  Clone ID: PAT_MRT3847_95058C.1
gggaaaaaggagggaccattaaggggggtgggggtccccaagaaaattcacatttttgggaggccattggaataacatttccttccccaaacacaaatttaaaaacttttaaaaggccacaaggcatccttttttttaatgcccacttgccggggacaaaattgggggggtaggcccaggctttgttgttgactgggcccccagggggatcaacaggggtttccaagggacccttaccggggacaatggcctgaacaaaaaaccccaacttaggggaccgg

SEQ ID NO: 137375 - DNA, 470 bp, Glycine max
  Clone ID: PAT_MRT3847_95059C.1
ccacgcgtccgcggacgcgtgggcggactcagatggtattagcaagagagatcataatggataaaagagagtttattggggcggtgatgatgatgctgtgtttgaggcctagagctggcatcactctatgaaacttaagatcccattttctaaagtaagatgttagtattatatattatttatatctatgaatacattcttactcctaataagcacacctcatttgttaacataatctttatatgataagccattaatatttgcgttgaagtattatcaacctatgtagtaaacatttgacatcaatattttttattcacatttaccctcaagcactaaatattaacaatgttttggtagcaacaaagtaccttatttatagcaattttttaacggtatgtttgaaatgataagaagaaagtgagcgaactagaggggatttcctgtctggctcaagtatgttacaaaag

SEQ ID NO: 137376 - DNA, 477 bp, Glycine max
  Clone ID: PAT_MRT3847_9505C.1
atgccaatgatgcagaaactggtagctttgatgatgcctacgatgacaataaccacaacatgtcccttgcttcatgggagggatgcttgctgaaatcctttgatgagatggatgagtaccttgctcaggaaattaacactgacagctattgcagtggttgcacagctgtgacattaattaaacagggtgaccagttgatagttggcaatttgggtgattctcgtgcagtactttgcacaagggatagggaccaactcattcctgttcaactcactgttgacttgaaaccggatattccaagtgaaacctcaagaatagttaactggggaaggaagagtttttgcagcagaagaagaaccagatgtgtacagaatatggatgcctgatgatgactgccctggactagccatgtcaagagcctttggggacttttgcctcaaagattatggcctcatctcagttcctgatgtgttctac

SEQ ID NO: 137377 - DNA, 555 bp, Glycine max
  unsure (1)..(555): unsure at all n locations
  Clone ID: PAT_MRT3847_95060C.1
gtcgacttgaactggttttgtatccaaattgcttacactctgtccggntggtaccactcaatagctgggtaacaaattagtggcaccatcgcgtaccacgcgagacttccgactaaacaaacgggaggcaacaatgatataacggttgatgggtaaagctcccacacaaactgcatataacaacatagttgtgaacattgtagtaaaataacacataattttttattttacaaatataatagcatgttcttacctcatgacgtttcataatatccagcttgcgacgaaaaactctcacatcatcattgctgatatgttggtttccacgatcgaggcacctacaaagattaaaatttaacacatgtctaaaaccatttattctattgaaatgaaagacgcggttaaaaatgactaacttgtgccccaatggtgtattgtctactttggaaagagacatctgtggagacaatgctggacatggttctcatgcccacagttgtagtaagatgcacatacctgcgattgatttagtattataatcggtggcactgcata

SEQ ID NO: 137378 - DNA, 817 bp, Glycine max
  Clone ID: PAT_MRT3847_95061C.1
acgacccacgcgtccgcgtgcatataaataatgcatttttttttttaattttcttccgttgcatggttttaatttttctgataaaagcataaaaagtaaataagccttcacagttctatggttctcattctgcttcttggtacttgatgttcttcttcttcctctgccatccatatcgggttcataacgcaaactctgtccaaaatcaccgcttgatgctctttatcttttccaatcttatccaaattcttcccttcaattctcttcactcttttttctgcgccgaaatgggtctaatcttgaatataatcttgaatcataatgtgcaatcttcatcggttacgtgtccttaaaattggattcttttctatccatgagttcaattgggttatccgtttcaatccagttttcgtaacagtttgatacacacactcatatatatatattctctgttgattttgattttttttttctttttgggcactttcacgttttctttctgataagggggtagaaaagaaggctgcgactttttcaaagggttgattagaaatggtgtcagggagcgacccagttgagtcttttttcaattccgttcaagttgtgaaggattcgctgtcgccacttgaagtgggtattcgcaaggcggcgaaggatcttgagcattgtttggcagggtcaaagaacaaggtaaacaatggtgtttgtttgattgccccagtgagggaaagtggtgcatttcagatctgtgatgtgaagaagaagaaaggtttgtcaatgaaaggtcccctgaaggctttctggggcatgttttcac

SEQ ID NO: 137379 - DNA, 105 bp, Glycine max
  unsure (1)..(105): unsure at all n locations
  Clone ID: PAT_MRT3847_95062C.1
ctcatatatgatggctacgtcaatggtgaagcttatgattttgtatggggtcataggagtgaagttggangcaggtgtgtgtgtaaaagtagtgcatttgcaaga

SEQ ID NO: 137380 - DNA, 693 bp, Glycine max
  Clone ID: PAT_MRT3847_95063C.1
gcaacaacattgaatttcagcgttatgtgtaaactcaaattttaagttctttgtgattttttcaacgattgtctcttataagtaaagaaatcaaaatgaatttcaattctacgggtggcagacaccctgctcagcgcaacagccgcaagctcaaagcaggtggtgatgctgcgcctgcttctcctatggctccatatccagcgccatacaatccttcatatccttcatatgctccgcccccatatggacagcctggtgccgatatgtatgcccaacaacatgtttccatgccaggaggtggtgaatacatgcagcctatgcaaccccaaaatatgggagggttccctgggggcccccaaatgaatcaaggttttgccataccatcccaagttttttcacagccaattgttgctgacttagccatgcaatatggagctagtatggttggtgcaggaagacaaattgttgacagagaactagaaaaatatgttcctgtttcaagactcaagtactactttgctgttgacacaaaatatgtcgctaacaagctacgactactcttctttccatttacccattctgactggtctatgaaatatgaacaaggacaacctgtacagcctaggtttgaaatgaatgcccctgacctctatattcctaccatggcatatgtcacatatgttttactagcgg

SEQ ID NO: 137381 - DNA, 647 bp, Glycine max
  Clone ID: PAT_MRT3847_95064C.1
agacagaaataaacttacgtatgccagagcaagaattcatcactgcgctaatgagcaaaatgatgaacatagatatagatgcatcattcacggtggaaaaggacatcgattggaatgaaatgaaggaggttctgccctccgatgaggatcgcctgatcttctccgatctccatctggcattgtacgaccaggctcattcccgactacaacactacgtaaagacagcacagctgcacctcattgcatcgccatcactatagaaagcaagatggcactcaatatgacgtatatgaacaacgagaataatgagagcattgcgatacccacgatgtgtctgacatcctccactctctcacatataacgactactctcgatgaccttttgattgtacttagagaagcccacgagacatatgtgaaggagtctacattctgcatgggcaaacgctatctgatgacactcattgaggtgaagaagaagctgaccaatgtgtaccacaatgatgtactttgaagagcatcttgagctgatgcaaaagtctgatgattagaacatgaatgataacatgagactcttgatttttcgactagaaaaaggtcacgtatgattatgactgcctgaatgaacagccactacatagattact

SEQ ID NO: 137382 - DNA, 574 bp, Glycine max
  Clone ID: PAT_MRT3847_95065C.1
ggctcgaggagataaccctgaggttatggaagaggatattgaagaggaagaggtagctgaaatcaaggcagcacattttgaagaatcaatgaagtatgcacgaaggagtgtaagtgatgctgacattcgcaagtaccaggcttttgcacaaacattgcagcagtcgagagggtttggatctgacttcacttttgcaaataccagctctggtggtggtggtgctgccactggcactgcatccgacccttttgcaagtgctggtggagctgatgaagatgatctttacagttaggttaacctgtggcttttgtttacgaacggcaatactgcctagtttatgtacttctcattttctgtatgaagtcaggcttcaattcgatgatttattgtcgttggtctgtaaaaggcactggttgaaagtggaagatttatttgaacctgaaaagaagatttaaagaacattttaaaatttgaagagcttaggtttatttgactttataatgatttatgaattccaatttattcgaatgagttcaatgcattgtattggtatcgttttactaaaataattttt

SEQ ID NO: 137383 - DNA, 2305 bp, Glycine max
  Clone ID: PAT_MRT3847_95066C.1
gtacaactgaagtgatctcaacctggttttgtgtccacttctgttacttaatccacatgcttgccctaattcaacccaagtcaataccctgtcccaaatcttacatagatttctgctaaattttctattgccagatccatcaacttcgacacaccctccaattttcttcttcgaattcaatggcgtggtcgcataaaggcaagttttttatcttctctttactcttctttttctcttctcttcatatttccagttccccattagaccccgaatcatgttctatacaatccaagctggaccacgattcatgccaggaacatgatcctgaaaaaccccaaatagctaatcatttgaatcagcaagttttgttggataggcttgaggagttagtgagaaaccttagtgatttagttacaagattggaatcaaagctacctgaccctccaaaagaaaagggtaggtttactcaaaaaaaaattggtgatgatgatgaagatgcaagatcaagtagtaaaggagttgaagatggtgaatttgaggggaaaatccgagatggggagagagctaggggaacgtctgtgacaaagtacacacctttttggtcagagaggttccagtttgcatctgctttgaagttggattctgaggccacttgtataaatgttttgccttttagggaccacgaggggctgagtaagtatgtggcggttagtgatgagaggggaagagtgtatgtgttcacgaggaatggggatgtgttggttgagtttgatacctcattggagtcccctattacagcaatggtttcgtatacttcggtttataagaatgagagttttgtggtaactggtcatcaaaatggggaaatcttgatgcatagaatttgggagggagggtctagtggagaggattatagttctgttttcatggagaatgttggtaagtttctgtcacctgaaaactgggaagatgggttgccggtgactctcttggaagttcattatgtagggaggatgaagtacattctgtcagctgatacaagtgggaagatcagggtttttaaggagaatggttcgttacatggctctgccacgccctctagtaggccgctagtttttttgaagcaacggcttatgttcttgacagaaactggggcaggttcattggatttaaggggcatgaaaatcagggaatctgaatgtgaaggcttgaaccactctgttgctcgaacttatgtttttgatgccacggagcgttccaaggcttatgggtttacctcagacggggatctgatttatgtcttgttgcttggagatgtgatgaacttcaaatgcagggttagatacaagaaaaagtttgatgtggatgagcctcttgctctgcaggcaattaaggggtatttgctgattgttaacccggagaaggttttcgtgtacaatgtttcatctccgcattatgtgagagttggtgtgcctcgacctgttttctcctcaggtcttgatgagcttagatcatccttcttgaataatccaaccccaagcttggatgcggaaacaagagtgacacccttgatagctagtgaccgcgaaaagcttgttattgttggtcttggaggtgggtatgttggaatgtatcattctaatctacctatcttcaaaggggaattcaataccatgctatggactagtcctgtgttgttcttcatacttttcctatttggggcttggcactttttcgccaagaagaaggaagcacttacatcatggggaccagatgatccatttagttccacgtcagctaccaccagtgcgccattggcatctggctctggagacagatcttttgcagactcttcttcgagaagttctgaagttatggatcttagaggtggaaatctcagagctccaccgagaaggtatggctctccttcaaggtatcccggtggggctgcaacttcctataggcttggtggtgcgtctgcagatcacaatgctaggccagcttcagttgatccagattttcgtgcagcctcggagctgaaatttagggcctccaccatggaccctccaggttttcctaaaagaagagatggtatgtttgtaggcaatcaagttgtaaatgaccgcagttgagtggcagagttaattgcatgttatgggcttttctctaactagtttcagatttccttagcttttaatcttatgcatcatttgctatctggtctcgcagtcttctagctttcaagttgttgcacacaagagagaaataaattataatgagaaacttctaagtcttttcttctacc

SEQ ID NO: 137384 - DNA, 514 bp, Glycine max
  Clone ID: PAT_MRT3847_95067C.1
cccacgcgtccgacggctgcgagaagacgacagaaggggatttaaatattccaggttcgtccttgactctacaacattccattttcataggaaaagccaaaactgaagctcgaggaagataactacgatgaaacaagaggaatggatgattacgacagcgttgctatcgttgctgtttgtttcatcttttccgccgttgagttacggagttgttcctcctcgtactctgctcaataagctgtcggagggcaaatatctcaacactcaggagctctggttcgaccaaaccctcgatcacttctctccctatgatcaccgacaattccggcaacgttactatgagtttctagactatttccggattcccgatggaccaatttttttggtaataggtggtgaaggtatattgaatggggtagcaaatgactatcttgctgtactggcaaagaagtttggagcagctatggttactcttgaacatcgctactacggaaagagtactccatttaattct

SEQ ID NO: 137385 - DNA, 359 bp, Glycine max
  Clone ID: PAT_MRT3847_95068C.1
ttaatatcttccttttttcttatttttttttcatgtttttttcattggagagcctttcttgattcaagagataagggcgatgttgcattcttttctatacatctgtagaaaaatgccaaaccattgatttcatccatatcaaatcaacgaaatacctaccagaccatgtaggttttgaacgctctactatatccacatgggccactgtaggatatagccaaccaaaaaaaacccttaaaaagattggatcattccgagtcttgtcgaagagggaaagctggcagtgctccctccgtggagccccaaaaaggatgggatcattcactgctgaacgatgctttctcaatgccggattccta

SEQ ID NO: 137386 - DNA, 968 bp, Glycine max
  Clone ID: PAT_MRT3847_95069C.1
gacttggttactctatgttttactgcatttcatggttttaactcaactttttgtggccttctgtttcttgtatcgaccatttaaatgaaataacaaaaggaggagatagaggaaatcaactggtggctccatttgtgcttggtgctggttttatcctgtaactggatctgcttaatttctatcctagctttcttattttgaaatagttgaagtctgttcctggatggtggaaagttgcccagtgctaactgcgttgttcttaaatttaatctctgcgtaacttacatccagaccattgatttattgaccacccatgtgatgtgtttttggttttgaatgttgacacaggctccatatggtcctcctttcgcacttattcaaggaacattggaatcctatgggtctatgttcaaggatattcctaaagagcactgtcctaccataagaagaggatctgttgcatgggttggttctggtccagaatgcttcatcagcctcgccgatcacggggaatggagaaatgcatacactgtgtttggttctgttctatctgaagatatggaaattttagagaaaattgctcagcttccaactaaatcagaaatttggaataatattaaagtttctgtcttggagaacccagtttcattacggtttcggagaatgaacaaaaagtcttaaaatcctcagtttcattggtttgttctctcaattttttcatcctttattaagtgataatgactttcagtctatcaaggcaatacaggaatggatcttgggctcaaagttacttttctacatgcttgaaggggtctaaaggatgttaagttattattcaggcaccaaattatagctgattgcaaatcaaatagagttgagtatactacaagtttgataggcatgagactttgtggatatttcatgattctgttatttcattttttccttgtacagaacttaaattagtg

SEQ ID NO: 137387 - DNA, 663 bp, Glycine max
  Clone ID: PAT_MRT3847_9506C.1
cttttatttcaagcgattccagaactgcaatggcgaggaaaaatagcacgcctcaagctactgcaatgcatgggggagctatagaaattatcattgatagtttggcaagtgccgactgcaacataattggagcaatgcttttggttgattcttatcataccaatcctgaaaatgcacttcgtagtatttttgctgcgcctttcagaggtggaaggcccattcggatggttacattttcaaataccattgtgcatattgaaccagacatgaattcaaggctttagcttttgaggaccactaccaatggtgattttgttcaaggaaaagatctcccaatggttaaagataacgtagtctgtgcttgtcgtgccttgacatttagttacacttcaactacatcgttggaatctggtttgcaaaaagacagagggttaattgtggagtattttggaaggatgtcttacgttgctcataacattaatcagccccaagagaaatatttgccggagggaaattttccctttgatcttaaacctcgctctagattggaaaaagtttcctttacaaaagctcaatttgttagcggaaagaccttcaaatttgacacaatttggtgctggctctcattcttcacacagattcttcctgaaaaggtacatcctt

SEQ ID NO: 137388 - DNA, 454 bp, Glycine max
  unsure (1)..(454): unsure at all n locations
  Clone ID: PAT_MRT3847_95070C.1
caacctccttcttcacccttctccaccatccactttttcctctctggacaaatgtggcgccgaaacttcttgaagctccaccacctcagtctcagagcttcggggaagaggttcgtggcgttgtgggggaacggtgattttgggagaattgggtcttggcaacttggattcgcaatggaaacctgtcgtctgccccgcgttccgcgaccgaaccctaaaggccattgcttgtggtggtgctcacaccctcttcttaacagacaatggatgcgtttatgctactggtcttaacgattttggacagcttggtgtatcagagagtaaacactactcagtgcctttttcttgcttgggatatttcaggagccactntgtgtttttggagaggagaagaaagttgtgcacgtctctgctggttataatcattcttgtgcgattacagtggatggagagc

SEQ ID NO: 137389 - DNA, 561 bp, Glycine max
  Clone ID: PAT_MRT3847_95071C.1
cttcttccttcctctccctctcttcaatgtattgatttaattgttcaactgcattgattcgcttcatgattcttcctcaccccaacaacggaacaacctccttcttcacccttctccaccaatcaccttttcctctcaggacaaatgttgcgccgaagcttctcgaagctccacctcagtctcagagctccgggtttagggtttccgacgcgatcgttctcgcgcgacgccgggaagaggttcgcggcattgtgggggaacggtgattacgggagattgggtcttggcaacttggattcgcaatggaaacccgttgtctgccccgcgttccgcaacaaaaccctaaatgccattgcttgtggcggtgctcacaccctcttcttaacagaggatggatgcgtttatgctactggtcttaatgattttggacagcttggtgtatcagaaagtaaacactactcggtggagccactttgtgtttttggagaggagaagaaagttgtgcagatctctgctggttataatcattcttgtgcgattacagtggatggagagctatac

SEQ ID NO: 137390 - DNA, 306 bp, Glycine max
  Clone ID: PAT_MRT3847_95072C.1
tcgggaaaaagttgtattgaaattttcacaggaggaatttcttacaggttggtcaactcatgtgcgggctgtaacaactatgtaggatgatgggtgtccatatttgtctgctagggtacatgatcgatcagagtctacaataccgggtgactttgtaaatgaagtgaaagtggcaaccataatcaatatgtgtgcatatgggatcaatcctggtttttgacgttctcggattgtgagcaccattcattattttatgtgacagcaaactgtatggtatgaaatggcaacagtgagaacacccttgtt

SEQ ID NO: 137391 - DNA, 320 bp, Glycine max
  Clone ID: PAT_MRT3847_95073C.1
gttgctaagtaaaatatatgaattgttcagttgcccatgctgatcaattttgacatgctgatgaaaacaagctacgcttaattgcaagttcaccaatggatgggtggttcaaccatgttaactggcctataatatcaaatccaaccagatgggtcatccgtaagcaatgcaaacttatttaatatcttttcaaactgcacacgaatgtacataccactgtaccatttcataacaataacgtccccttgcacatgctcttgatttggaggaactggaaaactgtgccttgtgaaaagaattgttccaagcatgaagaaaaa

SEQ ID NO: 137392 - DNA, 171 bp, Glycine max
  Clone ID: PAT_MRT3847_95074C.1
gacgcgtacgctctgacatgtctgcatcttaagctttcatttgctgtgatgaggaaatgttgacagggcatgatgaatctgaaactttggcagcgcaagataatggatttgtaaaatctcttgaacgtatctatgaacgatcgcaagcaattgattcatctactgcacaaa

SEQ ID NO: 137393 - DNA, 313 bp, Glycine max
  Clone ID: PAT_MRT3847_95075C.1
gctagatctgatttgaacagatgtagagaatgagctgaaaagagtgattcatcataatgaagatttattaaaactacgccgatgtgaataagtaaagttactgaatgataatcaagacacactggcatctgtgcgaggggggtcacaaactcttaagttggctaaagagttattcgctgcagaaatggagatagacaagtcaagcctaactgaaaaagctcaaagtgtgaggtaccaaatacttctgtatttttagctccaaaaaaaggaacttgaatcttatatacagaatcagttttagctgaaggaaaaa

SEQ ID NO: 137394 - DNA, 381 bp, Glycine max
  Clone ID: PAT_MRT3847_95076C.1
atcactctctcttccaacgatcatgttccgcatccaagaagctatggcacatctctgccccctccatcttcacccgcctcgccatgttctccatcaccgtcgtcacccagtccttagccggccacctcggcgatctcgacctcgccgccatttccatcgcctgcaccgtcctcatctccatcaccttcggtttcttgttgggtatggcgagtgcgcttgagacactatgcgggcaggcgtacggcgccggacaacagcgcatattgggcgtttatttgcaacgctcgtgggttgttctgttcctgtcttccattctgttggtgccggtgttcatttttgcgacgccggagttgaaactaataaggcagcccgtcgcggtgg

SEQ ID NO: 137395 - DNA, 394 bp, Glycine max
  Clone ID: PAT_MRT3847_95077C.1
cgccacgcgttcgaccactcgtccgcccactcgtccgatctctttctattttctattacactctacaaattcttgggctgccatttttaacaacaactggtttttatccatatcctctagacctccaattctcctgtactattatcatcctttgtttcaaacttcaaattttaatctctaacttattccagaacgcttatcacataccaccctcgctatttcacatcatctctttgaagtcacccatgacatttctcacctcacatgcacatatatccttcaagctcctaaagttcatacacctgtaattgttacattctcaactgtcattcatgatcgtgttatcccataaacctttacccaccctaaatgcttttcctttaagttctacacc

SEQ ID NO: 137396 - DNA, 991 bp, Glycine max
  Clone ID: PAT_MRT3847_95078C.1
ctatagttcttcctttaatacttaaatgagatatacaccatgtccatgatatacataatgacaatccttttagctactgcctttacaggactaccagtaatgattgtttgcactgtatttcagattcagacgatgccacaactttcgtgagcaattagcttggtacaatgataatcagttcatctttggttcagtttggcaacctcttagagtgattttgaaaaataagttgatattatgtttcacctttccaccatggatgcttgccagagaaaggatacaataactgaagaatggagagctctgacgtgctggcatccactcaggcaaaatattaacactgccactctgctagtgggaacactgactgggctataaggtggcaaaaatccacgcacttgaaaatgtggaaagtaattccacatacttttctggagtgctatatctgtgagtccacaggaaggagtatgcagctttctgtaataaagtgtgttcctcgtggatgcatagcagcataggacaaggcaaggtgtgaattgaagtactgaactccaacaagatcatttcatatatcatgttaattttgtaaattggctatttgtgatttgtccatacgtgcttgccccaattcatttttctaatgatttgagcatacccgcaactcttagttcttgaatagcacatttatatgtattttttttcactttattttctgtacgggcaactcaatgctctaagaacttcaaagcattgtactaggaagaagctcgttatactacattatgagtttctcctttgattcctcattttaaaataataataattattataatttattttgtaaattcatttcctatgtagttccagttagttttttttttttttggaaaacattaccaggtcccctgaaggaaggttagtggaaatgttaaaaaaaacaggagaaatttgtataattgtataaaacttcagggaaattgaggtaatttac

SEQ ID NO: 137397 - DNA, 207 bp, Glycine max
  unsure (1)..(207): unsure at all n locations
  Clone ID: PAT_MRT3847_95079C.1
ctcagttctntcgttagtattcttccaatctncgtcgatnancactaacaccancatgtcgtggctctaccgatncaccaagtcanaactcctctcttcctcatcttcactttctngaaccttccccncnntntnangctccggccccacacttganctccntcagatggagcnatctctnccctccccgatctgtggagncnanat

SEQ ID NO: 137398 - DNA, 346 bp, Glycine max
  unsure (1)..(346): unsure at all n locations
  Clone ID: PAT_MRT3847_9507C.1
ttattaaaagnaagaaaatgttgctcacagatagatgttttgcctttccattttcacaaataacatttcttgagtcaccaacatttgttactataagcttctgaccatcaaaaagtattgcagacacagcttttgaccctatctgtcccaacacaagtgcttgtaccaatattttttaatctgttttaaggcaagctctttttaaccgcgctttctgtctcattccaaaagtcatgcttttttaagatgtttatgaaaatgtggttctgcaaattattgtaaactatatgtcctaattaggccatcaaataattgtaaaccagcttcaaatcttataatctttttt

SEQ ID NO: 137399 - DNA, 352 bp, Glycine max
  Clone ID: PAT_MRT3847_95080C.1
ctgcaattgagtggcgagctcttggccaaccttttgacataggtcaatgatatagcgagagaaagttagaagcgcactcatctattaagggagcgaataacagggggcgcagttattgtttgtggccaaacagggatatcataggcctgtgctatgaatagatgtttttgggggcgtgccaggactgatatttacaccatttgttctcaagactgtgaaatatggaaacctgcttgcgcataagcaatgactatgctatttaattcaaatgcgtgttctgaaacatggagttaggaatatttgaagagtaccagattggaagtgagaaatcattgcctacactggatggact

SEQ ID NO: 137400 - DNA, 572 bp, Glycine max
  Clone ID: PAT_MRT3847_95081C.1
aaaaaaaaaaaaaaaaaaaaaaaaaaaaaaaaaaaaaaaaaaaaaaaaaaaaaaaaaaaaaaaaaaaaaaaaaaaaaaaaaaaaaaaaaaaaaaaaaaaaaaaaaaaaaaaaaaaaaaaaaggggggggcccttttaagggacccaagtttaactcccggggcgggggaagaaaaagtttttttttgggggccccaaaattaaattcccgggcccgggtttaaaaacggggggattggaaaaacccgggggtaacccaaaaaaaacgctttggaaaaaaacccctttttcccagggggggaaaaaaaaaaagggccccccccaaacccccttccaaaaaattggcccccctaaaggggaaagggaaccccccctttaaggggccaaaaacccgggggggggggggggttacccccaaggggacctttaactttggcagggccctaagcccccgtcttttgggttttttccctttctttttgggcagggttgggggttttccccggaaagtttaaaaaggggggcttcctttgggggcccgattaaggggtttaccggccccccaccccaaaa

SEQ ID NO: 137401 - DNA, 137 bp, Glycine max
  Clone ID: PAT_MRT3847_95082C.1
gtattgggagggagtttaagtaaaaaggaaaagggaatatgctatggcaaaagggagatccgtttaagtcccagtggccttgcaacatggccaccacactttaaagcacctattcaccagacccatttatccttttc

SEQ ID NO: 137402 - DNA, 397 bp, Glycine max
  Clone ID: PAT_MRT3847_95083C.1
tggggcggcggtactatgagtaggagtaaagtcttttttttacaatttaatcacagggccattttacggattgacacgtattattacaacatatggcagccaatttttggatgaatgaactaaatatatggggtggattccaaaagtttcaacaatcaaactatgtcactggtttgtaaatcaagagttgcccccatgcaaaaaaagaagggtttatatccctatccattactgtggcaatattgcccatgtgttaaagcaaatttttatacaacaaatcggtgcgtaacatatctgccagtagtttcacttggccggatattcttgacagcttgagcacgctttaatccataatttcttgcaacaggagctggggactgaaacctagggaactggg

SEQ ID NO: 137403 - DNA, 291 bp, Glycine max
  unsure (1)..(291): unsure at all n locations
  Clone ID: PAT_MRT3847_95084C.1
aaaggcgatttggttttttcgggaacggaaaaaaaaccaccctaggtatttcctcagggggtatataatcccaaaaaaaagggggggttattttggggggtaaaataatacaaaaaaaattttaacaacccgagaagctagaaagaaaaaaaaaaaaaaaattgcttttatgtaacgaaggccaaaggtttttngaaaacaatacaaaaggctcagggggtaaatttggaattcctgctttaacaaaaccataattcaaaaggcgtttcgggggagtaaaccttaaaaatt

SEQ ID NO: 137404 - DNA, 444 bp, Glycine max
  Clone ID: PAT_MRT3847_95085C.1
gaaagtgagtggcactgcaataagagaaattactttatcttaagttcgtttagaaaaacttaaagagctctcctttggtggaaggaaagaactagcacccaactcacaaaacttgctttctatggatctcaatgtttatgaggcaaacagatcttaagagtcaatcatgcctcctctttccagcttacctgccttggtgtccttggatttaccgtgatcttaacgatgaatcatttcctagtgatcttggttctttatcattgttgcaggatttagatctaagtggtaacaattttgttaacccaccagcccagtgcattattaatctttctatgttgcagaatttgtccttcaatgattgcccaagacttaaatccttgccaatgcttccaccaaatttacaaggcttgtatgcaaataattgtcctaaattgaaacccttta

SEQ ID NO: 137405 - DNA, 174 bp, Glycine max
  Clone ID: PAT_MRT3847_95086C.1
ggcgccacgcgtcgagacatagcttatctactcagagcgcaagaacccgatcgacaccatgggggttgtcgtgcctgctctctgctcttgtggagcgcactcacgcatacacggtgtgggctgcaccaccgcgcggtattaccgcgcgggcattgcactcggtccctgcacctc

SEQ ID NO: 137406 - DNA, 271 bp, Glycine max
  Clone ID: PAT_MRT3847_95087C.1
gtaattataattataatatactacccagcaaaacaccaacgttgttttgagttattgaattaatattaaacctagctatcatccatgggaagctgcatatcaacgcaaggcgtgagaacacgcaagaggtcgaggagcaagaattacaagccctccacgccaagagggcacgagccggcgcgaaggtcgagcgtgacggcgcgtccgctgaacgtggtgtcggggccgagtcctgggaacatattcgacaagtaccagttcgggaaggagc

SEQ ID NO: 137407 - DNA, 322 bp, Glycine max
  Clone ID: PAT_MRT3847_95088C.1
aattaacgccacccctgttgcttgacatgacaaaggttaggttggaaaggctgcttatctttgaagactccctttgttgccaaccttgggacctggcaaacatgcttacaaactctattctgaatgggactgctactttggaattcccattgcattttacttcaagatcttcatgcaatgaggtttgtctctcatgtctctaagttttgtatacattccaaaccactgaaccatttgcttcgtatgcagcgcctgcgattacgtttcgtaaacctacaagactgatctcttttgatagcccagcattacgtatatgtcaccg

SEQ ID NO: 137408 - DNA, 504 bp, Glycine max
  Clone ID: PAT_MRT3847_95089C.1
cagaaaccgaacgtggttacaacgctactcttgaaactgaaaaatcctcccaattttcctaatgaacacaaaccctaattccccccttttgatgataacagaccctgaatttttagttaactgaaaaacatcctcatggatgcaccacgtgtctctcgagcaatcggcgaccccaaaatccgccgcgttggtttcttcgcttcagattcttccgccaccgattctctcatgatcccgtcgccacgtcatcgctccattccggttccgccgacgcacccttccggagatcgccacgtggcatccgggagctacgatcccacggaatacccaaaactcgctactggcattgaaaagagaggggaggaagaggaagagaaagaggttctgcaatcaagcttaaagccgttgaaagcaaaaactaccaaggctgagagacgggccttgcaggaggcacagagagctgctaaagctgcttctaaagacgagggaagtaaagcagttgct

SEQ ID NO: 137409 - DNA, 358 bp, Glycine max
  Clone ID: PAT_MRT3847_9508C.1
ataaaatcaactaaccgggagcgagtaaaatcactacaactaaagcgttttgactaatacaatctgaatggccgctttagggggtgataaaaacaaacaatgtaatcttcctgatttaattaagagcgggcccaagaatacctaaaacaaactggtttgacaactaagaacatatgggtatagatgaactttttgcctgatcaacataatttgaaaagaacgtaaccaccattattgctttgcgaataaactaccaaaaatatagctgtcttttcacatcaactgtcctgacaattttctcaatctcttataactgggtgaccactcaagcatggccctggtagcatcaatctatatt

SEQ ID NO: 137410 - DNA, 192 bp, Glycine max
  unsure (1)..(192): unsure at all n locations
  Clone ID: PAT_MRT3847_95090C.1
cngcgcancacaattacnnccacnagcnattcngcgaacttaacatgaatcggcnaaaagtanatctaccatgtgatngagggnagcnnnaccngatgananacgaanngccagntgtgttncaanggcnganggnggcnattnaagttgtnncncaagccattnatcccaagnnagaatntgcctcnnncc

SEQ ID NO: 137411 - DNA, 479 bp, Glycine max
  Clone ID: PAT_MRT3847_95091C.1
ggtcgtagcggagggagggaggcggaaaggatttgcggatacaggtgatactggcacacaacaggataacattaagggtaccgtacagttatcggacaaaacctatggccaggtacagtggtattgtgtcggaaggtaaagcacagcagcagatttaacttacttatacaaggaaggacccaaaggctacgcggacacggccaacggcgcgagggccactaatagtggtgtgttggcgattcgaaactggggcagtaataaggagtggtgcgagtgttcatggtgaaccaccaacgcgaaacggttgtgataatatagactctatcaggtagtaagcgggtgcgcttgcagcgtggaatttacacacaagtggtgatacaataagtgaagcactagaactggcacatgggcacttaacacgagcatagagagcacttgcacatgggccccaccaatagaagacaaagtgctgacaacaa

SEQ ID NO: 137412 - DNA, 291 bp, Glycine max
  Clone ID: PAT_MRT3847_95092C.1
aaaaacaagagttcaaatgctgaatccccttcttctccacgatttatggaggaaggaggcacaaaaatgtcgaccctctcttacaattctgaggcaaaaaaaaatagagggaagctctcgttgcattgaacgccaacttagatctctggcccaaagttgctatataacactactccccgcgaggaaacttttttatatgatgatcagcctccctgaacccaactacggtgaattgagggacataaatattagggtctttcacatctatttatcctaagaccccttgggcag

SEQ ID NO: 137413 - DNA, 380 bp, Glycine max
  Clone ID: PAT_MRT3847_95093C.1
tttagacaaatactattctaatacatagtaactgtttagatgattcccggtgctttattacttcatggaagccgtaactctaatgcacataaataggtgactttgagtccacagaaaagggcgatttctaaaaagttcaatatttaaacaaatctcacaagaattagacggcttaaactaatttgaaatcctacacttgcttgaacctttttgaccctattatcataacaatgttaatcctcttttttctacacttcttcattcaaatattctttaccttcccagccaaaaactatgacaggcctagatactggaggtggatttcttggctctgctacaatactcagtatgtcaagcacactttgaaggggaaagtttgg

SEQ ID NO: 137414 - DNA, 351 bp, Glycine max
  unsure (1)..(351): unsure at all n locations
  Clone ID: PAT_MRT3847_95094C.1
ggtttagccttttttttttttttttttttttttttttttccaaacaagctaaatcatataattcaaatcgcattctgctccaaaaaaaaaaatgagagagaaaaaaggccccctccccttctcaattccatctaaagggccccccgttgcctcccgannctctttccccccaaaccgggcaagccatgggaacccaagccccccccctgctttggccgctatcggaaacttttttcttgccatctttactggaccaatggcaaaagcccccttattccccccccggctatgagctgcagcacctctcggaaaactagaacttattaccgattctggaaccccaccaccttt

SEQ ID NO: 137415 - DNA, 516 bp, Glycine max
  unsure (1)..(516): unsure at all n locations
  Clone ID: PAT_MRT3847_95095C.1
ccagtgcatgaccttcaactggcttgtagtgctgttttactgctccccttatcattttcatttttttttttttaaacttctgcacacaagcacttgctttcctttttccaagcaatatatactatagtaactggaagaggtctatccgggtcagcataattttctagtatgtgatgagttaattttatagaacaacctagcctacaagttacaacaggctgtatttaatcccgttgccacttctctataatgcccctcctccaatggtaagggttgcatttttaatttttctttctattcttgggaatctcattagagatcaaaagtggatttttttttttaaaattgaaaatgaatgatcctgtcacaacttgggttccccacatattatgcccaatatgtcaccgatgggtaaccatcagntatatatatatatataatcctttttcttgtcctgttttgatcaacaccatctgttcattgtttttgagttttcttgccgctaccatttttact

SEQ ID NO: 137416 - DNA, 1244 bp, Glycine max
  Clone ID: PAT_MRT3847_95096C.1
atcgtcagaaatagatttggtgccatcagagaatgaggttcagcctggtgaagatttccagcagaatagcccaaaaaagaaaaggtgcaagttggaaccagctggggaaggggagtcttgcaagcgttgtaattgtaagaaatcaaaatgtttgaagctttattgtgagtgctttgctgctggagtctactgcatagaaccttgtgcatgccatgattgcttcaataaacctattcatgttgagactgttcttcaaactcgccagcagattgagtctcgtaatccacttgcatttgctcctaaagtcatacgaagttctgattctgtatctgaaattggggatgaccctaacaaaactccagcttcagcacgacacaaaagaggatgcaactgcaaaaaatcaagctgcctaaagaaatattgtgaatgttatcagggtggtgttggttgctccattagctgtagatgtgaaggatgcaagaatgcttttggtagaaaggatggttctgctcctgtaggcatagaaactgatccagaagaaacagaagcctctgacaagggtatggtagaaaaaactttacagaaaactgaaattcagaatactgagaatcatccagattctgctacagtgtcaacaccattacggctttccaggccattgcttccattgcccttttcatcaaagggaaagccaccaagatcttttgttacaaccatctctggctctgcattgtttgccaaccaaaagcttgggaaaccaaaccctctttggtctcaagctaagcattttcaaactgttccagatgaagaaatgccggatattttgcaaggtgatagctctcctatcacttgcatcaaaacctcttctccaaatggcaagaggatctcctctcctaactgcgacttgggattatctcctagtcgcagaggtggcaggaagttgatattacaatccattccttcatttccttctctcacccctcacccttagaaatggggaaaattttcgttgtaagttagcccccctccctttttaatctcatgtttttagtttgttgctttaggtttatgtatattcagttcagttttactttggcaataatatgttgcattcctttttaagtatacgatttaagcattcccgggaagtcattaccgggattaatctttacgtttttctgttatgattttggacatttctttataaataagttcctgatggtacccgttggaggaattatctt

SEQ ID NO: 137417 - DNA, 403 bp, Glycine max
  Clone ID: PAT_MRT3847_95097C.1
cattcacagggatatcaagagtaacaacaaaggacatgatgcaaatctagaggcaagaagaggagaattaagaggggaaaggaggatgattcggaagaatgagaaagataacatgatggatggatagtatggatacattgaacgagaaaatggagaaaatcggaaggtagaagagaagattgacatatacagatacagagaggggcatatagagctactaagtggcgaaacggcagtagacacttggttagaagaatcaatagacatagtcgaatggataaggaaaaagagaagaatgaataactgggaagaagcactggaacctgctatagatagtgatggagaacaggacaagtaagagatgcagatagaactccggatagatcttgcgagtactgcaaag

SEQ ID NO: 137418 - DNA, 415 bp, Glycine max
  Clone ID: PAT_MRT3847_95098C.1
aattgcaccaagcttctaaaatccgcaccctcgtctcatccctcagttcctcctccgaccaaacccgcctggccgccctccgccacctacgccgcacctccgccgaagaccccgccgctcgccccctcatttccgccgcaggcgccgtccctctcctcgcctccgccctctactccccctcccaccccatccaggaccacgccgccgccaccctcctcaacctctccatctccgaccgtcgccccctcgccgcctcccccgacctcccggacgccctcgcccacctcctctcccgccacgccacctcctccgctgcctccgccgtccagtgcgccgccgccaccctccacagactcctcgccgtcgactccgagatccgacccataatcacctctaaacccgacatcatccgggc

SEQ ID NO: 137419 - DNA, 345 bp, Glycine max
  unsure (1)..(345): unsure at all n locations
  Clone ID: PAT_MRT3847_95099C.1
cccaaaaaagaggggggccnaattcngcacaangattgactatgncacatcangaaaagttgctggatttatagctgaaacaattcanggagctggaggagcaggtgaactggcacctgggtacctaaaactggtctatgacattggacacaaagctggaggcatctgcattcctgaagagagacacaaggggnttgctcgttttttaaaccatttttggggaaangagaacaaaaggagncttttttttttttaggaaacaggaaaggggggtatggccaaggggntnnncnnnnnnnnnnnnnnnnaaaaaaaaaaaaaaaaaaaaanggggggggggggggg

SEQ ID NO: 137420 - DNA, 607 bp, Glycine max
  Clone ID: PAT_MRT3847_9509C.1
gaattcggcacgaggtggttagagggagggtgaggatgcagggaattaaattagggtttacaataatgttggtggttgctggcattgtagcagtgccacgcatctcgggtcaagtatgcaatggtaatttgggtactattcaagaggaatgcgaggagtactataaacccggagggccaactattccgccatctacagaatgctgcaacgctctgagaaatgttgatgtgccctgcatgtgccgacttgctaacaattttcagtcatacttcagcgggggaaaagttgtctataccctcaggcagtgtggaaaagatgttcctcccggaaccacctgcggaggttaccgtgctccccctgcttctactcaggtgtgaacgtcagcattgaagacgtatgcatacaacttcccttacctcgggatccataaataactaaataagccaaacatggcctgcatgcgtcattgcgtcctacatattgtgtttttctttttctgtttatgataaataaatatatttcactggtttatctatgacaccgacttcaatgttaattcagcagcagtgatataaatatcatcccattatatttaaaaaaaaaaaaa

SEQ ID NO: 137421 - DNA, 1015 bp, Glycine max
  Clone ID: PAT_MRT3847_950C.1
tgagcatgtgtatttttaatctttaaaaaatacagtacacatatcaaatctttgcatctatatatatgacacagcccaacactgtaagaaagcacaagtttcagtctcaacccaagtcttacaaaaaactatggcattcttgggggagacaagcaatcaggcagttgtgaactccacattaggttttatttttccaaatggatccattgttcacaacaatagtggtgtttcctttcaagcttccactccagttcccattcgagtacctcaccataaccaacgcttccctcttcaagcactaaagataaaataaatccttctctataaaattccttacaactatcagtaacaaatgttgatgttggcggagcttcaagtgcaattctatatttagaacactgtatttcacggattttgtataaatagaacttgtcctttatagagccttgactgtggaaattggcattggcattaatggaatcacaatctcaaccatacagtccatttgctcatgttgtgctacacacatagcttctttaagttcagcctatgtcatcacatgcaaatgtttgacacgctggttggaagttgtcaaaactcggtctagtcggatacactcaatttcccggttgtactctctcactttccaatacactttggtctgtctattatatctactttcacacagtcctatacctgcctattgttctcacacgctgcccaatgtttgtttattgctttctcgcatagcccagtacattgctttttttgttgtttacgctactttttgttgtttgtgaacacctgaatataaaaatagagaaaaacaacacaaaataggatttgaaccaaaggtcatcaacttttctaaaatatttaaagccactgcacattttgacttgcctcaaaataagtggcacaaaatcttgacttgcctccacaacctgcacattttgttagtaacctaaagagatcaaaaatattatttgtatcttaacaaacatgaactcgagcc

SEQ ID NO: 137422 - DNA, 361 bp, Glycine max
  Clone ID: PAT_MRT3847_95100C.1
accacgcgtacgtccagactgtggtgagaatccagacacgcctggaggtgaaccctgtgtacataggcctgatgattatactaaacggaagacgagaacgagtgccatcaccaatgggagccatagaggatatagactggggccagttctggatgaaacagatctatgcttagatagttgacctgcgctagtatgaaggacctgacgtgatgtagtatccttcacttgaagacactgagctgagcaatggatggtgggatctttgaagatatgactgaggctggcctttcaacatggcaaggttcactcttaatcgctatagggattcaaggttatggactttttatgtacctacacttta

SEQ ID NO: 137423 - DNA, 381 bp, Glycine max
  Clone ID: PAT_MRT3847_95101C.1
cccacgcgtccgctggctttgtaattggtgggaagcaactatttgtgatattggtggcgcgcttatcatcctgcccacagtttggttggacaactttacaatgtcataaatatagaaactatattccactaaacagtgagcagaaaacgtgagtcttcatagtgctcgtatgaataaaacatgtctctgcaccaaatgattagccagccatccttctcaaaatcttcacaagctttttatctaccccagaattcaaggcggtgtattttgattatgttggggaaggtattatagttagtttttaattagttgaaaaatttatttgattattttataaataaactcttttaatagtttttagcatttctttaaaaaaaaaaa

SEQ ID NO: 137424 - DNA, 477 bp, Glycine max
  unsure (1)..(477): unsure at all n locations
  Clone ID: PAT_MRT3847_95102C.1
ataatntgagaagnnaaagnnnnctacanntgtgnnaatgtttttctttttttttttttcaaccagcaaaaaattcatgcctttgtatttttttttgggggttttactatcttttggatttttttcaaaaaaataataggagggccaccccaattccccttactcaagtggggggttgccaatttcaaaattcaaagtattttactttgtttttgacaaaatcatgaccccaaatttttcagggctttcaaggcccctttccctaccttcctccaacacaaaagaaaataaggcgatctgggttaattaaaaactgtctttctactcctgggaatccaaaccaactttttttaaacatgacctaataattttcgaaagctttgcacaagcttccaaacccaggtgctttccctaattaatttttgggggggaccattccccaaaaacggggagttgggtgatttcatagcgagaagg

SEQ ID NO: 137425 - DNA, 2351 bp, Glycine max
  Clone ID: PAT_MRT3847_95103C.1
aatttattaaaaactataaaataatgagtgaagctcattaaattagtaggagtaaggcttgcacaatttgtgttcaataaatttcaactacaagtgtgtttaaaagaatgtattagcatttagtatctagttttacttttcaaccaatgaatattatttttcagttttcttttttattcttttctgggtggctggttcgttaaagcaaaaattgatgatcacaaatttttttaatgagtacactttttttatttttttggtaagtttgaattggactgaatggattttacctctactgtggcccccacgcgtccgcccacgcgtccgccacgcgtccgcccacgcgtacgtccacgcgttttattaaaacctataccccggcgatatctctctctcacacacacagtctcttcttcttgctattccttcctcgttatggagtcgcgagtgctgtcacgcgccggaaccttgtcctccctccctcacctccgcaagccgccgcgggaggccgtctccagcgcctccctcgtcgccgtgaaggccgtgggctccgtcgcggacggcggaaacctgatttgggggaggcagctgcgcccggagctctgctcgccggtgctgaagaaggaggctgtcctcctccggccatgcctcgccgccgcctcctcgccggccgagggtagtgattccgccggagaagcaaaggttgctccggcggggttcttcgacaagtacccggctctggtcaccggatttttcttcttcacgtggtacttcttgaacgtgattttcaacatcctcaacaagaagatctacaattacttcccctatccatacttcgtatcggtaatccatttattcgtgggagtggcgtactgtttggtgagctgggccgtgggccttcctaagcgtgctcctatagactccaacctactgaagttgctcattccagtggctgtgtgtcatgcattaggccatgtgaccagcaatgtctcatttgctgcagttgctgtttctttcactcataccattaaagctcttgaaccattcttcaatgctgctgcttcacagttcatacttggtcaatcaatccccatcactttgtggctgtcactggctcctgttgttattggtgtgtccatggcatctttgactgagctctcgttcaactgggtcggcttcataagtgctatgatttcaaacatctccttcacataccgaagcatctattcaaagaaagccatgactgatatggacagtaccaatatctatgcctacatttccatcattgctctaattgtctgtataccacctgccgtaattttggaagggcctacactgttgaagcacggcttcaatgatgccattgctaaagtaggtttggtcaagttcgtctcagatctcttctgggttggtatgttttaccatctctacaaccaggtggctaccaacacactggagagagtggctcctctcactcatgcagttgggaacgtactgaaacgtgtatttgtgattggattttcaattatagtctttggtaacaagattagcacccaaactggtataggaacagccattgcaattgctggagtggcactctactcgttcatcaaagccaggatggaggaagagaagcgacaagcgaaagcagcataagaagttgtcaacctggaggatgtcttgcactgtaaatcaccacaaatttccttcaaaataattgagtgactggttcagtgttgtactatccttgtgatagcgcgcttttatttttccttctatttttgtcaaatattttctttttttcctttttctctcttcattcagaaaacaatgtctcgctgctgattttcagtcttcttgtgttgactggaaaatgatgtacccttgattcccataaagagctattgaaactattatattagctgaaaacataccatgatcagcaatctactgcagttgaatcaactaaaaggtaaaagttcaaagaggaaagtagttgatatagaattcgaataccaaaaaaaaaaaatgcgacccaaatccacgagtcgggactctgttctgtgtctcttacgttccctaagcttaacttttaaccacttaactgtgttccacgaggaatagatagacttttatgtgtggctgtgatcgttccaagtgttaaaattatggttttgtcctttttcttttttgatgcaggtacttgaaagtgattttcagatctacaattacttgctcatgaatttcatgtcttgatgttaattgtgattggatccgtgaaatgttatgtgcaaacatgtttctctgtcctttgttaaaatcggttgttaatgaatagtttttttttgttg

SEQ ID NO: 137426 - DNA, 292 bp, Glycine max
  Clone ID: PAT_MRT3847_95104C.1
gggggggggaaaaacttctttgcaataattaacatgataccccggtttcgatttgcttgctcccgaaaaccgctaaaaagttcctttttttaaccctacaaaacttttcacctttttttttggacccggaaaatttaacctgcaaagccccccaccccttgttaaggagggtttttttgttttgcccaagggcatgtttttaggacttacaatgccccccgggccgattttcgggctttcttacccgtgcttgccacgtttttgctttttttttggggcccccaaattcaat

SEQ ID NO: 137427 - DNA, 363 bp, Glycine max
  Clone ID: PAT_MRT3847_95105C.1
tgcttacagagtcccacggcttgattatgtttcgcaatttctttgctaccccttctgcctgaattagctattatagttcctttgcctttatagcctcaatggaagaagaggactttgaatgctgcctgaaagcattgaaaggaattagggttattgctgcgggtgatctcattcagcctcctagatgctgtcttccctactcttgaccagagtttctcagttgttggatattccaagtactcctccaagtcaaggaccacttggaatgcttgctctaaaagtctatccttgcttgatgcaatgatctctttgggtctctattgtatatcttcaacacctgtctaccaaactttaactaaacct

SEQ ID NO: 137428 - DNA, 568 bp, Glycine max
  Clone ID: PAT_MRT3847_95106C.1
caaaacccttcattaaaataagtttggaaaaattcttggaaaaacaatttttcagccctggaaaaaaaaacaccgggatttgggggaatggggaggacaaacattcccgtttttaaaattacttcactaaaacaaaaaaactttgcaaaggaaaaaccctttaacctaaagggggaaattttaaactttttaccttagggcaaaaaaggggacccaggcccttaaagccaaggggggggattaaacggcaacaaatatgggaaacctcccctgggctttttttagggaggggcctgggcccccgggtcctttgaaaaaacccaaacccccacttagaaaaactggcagggccatggtttcataaattcggaaaccccctccctttaggaaacctgggtttaagaacattccaaggaaacaaaacaattgggccaaggcagggggggcaaggaaaagggggcttgggggatgaggggggaaaccgcgaaagtaggtgtggttagggggggggggcatgggggggggggggctgggggggggggggcgggggggggcggggggccggggg

SEQ ID NO: 137429 - DNA, 428 bp, Glycine max
  Clone ID: PAT_MRT3847_95107C.1
gaggaagtgaaggccagatatcctcatgttttatatgccgaactttaccatgtagctggcgttgatccagtagaggtcactggtggtccatctatggactctcttccagggataacattgcattgctatatcctgatgatgggtgtcttcctgatgccgaacatcatatggacggatagaggacgccaaaagattgactgaagctttccacagacttggctctatgtgaagatactaattcgcgcaagtatgatgacctatctgcgaaggctgcagatgctttactcgcatattattgaacctcatactaaaaactcagagctaggctgtatcttcaggaatcatttgtacatcatggccaagggggttaccggaatcgctactaggctaacacgcgagatctcggattacttacttgaactgatcta

SEQ ID NO: 137430 - DNA, 203 bp, Glycine max
  Clone ID: PAT_MRT3847_95108C.1
ccacacccttccggccagagcaaaaagaaagattcccagcctaggtgaaagatggaggggaaggaccaggttttgtcgttggaagcaaccaagttccccaagggccagccatttggaacggcggcccaaagccaaaacaacggcagaggcctaccagaagccggccccggcccctttgtttgacccaccggagtttacgtatt

SEQ ID NO: 137431 - DNA, 442 bp, Glycine max
  unsure (1)..(442): unsure at all n locations
  Clone ID: PAT_MRT3847_95109C.1
ttatttttttttttttttttttttttttttttttttcttttgggggccaagacatccacaaagccatcaaaatgtcttaccctacntntatttttatttttatctgattttaggatacatttacaatcccattatggggctctataaaatcatcatctctcacattttactcattcatacttgggctcaggcaactttttttgcaaaaggttttccattcggaatctgctgggcgggccccaggataaaggttccagattcagaaatccaattgcccccaccctttattggtggaggaggacaaggttcccccattgattgttttcgactggaaacagacaaatggcccaactttttagttggttgtgaaaccccacgttcagacctccctttgttcatagaaagggggctggcctttcctggctgaccaatatttgggttt

SEQ ID NO: 137432 - DNA, 372 bp, Glycine max
  Clone ID: PAT_MRT3847_9510C.1
attctctcttttacattctgtatcacttcttcattaaacctaagggatttggggatacttttaatacatttaccggcaatcccccatttatttatcctagttcctcgctttcttcttgatgacgctgtcctttctttttgatagaaaataacacccttactactattactatactacgtggtttcaccaccaatcaacaatggttttaacctcttctcccacacactcctctacacgcttcgttcgcctcccctcctttttacactccaaccaccgtttagctttcgttcgtagagtccgttataacctttcacacccaaatctccataatctcaccatttaaattctctttcccaacttcccactccccac

SEQ ID NO: 137433 - DNA, 269 bp, Glycine max
  Clone ID: PAT_MRT3847_95110C.1
caattcaagttttcttgttgtttatatttcagatgctgacaccctccaattggggactgtattactcttatttgttatgaacgtgagctgctcatagatgtctttgagaccacctatgatcacttcctaaacgccgcatgccaatgtttatttgattgcgctgcctcttgtaagatgaatggcactcgaatggagcaggaattgagagaagagaatccacgcctaggagaagatgagtctacaagaaactcaccaccacaagaagccat

SEQ ID NO: 137434 - DNA, 729 bp, Glycine max
  Clone ID: PAT_MRT3847_95111C.1
tgcccaatggccgtccgctcagctctttccttcacaaacaccatcaggactttcccactacacacccaccgtctctctttttctttcagctccaaactcacgtgcagcaggtcctctctcaaagacgaccaacaaactgactcttgttcctctaatactaccacggtttctgttgcacccgaaaacgattctgagacccagcagcaggaaatggattggaagagcgacgaggagtttaagaagttcatgggcaacccttccatcgaagccgctataaagctcgagaagaagagggctgacagaaagctcaagcagcttgacagagaaaccaccaacactaaccctcttttcgccctcttcaacaacttggtgcgtgataacttgctcaatgaaaaggagaggctgcaaaaagctgaacaaactttccaggctcttgatcttaaccagttaaagagttgctttggatttgacaccttcttcgctaccgatgttcgaagatttggagatggaggcattttcattggcaatttgaggaaacccatcgatgacgtcattcccaagttggagaagaagctctctgaagcagcagggcgagaggtcgtcgtctgggtcatggaagaaaaagcaaatgacattaccaaacaggcttggttgtgggggcaacccaaagcagaaaatggatctccaatttgagtcaactaaactgagtactcctttgggctattttta

SEQ ID NO: 137435 - DNA, 244 bp, Glycine max
  unsure (1)..(244): unsure at all n locations
  Clone ID: PAT_MRT3847_95112C.1
tnaggatgatcctaaagaaaagcacagaaggcatgacgatggccttggagactatcgtatgggaaganagcatgcaagggatgaggatgatcttggagaacgaaagcatgcaagggatgaggatgattccaaagaagggaagcacagaaggtatgctgatggccgtggagagagaaagaacttgagggatgaagatgaccgtgncagagagaaagcgtggaagggatgaagattaccgaactgg

SEQ ID NO: 137436 - DNA, 2121 bp, Glycine max
  Clone ID: PAT_MRT3847_95113C.1
gttcttcttctgttcctttctgtggccatggatggaaagaaattagagtacaaaggtgaggaagcactaaaggagatagagaggctgacaatgaaggctgctgaagttcaagaaggccttttgaaacagatcttaactcagaacagggaaactgagtatttgagtaagtatatgaggggagaaaaaaatataacagacgtagcagagtttaagaggtgtgttccagtaatcacttatgaaagaatcttcccttatatccagaggattgcaaatggggaagactctactctcatcaccagtcacccaataacagaaatgttatgcagttcagggacatcagctggagagcctaaaatgatgccatcgattgtggaagatctagaacgccgtacctttgtgtacaatcttatcacgccaatcataaatcagtacgtttctgatcttgacgagggcaaggcaatgtatctgtactttgtaaaagcagaaatgtgcactccatgtggcctaccagccagaacagtgttaacaagctactacaagagcaagcacttcaagtgccgcacacacgatccttggaacgactacacaagccctgaccaaaccattctatgcaatgacagcaaccaaagcatgcattgccagcttctctcaggtttggtccaccgccgccacgtcctacgcctcggtgccgtcttcgcctccgcacttctgagagccatttccttcctggaacgaaactggaggcacctttgtgaggacattcgaactggccaactcagttccttcataacagacccttcatgccgttcatgcatgtccacattgctttcatcccctgaccctcgtctcgctgatgaaatcacgagaatctgtagccagaagtcttggaagggaattctgtgccagctttggcctaaggccaagttcatagaggctgtggttactggctccatggctcagtatgttcctgctcttaagcactacagtgatgggaaattgcctttggtttgtaccatgtatgcttcttctgagtgctactttggggttaatctgaagcctctttgtgatcctggtgatgttgcttttacgctcttgcctaacatgggttactttgagttccttcctcttggacataacgggacgctgttgatggactttgatgaaggggagcaggttcccaatgataagcttgtggatttggtgcatgttaagcttggttgcttttatgagcctgtggtcactacttttgctgggctgtatcgataccgcgttggtgacgtgcttcaggtggtaggattttacaacaacgccccacaagtccgtttcatctgcaggagaaacgttgtgatcagcgtcgacaccgagaagaccaacgaggaggacttgcacaggggcgtgacaatggcaaaaaagttgctggagccctacgatgctctcttagtggagtacacaagctaccccgacacttcttcgataccaggacactacgtattgtactgggaaattcttcattgcgggataaagacgacagagtcatcacaacaacttcaacttcttgacgcaaacgtgcttgaggaatgttgcattgcggtggaggaacaattggactacgtatatagacgatgccgtagctatgacaagtctgtggggccacttgagatacgtgtggtggagccagggacgtttgatgcattgatggacttgtttattagccaaggtgcttccatcaatcagtacaagactccaaggtgcatcaagtctaagaaagcactcaagttactcaagtctaaagttacagcgtctttcttcagccctagggatcccaaatggtcccctaagatgtgttcaacttgaggattattatgtatggtgtcttattgattgcctcaaacctcaagtgattggtagttgtaaaagaatttggctctggctggttaattgataatttgtactcataatcttttctgtaaggaaaagcagaaacattttaaggctctggtaccaagaagttctaaacatatatatatccgcatcaatttaagtaaagtaatatatagtgaagtgtagtatatgcccaattatgaatttaaacaaagggaagggggggggggggggggaaag

SEQ ID NO: 137437 - DNA, 360 bp, Glycine max
  Clone ID: PAT_MRT3847_95114C.1
ttatttttttaactatttgagtaaagggtatttaaatataattattaagctgtgtaaatttatctttaatagtatagtatatatttgaggagttatactactattattgacttatagatgagatatttgatattttaaattattttgtatcatatttattatatttgttactgattcaatccaatctgctttagattgaattgaatttaaattttaaaccaatctaattgaatgataaattaagaaaactaaagtaattggactagatgatatttctcttcaaaactgatccaattcagtatgtgagcatccctattatattgctgtttgtttgaaagatgcctttcattttgttatttt

SEQ ID NO: 137438 - DNA, 274 bp, Glycine max
  Clone ID: PAT_MRT3847_95115C.1
ggctcgagcgcgactgggtattgttatttgcagagcggccttgctgtcaccatccactgggattcagccctggtcgcttcgattcgtctgtaaaggagactaccctccggtagatggaaattgcgcttgaaggcgtgtaggacggctaattcgtctcacgagggaaaccaacggcacgtgcctttggggggaccgggccccctactgcttgccatagaaccgtcggtgggcgcacgcgtaggttctagcccgcattctgacttacaggcgttta

SEQ ID NO: 137439 - DNA, 283 bp, Glycine max
  Clone ID: PAT_MRT3847_95116C.1
ggcatgtgtgtgcatgaaggaaaagcgaacagaaggggatgcatgggactgatgctgtcgactctaccttcctcgtcagaagagcctctgtttcactatctcgcggaggatactgaactggggatgtactatctcaagggatcatgccctcaagctgaatacatactaaactaacacgcgaaggtgctattcctgcgccacttgatcactgagtggtcctgaacaagaaacatgacacacgaccgggccttgctgaataggcttgctctactgccgctctact

SEQ ID NO: 137440 - DNA, 346 bp, Glycine max
  Clone ID: PAT_MRT3847_95117C.1
agggggtgagcgaaaaccaatatgccattgttgcatcattttttggaatgccagatagaccgtaaggggggacgtgcaggaatcaccgaggtgcatttcttgccttttaatcctgtggacaagcgcactgctattacgttcattgacaacaatggtgactggcacagaagcagcaaaggtgctcctgaggaaatcattgaactttgtggcctcaagggagagactggcaaaaaggcccacaccgttatagatgagtttgctgaccccactctgcgttacgtaggtgtatcactgcagactgactctgagaagagcatggatactgcaaattatgcgctgaaaaagc

SEQ ID NO: 137441 - DNA, 218 bp, Glycine max
  Clone ID: PAT_MRT3847_95118C.1
ccacgcatccgattaaaaataagaacgtttatatcaagttacaatactcctaataaacccgcctattttgtaaaacttaccggcccccacccaaaacacttcatcttacaactctcattctctcaactacatatcaaaaatcctaccctaattaaatctacccattcctttctatctaacaaccttacatatctcactatttcaatcataaaattttc

SEQ ID NO: 137442 - DNA, 163 bp, Glycine max
  Clone ID: PAT_MRT3847_95119C.1
cttccaaaacatacgtcattagttgcaccttagagtatttctaaatctttctaggattgataaaagtctatttagaattaagacccaataatatcatttgtcatttgactaaatcacagaaaatacaagtttaatttgtcttgatataaaaatttctacaaag

SEQ ID NO: 137443 - DNA, 731 bp, Glycine max
  unsure (1)..(731): unsure at all n locations
  Clone ID: PAT_MRT3847_9511C.1
ctctcttccttctttctctttacctcgtcattggcattgccagtggcgttcaaaccaagaccttccacttgcagaggaaactgcagcatggcaccccggagtgcctcctcccccaatcaagaaaggagaaaggcgctattatactggaaatgaaggacagaggtgagtgctcagagtcagagagaaaaggtgattgggttgagaaacagttggtactggatggtctccacgttcgttcaattcaaaatcacattcgaaaaaggacctctagtagccaaattgcagattcctcggaaacccaagttccattaacttctggcataaaattccaaactctaaactacattgtgacaatgggattgggtagccagaacatgagcgtgatagtagacactggaagcgacttgacatgggtccaatgcgagccttgccggtcatgttataatcaaaacggacctttgttcaaaccttctacttccccttcctatcaaccaattctgtgcaactcaataacctgtcagtctctcgaattaggagcatgtggcagtgatccatcaacatctgcaacttgtgactatgtggttaactatggtgatggatcatatactagtggggagctggggattgagaagctgggttttggaggcatttcagtgagtaattttgtgtttggttgtgggaggaacancaaaggtctgtttggaggagcctgagggcttatgggggtgggg

SEQ ID NO: 137444 - DNA, 446 bp, Glycine max
  Clone ID: PAT_MRT3847_95120C.1
aatgaaacatacagtgggggccaaagggagagcaattttcataatgttcaagttaaggacctttacaaatgcttacatggagcttgctatatgactcttgaatactgcccggaaccaacaaaccggctcctggcggtaaaaattaccttcaaccaagaaatgtcttggctaccgaataaaatctgagagaactcgttctttccatgaatacatagccaaaacacgatcctcacttatgcgaattgcgaccaaaaaggcctttggcatgagggttcacccttattggcgtgagacctacacgaggaggagaacatcaacaaacccttctggctggactacaaagatttgttaatccatagaacaagagatctctggagcctgaatatggttttaaagtcttgcgcaatttcacgaacaacagcttaaaaggggagcctgctgatcaa

SEQ ID NO: 137445 - DNA, 416 bp, Glycine max
  Clone ID: PAT_MRT3847_95121C.1
cggactcgtgggttagtggacaaaccttcaaatatgatataattggtgctgtgtcacattctttagaagattttgctgaaaaggaagatcacgaaaaacccaaaatgatggatgccagattgagacaaagaatatatcctcaatgcaatgaggttcacgctcagatggaaacaaatatggtcaaatggtctcttgatgacgatgaaactcctaaaggttccatgttggatcttaaaatttctcaatgtaaaattgcacttcccaagaacacagtcggaggtaccattctacgtattgatctattggcaaaacttttgacagatggcaatactagagcaagtgttgctttgctgcgcactcatcgtattgaagggatgatctaaatggcggccacagttggtattaccgagaataca

SEQ ID NO: 137446 - DNA, 1325 bp, Glycine max
  Clone ID: PAT_MRT3847_95122C.1
tcgcaattggcttcttccttggctttgggatctacggctgcgagaagacgacagaaggggtcatacgtacgctttcttgcaagagaagcagatgaatctcgtttacgtgaagtgtgtgagagtttccttggacctccaactgggatggttgaggaaacatcttcagattcaaagaacttagcatgggatcctatggtgcttggaatgaggaagcacaagcttcttagggaagacattcttccatccatggcatcaaacagaaaagtccagagattacttaatgaattcatggatcttttatccgaatatgagatcattgatgctaatcaagagcaatcaaaccccacagtaccaaaatcatccttgccagaaaccaatccaattgagagcagttcactagcaacagatcaggagcacactgctccaccaaaattggatcacaataccaccactgcaaaaagagcaaataaatttatgaatgcccttctcagatggtgaaataatcatctgtgtccacgcgtacccccacgcgtcagtacggctgcgagaagacgacagaagggggagagtgagtgagtggttctagtgcagcaacaaggtttagtgccaccaaacagttgggaaatgggtcgtggggtcagtgctggtggtggacagagttccttggattatctctttggcagtggggtacctgccagcagtgcaaacagtcagcctgcaaatggtgctcgcactcaaaatgcaagtgctccttcaccaccggttgataagcaaagtccagcaccagcaacgcaagcctgcacctgcagcagcagcagcaccagcaccagctgataagcaaattccagctggaattcctggaagtctcaaaaacaattaccatcgcgctgatgggcaaaactgtggcaactttctcactgatcggccatctaccaaggttcatgctgccccgggtggtggatcttccttgcattacctctttggtggtcctccagggaactgattcatacctaccatgtgatgtatcatgtgtaaaatggatagtgttgcattgtgtttagaccagtggactttgtttcttgttcaattgaatctcttgacaatgttggtgtggcttgatggccaaactaagctgattcataggtttgttgttctgtgttattgtgtgggtttcgattaatgaaatttactgtgcgaatgagctaaagtggctcataaatgttctcttatctttattattgtgttcatttcatgatgctgactttattgaaatgaccctggggatcatatatagcattggtcttgttccatgtgatggaattatt

SEQ ID NO: 137447 - DNA, 337 bp, Glycine max
  Clone ID: PAT_MRT3847_95123C.1
gagggctgaagcagagtttcgagaaatgtcccaaggaatatgtgaacttctatggctgaacattatatttgaggacttgaaggtaaactgggatgaaactatgacgccacatcgccacgggtggtctgcaattaatatagcccaggggcgggtgcagtttgatatatctaaacatattgagggggagggatgttttattaaggaaaagctacacagcggcttgatttgcaccccatatgggccgacgggggggcaacttgcaaacatactcaccaatggtctgaacaggaggaggtgcaaaagacttctctccgggctgggaggggagaacgcgcac

SEQ ID NO: 137448 - DNA, 240 bp, Glycine max
  Clone ID: PAT_MRT3847_95124C.1
ggacccaaaagcgcaagacaagcacggggccaagcgaacaaagcaaaacgcgcgctcaaaggagccggcgcggcccggagcaacgggcaaagcacgaaacgcaagaagacggagaaagcgagcaacagacagaagacgaagcgggagcagcggaaccctgcagcagacgcccaccccaacgaagcagcctccctacaagctcgagcacgcggggcgggggacagcgctgcggagcaaagg

SEQ ID NO: 137449 - DNA, 218 bp, Glycine max
  Clone ID: PAT_MRT3847_95125C.1
gttacatcgaatccggcgagatcaaagtcaagtacgccatcgtcatcggcggtgccaccttcggttgcagctcctcccgcgagcacgcgcgcgtcgcgctgggcgcctcaggcgccgccgcagtggtcgcggattcgtgcgctacgatcttctttcgggactccgtggagaccggctaggtggtctccgcgagagtcggagggagcccgcctgcgagg

SEQ ID NO: 137450 - DNA, 382 bp, Glycine max
  Clone ID: PAT_MRT3847_95126C.1
cgtgttaggttttgcttaaaagaggggaaatggaaggttgacaagttaggaagcagaatgaggattttttattttatcattcttgaagtgtcattgaactcccccccccccccccaacttgcgcaggatatttttgtcttttgttataatgaattcgaaagaatgtcgtgagagatcatttgaagcaactcttgattcctcttagatatatcaatcttaatatagaccctatacaatgtttatttgaacttcattcctataacttcggattcattttatgtccagcacaacacattatgaaattttgtcctacatattgatgttctaattcttgaagcctggaacttgtttgcatgcctgtcttattacaattctgggcttc

SEQ ID NO: 137451 - DNA, 363 bp, Glycine max
  Clone ID: PAT_MRT3847_95127C.1
tgggaatcgtggccacaccggcccggaccggcccggacgaccgaggcgacccacccgtccggctgtgactcgatcttcttcgccggtatcttcttcttttgttgtgcgtgggcctgtttattctctcacctgaacaggccctgcagcggtgggaactgtgggtgcgaaagcgcctgcaagtgcggcaacagctgccgacgctgcaagatgtacccagacttgagctacaccgagacagccaccaccgaagacttgggcatgggagggggccccagtcagggctcactcgaaaaggcctgaaagggtggtccccatgagaacgatggctgccaatggagagctaactgcacccggaacccctgg

SEQ ID NO: 137452 - DNA, 545 bp, Glycine max
  Clone ID: PAT_MRT3847_95128C.1
gggattcaagggcagaaaaacaccttttgacttggttttttttcctttcacacccccggcacaaaaaaaaaactaaatgggacggaaggctaacaaaaatcaaaaatgggacagaaaaaactaaaaaaaaacaaatctaccttgggttaaccatcacatgggacaaggacaggacaaaaaaaggggctgccgacagccccccatggaagggaaaaaagctaattaactaactagttggggtccgccacaatggggggggaaactagggccccctctcggtttggcccggttcgagggggaaacggtggcctttataaaaaaaccaatcacacattggttttattttaggggtaacggtggacaaccctggttttttatttggttcccaaacacacatttgaactttgacgcaccggacaagcaactacctgagcccactggcttagccttgtttttaccgggggggggttatcaccggggggaaaaaaggcggaagggggactgcccgggggggaaagactgctgtcccaatcggaggcggcgga

SEQ ID NO: 137453 - DNA, 195 bp, Glycine max
  unsure (1)..(195): unsure at all n locations
  Clone ID: PAT_MRT3847_95129C.1
tgaatctnaagaagcttgaccaatgaccatggtcttcattgaggttcaacgtacacaacatnaatctgtatgaggttacgtggacatctatacgtttcggagttcacgtcgctgtgtgacgacngtggtgacatgcagaagagtcgtnnctacttcgntnaatgttgcatgcaaggtcacagnttnactgtgagc

SEQ ID NO: 137454 - DNA, 201 bp, Glycine max
  Clone ID: PAT_MRT3847_9512C.1
catcaaggaagaaaatccacagggataaggatgctgaaccaactgagtttgaagagtcagttggacaggcattgcatgatctggaaaataccaaccaggagcttaaaagtgatctgaaggatttatacataaactcagctgtgcaagttgatgtatatgggaaccgcacggatgttgtgattcatgtcccttacagattaa

SEQ ID NO: 137455 - DNA, 116 bp, Glycine max
  Clone ID: PAT_MRT3847_95130C.1
gtttgatgatgtttggagacggaggggaagatgcaaacgcgtcgttgtgaaaactgacaagcccgggggcgaaaaagtacgcgacgaatgtgaaacagcaccccaaaattgttgtg

SEQ ID NO: 137456 - DNA, 594 bp, Glycine max
  Clone ID: PAT_MRT3847_95131C.1
gggccggaattacccgcctcgaccccgcgtccgattccgacgatatcccatcttctggctctgaagaaaaacccgagtactctctctctctctctctcttttacgcactctctcgtgaacgtgcattgcttcgaaactttttgttttgtgttttgttgttcagttttttttggatttacgttttgattccatgcctctgtttctggatcgtggctgcgtgtgaattttgccatttctgtgtctggatgtgatgggttccctttgactgtgtaatggggtgatacttgtttgtgcggtttgagttgttgtgtctgaattttctgcatccccccatttgatttgctgtagttcgtttgcatgtttggaattttgtcttgcttacacttgaaacttgttcgttccttgcctgctcaaaagaagtgattgttttagcgtagctttttgttattgattccaaaatatatgaatccttagtgtcattttgtatggcgttggattaaacatcaatcagcaccttacattatgtgtttttattgctacagttgcaaatttggaacctgtattggtttttgtagggatggtagaagtacagtt

SEQ ID NO: 137457 - DNA, 430 bp, Glycine max
  Clone ID: PAT_MRT3847_95132C.1
accaaggatcccataacacagacaccttgagtgtgtaaaataaccaataagctgagttagagattttataaaggtgcactcaattatcattattgatgcgtggcccactccgattggaagaaacatgtagtcaatgctatacgctattactctataccataaatgttggatagttttggtggacgcatctgcattatagttataaaaagagtctaagttaaattcggagggtcctaactctttaagtcttatatatactgatatacttatgaaatgatcgaggattacttattctgactcctgtcctatttcgtacgcagaacctgaactctctcaggaccactaaatctatattcagcggacttttgccatgaatgagtatcccattatgcgtggaaatacttgactatttgggtcctaccaatacaca

SEQ ID NO: 137458 - DNA, 332 bp, Glycine max
  unsure (1)..(332): unsure at all n locations
  Clone ID: PAT_MRT3847_95133C.1
agtcgcangcacgcntacgtnagctcggaattcggctcgagntctcaagtggtttnggctccangagaggnnttttncnnnagaacaaggggaagnggntgttaatnnncgtagtnngctgnncatgcntaccacaggaaatgctaattnngnatnggngnaactntngggagatttanaggcccttgnnntagaatccntntcatggtnttncaaagcanagatcccttnnagctcggttcagaagntccntctgngattcaggnctcttggtnttntcaannnaancctgnttgnggtnctccaaccaactgcgnaatgaagctnccnnt

SEQ ID NO: 137459 - DNA, 358 bp, Glycine max
  Clone ID: PAT_MRT3847_95134C.1
ttaggtgaaaaatcaataatttgcatatttattttaagatagttggagtttctcgttttcaaagctgaaattagacaaattcaatgaaacctatcttcagttcatgctaatgagcatttagagaagtggaaggatcacagatattgttttgaaaccgtggacaactcaactagaagaagctgctagctgataatcttctgtcacactagtttcaccttcatgtaagctagtagcttttggaagaagtccaggatctttaaacatgagttgatcagcatcaaaatcattgtttggagtggtgagtaacttttcacccatgaatttagaatttgcacctgctggaaagcacaatgtctgc

SEQ ID NO: 137460 - DNA, 162 bp, Glycine max
  Clone ID: PAT_MRT3847_95135C.1
gttaaggtaggcaaaacactcctctacatcgtcaccgcaatgggacgagtgatccgcgcgcatcgaaagggagcaggctcaggacttcaaggactacacgcaccacagaaagggccctgcccgcatccggtaccaggatatacggagagtcgcaaacggctt

SEQ ID NO: 137461 - DNA, 216 bp, Glycine max
  Clone ID: PAT_MRT3847_95136C.1
gcttaatattattttgtatatactcgtagtaggaccaatatgaaaatttcccccaaaagaaagcgaggggtaaaaaccccttaaattcttggtgaaaggtttgaaacctacttacaaaatgcatgttaaaaaaaacgttcaaaaaaattaccaggggtaaaaattttggagggtctaaaaaaagggaaaaactttccccggggaaaatttctaaaa

SEQ ID NO: 137462 - DNA, 413 bp, Glycine max
  Clone ID: PAT_MRT3847_95137C.1
aaaagaacaaaagagggccctccataaaaattggtcttagaaataacagggtaaccccttaagcaaaagaaacggttagaacgggtaacaaataacccggggggggacgtgggtttcaaattcaaaagcccacaaacttaacgggaacagtgctccagttccgaaaaacatttcctttaacggggggggcgcccccctagaaacatttttgggggacaatggcgtggccccctttcaaattaccggaaatcaaacctggtcgatggttttttccacgaccctcaaaactaggatgggggggctgggtcccctcataaaagggggatggcccacggggaataaattccgggttttttgcatttggggggaggggtaaaactatatccagggccattttggggggctcctttggt

SEQ ID NO: 137463 - DNA, 388 bp, Glycine max
  Clone ID: PAT_MRT3847_95138C.1
gatctggagaatttgttgattctttttcgccctcgggtcaaatggaaaaatttgctgaagcgcagccgccggacgcaacatacaaactgaacatggggggaaagcgaatgacagaagtaaaatcccaacaaacccagaacccccgtgggagggcgacaaagacgaaacttaccaggggacaaaacaccaggtaaagacgggagggatcagaagacccaaggggcccaggggggcgttaggaaccattacgtgaggattggggacttgaggccctgagggcaggaaaggcactggggggaggggaaggggcaaatggcccaggggggaaaggggcactaaggctcgaaggggaacaccagtgcccatatcatcttgggagggcaagaag

SEQ ID NO: 137464 - DNA, 317 bp, Glycine max
  Clone ID: PAT_MRT3847_95139C.1
taccacgcgtccgaccacacttcctcccactctttctctcactcgtaccagaaaaaataactcacagatagcattaacaaaggcttctcaacataagctagatcgaactatttctaccattattcgtttttgaaacattacgcaatctttgtcagcattttaacgtcttatcctgtttaaaaattaatcaaatgaattaacagattacaacattcttctctatcattctggattatattaacagtcacttcaatacctgacgaactaccgatatcttaataactcatctactcaagaattatcatcatcaaactctc

SEQ ID NO: 137465 - DNA, 168 bp, Glycine max
  Clone ID: PAT_MRT3847_9513C.1
ttttcaagtaaagttggagaaccataatttattcaagattcatatcctacttgtacaaatagggattacccttttctccatagaaacataaagtacagttaatccacatgcactgcaacaaatatttttgtatgcaagcaggcccctctaaaagactgtcccttactc

SEQ ID NO: 137466 - DNA, 294 bp, Glycine max
  Clone ID: PAT_MRT3847_95140C.1
ggctcgaggtgacaaccagcttgttccatattatgctgtctttcttggagccctttcgccttgggcagccgatgcagaagagaaactgagagttgccgctaccgaaaccaacgaagagctacgtgcccttaagggagatccccccgatgcgaatgatgtccgagcagtcctgtccattggcaggcggcaactatctcgtgagttggaggctactccaatcgaagctttgcactggatatccccccttcctaaacagtggtcgcactgtgggaaggcaacaactgaatgacatat

SEQ ID NO: 137467 - DNA, 450 bp, Glycine max
  Clone ID: PAT_MRT3847_95141C.1
gtggagcttccttttaggtacggcattttccacttgacgaattggagctcgcttctctcaggggaactgtacagagagcagaaatccagcttaatcttcaaaaaagaagaggacatggagtcctgtctgtacttaagccaaaattcagtggcgtgctcggcgaagccctagatgtggcagctaggtggagtggagatgttatcactattgaaaaaacggttttgcaacaaaactacagttgttatgaacttcaaggtgaatatgtgttgcctggcaccagagatcgtaatcctgttgacaaagaaggtggccttataaaaaggcttatgtctggtcatattggtaatgctatatcctcaatgggcaggtggagaatgaaacttgaagttcgtagagcagaggttgctgagatgcttcccctcgctcggcttctttctcgaagtatggatc

SEQ ID NO: 137468 - DNA, 503 bp, Glycine max
  Clone ID: PAT_MRT3847_95142C.1
aaccccccgctcgaccatctcctattttgcggccgccctttttttgttgcgtgtttaaaataacacacacttaccacattattgcgacaattaaaacacgagaggaaattttgaaataagcaaagcatactcaacaagagggtcatgccgaacttcctttattgaattaaacaaacgattctctcgataggaaaacaccaatcccacatcatgcagaggattccgcatttgcataacatctggcagtggcctgtggaacataaaaagctggcctaatattattaccaccaatgccaaaatcttgagatattcccaagagaatatcaaaaactgtatactgtttgggattgtcaataaggaaactcaaatgccatgaagtttgattggcccactcataaccccacatgtcaaaaccattattgggaccacatacctctattgggaatatcaattcccaaaaatgtgggtcagatgttggccacttacatgcatcaaaatgcctg

SEQ ID NO: 137469 - DNA, 483 bp, Glycine max
  Clone ID: PAT_MRT3847_95143C.1
cagacacccgaccatctactagatgcaccaccccattagaaatcccaccccctcagaagctccgttcaaacaccctcacccaaagccaaaggctccatcacattcctaacaaacccgtcgtcgacgagaacaggcacgagaggtcgttcgtgactagcttctgcaacgtcaacaacgacactagtgacccgttggcgaccccaattcaaagtcgtagcaatcgtgagcatacaaggctatcgtacaaggcatggactcgcgaacaagggttgttggtgtgttgttattcctattcaaaaaccttggtttgggaagagggtgagctgaagggctagcaccgaggcttgttcgtgcgatctgaaaaaagaaccaacagagttcttattttgtttcaataatttgttatctgtttttatttttttcattgttgtaggcactattgttgaagagatttgatttttgtcttccttttagaattaatag

SEQ ID NO: 137470 - DNA, 310 bp, Glycine max
  unsure (1)..(310): unsure at all n locations
  Clone ID: PAT_MRT3847_95144C.1
aaaaccggccggcccacgccgtccgncaggcagacgaaaagtgaatggctactttatatcttaaatgacctcaaatttatgcggggcggctaaagcatagacagtgtaaggacaaaaaagagggctctattcttccaaaccacgacataagcagcacgacaatgccactccaaccagatgtacactctcctaatgaacactgcctattgtgcccgtactcccgcagggaaacgcgcaaggtgcacgctatctgagaaagcacacaacatcatatggctatgagaccattcgctgagagtagcgtggaaca

SEQ ID NO: 137471 - DNA, 1038 bp, Glycine max
  Clone ID: PAT_MRT3847_95145C.1
gtaaataccatgactatgaccacaagtgaaccattcatgtcaaacatgcatgtgacttttcatatatctcataataaaaccgcaagccattaatgtcaaaatataataacagactaataaactcaacaaggagggcccgctcgaggcggccgggcggaccattctataaaatcaaaataattgaaaccaaagattctctctctctctctcatgatccctacgccatggaaccatttccctcataaaattctctcttcctttttgggttctcctcaatccattccaagcttcaatcttttctctcttctgccctctgcacctcccctcacacccttcctcattcgcaggaggtgaagatgtcgaccccggcaaggaagagactgatgagggattttaaaagattgcaacaagatcctcctgctggcatcagtggggctccccaagacaataatattatgctttggaatgctgttatctttggaccagatgacaccccttgggatggaggtacgtttaagttgacacttcagtttacagaggattatcctaataaaccacctactgtgcgttttgtttctcgaatgtttcatcctaacatttatgcggatggcagtatatgcttggacattttacagaatcagtggagccctatttatgacgtagctgcaattcttacctcaatccagtcattgctgtgtgatccaaacccaaattcaccagcaaattctgaagctgctcggatgttcagtgaaaacaagcgtgaatacaacagaagagtacgtgagattgttgagcagagttggactgctgactaatcatcatagataagatagggcttctgtgacaatcaaaaggttgtcaaaaggatatatgattgaataaccagcagacttcaaaaagaaccattatgattttctagtccttgacactgtgcttgctcaaactctatgagttaatgttccaccttattttctccatgttgtgtggttcatttgtctttggttaaaactttatcattataacataggatggcgtatc

SEQ ID NO: 137472 - DNA, 868 bp, Glycine max
  Clone ID: PAT_MRT3847_95146C.1
cccacgcgtccggatccctgagccatggtaccatttccctcataaaattctctcttcctttttgggttctcctattccaagcttcaatcttttctctcttctcacagccttcttcactcacaggaggtgaagatgtcgactccggctaggaagagactgatgagggattttaaaagattgcaacaagatcctcctgctggcatcagtggggctccccaagacaataatattatgctttggaatgctgttatctttggcccagatgacaccccttgggatggaggtacgtttaagttgacacttcagtttacagaggattatcctaataaaccacctactgtgcgctttgtttctcgaatgtttcatcctaacatttatgcggatggcagtatatgcttggacattttacaaaatcagtggagccctatatatgatgtagctgcaattcttacctcaatccagtcattgttgtgtgatccaaacccaaattcaccagcaaattctgaagctgctcggatgttcagcgaaaacaagcgcgaatacaacagaaaagtacgcgagattgttgagcaaagttggactgctgattaatcattatagataagatagggcttgtgtggcaatcaaaaggttgtcaaaaggatatatgattgaataaccagcagacttcaaaaagaaccattatgattttctagtccttgacactgtgcttgctcaaactctatgagttaatgttccaccttattttctccatgttgtgtggttcaaaaaaaaaaaaaaaaaaaattaaaataaaaaaagagaaaataaaaaaatataaaaaatattataaaaaattaacttaaaatttttaaaaaaaaatataaat

SEQ ID NO: 137473 - DNA, 390 bp, Glycine max
  Clone ID: PAT_MRT3847_95147C.1
ggctcgagggggtgtttgttgtggccctggctacccattgatttggaaatgctcaatccataacgaggattaagcctaattgagaagctcttagagaatctattttatgaatcattgctgacactcatgaacagaacacgcacagaggctgactcccagactgcaaaacgcgctggaaacgtagacccccagaatgacaagccgaatattggcttggttgaggggactcatatccctcttctcatcaagaagatctgcctgcctggagatgcccatcactttcgctatgttgctaagattatacaggtctacatggaagctaaggcctatcagaagctaaacatatcgctggattggtgattggagctgccactcattatggagcctttt

SEQ ID NO: 137474 - DNA, 2010 bp, Glycine max
  Clone ID: PAT_MRT3847_95148C.1
attttacaaactctaatttaaactattctttcggatgaatctacgagatagaatgtgagtaatgctctgctcatcactaaatccaaatagcactataaaaatgttaaacgatgtactgcagagaaaatcttgctatgactattatgtcaacgaaaagaagtactaaatttgtattttgtgtactagtccctttctcttcttttatgaaggaagcccttaaaataaaacacgacagtattcggaagagggtgagcactttggcatcacaataagacaaaattgccgagcaattaatttaacacaaaaggccctggacccggagctgtatagattttcaattattaaaagaaagaagaagaaaaaaatgagcggattctagttcatttatttctctatattgatatcgaactctataatgtcatcttatctaaataaattagaagtcccctatgcgaagggaaactatcatacaacaaatctggttgtatcaactattaccatgctataagcaaagcccttgcacggacctaacttttgctgtagttgctacttggaattgctcacaagacagcaccacaaatttctgtcttcttcacatcaccacattatttctcaactttatcacatcaaccttcaactgtgttggggacgaagaatctgatcaacaagcttctctggaagctttttagtagcctggaagttcctcatgtgcaatataggttcacatccaacatctgccactgatctgccattcggtgtttgcaacttaaatcgctctgccttgtatgcagaaaggatattttcttcatcgggtaggtgattgctaactttcaggagtgagccaagagaattcatcttcatgtatggacaagatgcacagccaccatgaattgaacagccctccccgctagctattcctggtacaacaggaagtatgatatcacccactttggcagtctgaaggccggaggataaacttgaggtggtcgttgagattgagtctgatgaaactggaaagactatttcaacagtaacttttgctctttcagaagaagacttcacaggctccaacaaactacgaactgttgccacaattgaagtcaccatcccagattctgttcctaaaacaaattggagatgatcatctatatttctatccaaagcttcctgaaccctgtcctttatgaaatccaaaatattctttgtggagcctactacacccattccccttctctttgcttccattgccaatgaaaacatctctccaggtacctcaagatgggcagtaaggaatgcatcacagtacatttcttttatcttctccacaacctcatggccaaatagatggtgaacaatgcacgttccatcctgaaaatagtgaagtcgaggtagtaatgatctaatagagtcttgactgtgctcaggatgtattgcagcaatctcttcatcagtcatttttgtcatttgttggaaccaatctttgatatttgcacccatgtaagaatcaggtccataaaatatgctcaaatctggaacttgagcaaatgcctgtaggatagtctggacaacatttgatgaagtacaggttattgtaggcacaagttcatgagcatatgcctttgtctctaacttagtgttaatgtatatgacatgcaaagaagtagacctagaagcagctgtaagatattccatgtaagtacgagtagctgccgcatcagccagagaacatccaatttgctcatttgacatcctatacacgccaacctcactgaaaccagcttgatcaaggatggcacgcacattttctgacataaaatccacacctagaactgttatgaactggcatccggcttttgccattttgactgctgaatctgccatgaccagtgaatcagatatatggatatgtggccactgcttctgagcagcagttaaaatgccttggacctcaggatccatgtaaaagtgtgcaacaacaccaattttcttctccttcagcacattgactag

SEQ ID NO: 137475 - DNA, 1217 bp, Glycine max
  Clone ID: PAT_MRT3847_95149C.1
gcttgcatagcctgcagtaaacactgataaatacatttatcattactaccttcaactgcaatataatgtgcaaactcatgcaacataaaaagaaaggttacattttgtaagaaattgaagagttcatgcataggaaaaaggttacttttctaagtaaaaataagtaattgaagagtgcattcataactgaattgactgagatgcatgatggtcttcgaaagatctttgcaaaagttgaagaggtttctcagtcaaaagaatacaagacacactttgaaataactcaaatactcaagtatgtggtctaatgaatataggatgcattttcactttacgggacaactatagattagaagtctagaataatataatatcaatgatttttattttgttttcttctcaattttattttatccgttaaagtggtttgggcttatgcaaagaaaaccatcagaagcacattggaataaattgttaagatggatctcatggtgaataatatccttgagaatttggtctttaactgagctcaatggcatctcaagctggtaggataaggcttcttttgtttttggcaataatccctaatgtgaacataggaaatatgattatacaataaacatccaaagaaattcctctgcctgcctaagtgctccttgaccatggagtgagaatgtcaaatataccaccaagtattgaccaatgaacacataagatactttatcggccaaagtagaaaattcttcatgataattttttattaagacatccaagtctggaatgttgatgtgagaataataagtcacagataatgtaagacatatttatcaaacaaatttccaaatatattaatttttttgtgccatgttatcgaataaatcttagcctaaattccttcaacccttcttaaaacaaggcaacctacttccatatatatttctaaaaaaagagcaataaattgagcgcaaggcaacttctgaactttatagtgaaggccaccaggtcaaataccatcagactcaacatgagatgtagtaagacaggcaaaaagtgcagaaagggaagtaacactggaaaaataaaaacatgcctgtagtgcacgacaaacaatttccaattctctgtcaaaatctggcttttcatttgtggtgacaagttccagtacagcacagcatggcagttcaaaatgcagatcaaatatgggaaatgcaattgat

SEQ ID NO: 137476 - DNA, 341 bp, Glycine max
  Clone ID: PAT_MRT3847_9514C.1
agaccgctagtgcacttctggaatccacaggcacgattacgtaagcacgcgtacttgggttgagaattaggcgcgtgcatgagagcattgtgttgataaaataatgctttcgtactatcaggatgaggggtaggctttccaactttctagatcataagatgatggccgttctgtttgctatcattgttaaccatgtgggtgcgggggacaattacactatgcctatctacattgaaacgcgggcaaggccatgccacatacactgtggactgcgcgtactctttccattcgcatcgcttcaactacttatgtcgaaacaaggaaaccacgattcggtctga

SEQ ID NO: 137477 - DNA, 256 bp, Glycine max
  Clone ID: PAT_MRT3847_95150C.1
gttagtcatatatttagacgggtgttggtaacttaaaccccatataattatataattaaaattttttaagacaaaattcccattacaaatatttagcttatgacaatgaaaacattttattttccacaaacagggttttttccaatacatacacccttaatttttcctttaaaaagtggtttaccccatagcttgcatttttcattttcactatattcagaaaaccaatagttgccacatgttaacaattcctttt

SEQ ID NO: 137478 - DNA, 356 bp, Glycine max
  Clone ID: PAT_MRT3847_95151C.1
aagtgagttttttatcacaaatttgcatataatccaataccttagtacatacaataaggggataagagtcaatttagataggataatctaatcacccatgcaatgctaagacaactacaatactataagggccggccctttaatagaacgttacttgactatctacaaaaaaaattgacattgagctttgcaatcttacatcaagcatttgcactgcccaatttctacaaactgcgtacttggaaaaaccccggctttgcccaccttaaccacctgacggacaaccccattttccaatgttacgctctctgtaacaaggcattcaccgatggacttgcccaacatacccccaccct

SEQ ID NO: 137479 - DNA, 373 bp, Glycine max
  Clone ID: PAT_MRT3847_95152C.1
tatctgtgctggtgcatccgcaggaggaagctctactcccgatggggaatttaatccttatgaggagctaagtgcaagccccattgagaaatttgacgtggcccctgcagcatatgcttcatcttagaaagaggttgatatgaatggggatgaagcaactgcttctagactggcaaaggcctatgacaaactcatgatgggtcaatcgtctaatcagcttaaaggtgtgactttaggatcgttgaatgcatctaaggagatccagtatgctgacaagctgccagtcataccttgggtgccgaggcttactaaatcaaggctcaatgacatgcgcatcgacttggcaagatctgctgtgtttacagcttggatc

SEQ ID NO: 137480 - DNA, 170 bp, Glycine max
  Clone ID: PAT_MRT3847_95153C.1
ctcaacttatctctcattccctacgctacatccccagcgttttacatgtggtgtcggaggttatgtgatcaatcaaccacaccacacttgctcaaatttgatcctctactgatttaaacatgtctacaatggttgactcgcaccgcacggacagactgaaacttgcaacc

SEQ ID NO: 137481 - DNA, 586 bp, Glycine max
  Clone ID: PAT_MRT3847_95154C.1
tttttcaaagacaaaaaaaaaaaaaaaaaaaaaaaaaaaaaaaaaaaaaaaaaaaaaaaaaaaaaaaaaaaaaaaaaaaaaaaaaaaaaaaaaaaaaaaaaaaaaaaaaaaaaaaaaaaaaaaaaaaaaaaaaaaaaaaaggggggggcctttttaaagaatcaaattttacttacccttgattgcaaataaaaattttttttataggggaactaaaattaaattaattggcggggttttaaaaagttgggaattggaaaaaccttgggtttaccaaattaaatggctttgaaaaaaatcccctttttgcaagttgggtaaaaaaaaaaaaggcccgaacgaatggcctttcaaaaaatttgccaaccttaaatggaaaatggaaccccccttttaggggggaataaagcgggggggttttggggtttaccccaagggtaacctttaaatttgcaagggccttagggccggtttttttggtttttttccttttttttttggcaagtttggcgggttttcccggtaaagttttaaatggggggctcctttaagggttccaattaagggtttaagggaacttggaccc

SEQ ID NO: 137482 - DNA, 126 bp, Glycine max
  Clone ID: PAT_MRT3847_95155C.1
taacaattaacttatgctttattttgatgacacaatgtagctgatggtacgtacttaatccctcgacgcagttgttaacatttgtttttaccaagtgaaattgaatgaataatatagcagtgtaaa

SEQ ID NO: 137483 - DNA, 227 bp, Glycine max
  Clone ID: PAT_MRT3847_95156C.1
aaggggaccaattttaatgtgattattggtatggttttgggaggtgttccccaactgtcatggtcaattgcaccggttacatattacaatccaatactgaagcctgggactgagaaatttatggcccacattaaaaaacactgccttccatgggctggtactccaaatgttccctttggaggaaacggaacctttaaggccagaacctaaaaaacatggaattgaac

SEQ ID NO: 137484 - DNA, 294 bp, Glycine max
  Clone ID: PAT_MRT3847_95157C.1
gcgatggaaatctgacttaccaccgatatactatggtaagaaatatcctatagctaaaagctctacaatgatatatatattaagagcataaatatcctatcttaattcaagtcggcaataacgacattagacaattcactggcaagaagcgtgggacatcttcagatattagtcatatcttatcttaatgggaaacctttctccccactgttagctgcatgacacgaagtagaggcgcatggctggaatctctactgtgctcatgacaacttgtgataattgacggatattgaa

SEQ ID NO: 137485 - DNA, 282 bp, Glycine max
  Clone ID: PAT_MRT3847_95158C.1
acaaagcgtccgagagccaggcatgctttaggaaccagaagatcgatcagattactggtaagagcatacatactaggtggcaactgtgaaaacgatacaggaggaactgattcaaatcgcttgacgagacaagccggactaagacactttcactggcctgaaaggcaagcatatgcactaagggaggcaaaattcgaatatcacgatctgatgatattggagaactgagtgtccactctaggagatgatacgtatcttacatgtagaagctgcactgatgaa

SEQ ID NO: 137486 - DNA, 524 bp, Glycine max
  Clone ID: PAT_MRT3847_95159C.1
atacccaggccgagccacgcgtgcgcccacgcgtccgcgagaagacgacagaaggggatcccatctgattttagcgaccacactactctttttttccaagctcccagttctcttaaacggtgattcaattcttgtcctctttaaagagttaatgagatttcataagatgggaatgtaaaatactgggatgttgcatcacattcatcatttttttaattatcttgatttgtgtgccttaatttaaaattactctgaaaaccgaagtttttattaatgtgcatgttttggtctttgtaacgaccatttgtgcctataggaagttacttctatgacaaagtctgcacattgtttcttctttttaggacaagtctaatgtttaggtttcaacaagtccattagttaagtgtctatttacaaaccaatctgtaagtttcacccatctacttgttcaagctgacctcagaccattagataactaaacactaaaatatctgccatataagagaggattcttatgagcattt

SEQ ID NO: 137487 - DNA, 382 bp, Glycine max
  unsure (1)..(382): unsure at all n locations
  Clone ID: PAT_MRT3847_9515C.1
cacgcggacggaagcggggaagnaggggggaggcaaacacgaaaagagancgagaggcgggggaagacgaggaaggaaccggcgcgagacgaggcacgggaggcaaacgacaccggcgggcccgccgaagaagacgaaagcagggaaccacaggcagaggacgcgcaccaaccaccaccaagggcgaccgcaccgagaagaagcgaaagaaagaagcacaccacgcgggggagccaaaggcgacagagacggagaccccaacaacaaccgacggagagaagcggggaaaagggancgcagcaggagcagacgacaagcgaaaaaaacggcagcgaaaaagcaaggcgaaaggggaggcgaacgcaagggagaaggagaacgc

SEQ ID NO: 137488 - DNA, 128 bp, Glycine max
  Clone ID: PAT_MRT3847_95160C.1
agaggagagttcctgggatggaagatattgtattgatgcaataggcatgtgccctcttgctatagatgcttttcagatgatgtaggaatgactttatatatgggggttggggtgcttattatctatta

SEQ ID NO: 137489 - DNA, 380 bp, Glycine max
  Clone ID: PAT_MRT3847_95161C.1
aaacactgaaacaagaaacagaaaacactctctttctctctctttctttagattatactactatcataagatcgttgttttacttagaatctgaactcaactcgccggagccaacaaatctcgccggaatattcctccgggaaatggggtttctgaaaaactactgagaattaacaaaaaatgggcgacgaagaagtattcgccggagcttcgggtctccggcgagcggtggagctaatcttttccgtgctctcactctcgcactcgattcgcgtcttcgccggaaaatggcagctgattcgggccaagctggaggagcgccacggcggtctaatcgccgccgagaactgcgactccggcgacagccgtcgctgtcgagg

SEQ ID NO: 137490 - DNA, 254 bp, Glycine max
  Clone ID: PAT_MRT3847_95162C.1
ctgcagcgattcggctcacgccacgatatccccaagccaaccgaacacttcgacctcattgccggcaccggcacacgcggcttgatcgccatcatgcttggccgcctgcgcctggacctcgagacgtgcaaggatgtctacgtgcgcatgacgaagcgtgtcttcgaaaccgacaagaccatcgccggcattccctaccggtcgaccctgttcaaggcctcgaagcttgaggaggccatccgcgaatgtgtgcg

SEQ ID NO: 137491 - DNA, 559 bp, Glycine max
  Clone ID: PAT_MRT3847_95163C.1
cccatttcttcttcttcttcctctttttatttctcacataactcctcttttcctcacctcaatctcactttttgttgttgtggttttctcttttgggtcttcagcttttcaagcgaagtctcaaagctaaaaaatttcaggtataacgtctctcaagttttttctggaagctaattagttattattggcaatgagcaatctcaagctaggtgtggaagttgtgggtgctcatgaccttatgcccaaagatggacagggctcatgtagtacttatgtggaacttcactttggtggtcagaaatttgggactacaactaaagagaaagatttgaatcctgtttggaatgagaaattttacttcaatgttactgatccaagcaaattgcagaatctcactcttgatgcttgcatctaccactatagcaagagtaataattccaaagtcttcctgggtaaggttcaccttactggaccctcatttgtaccttatgccgatgctgttgttttgcactaccctctggaaaagaaaatgtttttttccgcattaaaggagagcttg

SEQ ID NO: 137492 - DNA, 1101 bp, Glycine max
  Clone ID: PAT_MRT3847_95164C.1
ccgctacaactactgaacaatacgaaaccgacattctacaatgtcaatttatgtgtgctacttgacttcaatttctctctttgaaaccccatttctccttcctcttcctctttttttatttctcacataactcctcttttcctcacctcaatctcacttttttttgtggttttctcttttgggtcttcagcttttcaagtgaagtcccaaagatcaaaatttcaggtttctggaagctaattaattattggcaatgagcaacctcaagctaggtgtggaagttgtgggtgctcatgaccttatgcccaaagatggacagggctcatgtagtacttatgtggaacttcactttgatggttggaaatttcggactacaactaaagagaaagatctgaatcctgtttggaatgagaaattttacttcaatgttactgatccaagcaaattgccgaatctcactcttgatgcctgtatctaccattatagcaagagaagtaattccaaaattttcctgggtaaggtccacctcactgaaccctcatttgtcccatatgctgatgctgttgttttgcactaccctctggaaaagaaaaatgttttttcccgcataaaaggagaacttggtttgaaggtatatgtcactgatgacccttcagtaaaatcctcaaaccctattcatgatgtggaaccctctgtggacaccgtccaacactcaaccccagatcaatcaccagtttcattcactaattcaatcctgaacgtcttttctcggaagaaaaatgagacaaagcacacatttcatacccttccaaattcaaatgaagaaaaacagcgatgagaaactgagaaaccgttgtggaccagttcaaatgccttatactctgcttttgccttctagtaaggaaggattaactttcagaggaattcccaacagtatctctatctgaagaggtttgtggttccttaagttttgtggctttgaataaaagatagaagagaaggaatctgaatttcttcatccaacctgcacatggtaatctagtgtgtttgagtgctttcatgtttggctttaataaaataaaagcagttgttttgtaaaat

SEQ ID NO: 137493 - DNA, 523 bp, Glycine max
  unsure (1)..(523): unsure at all n locations
  Clone ID: PAT_MRT3847_95165C.1
cnangctttaatgcttttatttttttttttccaaacacccccacactgaaataaggggggggggagacatatttacaaattcttggttctgcaagattgttgtatgaatgtcccctgaaaaaggaaggcccaaatattttttaaaaaacaacccaaaatgggccaaaaaaaagaccaaaatttcgccaaaaccaaaataaaaaccccggggccaagaacaaaaaaaaaaaactgcttactccccaacaaaaatcgaaccaaaaaaaaaacccattttttttttttaaaaccgcgatgaaataaaaaatggcccccataaaaaaagaagaaaaacgcgggcccctggaaccctggataatgaggaaaaaagaatagggaattggggcccattagaaagaagagggaagaagggaaccccccattaaaggggcaaacaatattttttgggggcagaaaaaaccccttatatcaagagggggggggggaaattacccaaagcccaaaaaggggccaaaggggtgtt

SEQ ID NO: 137494 - DNA, 370 bp, Glycine max
  Clone ID: PAT_MRT3847_95166C.1
ttattttctataacaatacaagagcatacaacaaaatggatagggaaacacccatccgggcagaagaagatccagaaacttcgtggcgcacttcgggaggagggatacttacaatactccgaaaatggtaaaattgtccttgacctgggcaaaaaaaccctcataaggggatacacagtgcaaaatcgtgtatgagtatagctagaccaatataacactagtcagcgtgttctactttagtgccttgtggacattttttcgctaatgttcacgtatagattaggacctgttacgttagagcttcctaatcattccttttaagacacattcctcactctttctggtgcaagcgtttgtatgacaacttact

SEQ ID NO: 137495 - DNA, 366 bp, Glycine max
  Clone ID: PAT_MRT3847_95167C.1
ctgaatagaggtggtgggcggtgacctaacattccaacatgcttaaatgctttgaccaaatattagtggtgcattggatttaaccatacaactggctcatggtgtaacaccaatcaaacaaacccgagttgaatcgtggtaatgacttgatggctaacattacaaatggagtgaaagcggtgaaaaattttactgcgactttagcccctaccatagtacatagcacatcgaaaaggacccagtaaacagaactcgccaatgcagggcctacttgtaagctcatggtgaatggggccaagctttccagggggaagctgagcggcaaactggtgaagaaattatggcacaacactggtggaatccatg

SEQ ID NO: 137496 - DNA, 234 bp, Glycine max
  unsure (1)..(234): unsure at all n locations
  Clone ID: PAT_MRT3847_95168C.1
atataatcactgtattcatananttctgtctgaagagaaganttatgatatattaaatataataagtggttttnttctncttcatttccacnnancatcagataacnnatgcnccataacaatacanccaagtcancataacgtacantagggaattntatagtacangaatngatcngaanctgngntgttcaagaacnntgtggttncatnccaannctgtggccncaagaa

SEQ ID NO: 137497 - DNA, 423 bp, Glycine max
  Clone ID: PAT_MRT3847_95169C.1
ggaaattcccgggccgaccacacccttccggttaattaaaaccagggggataaaaattaaggtcctggtttttttcgtggttccaatggggggggcttggaattgccttccttccaatttgttccttttccaaatgaacactggttttggtccccgtcctccggaggtgaattgcccaagttgaaggtttgttgggaaacaacacaccatttttggttttgaaaccattcttgaaaagtgctttgaaccaccaaaggattccatccttggggaccattttatttcagactccaaaccagttaaccaacaagtttattttattgccaaagacctggaagtccttcccaaggccacatttttgttacagttaattggaaccgtcctttttaatattccttcctccaaaaacacatgttttgggtg

SEQ ID NO: 137498 - DNA, 773 bp, Glycine max
  Clone ID: PAT_MRT3847_9516C.1
cggccgggccgggcaacgacaacgagagggtttaaaggatcctccaaaacctcttccaaggtttgtgttttgttgggtgagattcgattctatcatcgtttcatcaaatggcttttttgtatggagctcagcgtctgcttcgccacaccccacttgttcattcccactatgcttccattcgtctcagctcaactctcacttcccccaaacttttcgtcagcggtctttctagactgacaaaagatgaaaaccttaaggaagcattttcttcttttgggcagctggttgaagctaaggtgataactgatagagcctctggaagatcaaagggattcgcttttgtaacttatacaaccatagaagaagctgaaagggcaagagaaggaatgaatgctaaatttttggatggatgggttatatttgttgatcctgccaaaccaagagagcctagacctcctcagcaatcacagtctcagccctctgaaataggtttcactgtcaacaaaacggttggctggtgtggttgatcactaaagaaacttcaactatgctcacgatatttggatgattttttaaagactattattcaaatcagccaattatactgccatttgttgagaaatatttgtatcagtcagtcataattgattattgaactgtagccataaggcattatatttatgcaaattcatctaagttcttttccccggtattgcatcggccagggaatttcattgctaagttctgtatgtttccggtttgttacatttcct

SEQ ID NO: 137499 - DNA, 632 bp, Glycine max
  Clone ID: PAT_MRT3847_95170C.1
atttcgtcccgttaaggactcatctctcccgtgctttgtagttgtgatgttcttcttttgctgttaacaggaatctttcaacaatacctggtttatcaagtgcagaagatacgcttgcagggctattatagtttcagccagaagttgaaatttattgtccgcataccctttgctattacagcttatggtatgtattttattgtttaaacttatatatgaagccaatcgatatatatatgtcataatgtcaagaaccaactcaagcccaaaacacaaattgttaggtggaggcatgtgaatgttttgatattttaacactggatagtttatattgtttgagttgttataatgtgaatgttctcgacagtttgattttatttcaggaactgctgcaatgctacttgttatagtctggaaaccttacactggttttctgtcaatctctgcaatattgaggtatattctccatttggttatatttgtccattttaaacatttttctaggattgattaaattgaattaaaaaatggaatattagcaggattatgccacttctaaatatgaaggactacataatctgaataatgtctttgtctccctatccccttccttttgtctggatgtggtaaca

SEQ ID NO: 137500 - DNA, 1791 bp, Glycine max
  Clone ID: PAT_MRT3847_95171C.1
ccacgcgtcaccgtcccgatactgatcccccgcagcaggcgtccaggaagatggctcccgagactgaaccttctcctccagctacatcgccggaggagaacgctctctttctcgatatactacacgaagctcctcttttcgctcatcgcaaagccgcgagggttatcgggagcgttttctactgcatactactggcaggttatgctactttggccattggagctcactggatatttcgtccagttcaaggactcatctctcccgtgctttgtagttgtgatgttctgcttttgctgttgacaggaatctttcaacaatacctggtttatcaagtgcagaagatacgcttgcagggctattatagtttcagtcagaagttgaaatttattgtccgcataccctttgctattacagcctatggaactgctgcaatgctacttgttatagtctggaaaccttacactggttttctgtctatctctgcaatattgaggattattatcctagtgaagcagtatctgccgtatgttttatgagtctttacattggttacatacaccagtacaattcattaaactcacatccagatgttctgaagtccttatactcaccactacaaccatcaagttctctggagggtctaaggtaccatgatggtaggctctctgatcagcaaatggctttgctgcaatatcagcgtgaaaatcttcattttttgagtgaggagattcttcgattgcaagactgtctaagcaaatatgagggaactgatgatcggagcacaccacaggttgaccttgcccatctactagctgctcgtgatcaagagttacggacactttctgcagagatgaaccaagtgcaatctaaggtgaggcttggcccttccttgttcgctggaccggactccaggatccagcagattagcaaagactacaaccagtctttggaggatagtgaaacacggctgccaatcttaggcgagcgctgcacgctgggcgcaaatctactcctggcatacaaaggagaccttcaacgccaagatggcaaccatatacatcatctgaaccaatccaacatggagctttattcacttgcaggaaaatatggtacatgcccagttcgtgttgagccttttaccgtgttctcacaggttaaaagaacatgtaaccgtcattattgtagagagatccaatgtacacatattagcttcaaatagggttctttttttttgttcaagggttcaacgtacttattagctttaaatagcaaaccatttggttatacttgtccattttagaaatttttctagtataaattaacttgaattaaaaaatggtatactaacaggagtatgccacttctaaatatgaactacatccttaatctgaatcatgttatcaataataggtgtcaactatagggaacagacattgaggccttttgtatgtttggtcaaatgaatatactaaacctaaacccttgccattttaaaagtgatttatctagtagatagggaggttcaatatatttcaatttattgagtttctagctgcagtatatatgcttagtaggagacagagagcttgattgacaccttgacattttacagcttatagaatgtctttacctccttgtccccttcctcttgtctagatgtgttaacagttgaacttctgactggccatgatttaatgaaaatatgttattcacaactcgcaataatttcctcaaagattattttattggtaatttaaaaaaaaaaaggcttaacctctggttatgccttat

SEQ ID NO: 137501 - DNA, 877 bp, Glycine max
  Clone ID: PAT_MRT3847_95172C.1
cccacgcgtccgcgttccgtgactgaaccctctcttctcttctcttgtgcgatggcaaccgacagatacgcttctccgccagctacatcgccggaggagaacgctctctttctcgatatactacacgaagctcctcttttcgctcatcgcaaagccgcgagggttatcgggagcgttttctactgcatactactggttatgctactttggccattggagctcactggatatttcgtccagtgcaaggactcatctctcccgtgctttgtagttgtgatgttctgcttttgctgttgacaggaatctttcaacaatacctggtttatcaagtgcagaagatacgcttgcagggctattatagtttcagtcagaagttgaaatttattgtccgcataccctttgctattacagcctatggaactgctgcagtgctacttgtagtagtctggggccgttacactggtcttttcatttatctctgcaatattgaggattattatgggcggaggggcagtatcagctacaaatttcatttatctttacgatgaataaacctggaaaaatgtattgcattgggctaaagtacccttttaatttaaagtaaatatggacatgttttgcttaaattcaccacttttataattataagatctcttcttagtaaatagtaatagttttaccttcctttctaactacatttttggtgcaagcaggttacatacaccagtacaattcattaaactcacatcctgatgttctgaagtccttatactcaccactacaaccatcaagttttttggagggtttaaggcaaacattttgtaatttagtttcttttctaatttacttcaaaacaaaaaatccatgtttgattttc

SEQ ID NO: 137502 - DNA, 257 bp, Glycine max
  Clone ID: PAT_MRT3847_95173C.1
tattagagttacgaacaaagcgtggtgatacacccactaatgttagtgatcaatgtccttgtgacacacctaaaagctgtaaaataaaagaatcacaaaattatagtaggatggacactttagaaacttcccatgattcttaccatgaaaatattttagaaagcataaaaacagaaatcgaaatacaatatgaattatccgtagcataatctgattaaaattccgtcaaaattaataaaattataactttcgataat

SEQ ID NO: 137503 - DNA, 637 bp, Glycine max
  unsure (1)..(637): unsure at all n locations
  Clone ID: PAT_MRT3847_95174C.1
cccgcgtccgctcctgagccatacaatacaaaaaaaaaagtcgcttttttttattttttctttccaatcatggctggtgtgaaccccgaggcaggagggtggaaggcttatccttctgttatggagactgctcttggtagtagtggtgatggaaggcgtggccataacatgaatgatgatgggtcggtgatgcatttctctgctacaaggtgtgtgtgtgtgtgtttgttgtgtcttaagtcttaacgtgtttatgtttatttctctatttctatgtatattatattccctcacccacaaccccatgttgtgtttccttatttgatgacttatttcttgtgtccttttttacccctttcgatgtgcatttacccaactgggtgactccttgtttggttaaaggtttcaagtttctgttgagactatacttagtgtgatatgggaacctatttggtcttagattcggcattttttatggggatttagttcatgaaaagaagacatccatgtctgnaaatggattttgggccaatttggataaacttttgaatgaatattttttttttgaagaaaataagaggtaaaatgaatcaaatttatcctantaaattaaaataacttatgaacctcaagtttt

SEQ ID NO: 137504 - DNA, 1232 bp, Glycine max
  unsure (1)..(1232): unsure at all n locations
  Clone ID: PAT_MRT3847_95175C.1
caacagtttgtgtagaccacattttactctttacttgtgttgtctcgcggcaacatcgttccgaatcggttgcttatgacacacacacctctctacccttttctctctttcatttccaacaaaccatttttcatttcttctactaaatcctaatcactttgcgtagttgtgttgtgtagtgttcccttcaacaaagacactcacaatggagcggaagcaaggattcttctccgcgctcaaagacgaggtcgttcgcggcctctctccggcgaggtcacgcgccaagagccccgccaggagcgcgtcgcccatgtcctcgctgctccgccgtcgcaggaagcactacgcgccgccgccggagctcttcattgcgagatcgggaagcctcaggcccgcggaggccctctcgccgctgaaagaaggacccgacggaaccgacgacggcggccatgactccacgcgcggagagggtaggtggggccagtggatgaaaggaccactagcgagagcaccctctgtttcttcttcttcctcgtcctcttgcaacaacaaaaagtccgatctgaggttgcttcttggcgtgttgggtgctccactcgctcccgtgcacgtgtgcaccacggatcccttccctcacctcagcatcaaagacatccccattgagacttcttctgctcagtacatattgccagcagtacattgctgccagtggagggcagaggcttcagaattcgattaacaatgcgtatgccatggggaaggtgaggatgatagcctctgaattcgagaccgcaaacaaggtcacgcgcagccggaactcctccaaggccgcggaatctggtgggtttgtcttgtggcagatgaacccggacatgtggtatgtcgagctcgctcttggcggcagcaaggttcacgccggttgcaatgggagactagtgtggcggcacacgccctggcttggtgctcacgcggccaaagggccggttaggcccttgcgacgtgcccttcagggtcttgacccaagaacaactgcaagcatgtttatcaatgcaagatgcattggggagaagaagataaatgaagaggactgtttcatcctcaagctttttgcagacccctcgacgttaaaggcaaggagtgaaggtccagcggagatcataaggcatgttntgtttgggtactttagccagaaaacggnactcctttgtcacctggagggactccattgacac

SEQ ID NO: 137505 - DNA, 343 bp, Glycine max
  Clone ID: PAT_MRT3847_95176C.1
gtgcagttcacttgacttcacattgctttgaatagcgataccctggccaatcccagttttatgaggcaaaatcacctgctggttctgtgaccttgcatctaaagagagaagagggaacagatcccacatgcccatatttgcctgctcggacagtgaaaagcgacgggcactgcggcatgtaataatggctgcaaagctgcggtggcctttgataatgagaccattaccgatgttggtgacggcccaccaccacccttgactgccttacatttcggtaccgtcttggacaccaaaggagcccgctatacccaagaggctgaacatcagggacatttttaatggg

SEQ ID NO: 137506 - DNA, 839 bp, Glycine max
  Clone ID: PAT_MRT3847_95177C.1
gacctagaaggccgaagaagtatcaaattaacacattctcgatcgagaagaagaagaatgtggacgcggatactcgcacgaggagcaagagcatcaaattaacaacttctggagaagaagaagaatgtggacgcggatactcgcacgagcaacacgtgctgttgccgttgccggcaactattcactcattaatcaacccatctctgaccctatctttctcaaaatccccaaatcaacttttccccaaattttcaataaccctcgatttttggtcacctccaacctcgacaatgagctctcaccggattcttcagtgaacggcggtgacagacagctcgcagaacaagaagaaggaggaggaggaggagacacgtacgaggttgattccgacacgttggagagtgtgctacgtcttctccaaaccagcgctgatgggtcccttgagtcgtgtttggatgacatggatttgacactgcaccagcaattggtaacgaaaataactgaaactccgtttgttttgagtgagaatctgataaggtttttctggtgggcatggagtgagagatcattggaagtgacaaccccaatggtggagtctcttgttttggccatatgtggaaatgatgatgtgaggaagaagaaagaggtggtgtactcgttgtgggacttggttaaggagattggagagaaggagagtggactcctcaatgtcaggattctcaatgagttgattagttccttctccaggttgcggaaagggaaggctgcattggaggtgtttgataaatttgaggctttttactgtgtgcccgatgcagacacttattactttacaatcg

SEQ ID NO: 137507 - DNA, 528 bp, Glycine max
  Clone ID: PAT_MRT3847_95178C.1
ggctcgagctacaagttttgttatataaactaacagtggcaaagaggattgatgggatatggatggatggtactgtcagtggggggaaagaaaatttcttgggtggctgtcacaattgtccatcttattattagaaagtgttggtgtagcaattcagaccaaaactttaggtttagtttttatatacatgcaattaacacttaattaatccaggaattgctatacttggttttaacaggtcaaatgaagaagactgttgtcaagccatacaaggcttagaaataggataatatatgttagacactgttgtcctttttgtattatataattataagttttctgttttgtgaagcctctagcacttatttgtcatgtgtatgagctcagttataaatttctgtctctctggcaaagaaatagtgcaatattcagatactattcttctatgttatttcaagtgttttgtgaaatatggaacaagtctaatgacagaaactggtgtttagttgatgaattcaacatgaatta

SEQ ID NO: 137508 - DNA, 379 bp, Glycine max
  Clone ID: PAT_MRT3847_95179C.1
ctatttatttgaatgtttcttattttttatttttttataggatgccgtgtcgggtgcggggagggggatttttattcatgagtaccccccccgagggactgaaagacctagagctagataagcgccccccggggggcgagccgacagaacgaaccttcgaagataccactcaaccaaaacaaatcaccagacacagagagttcgccaaccccccctataaggaacacaccgtcctcgtacaagcgccccaaaatcaaaccctgcttaagaaccccgaaagcggccccccccccccctaatataacagaaccaatcaaccctcacccccacttttaaccccaaaaaagacctccccacaaccctgttaaagaacccaccc

SEQ ID NO: 137509 - DNA, 127 bp, Glycine max
  Clone ID: PAT_MRT3847_9517C.1
tcatattgctggtgggcccctcaataaagtcactaacccaatctaccctaataacaactttaacccattaagccttactaataacccagaagcttttgctaagcttaaagtaaaagaactcaagaac

SEQ ID NO: 137510 - DNA, 2372 bp, Glycine max
  Clone ID: PAT_MRT3847_95180C.1
ccccactaaggtaacattgacattgattctacaggaactaatagatgaattgggtatatatattctgcaatatgatcgagctgggtatggagagagtgatccaaaccccaaacgctcactgaaaagtgaagcacttgacattgaagagcttgctgatctgttacagatagggtcaaattttatttgatcggtgtctcaatgggatcatatgctacctggagttgtttcaactacacacccaacaggcaaattacaagcctcaaaatatacatttctaaacatatgtttggtttcagaaaatgtcaattttcattttttattttcacaaataattatgaaaacgatattacatttctaaacaatgtttggtttcagaaagaaagtaaaaataaaaagcacaaagtcattttctgtaactatttgtgaaaataacatattctcaagccaaactggtcaaaattctcccacgcgtaggtacacgggaatgaccaagcgcccgacgttcacagacaagtggatacaaagggatctatgtgatcattgttgtattaaaaaaaggtatcctggatctaccctctattccttcattcattgattgtttcaagagcagcttcattatttctcataggtcctgtgtgaatgttttgacagggcactcaacacccccctccaaacaacagtgattcatcagatgatggtgttcaagtttcaacaccaagagtcagactcagagatggtcgatccttctcttaaactataaaccttcgtccccaccgaccaagaaaaacccaacatgatctttttacattgctttggaagctacaaggatatgaattttctggcaccccaagaactaatagatggatacgatatatatattccgcaatatgatcgagctaagttacatgtgtgaggtctatttcacttgttctattatgtgaatgtatacataggctctttggggataaattatccagtacctacagagacaaaatattaagatggtgatttcaatttaggatcatacgtaagctcgaagttagtgtatgcatacgcatttatttttccgagcctggatatgagtgctcccgtcgcgtgatatcttcggccttccttccatgggagtctgatgatagtgggctcaaagagattttctctatctagttacctttatttagttttcttttttcatacttaactttattggcggattttttttcggttattgatttctaattccatcacaagttcaaaccctgctttcttcagcaatagtgttaaagatattttagggactattcctgcgcttcccttcccttaccaagaacaaattaagggaacaagttgtttttgacactctaaggggtgactggatggtggcctttggcaactgggaatttgaccctctgaagctaagtaatccattccctgataatagaagttcagctcacatttggcagggctatgaagataaggtagtgccctctcaaatccaaaggtttgttacacagaagctgccttggatacaatatcatgaagttccagatggtggccatttgtttgtgcactatagtggcttatgtgaggccattctgaaggcacttttacttggagaggaaaatctttcatatagacctagaccagaagtatttgtatcttgatttaccatgatctcttaatacaatatctttattgttgattattttttttcctttggagaatgtcaaatgtaaatcacattcgttgattgaaaggaggaaaatgccatagatgtaaattctctctctctctggtgccatggaatccggtagtgcccgatgtttatattctctctggttctgaaatcatcgccgaggaaataacaaatgcaacttccaaacctcgcgaagcttccttcacacacttccttctattccttgttcgtcgaacaagctctttaacattccatcaccacaacttcctacctacaccttccgatattgcatcttcaactgtttaggttacatttcacacgtaataattgattgtttctttcgattggatcggtcggaaccatcgctcgaagagaatctccggtgacgtagaagcaatatcagtttactgtatgtattggttcggattaataataataacgaaaaaatagaaagaaaatcagagttgaaaatagccagaagaagattaagcgcgatgttggatcttaatctgaatgccgagtcgactcagaacaacgagtcgctggtgctgttggacaagtttcccgaagcttcgttgggaacttcgaattcctccgtcgtgaatgcggagggatcgagcaacgaggactcgtgctccacacgcgccggcgacgtgttcgccttcagtttcggaatcct

SEQ ID NO: 137511 - DNA, 208 bp, Glycine max
  Clone ID: PAT_MRT3847_95181C.1
ggcgtcgtcagcggcaaatacctccttgggatcctatggtccgcatagaattacacgtcacggcacgctaccaacttgggtctggacctcttccacgtagctaaaccactccagtcaaaggttgttctgaggcgccctgatacgcttatgataccatgctcgtgctggacgactgcatggatggtgagactctggtgccgggagatcc

SEQ ID NO: 137512 - DNA, 106 bp, Glycine max
  Clone ID: PAT_MRT3847_95182C.1
cttaaagagaacatatatcatatgatccattggatacactcggcgggggctgcattccgacgtgagatgcgtgagcacccttgaggccgtctgtgtctggcagctg

SEQ ID NO: 137513 - DNA, 285 bp, Glycine max
  Clone ID: PAT_MRT3847_95183C.1
cattgtgttatctaactgaatgaacacataccatttcccctaataaaacatgaacacacactctgcaaattaatgcctactttagtggcaaaccaatataccaacaaggtgcttaatgatcgaaatttctgcgtgctgtgctcaccacgccagaacataatatcaccaacactgtaaaatgaatagatcaggaccaccttcctgtacagcttggaagaacgtacttattaaagcagaggctcttgaggttcactataactttctactacacagccttactagctg

SEQ ID NO: 137514 - DNA, 839 bp, Glycine max
  Clone ID: PAT_MRT3847_95184C.1
attttggcttcaggtttacttctctttctcagggagtgaagagtacaccgcttagttcatgagagatatttgagtgttctagtgattttttgcattcctgggatgcatctttcaaagagtttcaagcatggagttgttttcctcttgtggttctgctgctatttgctgcatgctgctgggcataataacatcactgatcccggtgaagttgacgcattgagagccattaagaggcgtttgattgatcctaatggaaatttgagcaattgggaagatagagacccgtgtacatcacggtggaaaggagctttgtgcttcaatgaaacaaaagtggatggccatctgcatgttgaagaattgcaattactgagattgaacttgttgggaactttggcaccagatcttggcaaattaacttatatgaaaagattgaactttatgtggaacaacataagtgggagtattccaaatgaagttggcaatatcacatctttggaactcttgcttctgaatggaaataaattaacaggttcactaccagaggagattggctatcttccaaacttggacagaatacaaattgatcagaaccaaatatcaggacctatacctacgtcatttgcaaacctgaacaaaacatcactttcacatgaacaataattcacttagtggacaaatcccaccagagctttcccgattaccaaatcttgttcaccttcttctcgacaacaacaacttatcaggatatcttccccgtgagctggctgatatgccaagcttacttatcattcaacttgataacaacaactttgagggaaatagcattcctgatacatatg

SEQ ID NO: 137515 - DNA, 431 bp, Glycine max
  Clone ID: PAT_MRT3847_95185C.1
atacctctaggtttttgtttgataattatactttgattgtgagtgagtattgggattcgaagcgattgcaccagattttggctgattgtggcgatgaggagaggaagctgtctgcagtgctggaggaggactttctcaggctcgttcctaaggctgttcttgactgggattacacttccttgttgttgctagataggtcagatcacgcggtcccctttaacgacatggagattgctggtgagactatgatcactcagaccgttagcgattatgcaggtactggtatgcttgtgttcacaccaacctgggagcttgagctgactattgcacgcttaagtcttcagaatatgtggggggggttggcgtgtcttctcatttggaccccacatcacaatgagacgctggaggataataccaggcgcatggggttg

SEQ ID NO: 137516 - DNA, 236 bp, Glycine max
  Clone ID: PAT_MRT3847_95186C.1
ctgaagacacatttaatttgtaggtattgaatctaacaaaatgttagaagggttgaaaaaagtggcatgtagagttagttagtattctccatagatacatattaaagttctcctttttcctttaggttttacctactttcaaaattcaagcacttgcttacaattatggggttaatttatttggaaatctgagtagcaatatgactacagtcaattgcagtggcagggtgttgaaa

SEQ ID NO: 137517 - DNA, 822 bp, Glycine max
  unsure (1)..(822): unsure at all n locations
  Clone ID: PAT_MRT3847_95187C.1
ccatnncatgtcctcatgttgctggagtagcatcttatgtgaagtcatttcacccacattggactccggctgcaattanntctgctattatcaccacagcaaaaccaatgagcaagagagttaacaatgaggcagaatttgcctatggtgctggtcaattgaacccaagaagtgctgtgagccctggtctagtctatgacatggatgccttaggttatatccagttcttatgccatgagggttacaaaggttccagtttatcagctttagttggttcacctgtaaattgctcctctttgcttcctggtcttggccatgatgctatcaactaccccacaatgcaattgagtctggaaagcaacaaaggcacaagagtaggagttttcagaagaacagtgaccaatgtaggtcctgctccaaccatctataatgccaccgttagatcacctaagggagtggaaatcacagtgaagccaactagcctcactttttctaaaaccatgcagaaaaggagcttcaaagtagttgtgaaagccacatctattggaagtgagaaaattgtatcaggctcccttatatggagaagcccacgttacattgtaaggagccctatagttatcaacaatccataaggttacagttagcattggcctaactatgctcataaagttgccttcgtagcacttgttttgcataatgtattgttgacattttgtttatcatgtgattacaaatatctcttgcagtctgtatccaatacaatcgtcaaataaaaatggtgttatagtttcaaaaaaaaaaaaaaaaataaaaaaaccaaaa

SEQ ID NO: 137518 - DNA, 403 bp, Glycine max
  Clone ID: PAT_MRT3847_95188C.1
gttaacaatgtttttctttatactcttttattcaactttgacaagacattttctaacattcagcataaacacataaccacaataaacattcagaatgcttacactgtctgaggaaatatacagcatcccaaatggtgaagatcatgataacgcctacaacaagtctgaacattccacatgaacagctggtgctcagaagttattcactgatttacccacgacattcaaaacccccaacacactgtaattctttaactgtcacccaatgaaagcataacaggtctcttatccaactcatcagtaagcttgcaaagtcaaactgaagaccatgagcgaaacactcggatatattaatcttgaactgattggatcacatttctcaacaacatctgcaatatcttgg

SEQ ID NO: 137519 - DNA, 246 bp, Glycine max
  Clone ID: PAT_MRT3847_95189C.1
aaagggagaaactaaaatatatatacattaaggtctctggaaacccacttccccggtcgggagtacatcgaatcaagttgaaaagagaagccatgggggtgacttccctggtgatccagttgcaatgtcatatctagctacgcaaccgggtggctacaaaggagtgcgatcctgtgtaacctgagactactaacctactgctacagcagagtggtgaaaatggccggtgaatcatgctgcgtggtg

SEQ ID NO: 137520 - DNA, 292 bp, Glycine max
  Clone ID: PAT_MRT3847_9518C.1
gtcgatgtcaaaggtcttatatccaatggaggaatacgtgactcttggcccagctgttcgagatggcgaacatgtcttttgcgtccctctcatatttgcctcctttcatgataccttcattcatctcatctgtctgtctgggatggtacctcttgtcctcttcactggtggaatgaaagttactgctgacagagattaatcatctccttgtgctgctatgcttgcatctctggatgttgctcccttatgcctggtccttgccctcactgctcttcttatctagctccgtgcc

SEQ ID NO: 137521 - DNA, 479 bp, Glycine max
  Clone ID: PAT_MRT3847_95190C.1
aaaagggacgggcaaaaccccggaaaaggattttgccaagggcggggcccggcggcaaaagcattttatttggcccaaaaaaaaaaacccccgggcacccaggtttttatttaaggctggggcccttgaaaacatcagggtaagcccacaaaaattcattaaaaacatgggaaaccccaaaacgggttcagcaacggggggtttccaaagcccgagacccaaaattacaaggggaaaaggaaaaaatccggaatcaaaaagcaaaaaaattctcccctcagaggaaacaaaattcaaaatccgcccacccggggaaaaacccctgcaaaggggggaaacgaggggcaaaaaaattctcccccccccagaggaaaaaaaacccaaaacccgcctacggggggaacaacttcggggaaagcaatttaaaggggcccttgctctgctttttgaacccccttttaagttttcccgcccttttt

SEQ ID NO: 137522 - DNA, 301 bp, Glycine max
  Clone ID: PAT_MRT3847_95191C.1
aacggttgcaaaaagacaccggaggggaaaacaattacaatacattccattctctgggggtgggttctatacgtttcaagttaacataccacatcttgctaacgactatctcttgtatgaccatacctattttcaatgaactggccgacactatacaccgcgttaactgcaaaaaccatgacatggcccaaattaatccggtccgaaaacatctcattttcgccagatagcaattataggacagacgccccctccgttactacttcataacaaatgagcaaactgtatacctaatgctacg

SEQ ID NO: 137523 - DNA, 408 bp, Glycine max
  Clone ID: PAT_MRT3847_95192C.1
aacctttggtctgatgtatgtgcttgcatggtcgtcagaagatcatagacggggccactatatatatagacatagttgggcacaagcattcctgaacccgagcccgcgcccctcttctctatatacgacagacaggacccctcctcgtcattcctaaaaatactatactaagaagtaacaatatttttcaacatgagccaggcgagcctctagcctaatctactgcgcataaaaaaaaaaaaacaaaacaaaaaaaaaaagtggttgtctcagaggacttaagtccatgcatgtccgtacgtcatgctacagtctcctcacagcgctattcaaacctaacctatcggttgctgccccataatgctccgatcgggaaaatttcgctgccatttaatccaactgttccgt

SEQ ID NO: 137524 - DNA, 199 bp, Glycine max
  Clone ID: PAT_MRT3847_95193C.1
gaaatttcgatgctcagacatctcttttaccattctctactatctagctcttgcacgacagagccatgtctatgcatcgatacctgacgaagattattgggaagctgttaagtcaaacactcccattcccactgcactgtaagagcttctaaagcctctccttgcaggtgcttaaatcgattaactcccttaacaaata

SEQ ID NO: 137525 - DNA, 380 bp, Glycine max
  Clone ID: PAT_MRT3847_95194C.1
aattgaaccagggggaactagataaaatagcaataatctgcagtattgaacatgctaccaaacaaatatagaaaaccgttttttgaaaactccatttgttgggaaaaaaatggttttgaaaaaggggcccaaattgtttgacaaacaatcttttaaaaaaaagaaaaacaaaactgaaaaacttgcaatcaaattttataaccctaacgacgttttttttaagccttattaaccttggaagcagttgcaccgggttggcctttaagacgaccagtcctcctagcagtaatgagaccaaccttttgtccaggaggagcttaacccctgacattacttgtggggaccaatattgctggggatttctcttctccggggggatg

SEQ ID NO: 137526 - DNA, 204 bp, Glycine max
  Clone ID: PAT_MRT3847_95195C.1
ttggattccaagcagtacctcctctcaatccgacgcattcttaaaaaggggcggtgttatacaatacaacattcattacacatactcaaaatatcttctaaattcgattccttttccaacaccatgaagaaaaattttcatcctttttgacaatatattttccaactaacactaccaccatttaattttgctaaccggattccc

SEQ ID NO: 137527 - DNA, 847 bp, Glycine max
  Clone ID: PAT_MRT3847_95196C.1
attccgtgcctacccttcaaatattagtgtctcccctcaccttgaactgcaagatgaaccttaaatcagttgcacttctcgctctccctgtctaagacctccccagagttttgctgctgctattatgaggatcagggaatcagaaactactgcactcatttttgcatctggccttatgatctgctctggagctaagagcgtagccacagtctaaattggcgcttcgggaccatgctagaattagcccaaagcttgcattcccacctagatgtacggagtttacccattcagaatattgttggctcttgtgatgtaaagttccccattctactggaagctcttgcctattcccatgctgctctcttgaggtatgagccggagtcgactccctcagctcacctgatgatgccacacaacttgataactacctctgtaagaatttccttggaggccaaactgaatcaggcccattaggtgatggtatcttgcatgccatttcctttcccctttcccctcgttcattgcctccccccgccttatcccactcccttccctctcatccttcccctttatttatttcccccccttccccgcctttcttctttttctcccccccttttccatcccccccctcatttagtatccaccttctttctcctccctcccccccctcccccccccccctccctcctccccctacgtcactccttgtcctctctacctcccccccccgccccgctctcccccctcgcctcctccccccttcccctcctccttttccttttattctcttccccccctcccttccttttccactattaccccccatcccctctcttgccccccc

SEQ ID NO: 137528 - DNA, 1075 bp, Glycine max
  Clone ID: PAT_MRT3847_95197C.1
tgaggactcgaagagcagtagaaagaaactagaatggccactttagacgagcgccttgaaagaaactagaatggccactttagacgaacgcccttctgcgaaaaggtggcttcctctcgaagctaaccctgacgtcatgaaccagttcctttggggtcttggccttccagtggatgaggcagagtgctgtgatgtgtttggcttagatgaagagcttctggaaatggttcccaagcccgttctcgccgtgctttttctttatccaattaccgcaaagtctgaagaagaaaggttgcaacaggaaaacgtaaaaaaggattatagcagtaaagtatatttcatgaagcaaaccgtgggtaatgcttgtggtacaatagggctgcttcatgcacttgggaacataacctctgaagtcaagcttgttgagggttcattctttgataagttctttaaatctactgcaagcatggatccattgcagcgggctgtatttcttgagaatgacagagagatggaagttgctcattcagtagccgccactgctggtgatacagtggcatcagataatgtggacactcatttcatctgctttgcttgtgtggatggtgaactgtatgagcttgatggaagaaagtcaggaccaatatctcatggtccatcctcaccaagtactttgttgagggatgcagctaaagtcatccagagcatgattcagaaaaatccaggttctctcaacttcaatgtcattgcaatatcaaagaaatccaaggatggacattaaggcagtctatttgggtgaagtaattcttgaagttatctgcagtataatccccagtcatccatgcagctttattcactttccctgtatgtttgtatgctcggatttttattttcagtcagtggcatatcaggttgagcatttttcgtttcaaatagatgcagtgcgagtaactttgagctaaaagaacaaactgagctaaaagttgggttaactggcgttttgattttaattttttttaataaaaaataattcaagcaagcataaaaatgcgataagagcttgcctcctagcgct

SEQ ID NO: 137529 - DNA, 454 bp, Glycine max
  Clone ID: PAT_MRT3847_95198C.1
atgaaagcagcatttggacaatagttgaattataccaaacactacagtttggtgtggttgctgaggttcctactatggcctgttttgcatcacagtggatctattttggaattagtatgctttccagtgtcccgagcttctatgcatctcttcctacagatttatattttgcttggaggttgccttattaggctggactctttggatctttttattgatatattcttaagcagtgtccgggatattgaccaagtatgtgttttgaacttttgctggatattgatggaccttcaagctagttaggtaaaccattctcaatgctgtttgtttttatcacttgagaagtgatctacccaatcaaattcttctgggtgaactgtggaatgtgggtcctgaaactgttttgttggcttatgttcgttggtggctgtcttcgaaatgttacaagttaaac

SEQ ID NO: 137530 - DNA, 324 bp, Glycine max
  unsure (1)..(324): unsure at all n locations
  Clone ID: PAT_MRT3847_95199C.1
aattntttgatccgagggccattatggggcatgtgttgacttgcagcgcactcatcgtctcaacggaatgaactacagggaggccacagttggtgtttctgagaatacaggattttcatgggcctgtgctctgaataggtctcatagggggcgcgccacacctgatatttacaccatctgctctcaagactgtgaatgatgggatcctgcttgcacacatgcctggactatgtcatgtaatgcaagttcgtgaactgatgcatggtgtttgtaattaaagccgcgtaccgcaaatcattgcgatagacatggtgtcactggatg

SEQ ID NO: 137531 - DNA, 778 bp, Glycine max
  unsure (1)..(778): unsure at all n locations
  Clone ID: PAT_MRT3847_9519C.1
gtgaggcgatcactacataatttacaatccgagtggtagatccaggagttaatcaacatccgaattgttcctcccttcctcgccatttcttgtctcaatacaatttcagtgtatgtagtttttcagcatgtagttttcatgaattgtattactccagtgaccggcaatcgtaagtacgtggatacttcacggtgctattgctggtgacttaaaagcaaaggactttgaaattggttgccatgtaaaactggttgctccaacatcatggtggggtttggacacagataaatattcctacagtctgatgcatagggctctagtctatggattcgagatttcatggatgcgtttcgcctgtgaggaggaggattgtggagaccatggttcctgctattttgactttgacaagcagaagcctcgttgcgtggtttgttctgccttcccttgggaaaagggaaagaagtgtggtaaaggaaaattaaatcattataatttctatcgtattactattttcttgttatcacttcccaaatttaaaacaataaattttatttttacttcttaagtttcgtttttatttttcaagttttcatagagacaaaaacacctctcaagtttagtcttccaaactttccttattttttctacatttaagttaaggtcggntgttcaatcatacccatacatgtgacctgatttattttatcacatanaatgatttagttttatttttttttattttttataantaaagattaaggataagtttatttttttt

SEQ ID NO: 137532 - DNA, 2048 bp, Glycine max
  Clone ID: PAT_MRT3847_951C.1
atatataataataattatttaacatttacgaaaatattagagtagcggtcatctcactatctactatctcatttttttgtggcagccactccacaccgctatccatatcttgtattagagctatgaactctaactctataaatacatttactaagaaatttagcttttatctaatcttcagttttttaacagcccaacgttattataaagcaagacattaatgtaaagcaagatacaagacatgatataacatgaaactgataccaacctcaccataaccaacgcttccctcttcaagcactaaagataaaataaatccttctctataaaattccttacaactatcagtaacaaatgttgatgttggcggagcttcaagtgcaattctatatttagaacactgtatttcacggattttgtataaatagaacttgtcctttatagagccttaactgaaaatccatgacaggaaacttatggtgtgttaagtagtttggagttcaaattttttcaaaatgcagagtcaagaaatgaaggtgttggcaaagacttgttcattaagtcaacaaaatattaaataaccaaaatgcaaattaaacctgtggaaattggcattggcattaatggaactctcaatctcaaccatacagtccatttgctcatgttgtgctacacacatagcttctttaagttctgcctttgtcttcacatgcaaatgtttgacgcgctggttgaaaattgtcagaccgtttgtctcatgcaataaagaaatatctccaattacacacaacacctttttgttgcatcctacagaaaaaccaatggctgtgctaagtaacccatcaataccactagcccccctgttagcagctagcctcaccaagttaattggtaggtctgagtttaacaggagtcatgaaacactttgatagcatatagaccaactcggacgctatatatttgcatcctgaatgggcatagtattactaagaaaaagggcagactcagaggaaagaacatcaccaaaaccgggcctggcgcattcttccactttccccgttgcccgctctccctttccattgccccttggtctctcgatgtttcctacttcctcgccgtcctccacctgcctattgttctcacacgctgcccaatgtttgtttattgctttctcgcatagcccagtacattgctttttttgttgtttacgctactttttgttgtttgtgaacacctcaatataaggggcgcgaaatcctgccctgcctccgcttccttccataggtcatcaacttttctaaaatatttaaagccactgcacattttgacttgcctcaaaataagtggcacaaaatcttgacttgcctcctcaacctgcacattttgttagtcacctaaagagatcaaaaatattatttgtatcttaacaaacttgaataatttattcctcttccgaatcaagacttccagtccccctgttggtagaatatcctagatgatctcttaagaattattcttctttttttatttttttatgatttgttcccttatttaattaggatctttgtaattataggcatgttttattagaatgtgatttataggcatatcaaatcatgtatataagaataaaatctcctataattatattcattgcaattagactgtataaagcaaactttgttgtgtatttcagacacatttcccatgtctgttgggtttgcctttctagaccttcagcaacagtttttcatgacaggaataaccatataaattgtcattttatcagaaagaaggttcaacttccaccttatatctacctcccacataagggttggtgaccaactaacagatctgttcacaaaggttatgaccggaaaacactgttatttcatttgtaacacgctcggcatgattaatattcatgctcaaacttgggatttgggcacaatgtttaagaggtccttttgattgagttggaatttactattggaagtttatgggcttgtcccaaatataatttgcacctgcttcgatttaactcttac

SEQ ID NO: 137533 - DNA, 458 bp, Glycine max
  Clone ID: PAT_MRT3847_95200C.1
gagagcgccggtacagcatgcgagaagacgacacaaggggaagaaatacattgcacataggcctacaagcgataaagagtgggactgacgaaatcttacacggacttgtggatctacaagagcatgatcctgcaatagttcatagggactcttgttgagagagcatgatgaacagagggcatgtcggacaagggaaaatggacgaccggggcgtaacggcagccctacatggaccacaaacaaaccacagcgccataggcacccaatagttcatggagccggagacatatagaacaagactacgacgaactccgtgatgtgaactcatttgacaggtgagacctggaaatgcccacatttgattatccatatagagaatgtgctaaccctgcacagagatacaagaaagagacctcggcgaagctgccggcataactgttgaggattgaggacgcaga

SEQ ID NO: 137534 - DNA, 343 bp, Glycine max
  Clone ID: PAT_MRT3847_95201C.1
ctggtaataatgctggtgcaggtgccgtgggagccacgctgttgcacgaggatatgctggaaatgaaatgggggctttgcttaaaggactgggccatggtcgaatcctccaccccatgaatggggatcgcgcgtaacggggatatagccagcgagccactgcattccatccatgcggtgctacacgtgccactgtgttcatgaatgccaagaatacaggcatggcggttgatctcactgatgacggtcaaaaacatcgctgatatcagaatgataccgaggagctagatacagtaccggttctttgtgagacaatggcgtagcgttagaaaaaaaggagggga

SEQ ID NO: 137535 - DNA, 510 bp, Glycine max
  Clone ID: PAT_MRT3847_95202C.1
ggttctctttcatccgaggctatgagttcctgcataacaagttcagttgatcctgtagaaggtaacagggataggaagttcctgaaagtaaaccctttatgcaaaccacccatgacacctgatgttactcaagatgttgatgatgagacttgctcagatgagagctgtggtgaaatggatcctacagattggactgatgatgagaagactgcttttcttcaggctgtatcatcctttgggaaggattttgccaagatagcacggtgtgttgggacaaggtcccaagaacagtgcaaagttttctttagcaagggccggaaatgccttggattagatctcatgcgcccaatacctgagaatgttggatccccggttaatgatgatgcaaatgggggtgagagtgacacagatgatgcatgtgttgttgagacaggctcggtggttggaactgataagtcaggcactaaaacagatgaggacctgcctttgtatggcacaaacacataccat

SEQ ID NO: 137536 - DNA, 1118 bp, Glycine max
  Clone ID: PAT_MRT3847_95203C.1
cgagcgaatcgcaagatattttgcaagcaaatatggataaggacatgggataaggagatgaagtgtggttcaaaagaagaagagcaggatagtgtttagttggtcatctgtggatggcatattgcattccaaactcaccatcactccagggttggaagacaggtccatgttgtttattcggctggaacataggcaagaatagagttaatggcaaacctcagattaagtaccatgatattgatcttacattcccaacttctctggtcgacaaaacatttttgagagggaaggagctcaaatgctgctatagggctacaattgatggattcagtgcaaccaatttccacgaatgttgtgacttcaagggcccatgtgtgataatcggctatacaaacaagtctttcaagtttggtgcatttaaccctgaagggtatagaagcacagatgactactacgacacatttgatgccttcctattttactggatagacaatgaaactactaaacccatcatgttgcccaaggttggtggaagtggtgcagccctctttgattatgcacgtgggggcccacaatttggagcagatgggcttctcattgggcccccattggccccagttatgggtggctttgctgggcctgataccaattctggcattggtgatttaagacaagccaagtctagattgggattgtcttatgccaaaagagaggatgggaaagagtccatttttggtgatgagtcaagggcaacccttgaagaagtggaagtcttttgtagtcctcaaattgcaagcttatattagaattgcatattgaatagtgtgtgtgagttataaatctctaatattaatgtttgatttctacgaataaaaaatattagaattgcataaaaggggtaaccgggtaaggagtattaagctatatattactacctcgttgcctttcatgaatgcattccacgtctataacgagtcaatgtctaatattttgtgcatgaatagccactttacccacttgggcctttgatcaaaaaaaaaaaaaaaaaaaaaaaaaaaaaaaaaaaaaaaaaaaaaaaaaaaaaaaaaaaaaaaaaaaaaaaaaaaaaataaaaaaaa

SEQ ID NO: 137537 - DNA, 196 bp, Glycine max
  Clone ID: PAT_MRT3847_95204C.1
cgcatcacaacgcttccccaacgagcacacggattcgcgaactgaccctgctacttcctgcatctcatgtaccgcggcggaggacttgcatcactggcccgcaataatcatggaacctactgatagaccatataccggtggtgtattactattgtcaattgattgtccttctgattatccatacagaccaccaaag

SEQ ID NO: 137538 - DNA, 316 bp, Glycine max
  Clone ID: PAT_MRT3847_95205C.1
gacgacacacggggatgcactgatccgcgcaattgataccggcactattcgacggtgtcatctgactacttgctctcactacttgctgagacctctcgcagctccctgtcaaaacttcccaacccaaactcataaatgaaacccatcgctgtcgtcgtcatttcctcacactgtttcatcatactgtttgatcctctcttcatacactcgctattatcactggttattatgaacggtcagaaagatctggctcaaagctaaggacctgccgcgactacctgaagtgactgatgcacgcgatgcatgcacgcgattc

SEQ ID NO: 137539 - DNA, 464 bp, Glycine max
  Clone ID: PAT_MRT3847_95206C.1
tgctactccgtctcactcttcaccactggccactgagccagaggatgaactttacgtagccctaactcggaaaactagcgccgccagaactctaaactcctccttcaccacttcttctttctcctatgtgccgtcgccactctcctgcacttccttcctttccgcttcatcaattgcgtctacgacctccgtatttgcttatcacgcttaactcaaactacccaaactatacttaacttaactaacgcgacgtcgcctccagtaacagtatcaacatcaccattatcataaacatccgcactcgtagatatttatctttcaccacttcaccctccgcacctgcagcctgaccaacgacacattagacaacgtctgcctatcaaaaactgaccgacggaacaataaagctcgagattaacccttacggattcacagcttacatcttagacaccatgggcgcttac

SEQ ID NO: 137540 - DNA, 397 bp, Glycine max
  Clone ID: PAT_MRT3847_95207C.1
gtttgtacacattcgaaaacaaatccttctttcacttaacaccatttcactgactcacgcgctcttcggatctaatcgtagagaaactatcatttctcttcaaccaccgtcgccgatggcgctatcggcttccgacgttgcagccatgtactcgctgctttcgaattccatgagtaccgatcaccgtctccgcggtccggcggaggacgcgctcgcccaatcggagtccaggcctggcttctgctcctgccttctcgaagtgattaccgcgaaggatttggggtcgcagacggatgtgcgcatgatggccaccgtgtatttcaagaacagcgtcaaccgctactggcgccaccgtcgcaattcctctggaattagcaattaagagaaaatgcacctg

SEQ ID NO: 137541 - DNA, 369 bp, Glycine max
  Clone ID: PAT_MRT3847_95208C.1
gtcttagggtgttgagtgagttcaatgaaccgattcagattgaccatttcatgaaatttacctcatttcttaatttcttcaaggtattatttataattgatatcctttggcccaaatcaagctttatgcttttcaattcgtctagatacgactgtcgtatgtttactaccaggtcagcttgtgcatccttttttttgacctagcgaggagggctgatgttgcaaaatcattgcaaaaattgcgtatccacgtcacttgttcatcgatgacgcagcagggtactaaaccaaaccagcttttgatcaattatgaatgaaatcagcattgacctcagatgattgatgggattgtggctatggtggtgcgagt

SEQ ID NO: 137542 - DNA, 139 bp, Glycine max
  Clone ID: PAT_MRT3847_95209C.1
ggcagcagcggtatcaactgtatgctacaacctgaggtttacacacccaacactagacctgccagttatagattatgatatggctttgctctatcagcctatgctaacgctaggaacaaacattggtgctgcatttaag

SEQ ID NO: 137543 - DNA, 753 bp, Glycine max
  Clone ID: PAT_MRT3847_9520C.1
cgaaaatcatagtcacaggaccgaattcaaggcaaggctagcttcaacgcaacacttggaaaagtatgcattacatacattatactcacctataccaattgaacatgatttcaagataccaaaattttacaaaagacccttttcccttaaccatctggtaattcagtggaaagagccttctgcgaaattttgacgttcaaaaattatgtcaaattggtatagacgtgtatatttcccaagtgttactttgaaatcattgccttgaatttgtttttcatactgaagaccattgcttatcaattatgagccaagattttatctactctaaagtgttggggacaagaggtataacatagagcatgtattattggctaatgtcaaatgggaggtcaatcgtgttgatgcaatagttgtgcttgcttattctagtctctttctggcctaggagttgtatgtgtttccattatttggattttcctatgtaaggggctctcgtgtaggctgctaagagaggggcatgtcttgcacttttttcttcttttattagcaaaaggaggatggtgaatcgtgaaagagtattacaaaatatcaaaggcacaatgattttggagtgagatatgaaagagttaagaggtgtgagaagaaaaggagaagggatgctttgttaaaaaaacaaaagaaaagagaagggaggtaggggtgatgatatttaagtaaatttgccaaaaaaaaaaaaaaaaaaaaaagggcggc

SEQ ID NO: 137544 - DNA, 678 bp, Glycine max
  Clone ID: PAT_MRT3847_95210C.1
aagaggttaaaggatgaaaaacacaacttcaagtatgaattcaagatagatagtaataacaggcttgaacatattgcatggtcctacagttcatccattcaatcatattaggtctttgcgcgtccggtggtttttgatacaacctatcgtgtagaagcttatgacatgctgttgggaatttggcttggtgtggacaataatggaatgacttgtttctttagttgtgcacttctacgggatgaaaacattcagtctttttcgtgggctctaaaggctttcttgggcttcatgaaaggaaaagctccacaaacaatattgacagatcataacatgtggctgaaagaagctattgcagttgaattgcctcaaactaaacatgccttttgtatatggcatattctttctaagttctctgactggttttctttacttcttggatcacaatatgatgagtggaaagctgaattccaccggctctacaatttggaacaggtggaagattttgaagagggctggaggcaaatggtggatcaatatggactccacgcaaataaacatattattagcctatattcattaaggacattttgggcactaccattcttgaggcattacttctttgcaggattgaccagtacatgtcagtctgaatccattaatgctttcatccaacggttc

SEQ ID NO: 137545 - DNA, 1313 bp, Glycine max
  Clone ID: PAT_MRT3847_95211C.1
gaaaaacgccaccacaccattttcaaatcaagaaatttagctagctttctttcaactctcttgggagcttgcttagggctttaggaggcttgggtggagcaactcatcacctctttttctcctctcttcgcatagttcaacttgagaaattcggcggtgggaactgatggtggctctgagcttccagggtgggcgggcaagtcctgcccaaccccaacacccatcattgtgtagtggaagagccgctggagtcatcaggattcggtgtgggatagctgagccatctggtgaacctgctcctttaggacaaaagacgcggtaccatgacggcatttttgagaaggccttcatgactctctttgcacgtaagatggagaaattttcagatccaccagcaggaaaagctagagagaataagggttggtgggattggggttatgactatgagagtttcgtggatgtgtcaaggagggtaatgcagcgtaggtctcgtatccagcaacaacaagtggttcgagaggttctcctgtctatgcttcctccaggtgcgcctgcccagttccggaaattgtttccgccaacaaaatgggctgcagagtttaatgctgcattgacagtgcctttcttcgactggttagttgggccatctgaggttgtggaagtagagataaatggagtgaagcaaaaaagtggcgtgcatataaagaagtgcaggtacctggagaatagtggctgtgttggaatgtgtgtcaatatgtgcaagattcctacccaagattttttcactaatgaatttggacttccgttaacaatgactcctaattttgaagatatgagttgtgatatggtgtatggccaatccccacctacatttgaagaggaccctgtttcaaaacaaccttgctatgcggatatatgttctatggcaaaaccaagctctagtgtgtgtcctaaactacaggcatgagaaggcattcctttcggatttaattttccattgcagaattagtgtttagtaagctttttttttttttaaatcagcaaagataagtatatatatttaatatgtggtgggtacaaagggtatccaaatctatatacatgtctagtaagcttctaattcgacccgaggtgctcttcccgctctagcttcagaaaatttcatttttcatgtgtaataatattaataccagccttgctaggcttttacttctttcatagagtcattacattcacaaacgagagaacattgtctacaaatacttcatgtaaatttgtaattatagtgtcaaatatcggtattgccagattgt

SEQ ID NO: 137546 - DNA, 430 bp, Glycine max
  Clone ID: PAT_MRT3847_95212C.1
cgtccttttttttattaaatgattagaaacaatgacagaaatcgtgataatacgaaaaagaatatctctatagagtgaaaaaaacgacacctgatttcatacatataagcatcagtatagacccgcagaacaaaaattaatatactagattgacatataaactctttacaacattacacaataatacattctgcaagtgccacatacaaaagttttaaagttaaaaacttgatatttaactatatgatgatagcagcctgctttaacagataacctaacaataagagataccttattctgggagctggaacccaaccacaaagtatatgccttagctgcgacagaagaaaacgttaccggggacataagaggggggcaatgaatatcagtaggagcatggtacatataagggggagggaaaacacaaact

SEQ ID NO: 137547 - DNA, 206 bp, Glycine max
  unsure (1)..(206): unsure at all n locations
  Clone ID: PAT_MRT3847_95213C.1
tttcaatttcctttttaaaccggtttccgccaacaacntccccgttcttttccaaacaccaaagatatcccgtggtttcttttcaaccccaccgttcttcttcttccccgctttcaagaaccgtaaaaccgtcttcgcttgtttccaagaatggggtgtgggcttgaaaaaccatttccccgaatatgggaaggaaggggtaccct

SEQ ID NO: 137548 - DNA, 518 bp, Glycine max
  Clone ID: PAT_MRT3847_95214C.1
cgtttttgtacttttgctgtgtcacatcattgttttccagtggattctctctttgcaatattctgccagtgtgcagagcttaatccagaaccaaatgatggggaaggagaagaacatggttggttttttagtgctgatcagatgggagatgaagaagcagaggaagaaggttatatctctcaccatccagccaactctattggtcactcaaatggaaatcatgacctagctcgtacaatacttgaggttgggtgttcttccttgtacttctctatctacttctgtttttgcagtatgattctctgacacagggatgtagctcttctaataaaatgagagaataaggactttcgtttgaattaaagcattttgtaagcataatctgccaatcacaattatttggcattgtgcgtcaaacttttgtacttacgccccttaataacattctacagaatacgaaattaaacaatccaatggttaaatcatttgatattatctttgtgatcatgtatatcaaa

SEQ ID NO: 137549 - DNA, 354 bp, Glycine max
  Clone ID: PAT_MRT3847_95215C.1
ctctgtatcttgcaattagtcctgttaaaacaattacaacctgaactctagcgttctatcatgaacactgccggaaactatcaggagggcgcgccggaggaacaaaggactgaagcctataaaaaaagccatgttcaagggtcgtttacgccggtcttcaataccgcaacggaagaattgaccgttatttgaaaatggaatgatcacacagatatatcctacatgatctaacaaccacttgtctggacatctactgttcatgattgctatggtgctggaattgccttcaaatgtctgacgtgcacatcaagaataacatgatgatcccgacatatgtgctattggcttggacga

SEQ ID NO: 137550 - DNA, 368 bp, Glycine max
  unsure (1)..(368): unsure at all n locations
  Clone ID: PAT_MRT3847_95216C.1
gattggttagaagattagtctgtaaggaaggcaaagaaacaaagaagcgagacatgccaaacaagatcaaccaaccatttcctaactttgctccctcgtctttgttggattccgttttccaactctcaattccccaaatcttaattgctgcaatgcgttagcaaagtttcaatctttgccaaagggacgagaagaatcatggggagggacccatcttctgccaccgtcgaggtgcagattcatccgcgctgcgacnacancaccgtcaaccccggacggggcngaggcactctccgtcgccgccgagtccccctgccgtgcacgatcgcgacttcagcctcttcaagcgctggttcccatggctggtc

SEQ ID NO: 137551 - DNA, 297 bp, Glycine max
  Clone ID: PAT_MRT3847_95217C.1
aaaaaaaacccacggccaaacattttattggtttattattaacaatgggcccaaaaaaagggtgatagattcaggaaatttaggggggctagcccgttccccggataaaaaacccctaaaaatatggcattcatgccttcccttggtaaaaaactaataatcaaaaacctgaaactcgaaacaagggaatattcattcgggggtggattttcccattcccattcacaggattaggcccaagatttttgaaaagaaaaaaaaaacccccgaaaattttaaaaaaaaaccacctttttg

SEQ ID NO: 137552 - DNA, 217 bp, Glycine max
  Clone ID: PAT_MRT3847_95218C.1
gacctactaatttaacaattagaaacactaaatattatatccatgatcaacagctgcaacttagtcaaaaataaaaaaaggccctacggggtttttcaagggtcatgcaacaaatacacaattagtagagaaattttccatcaagctgctatcattcaccagtaatctactccttggaaaacttgttgataaaagacttggggatgtgaggaatcac

SEQ ID NO: 137553 - DNA, 256 bp, Glycine max
  Clone ID: PAT_MRT3847_95219C.1
ggcagcagcttcttccatggatctctcatccccatccttggctggcaaggccgagaagctgggcccatcaaccccagaagtgggaagggtgagcatgaggaagaccggtaccaagcaagtctcctgatgaagcccatggtacggaccataccgagtcaagaacttgagcccatgatctggcgagcacccgaactacctaaccggggagatcccagacgactacgggtgagacactgctgggctttgcgaagaccca

SEQ ID NO: 137554 - DNA, 806 bp, Glycine max
  unsure (1)..(806): unsure at all n locations
  Clone ID: PAT_MRT3847_9521C.1
tgatgcctgctaaactgcagcttgacgtactgcggaccctgcagtccagcgctcgtcatggaacgcaaacgctgaaaaactccaactttctcgagcgcttccacaaagaccgtatcgtcttttgcctcccattcttcccggcactttttttcgtcccagttcaaaaagtactgcagcacctctgtcttcgattcacgcaagttgctccatactttattatacaactctttgatctgccttccagacatgcggaaaacttggctcccttgcttgcctcttgtcgaatccaatacactaattgtttctcttcttctagtaatggccaggtaccaagcataatttctctgtatctgagagtagatctctctcctttttacgctaaaaaatttcaaataccctacagggtccccatgatatggctcgatgtcttccaagtattctttgtattcctcgtcatttcgcagcattctctccacagctagtgcttcccaagccatcctccgatacgatactttctggccagcccaacagacacagagctcgaacatcttttgacagcccttgcataatccgtattgtgtgaacactccctctgggcagaagtatatgtcaataccatagaggaaaagatgtttaaattcgtcagaccgaaatccaagaaactgtaagacattcatattctcggaagtattgggaaaatgtgctttcagtttctttctctctagcaaaccatntgactcccttttcgcttatacggccctttgttaatgtcggtgactggatggaatctattatcctcagtattg

SEQ ID NO: 137555 - DNA, 489 bp, Glycine max
  Clone ID: PAT_MRT3847_95220C.1
attatactaccgtgtctttgagggaccccatactcttcaacgtttccgattgtctcattgaattttcatattcggacgcgactgcggagaggcataaaactaactagcttgcatcttaatcgatatcccagtatgatcaaggggcagctttatgtgtgtcccatgacaaacccataatgcttcccgactatgagctcaaagaagttctataaccaaccgtcgaaactccatgttggagctgaccatatgcaaaggaaggtgaggcagtccctgaggcatcagtttgatgctagcatactactgatggcaatgattgatgattgaacatgacacgttcaaaaggtcttagaggtacgaccatacttatacagtctccagtactccgcctacaaacagctttatcctacctgggatgccgcagcgctatgccttgtgcagcagtattactcaaaggcatctgctggtcatgtgacgtctaattggtgacgt

SEQ ID NO: 137556 - DNA, 501 bp, Glycine max
  Clone ID: PAT_MRT3847_95221C.1
cccacgcgtccgaattgctgtacttaacagtgagtaaatctagtgaagagaattattattgctgctaaaaaaaaaaaaaaaaaaaaaaaaaaaaaaaaaaaaaaaaaaaaaaaaaaaaaaaaaaaaaaaaaaaaaaaaaaaaaaaaaaaaaaaaaaaaaaaaaaaaaaaaaaaaaaaaaaaaaaaaaaaaaaaaaaaagggggggccgtttaaaagaatcaaattttacaaacccgtgcttgcaacgtaaaattttttttttggggcccccaaaattaaattcctgggccggggtttaaaaacgggggaacgggaaaaaccctgggttacccaaattaaatccctttgaaaaaaatccccttttccccagtgggggaaaaaaaaaaaaggccccccccaatcccctttccaaaaagtggcccaacctaaagggaaaatggaacccccccttaaagggcccataaaaccgggggggtgggggggtaacccccaggggaacct

SEQ ID NO: 137557 - DNA, 457 bp, Glycine max
  Clone ID: PAT_MRT3847_95222C.1
gcgtacgaatcttggaattggttcgagcggctaccccaccatattctacgacgccatttatagttcttctatggtctcaaacagaatccaaatccctctcttatccaaccacctcagcgacgcttccatcaaagacaagcccagcgtcacccccgatggacaatatttactatacgtgtccagccacgagaacccgggcgttccacgggccagttggaccgcggtttactccactcagctcgagtcaggcctcacccaaagactcaccccttacggtgtcgctgatttcagcccatccctctctccctctggtctctggaccgctgtcgcttcctacgggcctcacggttgggccggtgaagtagaagatctcaccactgacatctacgtcttcctcactcacgacggaactcaccgattcaaaatcgttgagcacggtggctggcccacctgggtc

SEQ ID NO: 137558 - DNA, 352 bp, Glycine max
  Clone ID: PAT_MRT3847_95223C.1
actggttggctctatattcatcatgatcatgttagttgtagtaaccctagatgctggggactgctatctggtacaatcatctatgcacggttcattgtcagataacaatttggcttccactagagacgactccctatttgggatggggggctcaactctgggattaggccttatatgcccggaggttgggccccgccatcccgagagaagagatgtcgctattgggcccaaattgttatttgaacaatgatcgttgatatgttgttgcttgatgttgtcagcctccgctttatgggtatcttcagcagacttgttcttgctgaatagaaggaactgccagaccgtcggcccc

SEQ ID NO: 137559 - DNA, 425 bp, Glycine max
  Clone ID: PAT_MRT3847_95224C.1
acacatcacaatatcttattcattattacacgtccatttacttacattggagcccgaggacagaagccaaatataccgggtgatgaaattttgtacagcaaaatgaaatggcaacgtattataagatctacatacaaaggggggtggttacaaatgcttggcaaatctttaaatgacttacaagcctggcggcgttggcggcaatgaaaacttgtgcactgcacttgccaaacggtgtcaaatcgaatgataccgatgacgccattgagggatgcggcattagtctattgaagctccttcaacacctgagaaacatataagcagtcaaacatatgctgattccacatggtgcaagttcgtccatcattgaatccatgtgaccggttgtgctcacggaacaccaaaccgagctttatacgaaccct

SEQ ID NO: 137560 - DNA, 347 bp, Glycine max
  Clone ID: PAT_MRT3847_95225C.1
ccacatggaaagtccgaaccgaacgtgaataataatataatattaaacaataaatacattctgataaagcagttcatattacacgaggaggagcacaaaggaaaaaaagaaaaagataccatttacgagctatgacatgaacgaatctagtttcaagtcctaatctctgtaagtcagaaagagatacctttttggttacatacaaagtcacaaaataaaaagtgaaactgtagctttccgtatacaaaaatctaaaccctccaacaacaaaaaaaaagttaagaataattatacaagaagttaaaaaaagtaacactagtgagaagttactgcgcattttttggtga

SEQ ID NO: 137561 - DNA, 896 bp, Glycine max
  Clone ID: PAT_MRT3847_95226C.1
gatggccttctctctgttccaaaaccccaccttccttaaacttaaacccccaaccatcgcgacgccgcgctggggctacgttcgggtgcggtgcggtggaccgcgttcccagcgtagcccattgatgaaaggccgaatcctgagcatcgaagcaatccaagccatccaaaccttaaaacgcctccaccgaaccaaccctccgaacctctcctccctcgtctccaacaccctcacgcgcctcatcaaatccgacctccttgctactctgcgggagctcctacgccagcagcactgcaccatcgccctccgcgccttctccaccctccgatccgaatacggcgccgacctctccctctacgccgagattatctctgccctcgccgccgccgccgccgccgccgaaatgaccgaccacgtggaccgtctcatcctcgacctcgaagctgaaaatgaagaaatcaagtgcgacgatcacaaggggcttgccagtttgatcaaggccgtcgttgctgctaggagcagagaatcaacggtcaggatttacgggctgatgaagaagagtggatatggttccgttaccgagcccgatgagtatgtggttaaggttttggttaatgggctcaagagtttcggggaagaggctcttgccagagaacttcaggatgaatacaaaattgcgcttgctatgttctctaagccccaattaaacacattgcgcttttagtcaagtttgtaaatactttttttatttttatttttaatatagtcattaggtaactgcagaagaagaaagtgctggctggcattttgtcaatcccattttttttcaaatgttatgattacagtgttacagtaaacttatttttaattgaatggtttctgattaatttaaaccc

SEQ ID NO: 137562 - DNA, 1275 bp, Glycine max
  Clone ID: PAT_MRT3847_95227C.1
acggctgcgagaagacgacagaaggggagagtcgaaagagaatagcaaaaagcacagaacaatccgaaaatggcggaacgcgaaacctccgaatccgaggacccctcgagttcaggttcagagtacgaggatgcacaaacggtagagggcaatggtgtgaagaagaagaagggtttgtcggagtacgagaaacagaggatgtcgagaattgccgagaacagagccaggttggaggctctgggtttgccccaaatcgcttcctcgttaaagggttcttcgcagcctcacaaagccacgaagggcaaagagaagaagaagaaggttaaagatgacgatgatgaagagtatgaacccgaagaagacgagggagaacaagtatcgggttcttcaagtgaagaaaatgaggaccgtaaagacgaggactttgcaattgaaaacgcttcagggtcacggaaaagaaaggtgaagagcaaaagtttgaaaaagaaagccagagtctctgggaagaagcatgttagtaattcagagtacattgattacgatgatgatgaagctcttaggcaggcaattgctctttccttgcaagactctgcagaaggttcttatttgcctgacaagaatgtagtgaacacctgcaagaacgagaaaaagggaagcggtcatgttcaagaagataagggaagaaagaagaacaaaaaatcgtttgctagtcggctgcaactgactgaggatgagctcattgtacacttcttccagctagatgaagcaggaaaaggaactataagtgtaagggatatacaaagggcagctacagctcatgattttttatggacagacaaagagttagttgatatgattcgctacttcgatagtgatggagatggaaagctaagccttgatgatttccagaagattgttgttcgttgcaacttgattaaagggtcttgaaaatcttgatagaatcatggttagacagagatgatagcacattggaagatattacaaggactgttatatatatatatatatattttcatggagtgacacagatttagtattccttgtatcccattatcactatatataacttatattgtactgtgctgcttttccttttctgtatacttcgtaactttcatgagctatgtgttcatttataacgtaaaatgtaattcagcagcctgtaatttgatccccctaaaatctcaaaatgtttcttactatttcattatggtatctttgaatttgaacccttaaaaaaaaaaaaaaaaaacc

SEQ ID NO: 137563 - DNA, 546 bp, Glycine max
  Clone ID: PAT_MRT3847_95228C.1
attttggatagtcaaataacagtgcacaaactttttttcttttctgattaatgagtatcctaaatacattatttaagaaattaaaaagaaaaagattttattgaaaatatgggactcgaagtgcatttaaaaatcataggaaaatatatttttctgcgtctcagtaaaaaaaaaattccttttatttctttaaccaagttaacatttgtcttctttttttttttttattctaaaggaaagtgtagctcttcgaattttttttccttaccaaccaaaaatctctacattaggtaattattctagggttgaataacattattaggacatttccattctagcatctcctatatatgagtttttaagcgggtcttactagtagatatctcatttttatttttttcaacttaaacacttcataaacactcaattcctccaactcaaccacctaaagaaatattgctaaaataaatttcatcaataacctctcatccttacattttattaataatttatttattaaattacttttactaacattgatgcaaa

SEQ ID NO: 137564 - DNA, 343 bp, Glycine max
  Clone ID: PAT_MRT3847_95229C.1
gcccaattcatcattggacgttgcatcactggaatcggtaatggcatcaacacgtctacgattccaacttaccaggcagagtgctgcaaggccaagaaccgtggtaaggttatctgtatcgagggcagcatggttgccattggtacgctgatcgcctactggatcgattatggctgcctttacggtcccgatgacttcacatggaggtttcccattgccttccaatgcgtcttcaccttcattgttctcggcatgatgatccagctgcccgaatcgcctcgatggctcctgactcatcaccgggaggatgaagctgccactattcttgcatcactcaacgggc

SEQ ID NO: 137565 - DNA, 286 bp, Glycine max
  Clone ID: PAT_MRT3847_9522C.1
ttattttttatttttttttttttttttttgaaggcctaataaattttttatgagagtattggggcaacaaaacaacactttctcaaacaaaaaatcaagtgaaacacaaaaatttttcaggaaaaatatcatacacacttaaagaagaaaaaaaaacttaatttaaactaaggacaaattcaaaagaaacaatgtataattcagaaagaaaagtattaaatccaaagattaaaaactatattctaaaaagacaaacaaggatctatggaatatattgggagcaaaa

SEQ ID NO: 137566 - DNA, 892 bp, Glycine max
  Clone ID: PAT_MRT3847_95230C.1
tacggctgcgagaagacgacagaaggggatagtagcaacttcaactactgatatcatatcacaaaacagtgaaggattattagggaagttttattagtttgaaaccgcaccaatttattatataacatgtgtcgtggaacttttgtgggtgcaaccactgttggagtggtggaggcgttgaaagatcaagggtattgcaaaatgaacaacacaatgatgaagtcggtggctcaacaagccaagagccacttagggtcagcaactcgggccaagaagctggcttctccttctccttcttcttcttcagcaacttcaaataatgagacttacatgatggccagtgagtcatccacagcaccaatgtatgcgagttattggctacctcttaatcaggtgctgataacccatgatgacatgaacatattaggtggggtgcttcggcttcatgacaaagggggtcatggaagccaccaagggctgaagagtgtgatctatcacttcaaaggaaatagagaatttcctaggctgagaattgggattgggagtcctcctgggcaaatggatcctaaagcatttttgcttcaaaagtttaatgtaacagctaggcaacgaattgatgaggctttgcaagagggggttgatgccttgaagctccttttatccaaaggtttggcagtgagtgcaaaaagattcaacaaagaacaaaagtataagcacctaagagtgcagaatttaccagtttgataggattccgtgatggaaaattgcattataagtatgattagttcttcgctttataggttgcaatatgtgtaaaacttaagcgattggaaattggcttaattttgtaacattccagagatagatatagcttttaaaatggtttatgacc

SEQ ID NO: 137567 - DNA, 1256 bp, Glycine max
  Clone ID: PAT_MRT3847_95231C.1
gtacagtagttcatcatcttcttgcaattgcagcattaaaccgtggcatttacggcagctagatgttaataatgcattcctccatggagaacttgacgaggaggtttatatgcaaatacctccgggactttccgttgataacccaaagcttgtatgtcgccttcaaaagtctctttatggtctcaaacaagccagcagacaatggttcgtaaaattgtcaagcttcttaacctctcatggctttcatcagtcaactgcggatcactctctctttttgcggtttactggaaacatcacaaccatccttcttgtttatgtagacgacatcattctcacaggaaatagcatgaccgaaatacaaacaattgtcaccctcttagattctgaatttaagatcaaggatcttggggatttaaagtttttccttgggcttgaaatcgcccgaagctcgaaagggatacacttatgccaacgcaagtatacattagacattctaaatgcatccggaatgctgggatgcaagcccaattcaacaccaatagactactctacgaagttacaggcagattcgggcagtcctctctcagctgagtcttcttcctcttatcggcgattgatcggtaaattaatataccttaccaacaccaggcccgatataacgtatgctgttcaacaactcagccagtacatggccgcccccaccaatgctcatcttcaagccgcctttcggattcttcgatacctcaagagttctccgggatcaggtatcttcttcactgccgcaggtaccgcacaactccgagcctttagtgactcggattgggctggatgcaaagattcaaggaaatccactaccggctacttagtttactttggttcctctctggtttcttggcaatccaagaagcagccaactgtgtcacgcagttcttccgaagctgaataccgcgctcttgcctccactacttgcgaactacagtggctgaccttcttgcttcaagactttcgtatctcattcgttcaaccagcgaacttatactgtgataatcagtcagccatccaaatagctactaatcccgtttttcacgaacgaactaaacatatcgagatagactgtcatattgttcgtcaaaagcttaactcaggtctcctaaagcttcttccggtttcgtcagctttacaactagcggatatattcaccaaagctcttgcacctgctattagtttaatctacaataaaactaaacacttttatc

SEQ ID NO: 137568 - DNA, 222 bp, Glycine max
  Clone ID: PAT_MRT3847_95232C.1
caagattacatattatccttatttttaaccataagtttacgatgattaagacacaccaattataaggtaaaaaaattgataatacatagcatttcaaaagaaaaataatcagggaaatgaccaagttcctaaaatctcattattaaaccatatactattagacagcgggggcagtgtgctttttttgaaaaggaacaacaattgattatgagggatagttct

SEQ ID NO: 137569 - DNA, 292 bp, Glycine max
  Clone ID: PAT_MRT3847_95233C.1
gggttgggttttttgggagaaaaaacaaaaccacctttatttccatcactttgggttccactctccctcctatttccatgggaataaaaactcagcattaaggggctttaggtggatgcatagatctggggatttaggttcagttttttaggggggcaggaaagtaacgggctggtttttttgggttgggtatgcggtcatgggatgaatataaacttttcattaaaaagtggccccgagggggggaccctttttttctttttttggaaattttaattttggttggccaatt

SEQ ID NO: 137570 - DNA, 778 bp, Glycine max
  Clone ID: PAT_MRT3847_95234C.1
aattcggctccggccttgcgaaagaaagaacttgctctgctctctctttgctttgctgcttctccctataatctctctgcaaacttgttcatgcaagaaaccgactttagaatcagcataaagttgggttatttcaagcttctgattccaggacgacaacaacaacaacaacaacaaaaagtggttccttttatttttcctcaataaaataccaaatatcttactgtatcaaatataatcacctcctgtgatttatacttttggttcttgcaaagtaaggaatgatgtactctcaaaaactggtttccttgaatcactataaactataaaggggtctcttcagtagtgatttactagtataaaagtgcgtttggattagttttatggtaaaaaataatcaattaatttttcatggtgaaggtaaagcaacaaatagttgcttctactttttcatggtatcggtatcaccatgattttgtggggtagaattgattcttatgtattatccaaacatgctagtagcgcttttacatttgggatgtacattagggttagtagttagaggttatttaggaatggatgttgtgttcatatgcttggggtataaaagaattgtttagccatttactatgaaaaacaatgaaccaaattggttgtggccatcataactgatttcaatctccttctgttatatcaaattcatgggatcagatgtgtggttttgagcatccattcaaacttaatggtgaatcataattgtaaagccataaaacatttt

SEQ ID NO: 137571 - DNA, 1528 bp, Glycine max
  Clone ID: PAT_MRT3847_95235C.1
aaaaaaaaagaggcaaggttaggtaataggtggttttatttgaaggaaagaatctatattgaatgttctggtgtgtttttgtagatagaagcccagtcatggataggcttctatcatcgtcttcacccccttctttcacatttctcactcgattcgaatctgcaactgcaagattcaatttcacacgttctcattctcacttgaagcgggtcacctcaatttgttgccagcatgcaaatccatctcctttcactccctttctcgcttcttccaaccaccccaatacttttccatccatttcctctccttcagttcgctccacacccgaatcccattctctcaatcaaatcaaaactggggctttcccaaaaccaaaggcaataacagctcggacgcttgtaatactttctgctcttgctatgatcttaatccaaccagctattgcaccagcagcttttgctacctttcaaactgctgccaagaccggtggtcctgctgctgcagttggtagaaaactaatccacactgagctactaagtagtgcttggactgggtttcttagctggctgcttgcacaccttatcagggcctgaccacctagctgccttggctccattgtcaatcggtcgaacacgaatggagagtgctgctgttggagccctttggggttgtggccatgatgctggtcaggttctttttggcttaatatttctgctcctcaaggatcaactccatattgaaattatccgaacttggggcaccagtgtggttggatcttactctgctaataattggtgctatgggaattaaagaagcttcagaagtacatgccccaattgttgcattagaaagtgatgaatgtgatgtcaacgtgtatgaatcacttgataatccaacagtgggcaaaaagaagataggttttgctacttttgcaacagggatagttcatggcctgcaaccagatgcattgatgatggttttgcctgcccttgctttgccttcgcgtttggctggtgctgcgtttctcatcatgttcttaattggaactgtaattgcaatgggaagttataccgtgtttataggttcgtgtagccaggcactgaaggatagagtacctaggataactgagaaactcacttgggtttcctcccttattgcaatagccctcggatttgctatcattattagccagttttttgggtttagtctgtattaaaacatctttaataagaaaggtactttttttcttttatttagaaaaagtagttgcgttggacagtgaattggttagtttacaggaagtagggtccagtatacatgagaacttgtttgttaataaattaatttgcggtcgtaagagagtaatttgattgtttggagaaaggtcattatttatgcaagattttgattgtctattatttgactacgtttgtgaatgtttatatcgggtaggttcaattactctactgccaagaactatgttactgtttcatttgaagatttcgattgattttaccaataaaaaaaa

SEQ ID NO: 137572 - DNA, 391 bp, Glycine max
  Clone ID: PAT_MRT3847_95236C.1
ctccggctctcgattgacgcttcctgtccgctcgagaccgatttcaactacgaccaccacgtctacctccagtgcgacggcctccgccgctccagatacttctgcgcgctcctctccgaccggtggatcggccacgctgcgccggagctctggtcctggtgctgctgcaaccgagagcgcgaactggacctattccgcctcagcctcggtgagggtcccaccgggggatcgatccaatggcatctcaccgttctggagctgctgtacacgaacgacttctgcgtggtggcggactgcgcgaggacggcgctggatctgctaccggtggcgctggagctccttttcgcagattgcgcgcgctggtgccaggatttactcgaggcggcgccat

SEQ ID NO: 137573 - DNA, 306 bp, Glycine max
  Clone ID: PAT_MRT3847_95237C.1
acacaactcattacaaaaggttaagtatcctcttatatttcaaatcaaccttcaacttccctatatttcactactattaatacatttcatcatttaaaaatcctatttccacctatctcttctacacccccttacttttacccaatttcctactttctaccattgataatatatattcttaacatttaatcatttttctattctttccctagaactaattcttttttttaattcttaatatattctttactttatttctttcattctattcctaaatacatatattactccattctcttcctttct

SEQ ID NO: 137574 - DNA, 752 bp, Glycine max
  unsure (1)..(752): unsure at all n locations
  Clone ID: PAT_MRT3847_95238C.1
ccacgcgtccggatcagaaggcctgagtcctgagtcctgagtcactctgctcagtagcagttgtcatcttgatttctacttccattcccacaaaatgcgagtccttgtcttgctcatgctcttcctccactccctccacgcagcgcgaatctcagaataccgcgcgcttctctctttcaaagcatcttccataaccaacgaccccacccatgctctctcctcctggaactcctccacccccttctgctcctggttcggcgtcacgtgcgactctcgccgccacgtgaccggcctcaacctaacttccttatctctctccgccactctctatgaccacctctcccacctccccttcctctcccacctctccctcgccgataaccagttctccggccccatcccggtttccttctccgccctctccgccctccgcttcctcaacctctccaacaatgtttttaaccaaacttttccttctcagcttgcgcgcctctccaacttggaggttctcgacctctacaacaacaatatgactggccctttacctctcgccgtcgcctccatgccgctcctccgccacctccacctnggcggcaacttcttctccggccagatccctcccgagtacggcacctggcaacacctccgctacctcgccctctccggcaacgagctcgccggctacatcgnccccgagctcggtaacctctccgncctccgggagctctacattggctactacaacacctact

SEQ ID NO: 137575 - DNA, 543 bp, Glycine max
  Clone ID: PAT_MRT3847_95239C.1
tgatcatcatctagctatctcgatcgaactgtccaaggtcctgtcaccgtaattttcttcgtattggtcctcttggtcgtcctcctaatagtattggttgtttcctagtcgtgatcgtagtctttactgttgtcctgttagtcgtcttgtttgttgttgccattggtcgtattcctgttatgcggttactaggtccatgtgttctgccacggccacggcctaatcttgccacgaccacagcacagcattggtccgtccgcgatatcgagatctaatgcttagcattttaacacccgaaggcccaaggagcgtgtttagcttagccgggtaggcctctctgaatagggcagcccaccccattggtgtgccactccttacaatttcggcgcataggcccgttgctcgtgcactgccattccattaatttgccagtgatcccgttccttgtgtagtcaccaccaagactgccttgcatgatcacggcgtgggagtactttatttatcactctgcttattatgcagatacaccccccaaacaaaaga

SEQ ID NO: 137576 - DNA, 269 bp, Glycine max
  Clone ID: PAT_MRT3847_9523C.1
ggtttattctattacaataggaacgttagatccaccatatccgaaaggactcacaccagctacgaaaaagagcaagatcctgggtgtgcccatttaccacatcaggattgatataaaatggggtatctataaaatcaattaacgagttcggtcgcttgacatttaaagttggcggaagctggtcatgttccatagatgcacctgtagttactagtgcggacgcttctggcactagttctaagggacctacattacttataacagcacca

SEQ ID NO: 137577 - DNA, 445 bp, Glycine max
  unsure (1)..(445): unsure at all n locations
  Clone ID: PAT_MRT3847_95240C.1
ggccgcccnnnacncnnnnnaaaaaaagctggtaaaatgtgcgaaaancaagaaaaaaaacaaaaggggggcagggggagagcanccaaaaaggacccaacccaaacaaaacaaanaagnccaanngaagggangaaangaaaaaaacccgccaaaggaaananggcccccgagggcaggacaaaaccgacccccggaaaaggcagaaaggngagaggacggccccaagcggaaaaaggaaagaaaccagggaggacaagcccacccaaacagaacacngcccggggggaaccgccnccaagggcaangaaaaagccggccacaaaacaaaacaacagaanacaacgaggggaaggcgccccaagaaagcccaaggggaggggggcagagccagcaagaacagaagggaggaaaaacaaagggcccacacaaggcgcacaccaaa

SEQ ID NO: 137578 - DNA, 495 bp, Glycine max
  Clone ID: PAT_MRT3847_95241C.1
tttctatttgacaccacaatttttttttttctgttcagtcctttttttaatgagtttattttggtgttggtctttgattattggaagaactcatcaaacttttttagttgattagaatgcaatccttggtttttttcaatttcaatgagtttatatatatatatatattttttttttggaccgccatgacatccgccattttccgctacgccatctgccatatttttatggcggatttttgactttccgccatgaaccgccatccgccattaacaacattggatatcatacattacaattctaaatgttttgacaaaacatgaaacttgaaaatgttaaatttaacaagtaaaaataaaaacttattctcttaagtttagtttgatgcatagaagctaatagtgtgcaatagcagcacggcaccgtggcaccctgctgttcctccaagcgtcatatctactatggtttgataaataccattcctaagcagctctt

SEQ ID NO: 137579 - DNA, 761 bp, Glycine max
  Clone ID: PAT_MRT3847_95242C.1
caagtggtggctatggcgccgctggtggtggtggtgtgtaccctgacactaccactgatggtgggtacagcaaaacaagtggtggtgggtatgatgatgaggttgactataagaaggaagagaagcaccacaagcatcttgagcaccttggtgagttaggtgctgcatctgctgctgcttacgccttggtaatcttctttaccattattattaatttgctttttatatatataatatattttcactaagttaacatgaaaatgattgtaaattaatgtatgtatgcactaaagcatttatttgttcttaattaaccttttcatttcgacggaaaattaaataaaatttatttaagaattgttttcataaaaaattaaattctcataatattcaaacatttaattttaatttcagcatattaattatttttttcaattcatttggttatggatatatacgtttagttttatggtcttgtggttctgaaatttcaaaaaactaaaggttgattacaaggacaaaaatttagatgcagttttatagatgtttgatgtttgatagtagtattatttttcattttgatatgttttttgaatatcatatgtttcattttaatacgtctttttaatttaaaccattttatattttttgaattagaaggtggaataaacaaagatttaccggttttccccttttcaatttaaatataaaaaaattcaatttatggcaatataaaaatttttacctttcaattggtaacc

SEQ ID NO: 137580 - DNA, 1104 bp, Glycine max
  Clone ID: PAT_MRT3847_95243C.1
tgtgaattccccctttcatgcatctcgtcattttcattacacctttttctttttggttcagttcagctagctgcagcctgcagaatttataacaacttctgactatgaccatgtcgggtcctgaagaacacggaagcatgagcttaatgggttcgttacgtgtgatagagctgcagctagtggcattcgcgttggttttctcagcaagtggtcttgtccctctactcgatttagcttattcggcccttatctccatctacctaatgctacttgggcgttttgcgtttccgtcgcatgggtgtgcgccgggcccgatgttccacgaaagtgggcttttccaagtgtacgtggttgtgggcacgacggtgggcctgttcttgccgctggcctacgtgcttggtgggtttgggagaggggacaagcaggcggtgcggtcggcgagcccacacttgttcttgctggcgttccaaatactgacggagaatgtgataagtagcttctcgctgttctcgccaccagtgagggccatggtgcccttgatgtacactgtgcggaggatctttgtggatattggttggatacatgatgtgtgcctcaacaagactttgcccccatatgcaaacctcaaggataaggcgtggttttggtttggcagggttttggcagtggctaacctggtatatttctccatcaatctctttgggttcttgataccaaggttcctgccaagggcttttatgagatatttccaagagaggggagagatttatgccaagctagttgaagagaagcgatatgtgaatgtggtcaacaataaatcccatccaccggacaagaagtaacattaactaaggatttttgtcaatatctgttactattttaaacgtgtgaatcgtaattcgagtctctctccccaaaaaggaaatcatctgaaaagtcaatgttctcatgaagtagttctggtacctttcagcttggataaagttcatcaagttattaacagatgtcttgtttctcccgaaaagatttgctttctgtttaacaatgactcaacatgtataataaataattttccacgataagggacaagccaagttgaagatt

SEQ ID NO: 137581 - DNA, 653 bp, Glycine max
  Clone ID: PAT_MRT3847_95244C.1
ctctaccaatctttaagttcaaattgaagaacaatgaaaatggtgatgaccaggatgccaattcagctatagatgaaggtggaattttggctgcagggacagaaaaggagcgaatgatttcaggagaagatgctgtttgttgcatttgcttagcaaaatatgcagatgatgacgagcttagagagttaccttgctctcacgtttttcacgtcgaatgtgttgacaaatggttaaagataaatgcaacctgccctctctgtaaaaatgaagttggtacgagtaatggagggtccccttcagcctgagagagactccagtacgtagccgaagtttatctctgctgaaggcacatatcccccatgaagttgcagcttttcaagtgtacatcatcaaacttttggattctgctttgaaggtgagatccaaagatagatgcaaatcaatatcttaaacatgtgatgcaaatcaaggttgagaatttgtttctacccgccctagtcacctctctttttacgcttttttcaccggttttacatactcaccaagtattgtttgtagaaaataggatgtttcaaatctttcttctgtttatcagttctgtatatataacaaaatttagttaaaatgttgattttttaaaatttaaaactgta

SEQ ID NO: 137582 - DNA, 263 bp, Glycine max
  unsure (1)..(263): unsure at all n locations
  Clone ID: PAT_MRT3847_95245C.1
gagaaggcaacaccacgcggaaccaacnacaaggncccgcagagacccaggacacaggggacgccaaggaaacagaggggggggaaccaacanacancaagggcangacnaaggacccgcccggagcncaaggagagaaagacgccgagngccngccgaacaccggcgacagaagaacgaccgagcacagggcgccagcaggaaacaggaacaaggacaggccggcngcaaagaaccgncaggagcgaggagcggaacaaaag

SEQ ID NO: 137583 - DNA, 253 bp, Glycine max
  Clone ID: PAT_MRT3847_95246C.1
tcgcatgcacgcgtacgtaagctcggaattcggctcgaggtggctttgacagcccacttgtcaatctaggctaattatgtgctgtgtttcagaatagtcattagttactatttagataagagactggacgggaatacttcatgctaacaaaccattatgaggtctgcctgcaagtgttcatgtacttgatagccttgtatctgaggaaagtgttcttctcatgaagttactgagggctcttatgctgcggaag

SEQ ID NO: 137584 - DNA, 462 bp, Glycine max
  Clone ID: PAT_MRT3847_95247C.1
cccacgcgtgcggctaatcgtccggagaactctgacggatatgactatgaccactctggcggagagcactgacaccctcgacgaggagagcgccgacaccattgacaatgagagcgtcccaacgcaccaccaggagcggattcctgctgaccagcagatgctggatggtgctaccctgcctgtctacgacatacagaccgtatctgccttcaaccttgagctggaattacccgtggggcttgaacttcgtctccgagggggggatgaagctccatgacatatgaagaacgtggacgcaaaacgtgtgaagaactatgatgcttgatgagactgtcagaatgtgcctagctcaatagtgcgccatgagtagtactcacttgagatccaacctacatgtgctctaatgtccacctacgaaaggatgaatgtgtgaaatatgaaatgattaattgtcaaaagggc

SEQ ID NO: 137585 - DNA, 1518 bp, Glycine max
  Clone ID: PAT_MRT3847_95248C.1
gaatccttatccaattgaagaggaaccaggagacatcacaagaaaaaatgatgctttctttctttctttttaaaaaagaaaaatgtttagacttcacaactttcttgattctttcaaacaacaatggttctaatatacttgcacaagtataaatagcatgaattattgttctcgaatctgttagtggttcgctgtaggcttattttttatcatccctcattcagagcttcatacattttaatatttgaccatggcttaattgaacagactactagactgtacaaggggaaagaacatgctgaagttgaattcattgttggacctatacccattgatgatggagttggcaaagaaattgcaactgagatcaaaacaaatctagcaagcaacaaaaccttctatactgattccaatggacgtgatttcattgaacgtgttcgagactatagagaagactggcacttggaagtaaatcaacctgttgctggaaattactaccctatcaaccttggaatttacctgaaagataaaagcaaagagttctctatattggtagatagagccgtggggggctccagcatcatagatggacaattggagctaatggttcataggtttgttatgctgttcaagctcaactgcttatgctcattgtgtatcattcaatattctaccaatcaaactccactgtctccatttccccgcctattttatataggaggttacttgaggatgattccagaggtgttgcagaggcactgaatgaaacagtttgcattcatgataactgcactgggttaactgtgctagggaagtactatttcagaattgatcctgtaggagagggtgccagatggcgtcgatcatttggtcaggagatatactcacccttgcttttagccttcacagagagtgaaggtcactggggagattctcatgtcacaaccttctcaggaatagattcctcatacaacttaccagataacgttgccatagtaactctccaggatctgggtgatggaaaagttctccttcggctggcacacttatacgagattgacgaggacaagtatctttcggttaaggcaactgtagaacttaaaaaggtgtttcccaacaagcagataaacaaaataactgaagtgagcttatcagcaaaccaagaaagagatgaaatggagaggaagagattggtttggcaagttaaagggtcacctccagaacctaaggtgtggaggggaggaccggtagatccagaaaatctaattgtagaacttgctccaatggaaataaggacttttattatcagttttaggcattaaaagtccaccaggagcactactgaaaaataacgaaataagaaattgtatcagactagatatttccaagaaatatgtccagggtttgtttggctaaaggtgtatggagtcaagttcattgccaataaaagtgcattgcttctcccctttactcttgacatctaaccaaaatttatgacactactttttttcttgactt

SEQ ID NO: 137586 - DNA, 201 bp, Glycine max
  Clone ID: PAT_MRT3847_95249C.1
ggcatcgaacagcattactccatcgcatcttgaagcataaattttctcccacactcgtcgcttcatggctcgtaacaagtgcatcaatcgtcaaatgcactagttagaccgatcgtaactggtaaccctacagccaaggttctagaaaatccgaagctagcacctatggcagtctgctgctgctactgctgctttcatgca

SEQ ID NO: 137587 - DNA, 938 bp, Glycine max
  Clone ID: PAT_MRT3847_9524C.1
ttcccgggtcgacccacgcgtccgcccacgcgtccgcccacggctgcgagaaggcgacagagggggatacaatacatacatcagtgccgtcgtttcggtgaataagtgtcgtttaaagatgcagagtctgcaacagaaggcttccgaatggagcggtgtttccatagacgacgctttcggcatcgacgacaccaatctcttccagaaactcggcctccaaaccttcattaacctctccaccaatttctacaacagggtttacgatgacgaggaagaatggtttcgttcaatattcgcgaattctgagaaggagaatgccattcaaaaccaatacgagttcttcgtgcagcgaatgggtggtcctcctctcttttctcagagaagaggacatcctgctctaattgctcgacatcgaccatttcctgtcacgcatcaagctgcagagaggtggttacatcacatgcaacatgcattagacagtactacagatatagatgatgactcaaagaccaaaatgatgaactttttcaggcacactgcatattttttggtggctggagatgagctaaagaatcaaaaccaacatattccatgcaaacatgcagcagccaaaaaggatgattcttgattcataaaactgtttcaattttctttaatttattgcctttatccataaaactttgtatcagagtagaagcattgtccaagtgttggggagatgaaaacgaagccacattacacacatgccaactttgaaaccaaatagttagtaagacgaggttgatgattgtaagcatagaatcgataaaatacactaagaaaatacaaatagtgttttgacaaaaaaaaaaaaaaatacaaatagcaatcttgaattgcctttaaattgtacttctctaaactgctatcaggtcaaatcctcaatcaacgatgttttc

SEQ ID NO: 137588 - DNA, 1215 bp, Glycine max
  Clone ID: PAT_MRT3847_95250C.1
cggctcgagaaaacatgctgccaatgaggcctggccaatattacgcgcacaaatcatataatgtggacaatggggacagatttcaagtaccaatatgcacaaacctggtttcggcaattggacaagtttattcactatgttaatcaagatggccgtgttcatgccttatactcgactccatcaatatatactgatgcaaaacatgctgccaatgaggcctggccaataaagaccgatgacttctttccgtatgcagatcgtgtaaatgcctactggactgggtattttacaagcaggccagcaatcaaaggttatgtcagattgatgagtggctactacttggcagcgaggcagttggaatattttaaagggaagagtgccttaggtcccaacactgactctttggctgaagctttggttattgctcaacaccatgacgcagtatctggtacagaaaagcagcatgttgctaatgattatgctaaacgactttcaataggttacacagaggctgagaaagttgttgcagtatcacttgcttgcttgacagagggagcaaccaaaacaggttgtaagaacccacagactaaatttcaacagtgtccacttctgaacataagttactgtcctgcatcagaagttgattcctcaaatgggaaaaacttggtaattggtgtttacaatcctctaggatggcccacgcgtccgcccacgcgtccgcccacgcgtccggaaaatgttgttcgggattctagtgggaaaaagatccaatcccagctggtgccgatacttgatgattttcttggtttaagaaactaccacactgtggcatacttgggagtgtctccaactgtaaaacccaaatactggcttgctttttcagcagctgttcctccactcggttttagcacttactatgtatcctatgccaaaaaagaagctactatttcagatagagatacagcttaccaatcatggaataagagtgatacaattacagtgggcctaaaaaacttgaaactagtttattctgtgaaggaagggaaacttactaaatatatcaacagcagaagcaaggtcaaagaacctctagagcaggcatataaattttacactgggtatggaaatgatggaacagaaactgctcaggcttctggagcatatatttttcgccctgatggttcaccttctcccatcaaatccaacgggaagtct

SEQ ID NO: 137589 - DNA, 3459 bp, Glycine max
  Clone ID: PAT_MRT3847_95251C.1
tcggaattcggctcgagctcgagccgaatcggctcgagaggaatcattgaatcgcaacctcacgacaagaaaaaaccgacaaagattgcggagtatcctccgccagctagttcttccatataatataaccactttattacaaataaataataacattaattctctttggattagacttagatcaaatcaaagtgttcttcttgcttggtcacagactcatagtcacttccatggagaacactggtttgtgtgtactatgctttatactactcctgttggggtgtgtcatttcctcagaatgtaagtatataagatacaacacaacatcaaccattgttcctgggaaactcaacgttcacttggtccctcacactcacgatgatgttggatggttgaagaccattgaccagtactatgttggttccaacaactcaattcagggggcgtgcgttcaaaacgtgctcgattccctggtaaccgcattgctggcagataagaatcgcaagttcatatatgttgaacaggcatttttccagcgatggtggagggagcaaagtgatgatatccagaatatagtcaaggagctggtcaactctggtcaattggagttcataaatggtggtttttgtatgcatgatgaggctgctactcattacattgacatgattgatcagacaactcttggacatcaatttattaaagaagaatttggagtgactccgagaatagggtggcagattgacccatttggacattctgcagtccaggcctacttgttgggggcagaggttggatttgactctctattctttgcacggattgattaccaagacagagccaagagaaaagatgaaaaaactcttgaagttgtgtggcggggctccaagagctttggttcatcatcacagatattttctggtgcattccctgagaattatgaacctcccagtagtttctactatgaagtaaatgatgattctcccattgttcaggatgatgtcagtttatttgattacaatgtccctgaaagagtaaatgagtttgtggcagcagcaatatcacaggccaatattacgcgcacaaatcatataatgtggacaatggggacagatttcaagtaccaatatgcacaaacctggtttcgacaattggacaagtttattcactatgttaatcaagatggtcgtgttcatgccttatactcgactccatcaatatatactgatgcaaaacatgctgccaaggaggcctggccaataaagaccgatgacttctttccgtatgcagatcgtgtaaatgcctactggactgggtattttacaagcaggccagcaatcaaaggttatgtcagattcatgagtggctactacttggcagcaaggcagttggaatattttaaagggaagagtcccttatgtcccaaaactgactctttggctgaagccttggctattgctcaacatcatgacgcggtatctggtacagaaaagcagcatgttgctaatgattatgctaaacgactttcaataggttacacagaggctgagaaagttgttgcattatcacttgcttgtttgacagagggagcaaccaaaacaggttgtaagaacccacagactaaatttcaacagtgtccacttctgaacataagttactgtcctgcatcagaagttgatttctcaaatgggaaaaacttggtagttgttgtttacaatgctctaggatggaaaagagaggatatcataaggattccttggaaaaaacatccaatcccagctggtgccaatacttgacgattttcgtggtttaagaaactaccacactgtcgcatacttgggagtgtctccaactgcaaaacccaaatactggcttgcttttgcagcaacagttccccccattggttttagcacttactatgtatcctatgccaaaaaagaagctactatttcagatagagatacagcttaccaaccagggaataagagtgatacaattacagtgggcctaaaaaacttgaacctagtttattctgtgaaggaagggaaacttattcaatatatcaacagcagaagcaaggtcaatgaatctctagagcaggcatataaattttacgctgggtatggaaatgatggaacagaaactgctcaggcttctggagcatatattttccgccctgatggttcaccctctcccatcaaatccaacgggaagtctcctctcacagtttttcggggaccaattgtgcatgaagtgcatcagaagatcagtccatggatataccagactactagactgtacaagggggaaagaacatgctgaagttgaattcattgttggacctatacccattgatgatcgagttggcaaagaaattgcaactgaaatcaaaacaaatctagcaagcaacaaaaccttctatactgattccaatggacgtgtttgaacgaagagtctgttcgagactatagaaaagactggcacttggaagtaaatcaacctgtagctggaaattattaccctatcaaccttgggatttacctgaaagataaaagcaaagagttttctatattggtagatagagctgtggggggctccagcatcatagatgggcaattggagctaatggttcataggaggttacttcaggatgattcccgaggtgttgcagaggcactgaatgaaacagtttgcatccatgataagtgcaccgggttaactgtgctagggaagtactatttcagaattgatcctgtaggagagggtgccagatggcgtcgatcatttggtcaggagatatactcacccttgcttttagccttcacagagagtgaaggtcactggggagattctcatgtcacaaccttctcaggaatagattcctcatacaacttaccagataacgttgccatagtaactctccaggatctgggtgatggaaaagttctccttcggctggcacacttatacgagattgacgaggacaagtatctttcggttaaggcaactgtagaacttaaaaaggtgtttcccaacaagcagataaacaaaataactgaagtgagcttatcagcaaaccaagaaagagatgaaatggagaggaagagattggtttggcaagttaaagggtcacctccagaacccaaggtgtggaggggaggaccggtagatccagaaaatctaattgtagaacttgctccaatggaaataaggacttttatcatcagttttaggcattaaaagtcccctaggagcactactgaaaaataactaaaataagaaattgcatcagattagatatttccaacatcatgtaagccagcaacaagaaatatgttcagggtttgtttggctaaaggtgtatggactcaatcaagttcattgccaataaaagtgcattgcttctccccttttctcttgacatctaaccaaaatttatgactactttttttttcttgactt

SEQ ID NO: 137590 - DNA, 389 bp, Glycine max
  unsure (1)..(389): unsure at all n locations
  Clone ID: PAT_MRT3847_95252C.1
ctacccgccgntcgatgggaattgcncttnaaggcgtntcgtagggctaatccgcctnacgagggtcaccaacggcacgtgcctttggggggccnaggccccctantgttggtcggnaaacggacggcgggcgcacncgtcgnttntagcccggattntgacttaaaggcgttcagccataatccaacncacggtagcttcgccccactggcttttcaaccaagcgcgatgaccaattgngcaaatcaacggttcctntcgtactaggttgaattactattgcnacactgncatcagtagggtaaaactaacctgtntaacnacggtntaaacccanctnacgtnccctattggngggtgaacaatccaacacttggngaattctgctt

SEQ ID NO: 137591 - DNA, 247 bp, Glycine max
  Clone ID: PAT_MRT3847_95253C.1
aatagattctttccatcagtttgctggggtgaagtggctgcgggagaagcctttgtctaagtttgaagatgtgcaatggctccttatacacaaggcagaagaggagaaactcattcaagttactattaactgcctgagcagtatcttaataagttaatagaccaattcaatgaatattatattagtgacagtgttagcagatctgctcagctgtggaatgatcagaggaagttgatactgcatgatg

SEQ ID NO: 137592 - DNA, 424 bp, Glycine max
  Clone ID: PAT_MRT3847_95254C.1
gcgcttttgggttttttgttttttttttttttttgggaaactgcaaagttcaaattaagggtgatcgaggatttcaaagggtaaatgagatgatagggtcacaattcagactagatgaagaaatatataaaggtgggaagcacaaacgagcaaaaatcagaatttcacacctaaaatgggcatcatttgggcttcccatcaaggtattttgacaaagaggagcgacagcgggagtagccaaacttggtccaacaagctcaatttgcaatggctttccatcaagcctcatattgggggatttcttgaggggtaataaaacgtcagaatgggtgacgaacacagcttgtggaggtgcctttggtcttccactctgagcataatgagtaggggaggttttaaatggagcctcttgcggaaacagggg

SEQ ID NO: 137593 - DNA, 128 bp, Glycine max
  Clone ID: PAT_MRT3847_95255C.1
tgtttacgcgtgcgctcacacgtggaaaaaaatgggggacaataaaaaagcttggtaggttacaacctagcggtggccccatgcgtcggcgtggtcccttagaaccaggagcgcccggcccatgtgag

SEQ ID NO: 137594 - DNA, 972 bp, Glycine max
  Clone ID: PAT_MRT3847_95256C.1
gctcgtcactcttctgtcagaacacaagcccctacatctgatcagttatacggctgcgagaagacgccagaagggggacgaaaaatggaccgcaggcgaaaatacccaacactatttactacaaccaacggacaagcttcgttctggcgaagaatggcggcgccgggctcatccgccggcggcggcggagggacggcgaaggctacggtggcggagcagatctcgcaggcggtgcagtccacctccaacctcctccaccttatgcggcactcttctcctgcccaggctcaactggttaagcttcctaagaatcttttggcaaaggtttccaccatcaagaatacagagcaggttttggagcagttgcctggggtgatatcatctcttgacgcacacatggaaaatgggttgcaaaatgttccacatctaaagaccgtggttcaggtactttcaaatatggaaagtagccagcttagcttgctatcccgaccccatcctctccagaaggaacttgaaccaggaaaccaatctcaaggaaccggttaaagaatctcatgttgctttaggagtttcacccgtgatcaattcatgcagattttggaaggtttggaactgtgacttgttgtgtttccttcttgcagtcttcctgcaaatcaaataacaataccatcctctgataaagtgcatggttattcaactgagaaacctgttaaatattagtgacaattgggaatcttgtccaaagaattcaaggctaggctattaattgattgatggcaattgggtatctgtattctgtaatgtatgtccattcattttcagcttgtgcatttttgtttttcatcttgccaaatgttatgttcaaagtgatgtaacttttatttaaatcagttttgttttactagctatggaatgactcaaagctgagtaaaaaccacttactcctatgatggcacttctactccccaaggc

SEQ ID NO: 137595 - DNA, 884 bp, Glycine max
  Clone ID: PAT_MRT3847_95257C.1
ggaaagcaaaatacggctgcgagaagacgacagagggagagaggaaaaatgttgattcgacgattgccttggacggcgatttcttttgccgcaccacttcccttctgtttcggcgctaccaatggacttcccattcgcaagcaacttaactcttctctcttctccttcttctgctccagctccggcgtcaatctccctctacaacctggtcacgaaacggatactcgtcactcgcagtctctgaaacccggtctttacctcgttggaacgccaatcggaaatctcgaagatatcacactgagggctattcgcgtgctgaactcggctgacgtcatactctcagaggacactaggcactctgggaagttgcttcatcactacaacatcaaaacaccccttatgagttatcacaagttcaatgaatcgcatagggaacagcttgtgctgaggaggttgaagcagggtgagattgtggctctcataagtgatgctggaatgccaggtataagtgatcctggtacggagttggccaaattgtgtgttagtgagaatatcctggttgtgagaatccctgggccgttccaatccctggtccctgtgctttggtgtcggctctttctgcctcgggtttacctactgacgaatttacatttgttggttttcttcctaagcattcgggatcgagaagaaaaaggctcatggtttcagctgatcaaacaacaacacaaatattttacgttcctcctcacaagctttctcagttccttgatgagagttcttcaatttttggtgatgcaaggcaatgtgttattgctcgggaaatgactaagttacatgaagagttttggcatggtactcttggtgaagccaaggaagtattttct

SEQ ID NO: 137596 - DNA, 863 bp, Glycine max
  Clone ID: PAT_MRT3847_95258C.1
acgagattaatatggctcccaccaagaagtccaccggtaagaaggttgctccttctccttaccccgtcaagggaaagcaaaccaccaaggctgctgccaaccctttgattgaaaagacccccaagaacttcggtgtcggtcaagatgtccaacccaagcgtgatgtctctcgtttcgtcaagtggccccaatacgtcaagcttcaacgtcaaaagaagatcatctaccaacgtctcaaggtccctcctgctcttaaccaattcacccacgttttggacaagaacactgccactcaagtcttcaagttgatgcacaagtacagacccgagtccaagaacgagaagcgtgatcgtctccgtgctgctgctcttgccaagtccgagaagaaggaggttgccaagactgacaagcccgttgtcatcaagtacggtatcaaccacatcaccgctttggtcgaggccaagaaggctcaattggtcgtcattgctgatgatgttgaccccattgagttggttctctggctccctgctctctgccgtaagatgggtgtcccttactgtattgtcaagggtaaggctcgtctcggtacacttgtccacaagaagactgccactgctcttgccttgaccgaagtctctgaggctgataaggctgagttggctaccattgtctctgctgtcaacaccaacttcaccgagaagtgggaggatgtccgtcgtcactggggtggcggtatcatgggccccaagtccaacgccaagatggctaagcgtgctgctattgccgctaaggaaattgctgctcgtcaatgagcgcctcaacttgttcatatagtgattttatggcgtggtaccccatttgcc

SEQ ID NO: 137597 - DNA, 755 bp, Glycine max
  unsure (1)..(755): unsure at all n locations
  Clone ID: PAT_MRT3847_95259C.1
ttacatgtttcgtgcatttttttattttttttattttccggaacattagtctatgttccttaattccttaatgttgccaatgtttattaaaattagaagaaatgttaggttgggtggatgatgtatttgggtcgttgtatgatgtgttgttacctgcctctcttttgatgatgtcgtgagggttggtatattgctaatgcacgtgnntttttccagatttttctgcatcagtctatttgtagggtgtattcccttgattttgtgtgggtttgagtgagggtgcgtgtgaatgaaaaggaaatttgctggaggtgatgcatttgcatagatgaagacagaaaaagtttggcgtttaggcggcatgggtgatatgcagatactgcctgggtctcgccaccgtcctcccatgaagaagccgaagtggattattgtcttggtgttgtttgtctgtgtctttctaatctgtgcttatatctacccaccgcagaacagttcgacctgttatgtcttctcttccaaagggtgcaagagttgaactggccttggagttcgagtggcctaacatggacagaagaggaggctaacgatttagtgttccttttgnggatggatggatggcttattattttttccttccatttctgttatattttacatgatagattttggaggaatcatatcaactcattatgggntgntcatctttgtaaaactttcaaaattgtttagttgaaaacactacgtgccactgttca

SEQ ID NO: 137598 - DNA, 305 bp, Glycine max
  Clone ID: PAT_MRT3847_9525C.1
gacccaactcttattcaaagcccatctacacactccgctcctttcgttttgtgttttgagtttgagaaatgaatttattagtaccatgtctgtgcattgggtgtacgatggaaggggacatatgactattaccagagctcctaggaataccggatccaagcaatcttttactagacttgaaggaggtcataataatcagtttagggagtgggggtacagacgggcatgcagaaagaattgtttcgaaaggaagtcgcgagagaaatatagtcaaaggtaacaatgatattgctgagacgggagaa

SEQ ID NO: 137599 - DNA, 2038 bp, Glycine max
  Clone ID: PAT_MRT3847_95260C.1
gccaggaggggtggaattgcattgctgatgagcattacttgccatgtttgttcccaatgtgctaataaacagcgagagacagagagaggatttgatctttctttttttaaattaataaattaactcagaaagggttccttcacttcccttccttttccattccacgtccaacacactcttgtcttgtgattcttcttcttcattctccctttttttgccctagattagatcctttctcttccaatcattaattaattagattagatttgatttgatttgatttaccttaatccttcgtctgctttttccttccctcaactccaccattcctgatttttctgcatcagtctattcaagttcattgtagggtgtattcccttgattttgtgtgggtttgagtgagggtgcgtgtgaatgaaaaggaaatttgctggaggtgatgcatttgcatagatgaagacagaaaaagtttggcgtttaggcggcatgggtgatatgcagatactgcctgggtctcgccaccgtcctcccatgaagaagccgaagtggattattgtcttggtgttgtttgtctgtgtctttctaatctgtgcttatatctacccaccgcagagcagttcgacctgttatgtcttctcttccaaagggtgcaagggttttgttgattggcttccgcctatgcctgcaagagaatacaccgatgaggagattgcttcgcgtgttgtgattaaggatattttaaactcgccagcaattgtttcaaaaaattctaaaattgccttcatgtttttgtcacctggctctctgccatttgaaagattgtgggacaaggtttttccaggtcacgaagggaagttctctgtttatgtccatgcatccaagacaaaaccggttcatgtgagccgttattttgttaatcgggatatacgcagtgacccggtgatttgggggaaaatttctatggttgatgcagagagacgactattggcaaatgcccttcaagatactgacaaccagcaatttgttctactgtctgatagctgtgtgcctctgtatgattttgagtatatctacgagtatctgatgtatacaaatatcagctttgtagactgctttaaggatcccggtcctcacggcaatggcaggtattcagatcacatgctacctgaagttgaggtgaaggactttagaaagggtgcacagtggtttgctatgaagcggcaacatgcaattatagtcatggctgataacctttattattcaaaattccggtcttactgccagcctggtttggaggggaagaattgcattgctgatgaacattacttgccgaccttcttccagatggttgatcctggtggcattgcaaattggtcactaactcatgttgactggtctgagagaaaatggcacccaaaatcatacagggctcaggatgttacttacgagcttttgaagaatatcacatccattgatgttagcgtgcacgtaaccagtgatgagaagaaagaagtgcaaagctggccttgcttatggaatgggattcagaagccatgttacctatttgctaggaaattcactcctgaaacaatggatagtttgttgcgtctattggccaattattcaggaccttgagcctgctattttgatctaattctttggtcggaaagtaatgttactttcagccccgatcttggtttctcatatggtatgagagttgtaaattgcagcattattgcggcttgatcgcctgccagccacatatattgagtgctaggtgaactggccttggagttcgagtgggcctaacatggacagaagaggaggctaacgatttagtgttccttttggggatggatggatggcttattattttttccttccatttctgttatattttacattatagatttttggaggaatcatatcaactcattatggttgttcatctttgtaaaactttcaaaattgtttagttgaaaacaccacgtgctactgttcattcagaaaattcattggtctattcttaaaacgtaaa

SEQ ID NO: 137600 - DNA, 757 bp, Glycine max
  Clone ID: PAT_MRT3847_95261C.1
tggtggggaagggtctaaaaagtctattgtgtatagctttaagaaggttgttgttgttgttgctgatgattgtggatcggtggagagtgctcatagtgtttttatggaggatggtggtttgggtgtggagcaatcgccttcgccggagatggcggcgatgacttcgccggagacgggtttggcggtgtccgccgctgaggcctcgccggggtttgagaagggtagtgtgcagagtgagaaggagggtgtgaagaagattaatgggagagggttgaagagtaattctgtgagggattggtggtggaagcatgagaatgaggttggggttggggagagtaaaaaagttaaggattatgtgatggagtggattgggagggatgtgaataaggaaagggtgaaaaatggaattgaatatggagatgtggtggtagggaaggaagagaaaaataagaaggagaagaagagaaggaagaaggaattggaatggtgggaatcaatggaagaggaaaagcttgatggggttatgaagaggaagagaaggacggtgagggaatggtggaaggaggagcgttttgaggagaatgcgaagtcgtcggcaaagaagaagaagaaaaagaggaagggtgggagtgtgaagagtgatgatgagaagtgtggtgatgattggtggatgagtgatgatgcaatggataagaggaagggcaagagtaggagtaggaacaaccgtgggaacatggattggtggatggatgggttg

SEQ ID NO: 137601 - DNA, 416 bp, Glycine max
  Clone ID: PAT_MRT3847_95262C.1
ggggcaagacgtggtttacttccttttttatggccccccgggggccctaggtggggaggaaaaaaaacggcccccccccccctttggcgttttttatgtgaaagcccccccggatttggccaaggtttttttgggggcccgaacttggggccacccccctgtggggatatactactttaaagctttgcaaaaacaaggggggtttttaaaattaaacttccttgtaaaaaagattggggcccggcccccggtttggggggggggctctggctggccccaaggaattcattttaggaaaaatgcgggtggaaaaaggggcgccccccttgggggaatccccccctttgggggcaaaaagtggggcccccctttttacccccctgggggggggggcaactcaggggggttttttaaaa

SEQ ID NO: 137602 - DNA, 503 bp, Glycine max
  Clone ID: PAT_MRT3847_95263C.1
tggcttggaacctttgggctgatttatgtgcttgcatggtcgtgagaagatgatagaagggggtacatacgagacaagttaaccgcgacaagttacctatctaggcgaaaagaaaaaaaaaatacacagcaataaaattacggcgacctatagatctgaaccgcgtacaaatacggcctaatctgttacagagcctgctgcgagtgctatggaaatagcggctacagcctagtagagaattgcggagttctctggaacgccgaactgtgtaagcatattctccttccctcacggtcattcttgccgaacgccgaagagtactgtccgaccaaccatccctcagtccctctcctcctcacgaaaccttgtaacccccacagatttcgcgcccctcccttccccgggcgtactaagtgtcgaccgacgtaaatttatatgagccgtcgccgcaaggaaaaccgacgtttccggcccccccctcgggccccggtcggatccctccg

SEQ ID NO: 137603 - DNA, 396 bp, Glycine max
  Clone ID: PAT_MRT3847_95264C.1
ccggctgggggaagacaacagaggggggggtttttacagtgcacgcgggactctcctagaccaaccttggcgacgtcatcgggggggaggaacaaattcgaatttgatgaaagatgggagagaggaaggcgtggaacaagcaccacccacccgactttgatccacggtaacttggcaaagcaagatgggcaacaaaccagcgaggcaaggccctcatgatgctgacagtgagcattcactgcaacactctgtggttagtacatctacaaaggaaccaacttgcagtccaaaagggaagatggtcttggcgagacatatctaaggatgcatatattgggggtccagttcaaatggactaagtggtcatctgacgttgccatgcagactgatcccgag

SEQ ID NO: 137604 - DNA, 1473 bp, Glycine max
  Clone ID: PAT_MRT3847_95265C.1
cattttgcatatctccatcttcatttgattttcaattttcttcatttgggtatcttcttttgaagtaggcgctgtaggacactaaatgcatgcacttctcccaacagggattcgaaccttggtttaccatatcatagtagacctccccccgctccttctcccttccatacctggctgtttttcatgctatgatgatgagtgggatggggaactcaagagtgttaattttctctttgcttgttcttgcaacctttcagcaagtggtgtccgatgagcaccaacccctctcaaaagttgccattcataaaacaacacttgctcttgatgaacgtgcttatatcaaagccactcctagtgtccttggcttgaagggacaaaatacagaatgggttacactgcaatatagtaatccaaaacccacaatagatgattggattggagtgttttctcctgcaaacttcaatgcttctacctgccctgcagaaaacatatgggtcaatcccccatttctgtgttctgcgcctatcaagtatcaatatgccaatttctccagtcatggttaccagaaccccaggaaaaggttccctgaagcttcagttgattaatcagagatctgacttttcatttgcactttttcacgggtggctttaactaatccaaagctcgttgcagtgtcaaataaagtatcattcatcaatccaaatgccccagtatattccccgattagcacaagggaaaacatgggatgaaatgactgtaacttggacaagtcgcgtccgaatcagtgacgctgaaccttttgttgaatggggccctaaaggagggaaccttgtgaaatctcctgctgggacactgacttttgatcgcaacaccatgtgtggtgcaccagcaaggactgttggatggcgtgacccgggatatatacacactagttttctgaaggagttgtggcccaaccgagagtacaaatacaagctggggcataaattatttaatggtacaataatttggagtcaagaataccaattcaaagcatctccttatcctggtcaaaattccttacaacgagtagtcatatttggtgatatgggaaaggcagaagcagatggttccaatgaatataacaatttccagcctggctcactcaacactactaaacagatcattcaagacttaaaagatatagatattgtcttcaacattggtgatttaagctatgctaatggatacctttcacagtgggatcagtttactgcacaaattgagccaattgcatcaactgtaccttatatgacagcaagtggcaatcatgaacgtgactggccagatactggatcattctatgggaccttggattctggtggtgaatgtggtgtactggctcacaccatgtattatgttccagctgagaatcctgaaagatcgtggtactgagttgactatgggatgttgaaatgctgcatacataacacg

SEQ ID NO: 137605 - DNA, 194 bp, Glycine max
  Clone ID: PAT_MRT3847_95266C.1
ggtacctaatagaaacaggaactactgcgagggcagacgcaaagacgggatcattggccattctattataaactgtgatggccttcattctatcaacaaccgaagacatggaaaatcgtaaggtttaaacaatacacagtagatttaaagccttggtgctaaaacaaagtcgagcgtatacataccgctgcata

SEQ ID NO: 137606 - DNA, 856 bp, Glycine max
  Clone ID: PAT_MRT3847_95267C.1
ttgtttcgtgggcggacgcgtgggtgctgccaatgatgatgttataacttgtatcttcttttgaagtacgcgctgtaggacactaaatgcatgcacttctcccaacagggattcgaaccttggtttaccatatcatagtagactaaccccttttgctaaactcaaccatacctggctgtttttcatgctatgatgatgagtgggatggggaactcaagagtgctatttgtctctatgcttgttcttgcaacctttcagcaagcggtctcagaagagcaccaacccctctcaaaagttgccattcataaaacaacacttgctcttgatgaacgtgcttttatcaaagccactcctaatgtccttggcttgaagggacaaaatacagaatgggttacactgcaatatagtaatccaaaacccacagtagatgattggattggagtgttttatgctgcaaactgcaaaaaacatatgggtgaatcccccatttctgtgttctgcacctatcaagtatcaatatgccaatttctccagtcatggatacaagaacacaggaaaaggttccttgaagcttcagttgattaatcagagatctgacttttcatttgcgcttttcacgggtggcttaactaatccaaagctcgttgcagcgtcaaataaagtatcattcatcaatccagatgcaccagtatatccccgattagcacaagggaaaacatgggatgaaatgactgtaacttggacaagtggatatgaaatcagtgacgctgaaccttttgttgaatggtgccctaaaggagggaaccttgtgaaatctcctgctgggacactgactattgatcgcaacaccatgtgt

SEQ ID NO: 137607 - DNA, 462 bp, Glycine max
  Clone ID: PAT_MRT3847_95268C.1
ttttaataggaaaataccagtctaactgataccttctcctcaataattaaattcatttagatacgaaaaatgtaagaagaatctgagaagcttgttgctcaaaaattcaaaggggaatgaatgctttttctcacaaccttgatcattccattactgtttccccttaaccccaaatagatagatataaaacccaagaagaatttcgtttcggggatacaatgattgggcgcatagacagagagggacccttgatgaggaacaacagtactaactctcttcgcaaatcacgggtcctaaccgcagttgcaattggtgtccttgttggatgcgtcttcgctttcttgttccccaatggcttcttcgtttctgactctgctgccactaatcatcatctccctctcgcgggatctaagacccaggaaaattcagctggatgtgaatccacggatcgggtcaacatgt

SEQ ID NO: 137608 - DNA, 293 bp, Glycine max
  Clone ID: PAT_MRT3847_95269C.1
tttcgcactaaaatcctttagtgtaaaaaaagacggatgggaaaacctgactttaccccagggctcttcccgaagtgataaaagaatgcctctttctataagtggaggaagctgttagcaaagaatgctattctaatgaatttgccaaatgctgatctttcaatgtggaaatattttgttggagaactctactatgaagataataagatgacttcttcctacattaaaagtaccagcctttgtcataatagctattagtaaataaggctgatagacactaactaattttgagg

SEQ ID NO: 137609 - DNA, 1581 bp, Glycine max
  Clone ID: PAT_MRT3847_9526C.1
ccacgcgtccgagagagtttagtttggtcattcattattccaaccgagtaacgccgtttctcttcttcccttcgtttcacaggcaaagaccgcaacagcgtcgtcgtcgttcaacggaacctcttcttcttcttcatcttctgaagagtttttcttttttgttttttttaactcttacgttagaagctgtcttcttctcagttttgtaataacgggatctcgtaaaggggattcacttattattcagattagtgacaaaacttgacaaaacgaatcgttttgttttcgtgaatatttcttattttctttaatttcttttctggggcgttgacttgggttgaaccatgttgagccgcggggcgcatggcgaagtggttggttctggtgagagtggtgaggatgagatgtatgagcagcagtggaaggcatgcgcgggaccactggtggatgttcctcgtgttggccagagagtcttctatttcccacaaggccacatggagcaattagaggcttcaacaaaccaggaactgaatcagaggattcctttgctgaagcttcccacgaagatcctatgtcgagttgtgaatgttcatttactggctgagcaagaaacggacgaggtttatgcgcaaattactttggtgccggaatctagtcaagacgagcctacaaatgctgatccgtgcactgctgaacctccaagagcaccagttcactcgttcagcaaggtcttgactgcttcagataccagcacccatggaggcttctccgttctcaggaaacatgccacggaatgccttcctgtgttggacatgtcccaaccaacaccaactcaggaattggttgcaaaggatcttcatggttatgaatggcgctttaagcatatatttagaggtcaaccacgcagacacttgctcacgactggctggagtacttttgtgacctccaagagattagttgctggagatacctttgtgttctcagcttggcctatttcaaaacctcactcagagagattgaacaatgatcatttccttgaccagagaatgcatctggaatcacctctgagtgcaaaattgatgtaaaccatgtgtccgatatctcaaaggcttctaaagaatggaaccaagaacagctacaactatctccaaaagagactcaaagcaaacaagtttgtagcagaagttgcactaaggttcaaatgcagggggttgcagtgggtcgtgccgtggatttgaccacattggatggatatgatcaacttgtagatgaattggagaagatgtttgacataaagggacaacttcaacttaggaataagtgggaaattgtcttcactgatgatgaaggggatatgatgcttgttggtgatgatccatggcttgaattctgtaaaatggtgagaagaatcttcatttattcaagccaggatgtgcacaaattgagctcagggagcaaactacctatctcttctatggaagagattgtaacaagtttagacacaaccgagacctgaaacttttacattcttgtcctttctactttgttaggttttcttcttcttctaaaacaaaaaaatca

SEQ ID NO: 137610 - DNA, 749 bp, Glycine max
  unsure (1)..(749): unsure at all n locations
  Clone ID: PAT_MRT3847_95270C.1
ccagcgtccgaaagaaagaaaaaaactaatttttttcttctccttgtttaccaaaacgattagcatattaaaacgcatttatgtggcgataattgtcccctgtgatgcgagttccagtcaaatcaaaatcattttcttcaagagtgtctgtctgtggctactgaactacctcagtgtctcgcccaaaaaccgaagtcgctttctttctctttgccaaaagggacacgagagagaaagagagagtttttcaatcccaaaagacaaaacgggtgattacttgagaaaaaagagagccgttgaggcttggaagagagccattcagttccgacccattggaacttgtatcatggcaagaaagatgcgttgtgcccctcaagagataggtaataataatccagaagttttagaagcaagaaaggattccataccaacaatatatcaacaacaaaataaactcacatctttagaggtcacaataaataccagtcctttttttataatgactttttaatagcatttggaaaggaggttgattnttacctctattttttcctctntaaatgtaattattntgttcaagattgtcaagaatcttctctttcaaagattaacactgatagtaggtaatatatttttatgcctgtagcatttctttcatttatctttagtcttatgggaatatgattctataaatgatttacttgnttctttttgtgaaattgttgacctattgatataaatgtatttct

SEQ ID NO: 137611 - DNA, 226 bp, Glycine max
  Clone ID: PAT_MRT3847_95271C.1
acgattacacaaagcacgggccttgtaaattttcttgatgaacaatgggacgtacattgttcaggatagccaaatatagagaattgtgaacccttttgggatactattggatcagataacacgctgcacaagtcaggcaatttcatgtgcactatccacgaagctcgtgtaattagctattacggcttctgaagttgcatcgtgctggttgaatgctccatattaa

SEQ ID NO: 137612 - DNA, 303 bp, Glycine max
  Clone ID: PAT_MRT3847_95272C.1
gggaggggaaaaaatgttttgtcctttaaaagggtggggagaaaaagaaaaaaaattccattggggggggccccgtttttaattcctttggggggggactttaattcctttggacaaatccaaaataatttggttttccagggcatgggtttgcctacaaaggtgtattttatccatgttgtcgccacaagactttggggtttggattggtttggtttcccttacttcgggggggcaataatgttaaccgtttgcaaaataataaaaagcaaaggggcatccatagttttgactttaacaact

SEQ ID NO: 137613 - DNA, 692 bp, Glycine max
  Clone ID: PAT_MRT3847_95273C.1
ccacgcgtccggctttccttgatatatcactatatagctcttattcttttttattttatgcaatatatctcttcaaatggaagccaaagcagattacacccaagatggcactgttgatttccgtggccagcctgcagtttcatctaaaactggcaaatggaaggcttgcgcttttcttgttggctatgaagcatttgaaaggatggccttctatggagtggcttcgaacttagtgaattaccttacaacccaacttcatgaagatactgtttcatcagtgaggaatgtgaataactggtcaggatctgtgtggataacgccaattcttggggcttacgtagcagattcttatttgggtcgattctggactttcactctctcatctctcgtttatgtcttggggatgactcttctcacagtagccgtgtcactcaagagcctgaggccaacatgcaccaatggcatatgcaacaaggcttcaacctcacaaattgcatttttttacacagccctttacactatggcaattggggctgggggaacaaagcctaacatctcaactttttggtgctgaccaatttgatgacttcaatcccaatgagaaagagctaaaggcctcattcttcactggggggatgtttacctcattcttggggtgctttgattgccactttaggaattggtgtacattc

SEQ ID NO: 137614 - DNA, 683 bp, Glycine max
  Clone ID: PAT_MRT3847_95274C.1
gtttctgacaccgaaattgagccaaaaagttgaccctctttggatgaatgagaatatcatgttcctcacattaatacaacatggagattccaacaattgaaaactcctaaacacccttctcttccaaccccgtttcatgcttccttccaatcctttggtgtgatttcaatcgtttcataagaaaacagcactcagttcttcttcttcttcttgttctttcatcaatcatcatctttttcattcaatttctctgattgacaaaattgccacacagatcagtgattgacccaattgagaaaaaccttaaaagttccttttttatattttatttttggaattcttgctggttttgcaggtgccccagttgggaattcaagatggttctgtgatttaacaagggcctcttgaaaactactcaagtgagatactttgatttaactccctttgttcatggatgaaaaactcaattgaagtaattcactggactactttgtcctcttggtctgaaggtgaagctatttgatttctgaatttcgctagtttcttaatctgaatatggcctgggaaccaagatcagttagagatcaaagtttctgttgagtgatggtacagatattgggcccacaaagtatgctgctgcccctagtattgcaccactgaaagaaagtgttcttgctcaatgg

SEQ ID NO: 137615 - DNA, 261 bp, Glycine max
  unsure (1)..(261): unsure at all n locations
  Clone ID: PAT_MRT3847_95275C.1
gcacgaacacacncacagacacncacgaacacaacgcnncnncggcnnnncggannnncgcnccaaaacccanngcgncnancacncacacnccacnnncagancggggngngncncncnccccgacagacaaaaaaagaagaaaaggannggaagannnggaaaagnngcnnncagncnngaagnaccaaaaaaggggagngngagacgngaagngaaccnngaacagngaaaanncggaaanggggacccaaaggcaaa

SEQ ID NO: 137616 - DNA, 408 bp, Glycine max
  Clone ID: PAT_MRT3847_95276C.1
ttgcactagcgggtaagtacataataacgttagttttgaattgtaccctaaggtgtaataaattatgggtagagaggtataactgttggcttggtttgaactttgaagggttagtgccttgcatttgcttgctgattggtttgtgctttatccctgagtcccccagatggctggtatgcattattaagctagaatcattatctaaggaccaaatgctcctttattttattatatataaatataacaggaatagcaatgaaaattaacatgtatgtatgtattttttgtaggctaaagttggccgtgaaaaagaatttcaactagctttaaggagacttcagggtaaagatgttgatatttctgatgaagctgctgaaattctggtactttccaagctctctttactga

SEQ ID NO: 137617 - DNA, 375 bp, Glycine max
  Clone ID: PAT_MRT3847_95277C.1
tcaaatcactatcttcttaaaaaaaaaaaattaaaaaaaaaaaaaaaggaacaaacgcaaggatgaagggaaaaaaaataatagggggggcccccctaaaaagatcctaacttaccgacgcattaaaacaacggggctgccgcttttatttgcaccaacttaactgaataatcctgccgccctttaacattttttctactggaaaaaaaattgaattttcccaactgatttttctatcaaaaaaaccgccaaaacccagttgttacaaaaacaaaaagccctgaaacaaattcccttctcaccatgtggggaaatcaaaaagagaacgggactcaccttctatcccaacattatcccctcctttttgggtattta

SEQ ID NO: 137618 - DNA, 560 bp, Glycine max
  Clone ID: PAT_MRT3847_95278C.1
ccacgcgtccgcacatacccaaaccctactttcggtccatttcttaaatcacaattcatgcatactccagactcctaggttcatatcatgcatcctacacacacacaccttatatttatatataaaaagagtgacagagcaagacaagcgttgctgttgttgatgacgacggaggaatgaactataatggaggattctgcggagcaaaaaaggaagcagtgatagcatgcgctagcgtcggcttccgaggtggcttatgatccttcttctgctaggccggggggttatcaatttgccggtgatcgtcttcaaatactgaacgaatctctccatgtgggtctcaatgcttatctttcagctattcagctattcagattaggtactattgaatcgttgagcgtggcgaaagagtcttaagctgacaaacagacgtcatattccatggcagttgctatacagtgtagaaatgaggaagagagagaagccttccattgtgcataccatctagggaagaaaggattcaatgttcatggtgggaactagccacatggaactaatgc

SEQ ID NO: 137619 - DNA, 343 bp, Glycine max
  Clone ID: PAT_MRT3847_95279C.1
gaagccaaaacaatttgatatttattactataagacaaaggtttgagttcctccgccgaagtacccataaaaaatatatattacagaactggatgcttattttgactatgaacgcacccttaaagcgcgtttcttcagcgaagatatattttattctctgctaccaggaagaaagccatgcagtgatcatcacagcctggtggcgccgggaggatatactcctctatggcaggaggaccggttcaatggtccatatctctcgggcgtattaatgaatcgcgcggacactgataaacttgtatgaacctgctgtggagaatattgacattctcgtccatttagt

SEQ ID NO: 137620 - DNA, 327 bp, Glycine max
  Clone ID: PAT_MRT3847_9527C.1
ggggggaaacaatacatgctttttttttcacaaaattgacccttttcaggggaaaaggaactcccttctgcaagagttgataaaaagcaaaaaacccccgtttaggaattgcaaaaaaaattgaacccctttaaactaaaaccctccccccccttacaaacaagatttggagggggaaaaaaaaaacccttggaaaaaaaaaaaaaaaaaaaaaaatgggttgcccaagtttgggggtcaacatttgttgcgggacccaaagggttaccagtttttggaaaattttttcttggccccacaaagaaattttttgcaaaaatatgggcc

SEQ ID NO: 137621 - DNA, 876 bp, Glycine max
  Clone ID: PAT_MRT3847_95280C.1
ggctcgagaaggcatcgccggaataaaaaacctgaatgtaaaggcaaaggctagtgcttctgccccttttgccaaggctattgcagaaaaagtagctattgcagcagcaggtgaggcggactcctctgaagcacacatgactaaagagcaaaagcttaaggcagagagattgaaacgagcaaagatgttttcagccatgctaaaaagtggtgttggagcaagtgaactgccacgagctttatcagtcgagccaccaggctctggagtttcaggttcagatgctgagactgggaatcttgtgggtaaagaaagggaaggaagttctgttccatttgatgttgataattcagataaaagtcaaaagtctgaggacaagctttctattgataataattcagataaaagtcagaaatctgaggagaaacttactgatgataatgaacgccggtcaaaaagaaagtaccgttcaagatctagtagacatgaagaggaggaagaagaaaacaaagataggagggatcacaaaagatccaggaaaaaacatcactctcatcgcgcttcacaccacaatcgggacaggcataagcacaagagaagacattcctcctccaaagacaaatattcttacagggggaccaagcacgatagctcctctgatgatgaacatcatcgctcaaggcatcatcgtcataaatatgatagctcctcctctgatgatgagcaccactcttccaaacaacgacatagggatgataacttgtcagaccatgagcatagacattctcgccattctaatgaagattatagttcatctgatgatgagcataagcatcgaagcaaaaacagaagtgtaaggcataagagcaaatctcatgc

SEQ ID NO: 137622 - DNA, 565 bp, Glycine max
  Clone ID: PAT_MRT3847_95281C.1
atatccaatgcaccattaatatcaattactaatcacagttttcagttagaggtattaaagattccctatataaaatatcgaaaatgctttcaagtttcaccaacagtcaggggaagcgtatattcacaaatatgtctgtcacgaactatgccaccttcctagagcctcaccaacacgaattctatccccacggccgacgcagaacctgaactcttgagatgaatcgccctcagggagttttgaaattggggcttggaaaacaccacaactgttgatcccatgttgaaagcacctaactcatcccctttcttgagcattctgcctacaccttcacatccataaatccgttcttcaggaggctctgaatgaagaaacttcttccttggcctgtttgtatgaagttcgggctcaatgaaaagctcaattgacccaatatttgtggcaccaattgcagcaagtgccataaacccttcctgccatagaccttcaagaataaccctctcgttctcaatatagaggtttctaattgttcttgtagcacgttcattcaagggataaagacgac

SEQ ID NO: 137623 - DNA, 548 bp, Glycine max
  Clone ID: PAT_MRT3847_95282C.1
ccacgcgtccgcccacgcgtccgcccacgcgtccgcccacgcgtccgtgattctcccatctctggattgattgccttgctcactgctgttgatgctctctctcaccttcatgatataagtaatcttaagaaacagcttgtttttgctgttttcaatggtgaagcctggggttatcttggtagccggaaattcttacaggaattagatcaaggggctgactctgttaatggcattagcagcttattgattgaccaggtcttggagattggttccgttggcaaggccataagtcagggatatccactattttatgcgcatgctgcagggaattcgtcaatttcgatgaaaatggtagatgcactccaaagtgccagtgaatcacttggttctgataatgttaaagtaaaaccagcagcttcatcaaatccctggtgttccaccatcttcattaatgtcgttcctaggaaagaattcatcaactcctggacttgtcttggaggattttgattcccaattttctaatagattttaccacagcactttggatg

SEQ ID NO: 137624 - DNA, 2093 bp, Glycine max
  Clone ID: PAT_MRT3847_95283C.1
aattcggctcgaggtagacagagagaagcagagaagagagacaattgccgtcactttctgaacattggaacgttaggttaatgggttgggttcggtgaaacaccaacctttcccaagccaagtttcacttcacaactcctcaacacaagaactaaagtagtagtagtagcttcacttcactcacaacacagcaatgcccactggcttctctctcatctttgcggcatcacttttccttttgcttctcgattgttgctctgggagttttgttggggtctgctatggaagaagtgctgatgacctccctacacctgacaaggtggcacagttggttcaacttcataaaatcaaatatgtcaggatttatgattctaatatacaggttctgaaggcctttgcaaacactggaattgagcttatgattggggttccaaattcagatttgctttcattgtctcagttccaatctaatgcagactcttggctgaaaaacagcgtccttccttactatccggctacaaagatcacatacataactgtcggcgccgaagtcactgagagtcctaataatgcatcttcatttgtagtgcctgccatgaccaatgtgcttacagcactcaagaaacttgggctgcacaaaaagattaaagtttccagcacccattcccttggggttttgtcccgatccttcccgccttctgctggggctttcaatagcagccatgcacatttcctgaagccaatgctagaatttcttgctgaaaatcagtcaccttttatgattgatatatatccttattatgcctaccgtgattcccggagtaaagtgtctttagactatgccctttttgatgcatcctctgaagtaattgatccaaacacaggcttgctgtacacaaacatgtttgatgcccagattgatgctatttactttgcactgatggccttgaacttcagaacaattaaggtcatggtcactgagacaggttggccttccaaagggtctcctaaggagactgctgcaactcctgataatgcacaaacatataatactaatctgataaggcatgttatcaacaacactggtactcctgcaaagcctggagaggagctagatgtttatattttctcgttgttcaatgaaaataggaagcctggtttggaatctgagagaaactggggattattttatcccgaccagacaagtgtttatagcctagatttcactggacggggtgcagttgatatgaccactgaggcaaatataaccaagtcaaatggaaccacatggtgcattgcttcgagtaaggcctcacaaattgacttgcagaatgccatagattgggcctgtggtcctggcaacgtggactgtacagctatccagcctagccagccttgttttgagccagataacctagcttcacatgcatcttttgcgtttaatagctattaccagcaaaatggggcttctgatgttgcgtgcagttttggaggaacaggtgtaaaagttgataaggatccaagctatgacaagtgcatctacatgagagctggaagtaataaaactgtgacaagcaatacaacagcaatgtccacttcatcctcttcactgaatggaaattcttcgtcaatttttacttttcttcttgtaacttgtctctttgctctaatgcatattcaacgatactgacaagattgattgttgaaattgcagcatgattttgctttgttgacaagtatgctgcgtttgaaatgcatggggaaggtaatgatttagtggagagctttcatatgctctatgctatgcatcagaaaagtgtaaactccgttgctgttatataagaattgttttttccactgcattagagcaatgataggccaaaactctgtggtactagttttgtgtgtcaagtgataaaagaaaacagcatgcaaagataattggacttgtcatcgataatttatttaactatgcatgtgttgctgcaccttattgtctcgtattgaactttgaaatataaaaactacttcgttcttgagattactggtcgctcatcagcaggtccatttcgggccggtctgggaagtggggc

SEQ ID NO: 137625 - DNA, 240 bp, Glycine max
  unsure (1)..(240): unsure at all n locations
  Clone ID: PAT_MRT3847_95284C.1
acctgagaagngcnngganacggnggnncgggggcgttttcttggagnacccggccgggactccaaccaacggagcacggacatagaagcggacctaagcggggacccggggaaaaggccaaaaggaagagccggcggagactggggaagaggcgcaatatgcgggacacacaggccacacaagagaagaaggaggaaagaaggaaacggataacaggaaggggaaagagcaagagaaga

SEQ ID NO: 137626 - DNA, 550 bp, Glycine max
  Clone ID: PAT_MRT3847_95285C.1
aaatgctgaagttggagatcagtaagaggtttgcaaatggtggtaatgtggtggaggaagttgctgcacaactagagacagctaaggccgcagaacgcgaggctgttataaagcttggtattgtgatggaagatgcagataggtgcaaccgaaaggcggcaagggtggctgagcaactggaagcatctcaggcagcaaattcaataatagaagctgaactaaaaaggttgaagatacagtctgatcaatggagaaaggctgcaaaggctgctgctgcaatgctctcagcagggaacaatgggaaacttagtgagagatcaatgtctttggacaacaactataactctataatgaacaagtactcacctttttgtgaaaagcttgatgatgatgattttcagaccaagaaaaatggcaacatgctcaagaagattggggtcttgtggaggaaacctaaaaaatagtcaatgttggctgtttacgagttatgacccgcttctaatgttatgattatgttaactgtaatgtttatgttatgcaattttgtctg

SEQ ID NO: 137627 - DNA, 936 bp, Glycine max
  Clone ID: PAT_MRT3847_95286C.1
cccgcgtccgaatcctttcacatataccataccatactataaatacaattcaactctgttcgctttctcgcttttctcttctcttctatctctgcttcttcgcaatctcagaacagaacacaacagagcccttcaactctctctgtcgttgatggcgtcacaagcgagcctccttcttcagaagcagctcaaagatctttgcaaaaaccccgtcgatggcttttctgccggtttggtcgacgaaaccaacatttttgaatggagtgtaactataattggacctcccgatactctttatgaggggggatttttcaatgccattatgagctttccacccaactacccaaatagtccgccatcagtgaaatttacctcagagttatggcatcccaatgtgtaccccgatgggcgagtttgcatatcaattcttcatccacccggtgatgacccaaatggttatgagcttgcaagtgagcgctggacgcctgttcatacagtagagagtatagtattaagtatcatatcgatgctttctagtcctaatgatgaatctccagcaaatgttgaagctgcgaaggagtggagggataggagagatgaattcaagaagaaggttagccgatgtgtgcggaagtcacaagaaatgttgtgatttacagcttggattctcatcttccttttgtgaactgaaggatatacaacttaatgtatggattggttcacctgttactgttgatcctagtagactgccatttgtcttggaaaaacaaattgtattgtaagtgcttggtgactagtttattggaattttagtttgttcatttgcatgaccttattgttaaaaatatatattaggtgccaagttttgccttttttttccttaatattgtgattgtggatgttgttgaaatctgaattttgccatttccctgtgtt

SEQ ID NO: 137628 - DNA, 269 bp, Glycine max
  Clone ID: PAT_MRT3847_95287C.1
agaagggggagaagtggaaagggagcctcagtaaccgtttcctgtggtcgattagatattgccttcataccagcatctgcgtcctctgcgacgttccttcaatccttcacctccattctctctaggccgagagtctcgtactgtttgtagacgctaaggatgtcagggaaaggggctaacgggttgatcacatgcaaatcctccgccgctaacgagatagacaatgccaagaggatccccatctcaccttcgtcacatgccgggcttca

SEQ ID NO: 137629 - DNA, 753 bp, Glycine max
  unsure (1)..(753): unsure at all n locations
  Clone ID: PAT_MRT3847_95288C.1
ctttatgaggggggatttttcaatgcctttatgagctttccacccaactacccaaatagtccaccatcagtgaaatttacctcagagttatggcatcccaatggttggtctgacacattttttttatcctgcttcgattaatacatgaaattcaatgatgttgttcaatttgcagtgtatcctgatgggcgagtttgcatatcaattcttcatcctcctggtgacgacccaaatggttatgagcttgcaagtgagcgctggacgcctgttcatacagtagagagtatagtattaagtatcatatcgatgctttctagtcctaatgatgaatctccagcaaatgttgaagctgcgaaggagtggagggataggagagatgaattcaagaagaaggttagccgatgtgtgcggaagtcacaagaaatgttgtgatttacagcttggattctcatcttccttttgtgaactgaaggatatacaacttaatgtatggattggttcacctgttactgttgatccgagtagactgccatttgtcttggaaaaacaaattgtattgtaagtgcttggtgactagtttattggaattttagtttgttcatttgcatgaccttattgttaaaaatatatattaggtgccaagttttgccttttttttgcttaaaaaaaaaaaaaaaaaaaaaaaaaaaannnnnnnnnnnnnnnnnnnnnnnnnnnnnnnnnnnnnnnnnnnnnnnnnnnnnnnnnnnnnnn

SEQ ID NO: 137630 - DNA, 673 bp, Glycine max
  Clone ID: PAT_MRT3847_95289C.1
ccacgcgtccgcaccattttctcttcctcttttgtctctctatcaattatcagatctacgttacaaaatcctttcacatataccataccatactataaatacaattcaactctgttcgctttctcgcttttctcttctcttctatctctgcttcttcgcaatctcagaacagaacacagcagagcccttcaactctctctgtcgatgatggcgtcacaagcgagcctccttcttcagaagcagctcaaaggtgccccctaccctgcgccctccctcacccgatcaactccctttctctctttccgtcttagcgaggattttccgcacccttttgattgatcttccctttgatgcagagctttgcaaaaaccccgccgatggcttttctgccggattggacgacgaaaccaacatttttgaatggagtgtaactataattggacctcccgatactctttagtaagctgtgttcactaaaaacctcttttttcacactaatttatgcgattttgaattgattattgcgattttagattccctgtgcttgtgcagtgatgatttcgacgcttccgtgttctggggttctgggcttccgcctaaaaatcacgttattagttatgcttactcgggggctcttcagagtctacgattctatttctttctgacagagggg

SEQ ID NO: 137631 - DNA, 2806 bp, Glycine max
  Clone ID: PAT_MRT3847_9528C.1
acgattccaaaagctgcttcctctcataaattctctgtcaacgcataatcattccatttagttatcatctgtgacaccatcacactgcgatcatcatcctcattcctactttgcacacccttatgacaatgatgatgtcatggacttagattcattggtcacagtcacagactctgaagaagaaaaacaacagctttgaattgattacaatacaaccttaaacgttctcgttgaaccgtggtggaggaggagaagaagatgaactctatgagcaactatggaaagcgtgtgcaggaccccatgtggaagttcctcgtactggccaaagggtcttctatttccctcaggggcacatggaacaattagaagtatcaacaaaacaaaaactaaaccaaaggattccactcttcaagtgggactccaagatcctttgtcgtgtcgtcaacgtccatttactggctgaacaagaaacagatgaggtttatgcgcagatctgtctagaaccagtatcttagcaagctgagcctatgagccctgatccgtgccctgctgaacttccaagtccaagagttcactccttctgcaaggtcttaactgcctctgatacaagcacccatggtggcttctctgtcctcaggaagcatgccactgaatgccttccagctttggacatgtctaaatcaaccccaactcaggaattggttgccaaggatcttcagggctatgaatggcgctttaagcatatatttagaggtcagccacgtagacacttgctcacaactggatggagtaattttgtgacttccaagagattagttgctggagacacctttgtgtttctgagagggaacaatggagaattgcgggttggagtgaggcgcattgctcctgtgcagagcagcatgccatcatctgtgatttctagtcagagcatgcacctaggagttcttgcaactgcatctcatggctgtagcaactcagactctttttgttgtatattataagccaagggcaagccagttcatttgttagtgtttggctaggcaagtttcatgctagttgtaatacactggctaattgtagctcaatatagagattctaggtactaattaggttcaaaattacaaaagattttcgggcacaatagttggagtagaggatatttcccctcactgggtaaattcaaattggcgatctcttaaggttcaatgggatgaacctgcatcttttccaagacctgatagagttttaccatgggagatagaacccattctggcttctgttcctactacatcatctcaaactgctgctataaagaataaaaggccacggcaagcaagtgaacttgcagatcttggagacacagcattagcttcccctactttctgggatgctggactgacacagtctgatatggcaaaacttagtgtcatggccgaaatcaaaaggagtgacagtagttcccatatgtggcatcataacagtaaaagcagcaacaatggtatatcaatgaatcagacagaagcaatttggctatcttctccttctcaattatatcatgacacaaccgatgatagcaagagcatctcagcttggcctatttcaaaacctcactcagagagattgaacaatgatcatttccttgaccaggttgacaaggagatcaacaaagtagaggctgctacaagttatagattgtttgggattgaccttattgatcatgcaaggaacaactctctttctgcagagaatgcatctggaatcacctctgagtgcaaaattgatgtaaaccatgtgtccgatatctcaaaggcttctaaagaatggaaccaagaacagctacaactatctccaaaagagactcaaagcaaacaagtttgtagcagaagttgcactaaggttcaaatgcagggggttgcagtgggtcgtgccgtggatttgaccacattggatggatatgatcaacttgtagatgaattggagaagatgtttgacataaagggacaacttcaacttaggaataagtgggaaattgtcttcactgatgatgaaggggatatgatgcttgttggtgatgatccatggcttgaattctgtaaaatggtgagaagaatcttcatttattcaagccaggatgtgcacaaattgagctcagggagcaaactacctatctcttctatggaagagattgtaacaagtttagacacaaccgagacctgaaacttttacattcttgtcctttctactttgttagttttcttcttcttcttcttctttttttttgctgtttcttttatttttcttatctaaggtaaggatgttagtttatttttggctaggcaagtttcatgttagatgtgaaacgctggctaattgtagctcaatttagagattctagacactaattgggttccaaagaccaaattgaatattttaataaaaagtaaattacacatgtcaaaaaaaaaaaaaaaaaaaaaaaaaaaaaaaaaaaaaaaaaaaaaaaaaaaaaaaaaaaaaaaaaaaaataataaaaaaaaaaaaaacaaaaaaaaaaagaaaaaaaaaaaaaaacaaaaaaaaaaacgaatgaaaaaaaaaaaaaagggggggcccccctatggggatccagctttttacccccggccacgtacaacaaattgtttttttttttgcccccgaaaaataaattacgggcggggggtttaaaaacgcgggggtgggaaaaccggggggtaaaccaattttaatggcgttttaaaaaaacccctttcccgcagttgtgttaaaaaatcaaaagggcccc

SEQ ID NO: 137632 - DNA, 1304 bp, Glycine max
  Clone ID: PAT_MRT3847_95290C.1
tttttttttttttttgaaaggcttgtaatcaactacagaaataatttttaattcattataacagatcagccaataatcctccaaattacttctcaaaaagttagtagtaaatacttttcgaactctcaagatagcaaatacttttacttttgtcacttttaaagcaattaggaggatgctgaagttgggttatgaaatatatgatctctcttgatgaaaataaacacagacaacatgatagtattgcttagaaatgcatcatagttcatcatgtattctttgttctaaaggagcctctgcattattaggaacacgattgcctctgacttgatgaagattcacgtcatctgcaacagcttggggccttagctctgcctgtcccaccataccagcttttatggcctcagtaacctttctttgcaacgtaagtagtccaattcgcttggaaacaacataaagaacagcaagggagaacaacaaaaaaccaaccccgattattaccctgtctatgacatcttgacgttgcattgtggagaggagatttcgtgttctcatcaacaacgagcggtgccctttatattcactttcagccttttttaacacaccagttgactcatcaagagtcataagtgtgcttgtgtttctttcaacctcctgaaccatcaattgacgagtacgacgaaggctttccgtgatgctctctgcagcggatgtcattcctgcttttgtctgtaaattgcgtctgcggactgtggactcttctccgccacctagaagtagttctctctcctcctgagcagctttcctcaagttagccttcgcctgcagattggcattccgcagatttaaccgcaaattttgagttagggttttggaagattgaagcaaggcacgagtggattggacctctggctcagagggcaactgaggagcgagaagatcgagggtgaagaggaaggaagaaaggagagccaagccatcctgagcgattccattcaatctggcaagagaattattctcctcttttgctcttgctgatttgccgtagtctgcaattgcctcaatgtgctcttgcgttttcttgtatgtttcatcccattccttcttcaccttttcaacctcctccacaaccttgtccatcaccgtggttgtatgttatgtttcttgagtaacggcgactgatccagccaagagagagcaaaaggtgttgttgagattccagaagcaagcacgaaggaatcaaaacaaagaccttgatttcttttcgaacaacaaaacacaaagtaagggttttcgtttgggac

SEQ ID NO: 137633 - DNA, 285 bp, Glycine max
  Clone ID: PAT_MRT3847_95291C.1
tgactcataaggctcacttgactactgcaatgacaacttagattagagtttggttaagcatctgttatggcaatgtactttacagaatgtgaattatcttgtgtatccaaatccaacttactgggactagctttatgcacaaactatctgacatagatctcatatcaacacaagtggattcgccatccatactggagaactcacttcttactctaatcatcgagcgtgaccttcgcaaaaacattcccgtcatcaggatgtcatctcaggactgcgatatgatgg

SEQ ID NO: 137634 - DNA, 409 bp, Glycine max
  unsure (1)..(409): unsure at all n locations
  Clone ID: PAT_MRT3847_95292C.1
ccggnccggttataaaatcccgggtcgacgatcacaccagtcggttgacgccctacatcagaagggggagcacgggaaaacataggggccaacccaataagtttcccgctgccacataacaataacaataggcaacaatgacaagactcaaaagcatgacataatcaacaaaccaagagagaaaggaaacccaggagagcccaaccaggtagagcccccaatgaagcttccaggagaataatcccgggcctcggcagcatcagtgacgaccttataccctatacaagtgaccctaagagaagaaccagcaccaggcccagcgtgcagggactccctataaaccaaagcactaaaagcaaaatccccactgcacacatgccacccaaaagggccaaagacaacactaata

SEQ ID NO: 137635 - DNA, 700 bp, Glycine max
  Clone ID: PAT_MRT3847_95293C.1
gcaatattggcaatatttaaaattggtaacagcagagatatgcctgaaattccggatcacctctcaagtgaggcaaagaatttcattcagctatgcttacaaagagatccatcagcccgcccaacagcccagaagttaatagagcatccctttattcgagatcagtcagcaacaaaagctacaaatgtcagaataaccagggatgctttcccctacatgtttgatggaagtcggacgcctccggtatagtcctcaatgcttatttattttctttttgaaattatgttccttttgcctcttacattctagttcctacatattttgatgtaatcagtataaagagggttccgttctcatatgaataacaggatgcaattgtcttgatatttgtctgatttcatcatttgtggttatccaatactggatcaacacgggattgtcatctatgtagaggtgctataataccatgtcaggattttatctcagggtttgtttaggtttttttgtgctctatgtatcttgtagctcaactttatatgtttagtattgtcaagtttaaaataatagattgtaaatatgtaataacttcatggatgaattgtttctgcaaatcaccgggtgcaattgacagtgaagtatgctttgttgtttggttgtgtctatagagttaggtgttaaacactgatacagtgttgcaatc

SEQ ID NO: 137636 - DNA, 947 bp, Glycine max
  Clone ID: PAT_MRT3847_95294C.1
gacaggtttggcattgttgagggtttgatgaccactgttcattccatcactggtgagcctattgctcgcaatttgattggttgcatgccttttactgtgttacctattatgatatgtcttgcatatccggtttatgtttttgttttgtaaaccagctacccagaagactgttgatgggccatcagccaaggactggagaggtggaagagctgcttcatttaacatcattcctagcagcactggagctgccaaggctgttgggaaagtccttcctgctttgaatggaaaattgactggtatggcattccgtgttcccaccgtggatgtctctgttgttgacctcacggtgaggctggagaaggaagcctcatatgatgaaattaaaaatgctatcaaggaggaatcagagggcaagttgaagggaattcttggttacactgaagatgatgtggtctccaccgactttgttggtgataacagatcaagtatttttgatgcaaaggctggaattgcattgaataagaattttgtgaagcttgtctcttggtatgacaacgagtggggatacagttcacgtgtcattgacctgcttgtaatcgttgccaagaagtctttttaattaaggtggttctaacattatgtgctggtcaagctgcgatttagtgtcttgctcgtgcaaaaattgagaagtatgaataaatcggtttccggaaccagtgttgttaccctgttacgagcattaagctctttttttgttgcctcttctgtgtaggggatggagttttttggattcttatatacttgcagatgtactcgggctttattgattctgatagcagacattttccctccatttttcatccatggttctcgagtgtttgaaccccccttccttttctgctttgaattaaagattcgtgttttatatatatctcgccacatgtttt

SEQ ID NO: 137637 - DNA, 279 bp, Glycine max
  Clone ID: PAT_MRT3847_95295C.1
tacagctgcgagaagactacagaagggcgacctagtggggtgtaaaggctctgagcgagacgatgaaggagagagagcttggcttgttctaccctgcaatgttgcatattaaccaatgaccatacttacactacctcaacatgcagtatcctgttgacaactgctagtcagaggcaatacagcaatgaggtgacctaacccacttaaaagcttcgctgttaagcatacaaggaaccccatgggcttactggacatgcggcattgtggacaatacataga

SEQ ID NO: 137638 - DNA, 427 bp, Glycine max
  Clone ID: PAT_MRT3847_95296C.1
atgttctattcatgaacaacaaaaaaataaaaaacaatgcatacaaattaaaaccaaataaaaaactggtacaaatataaaacataaaaaaaaaaaaaaaaaaagaccacaagaacaagaatctgaagtaaattctagtagtcttcatactctttctggccctaaacagactcctaacccaattttttataatcctttttaaaaactgtataattgaaaaaaccttttaattaccaaatttaatttctttgcaaaaaatccccttttaccaatcttgaaaattacaaaaaaggcccttacaaaatcacttttcaaaaaatttccaaatttaattggtaaatggaacccccctttaaaagtatcataaaacccttgaggtgtgggggttaccccaaataatacctttaaatttttccaattcctaaac

SEQ ID NO: 137639 - DNA, 388 bp, Glycine max
  Clone ID: PAT_MRT3847_95297C.1
cgccaatggtgaaggaaagctatgtatcccattgaatggctgctgaatgctgaacagtctaccatagcacagattgaaaagctccataacgggcagaagatgataaatgctgaagcttcaaacaatgatatggcactactgctgagcatgaatacagtgagtatacacatgactacgaaagcttaaccaaaccaaattgtttttaatgataagcttgtggtggataacacacaaaaattctgtgatggaaatttaacagtggattcttggtcaccaattattgtgaatagtcaatatccagtacgaaaaataccttcaaaagatgaaatattgaatgttacatgcagcagaggaccagtgtattatcagcactctacaaacattattt

SEQ ID NO: 137640 - DNA, 186 bp, Glycine max
  Clone ID: PAT_MRT3847_95298C.1
ctatttcagctatagctcttaagggggctttagggaagatacaaggcacttgaagtggctgtacactctttgggattcaactacttgagaattctaatgcataatgaaatctacaaacagtcactttgtcaggaaaggtgtgtgatgataggacttgttccatcattaaatgctgaatttgatcaa

SEQ ID NO: 137641 - DNA, 310 bp, Glycine max
  Clone ID: PAT_MRT3847_95299C.1
taacgcaaaccagccccaagagaaagaggggttgtagggaaaatgtccctttgatacccaatctcgctctagatggaaaactgtctcctctacaaaggcacaataggacagcggaaaaacgctaaaatatgatgccataggcgcctggacacattgtggacacgatagacctgatcaggaagagcaagacaagcccagactgactcatgccagattgagacatagaatagatccccaatacaaccaagtccaggctcacatggaaacaaatttgtgtaaagcgtctcttgatgatgaggacactcccaaa

SEQ ID NO: 137642 - DNA, 365 bp, Glycine max
  Clone ID: PAT_MRT3847_9529C.1
ttattatgtaagctgaattttatgttgtctcatggtctcctctctctttttaatgcctctgcgtcactactagggtcattagaggagaattgtgtatcccattgtaacacatttgcttatgtatttggccattatttaccagaatggctttcaattgacattcttgcataaattagaattaacttctgcattttttttttaaaaaaaaagagaattaaaaatgataatggaacagaaaaaatacacaaaagaacaaaccaaaaagactttacagtaaaattaacaatggataaaatgggggggggcctttttaaaggacccaagtttacttccccttgcttgcaacgtaatagttttttttttgg

SEQ ID NO: 137643 - DNA, 208 bp, Glycine max
  Clone ID: PAT_MRT3847_952C.1
ttttttttcttttttttttttttttggggccctacctgttacttttgggttacagaaggcaaagccacagtcgaacacaggtaacaaagtgcacccaactacttaaatactggtgggagcccgaccgaaccccatgattcttttgggaaccagccactaaaacaatgattcttcaattacaagggaatgtgatagtttcttgccccac

SEQ ID NO: 137644 - DNA, 823 bp, Glycine max
  Clone ID: PAT_MRT3847_95300C.1
cttgaaaaactctgcaatacttttcttatctacgaggccataaacattaaaaagagaaacttaagtagtagtagcaaagatgacaaaatttaattgaagaagcagttcagttggttttgacccaaagcacataaaccaaggtgttgttgtgaatgtcggtgagctccatgagtcgtgcatctccaatgaatttcttggccgcgcaacaaccatcatcaaagttgagtgcataactcgaaggatcgtattggaacttgagtctctgcttgcccccattcttgagagccttcttcaacgcagcacgcaccctccaaaacaagctcctgcaacgcttcttgccataagcattcacccattccaaccgctccaacaagcccatcttcacaaaagagaagcttcaaacaaagacaacaagaacaaaaaggtggaagtggtagtaaaaatgagaggctagcatagcatggtcttttcccttttttgagaacaagagcaatattaataatggttgaggcggaaattgttgagaaaggtaaaaggggttatattggtgatggagaagaagaaacactgaaatggaaagggcgaatctttttggtctttcaaagaaggtgtgcacggttatctataggagttacgttgggatgctaaaattccatcttctatagattgcagaatagagtgttggtatggtatggtggggttgcaatgcaatgggcagagagcctcaaagtctaacaagcttggtcctttctccatcacgattcagaatgttgttgtgacagtataacgaattttagtttaatctaatctattcaatgcccct

SEQ ID NO: 137645 - DNA, 242 bp, Glycine max
  Clone ID: PAT_MRT3847_95301C.1
aaatcattttaatcctttctacttcactatctctctcttctttttcaatggcctctttcaaaccaccaccttctctttacttcctccggcggcgtggctcactacaacaacacttcatcctgccttacctacaccacccaaaaactcacccactccaacaaaaagcttttctacaactgaataaaccttccctcactcaattccttccttcacttgacccacaatctcaccaacacctccct

SEQ ID NO: 137646 - DNA, 334 bp, Glycine max
  Clone ID: PAT_MRT3847_95302C.1
gctacgcgtccggtatttgggagaaaccgcgatcataggttgccgcaccttaaaaccggaaacaaaagcaatggttactggattccaagagtctctgaaggggttcctactatgcggggtacgaatccttaagggaaagaaaatcacgctctgagctgggcacagacttcgggaatcagtttctttgacatgattagtttattagatgaacactctactatgagagataggacttcgggtcagattgaaactgcttgagtttctttcacagctctgtgtgtaatttgaggcacaagctggcgaaatcttggagtagtgctgccactctactatc

SEQ ID NO: 137647 - DNA, 280 bp, Glycine max
  Clone ID: PAT_MRT3847_95303C.1
cattcttacactttggatcaccagcaggaagagaagttgtttttagatatctcttctggactcactcagcttactcaattacatgaattgctatataaaaagaattggtctgatcatataactaattgtttctctaattatgctggttgctatgatattgatactgtacaaaattacaacgagctctctacaaagattcagggcatgtgcaaatctatcagagtgacactagatcaacatattctcagggaggaacttgagtcatggccattgtttgata

SEQ ID NO: 137648 - DNA, 417 bp, Glycine max
  Clone ID: PAT_MRT3847_95304C.1
aagccgtataattctgacgtcagctcccaggcctgagagatacaataatcctaaaggttacttgggccaagtcctgttcaccacaagattgacctaaacaacacagggttagtctttggcaaaagcacgtattgtaatattggaatcctagcaaaagctaaggccaagaactgggtattaacatgatacaccccctaaacgggcgtggcttttggtacaaggacaaacactttgctctcattattgtgctttataccaaggattttacttgtgcatacaaccacattcatggcatatgctatgcacaatacacacctgggttgaataatacaccatctgtaggcttgctcagaaaaataaacgtgctaatatcctttgccacccttctcacattatattggactgtgagagcgaagg

SEQ ID NO: 137649 - DNA, 237 bp, Glycine max
  Clone ID: PAT_MRT3847_95305C.1
caacacaaccccctattgggaaaagtttaatttatatgccactacaatccccaacccaagtttcaacaaattactaaaaacaaatatttataaacgaaaaacatgttgactgactaaaagcatttaacctctatctcctttaaataaaaccccttaatttctggtttaaacaaattctttgaatacaacaaattccacggctattacacataaattttaaaacaaaattccaacctc

SEQ ID NO: 137650 - DNA, 263 bp, Glycine max
  Clone ID: PAT_MRT3847_95306C.1
acaaaaagaaaaacaggctgaatggcaaagggcaccccccctggagcgaatcataaagcgcggaggggggggtggttacacgcacaaagaccgtacgcttgcaaggggcctaccgcccggtccttttactttcttcccttccttaaaagccacgtccacggggtgtccccgttaagcattaaatggggggctccctggagggccccaaataagtgaatgaggggacctccacccgaaaaaccttgattggggggagggcccac

SEQ ID NO: 137651 - DNA, 389 bp, Glycine max
  Clone ID: PAT_MRT3847_95307C.1
cttcatgaacgagggctcactgattggtcctctcaacggctctaattactgaccatcctgtgacgacaaacatggggaccggacgctcgtgtgcgacgcacctatgaaaatactcatggagtgattccagcgcctgcggacaatgaagggatctcgactgactaaatctagcaccaatagcggtgcactagtgcccgaactgatgctagtggcaaagctgtgcgttccagacacgaccacaatcgcctcgatctagggctctagtgcgtccatgcaaagcattaatgctaagatcagagccaagttatgttatatgtgggaacgactttttggaaatgacattcttggatacggattgtgaattagatatatatatgagaaaatagttg

SEQ ID NO: 137652 - DNA, 361 bp, Glycine max
  Clone ID: PAT_MRT3847_95308C.1
tgattacttgtgtagtagcttctatatttttattttttttttggtttgtgttaattgtatctgttaataattttgcatcttggtgtcacctatacctcaatactgttaaattgatgcctacccagccttttaagattttgctataattaggagtacatttagctgcttattcatcagaggcagtctgagatgtcatataaattctgctgatatagtgatgctaggatgactagcttacagatgaaacatagtttttagtctgttctaccacttagatatttgcatatatgttgatctcctaattgtcttcatattgtttataaaatttccaatctatgcctgtaattcatttgttttatca

SEQ ID NO: 137653 - DNA, 376 bp, Glycine max
  Clone ID: PAT_MRT3847_95309C.1
tctagctaaacacaatatggataatagaatgaatagtgcgcactgggaaaccattaactaattggtagagttacttacctcaacggatacaacaatgcaaaaaaaagctgcaactgctctattaatcttatcagatgctgatctctacagatctgcaagggctggtgctggggcaaaagctcctatgatggatgtactacagactgagagcccagaaccctaagacaatctgcctgactgtcttataagcttatcaacgattgaggaaaacatgatatgcatatggaggcattgggcgatgggaccactagtataatcatcgcgaattgctaccacttggcgagagagagatgctgccacggctctattggatctg

SEQ ID NO: 137654 - DNA, 709 bp, Glycine max
  unsure (1)..(709): unsure at all n locations
  Clone ID: PAT_MRT3847_9530C.1
agctcggattcggcgagactgcttgttctttaattttgcttcatggaactgcacaaatccacacatgtggttcttctctcaagccctggtctgggccatctcatcccaacgattgagcttggaaagcgcttcgtccatcaccacaacttccaagtcactgttctcgccgttacttcccaaacctcaaaaaccgaaactgagatattaaactcatccctctgccacatcatcgacatcccttcaccagacctcactggtcttgttaacgaaaacaacggcgtcatgactcgcctgagcgtcatgatgagcgaagccgtacccgccattaaatccattctttccaaaattacccctcgcccctcagcactcattgttgatattttcggcacggaggctattcccatagcaagagaactcaacattctcagctacgtctacgtggcttcacacgcttgggtgctagcgttgatcgtgtatgccccggtgctggatgagaaaatagaaggagaatacgttgaccaaaaggaagcgttgaaaattccgggttgcaacccggttcgaccggaggacgtggttgactccatgctagaccggaacgacaggaagtataaagagtttcttaaaatagggaacagaatcccgcanagcgatggccttttggttaacacgntggaagagcttcaacgtanagtccttgaagcgttgagga

SEQ ID NO: 137655 - DNA, 451 bp, Glycine max
  Clone ID: PAT_MRT3847_95310C.1
gatctatatctagccgttcacaaatctttttttaagtgtagtataggagaggaaccgcgccaaccctttctttttcttcttcttcaatccttaaataacaaaccaaacgcttcagttctataatcggggcggttaattgttcatcagagaattttaaggtacagagtcctaatgtgaaggacaccgtgactgacattcagttcgtgtacatctacgaaaccaaaaaacttgttcacgagaacaggagtggcacctatcactggattgtcattcccaaacccgaaaactaccaatttaaaaccatctcggaaagggccaaacttgggggagaaaaaagtgtgtttgtggcgtaaacaacggctgtaccatcacctgtggtgttattgctaacagagagggcatttcatgaactacaaaggacaagaggggagaagccaaccactttggctcc

SEQ ID NO: 137656 - DNA, 256 bp, Glycine max
  Clone ID: PAT_MRT3847_95311C.1
caaagctgtaaatgatggtctttggctgcagatgcttcttagtcagagggtacaagaaattgctgctgatacatgcaaagtttgctccctcatgagtatggcttgcacttgtcagaagcaatttgcattttcacatggagcttctaccactggatcttacgcacaagaacataatcagaacattatgcctggcaatgcgggaaatatatatgttgctgaatcttctgcaggcgaaagaaatggccgttttagacct

SEQ ID NO: 137657 - DNA, 1449 bp, Glycine max
  Clone ID: PAT_MRT3847_95312C.1
aagcttcttctccaagccagaaagtttcaaaacctcccaccaggtccaccctctctccccataatcggcaacctccaccacctcaagcgccccctccaccgcaccttcagagccctctccgacaagtacggccacgtcatttccctatggtttggctcccgcctcgtcgtcgtcgtctcctcccaaaccttattccaagaatgcttcaccaaaaacgacgtcgtcctcgccaaccgcccccgcttcctctccggaaaacacatcttctacaactacacaaccttggggtcctccccctatggcgagcactggcgtaacctccgccgcatcaccgccctcgacgtcctctccacccaccgcctccactcttttgccgccatccggagggacgagactcaccgcctcgtccgaaaactcgccgaggctcaagggtcggagtcgtccctctccttcgccgaagtggaactgacgtctaagttttacgacatgacgttcaacaacatcatgaggatgatatccgggaagaggtactacggtgatgattgtgatatggccgatgtggaggaggccaagcagtttagggctatggtttcggagctgctgaagctggctggggcaaataacaagaacgatttcatgccggtgctgaggctgtttgattttgaaaacctggagaagaggctgaagaagattagcaataaaactgatacgttcttgagagggctgcttgaagaaatccgcgccaagaagcagcgtgcaaataccatgctggatcatctcctcagcttgcaggaatcgcagcctgagtactatactgatcagatcatcaaaggccttgctttgggtatgctcattgctgcaactgattcacaagctgtaactttagagtgggcattatcttgtgtgctgaaccatccagaggtgtttaagagggcgagggatgaattggaaacccatgtgggacaagaccatttgttggaggagtctgacctttcaaaactcccttaccttaaaaacattatctatgagacacttcggttgtacactcctgctccattgttgttaccacattcatcttcagaagagtgcattattgggggattcaaagttccaggagacaccatagtgttgatcaatgcttggtccattcatagggaccctaaagtgtggagtgaagccacaagtttcaagcctgaaaggtttgaaaaggaaggtgagttagacaagttgattgcatttgggttgggaagaagggcttgtccaggagaaggcttggctatgcgtgcactctgcttgagtttgggattgttgatccaatgctttgagtggaaacgggttggtgataaagagattgatatgagagaggaaagtggattcactttgtctaggttaatcccattaaaggccatgtgtaaagcacgcccagtcatcaacaggcttgggaaataa

SEQ ID NO: 137658 - DNA, 178 bp, Glycine max
  Clone ID: PAT_MRT3847_95313C.1
gagccggggggggacccactgttattgctcttctgcatctcacgcaaagaagaacaacatcggcaagaactacaattatgcttacctttgggtcggaaactccgaaacccaatgcccggggcaaggcgctcggcctttccactaacccatttatgggccgctgtgcccacccttagtg

SEQ ID NO: 137659 - DNA, 383 bp, Glycine max
  Clone ID: PAT_MRT3847_95314C.1
aaagcaaatgcgatgtttatccttacagggggtaatctccttgggacaagacaaccgattttttgcccttttcaccaagtccagtcccgaatttagctaggccttaggcaagttttggggcatttaaacaaagctggcctttttgtcgggtttaaggccgttctgtttgatggcttcgggggtttgcaaagtaccctgttggagcctcctttttttttgccttggttgacctcaagcaataatctccttgggatttgtattcgaaaacaaagccttggggatctgctgtacggcaaaacaggcggcaaagtcaatgatcatgggggccgtaaactgggttcggaaccaggactcctttttgaacagttgcaaccaacttttga

SEQ ID NO: 137660 - DNA, 737 bp, Glycine max
  Clone ID: PAT_MRT3847_95315C.1
tcgttcgttcgttcctctgattattattcatcgatcagaattgatgatggagtcctccttcgatccaacggtcaacggctcaccacacctatcccttttcaacggccacgattgaatcggcgagatccgtcggtcaacggtctcttctaaggcgcggttagagagagaaagagagaagagagagagagaaagggaagggagagagatgacgtcacgatcggggcaggggagcagcggcggagggagcagcaggacccgtgtggggaagtacgagctgggtccgtgagacgttgtatgggttcaccattggtgcttaaggtcactgccggatcactctgtgggcagccttttgagatgtgggaaaaaaagaaggatcgtttacaaaatcaatccaaaatggaatttagtcaaactgatttgttttgtcatcttcaacgaagtttagatgcgttggaggatgagttccacatccacgaaaaggtgtgcttcatggatctagggcttttccctgaagaccaaaggatccctgttcctgccctcattgatatgtgggcagaactgtatgaacttaataacgatggtagcaacgcaatggccatcatccatgatttaaccaccaggaatttgattaatttcatagttacaaggaaagtttcaaaggatgaagacaagtactacaataaccactttgtaattctacatgatctccttagagagttggcaatccgtcaaagcac

SEQ ID NO: 137661 - DNA, 1437 bp, Glycine max
  unsure (1)..(1437): unsure at all n locations
  Clone ID: PAT_MRT3847_95316C.1
ttccagatagaggaaagcgtctagaaagaaattccccctaaaaatcttcctaaacttgattcaagtcacgtcacttgcattgaaagagtgtgtggtcttggtctgaacccaagaagtattcgacctccaaagctacaaatgaattcgataaacttggtcatagatcctccaaagctaccaagatgattctttggtcagtgcagaactagttccctaagaatgaaaggaaaaccctcaaaagttttctattccaaattcaaactcaatcaaaactgttgttttaggtataaagaggttatttacaatctagagaagtgctagcaatacactctttctaacacactgtggggcaaaggcagatctatggtcatgtggtgttattctctttgttttaatggctggctatttgccctttgaagaaaccaatctatcagctttatataaaaagattttcaaggccgagttcatgtctcctccatggttctcttcaagtgcaaagaagctaatcaacaaaatccttgatcccaatcctgccactcggattacatttgctgaggtcattgagaatgactggttcaagaagggatataagcctcccgtatttgaacaggctaatgttagtcttgatgatttagattctattttcagtgattctacggattcacaaaatcttgttgtagagaggcgtgaagagggacctatggcacctgtggcacctgtgactatgaatgcctttgagcttatctctaaatctcagggcctcaatcttagtagtctttttgagaagcaaatgggactagttaaaagggaaacacgatttacatccaaatgttcagcagatgaaataatttcaaaaatagagaaagctgcaggacccctgggttttgatgttaagaagaacaactgtaagttaaagattcaaggtgaaaagacaggacggaaaggtcatctatctgtagccactgagatcttagaggtggccccttcactatacatggttgagctgcgaaagtctgaaggagatactctcgaatttcacaagttctacaaaaatcttgctactgggctgaaggatattgtttggaaagccgagcctatcgatgaagaaaaagatggtgccaatccatcgaaataattgttatccaaatttccatctccgtacgaagtacagtcactagttgtgttgttattcagattgggcaatggagcagttaaaaaaaaaaaaaaagagtgggtattggaggattctgtcatggacttttttcctcatccgtatatgaaaacttgcttatatttgaactgtatatcaataacttttaatttttgtgctgtaacaaactttgcaagtgcaaaaggaaaactgtgctagctaaagatttctagcatttgtttgcatgaccagtttttttatgatagtttgcttttatttgaactgnt

SEQ ID NO: 137662 - DNA, 606 bp, Glycine max
  Clone ID: PAT_MRT3847_95317C.1
tcacctctacttttcctcttccaacacaaacactttccgtttcgttttttttttcttcagattcaaaccaaaccagagcaaaccaaaaaaggaaaagaaaaatcccaaaatccacaacgttacttcctttccttattagcgagaggaaaaaaaattaatttaaaaggcttcttgttaatttccctggaaacttcattttattttcctcttttctcttcttcgcgctcgttcgttcgttcctctgattattattcatcgatcagaattgatgatggagtcctccttcgatccaacggtcaacggctcaccacacctatcccttttcaacggccacgattgaatcggcgagatccgtcggtcaacggtctcttctaaggcgcggttaggttaggaaagagaaagaaagaaaatgaaggtggcaaagtcgcgtgtgtggcagccactgaagaagaagaggagctaatatttaattttatatattatagagagagaaagagagaagagagagagagaaagggaagggagagagatgacgtcacgatcggggcaggggagcagcggcggagggagcagcaagacccgtgtgggggagtacgagcctgggtc

SEQ ID NO: 137663 - DNA, 345 bp, Glycine max
  Clone ID: PAT_MRT3847_95318C.1
aggaggtgagaaaacaccacaaaggggattgcaaaaaaaaaaaaaaaaaaaaaaaaaaaagcggacgctctaaaggatccaagcttaagtaaaaccggcaggccaagaggatccacgcctacgtagtcatgcatgttaagttcaatggcctccatattgtcacctaaattcatgtcaaaggccttcggttaacaaagttaagcacggtaaaacacaggcgctttcaacatagtcgctttgaaccaaaacgccctttcggatcgtggttctaataagtagcacgaccgtaactgatcgcccttcacaagacttgtacaggctcaatggccaatggggatctccctg

SEQ ID NO: 137664 - DNA, 851 bp, Glycine max
  Clone ID: PAT_MRT3847_95319C.1
ggtcgtctccctattcttggaaatcttttcactcgattaatattacccgaagacccactatactacaagggggctttttgtaagcaggctgaggcacaagctgccatgtatcattcttaacaatagcttatagctattctttcatagcatcaatccactttgtgtcattcattgctgtctccaagctcactgattcagattcagcaaatagagctaagtgtactagctcaccttcctcccctattgctgaatcatgtatcaattcataatcctgtaacctgctagagacttgtctagctctctgtgatttccttactcttccttggtcactatcatcaattactacagcaaaataatcacttggctcatcaataggagcttcgattacaacttttgtaggcttctctaccatctctttatcccaattccagtccttggattcatcaactaccatgtctctactcacgagcacttctttggttactggattaaacaatttgtaaccaccaatggcatgataacccagtagtatcattatctcacttttgctatctaacttttttctcaactgatcaggaacatgtttataacaaatagagcaaaaaattttaaaatgactaaccactggtttgcatccagaccatgcttcttcaggtgtgattttattgagcctttttgttgggcttcggtttagcacatacactgcagtggagacagcctctacccaaagaaattttggtagcttctttccattaagcttgcatctgaccatattcatcactgtttgatttcatctttctgctgcaccgttatgttggggagtgtagggaggtgtcacatcatgcccaata

SEQ ID NO: 137665 - DNA, 416 bp, Glycine max
  Clone ID: PAT_MRT3847_9531C.1
caaacacaaacacaatcgtcaattaaaacaacaacaatatcgaagctgcacaaattaatatccaacactctcaagctttcgagtttcaaactctgggcgctgaatttggttcatttttctaagcattgagtgacggccaggagcaatacagcccaggagaaatcctctctggtgtcagctcttcactggaaaccaaccattatatgtataatagatcaatctccactttggacagtttcccattatattctgatcggaactctcttctacagaatgcgagttctaatcagaaaatccaacatgctttgctggagctagaaactgctttgatggccccggatgacgatcaagttaccacaccgaatacattggccgagagacacaggtcctggaacaatgagaaccatgtgtcacaa

SEQ ID NO: 137666 - DNA, 3862 bp, Glycine max
  unsure (1)..(3862): unsure at all n locations
  Clone ID: PAT_MRT3847_95320C.1
gttccagagtagattaaaggcgtcttatttaggaacattccccactaaaacatcttgctaaacttgattcaagtcacgtcacttgcattgaaagagtgtgtggtcttggtctgaacccaagaggtattcgacctccaaagctacaaatgaattcgataaacttggtcatagatcctccaaagctaccaagatgattctttggtcagtgcagaactagttccctaagaatgaaaggaaaaccctcaaaagttttctattccaaattcaaactcaatcaaaactgttgttttaggtataaagaggttatttacaatctagagaagtgctagcaatacactctttctaacacattcgtgcattggttcacctctacttttcctcttccaacacaaacactttccgtttcgttttttttttcttcagattcaaaccaaaccagagcaaaccaaaaaaggaaaagaaaaatcccaaaatccacaacgttacttcctttccttattagcgagaggaaaaaaaattaatttaaaaggcttcttgttaatttccctggaaacttcattttattttcctcttttctcttcttcgcgctcgttcgttcgttcctctgattattattcatcgatcagaattgatgatggagtcctccttcgatccaacggtcaacggctcaccacacctatcccttttcaacggccacgattgaatcggcgagatccgtcggtcaacggtctcttctaaggcgcggttaggtagtttaggaagtgcgtctaagaaagaaaaattgcccatattgatggctgagccgttcgttggagctgctgcgggatagtttttgaaaggggctttttaaatcattcgccgcgataactaattccgacccaccctcacatgaatcatagaaacctttgaatctttatcttctcgagtaaaaaagattaaacttaagaacagtagcctggatatctctatagaggacataatgatcttcgcgcctattttccgggtgggcaaataaatgatgtgacattagcatggcatgttggttttctcctagttctcaacggccattgacgcccaaaccaggcttaacgtcagcgacgatgtttaagacgagaagaacatttacgaatgcgccgcttcacagttaatagcggaactgatgtaaataaagaccgtcatcaaaatcattcatgagactctgatgatgtcagtgatggataataatgccaagatattcgatgtattggaatttgttgcagggggagaactttttgataaattgaaaattgaactgctcaaggatggcatgtcggcccttgtcttgactggtttgcctggatccggcaaaaccacactggctaagaagatctgttgggacactgacatcaaaggcaagttcggggtaaacatatttaacacagtccttaaaacatccgatttggggtgcattgtattgacagagctagatcgcggtagacgtccggttcacgcatttcacagtaaggacaatgatattaatccatagaggactctcaaccaaagttatgggggtgcaaaggcagatttatggtcatgtgttgttattctctttgttttaatggctggctatttgccctttgaatatacaaatctatcagctttatataaaaagattttcaaggccgagttcacatgtcctccgtggttctcttcaagtgcaaagaagctaatcaacaaaatccttgatcccaatcctgccactcggattacatttgctgaggtcattgagaatgactggttcaagaagggatataagcctaccgtatttgaacaggctaatgttagtcttgatgatttagattctattttcagtgattctacggattcacaaaatcttgttgtagagaggcgtgaagagggacctatggcacctgtggcacctgtgactatcaatgcctttgagcttatctctaaatctcagggcctcaatcttagtagtctttttgagaagcaaatgggactatttaaaagggaaacacgatttacatccaaatgttcagcagatgaaataatttcaaaaatagagaaagctgcaggacccctgggttttgatgttaagaagaacaactgtaagttaaagattcaaggtgaaaagacaggacggaaaagtcatctatctgtagccactgagatcttagaggtggccccttcactatacatggttgagctgcgaaagtctgaaggagacacgctctcaaggaaagtttccaaggatgaagacaagtactacctgaaccactttgtaattctacatgatctccttagagagttagcaatccgtcaaagcacagagaaaccatttgaacaagacagactgattattgacataacgggaaatgattttcctgaatggtgggtgggagaaaatcagcaaggaaccatcggccaaatgttcccatgtttctgcagaatgataagacagaaacagctaaaggttgctgctcgcatattgtgtatttcaactgatgaaacgtttaattcagattggcgtgacatgaaaccttacaacactgaggttctgattttaaatcttcactctagccaatactcattaccgtgttttacaaagaagatgaaaaaacttaaagttctgatagttacaaattatggttttcatcgttctgagataaagaagtttgagctgcttggttctttatctaacttgaaaagaatcagattggaaaaggtttcagtcccttccctctgcgaattgaagaatttgcaaaaattgtctcttcgtatgtgtaatacaaggcaggcttttgaaaactgttctatccaaatctcaaatgcaatgccatatcttgaggaaatgagcattgactattgcaatgatttgattacattacctgatggactgtgtgagattagcccattgaagaaacttagtatcactaactgccacaaactttctgcactgccacaaggtattggaaaactggagaatctggaagtgctaaggctatgttcctgctctgatttgctagagatgccaaattcttttgaagggcttaacaagctaagctgtcttgacatctcagactgtgtaagtcttaccaaattaccagatgatattggtgagttgaagaagcttaagaagctatacatgaagggttcaaaactgggtgaattaccatactccgtccataagtttgaacaatttaagcatgaaataaatgtgatctgtgacgaagaaacggttaccttatgggaaaattttcgtgcctttcccaatttgaagatagagatatttagagaggacattgacttgaattggcttcatggagttcattcctgagacttgtttcctgaaattgattgtgactcagcatcatgttgggattggagaacgatgttcgtctagtgaaaaacacgagtttgtgttagcatcaatgtggaatgtgttgaaagaacattcatgtgttattttagcatggtcatttatactttttgttatcaagtagagcaatattttctcgtttgtttgaaaaaataaaaaagggagattgtcgtgtatgacatcttattttataattaactttggcatatatctgcagaaccttaccaaagtgtttactacaaataaataaaaatgacacggtcatgattgcatgataccccaggtaaagtcctcaatgaggttaaggttgtttgccaaaatggcaatccattgtccaacagttgttgtgttacccagttaaaaaaaaaaaggccgcatccgggcttaggaaagagaaagagaaagaaaatgaaggtggcaaagtcgcgtgtgtggcagccactgaagaagaagaggagctaatatttaattntatatattata

SEQ ID NO: 137667 - DNA, 340 bp, Glycine max
  Clone ID: PAT_MRT3847_95321C.1
acggaaacctgaaaccctaacaatccctattcaatgactcctcgcgccgacgatttcgaaaaggacaatctctccgccaccggcgagcgacgacgatgatgacgacggcctcaaggaggacatggacgcgctcgcccgagcctgcatgatcgccgtccctcgccccgacgataattccaccgccgaagatgatattcctgcggaggacccgctcctcctcgccggcgactccatcgttcccgccgccaccgacttccgacgacgaccaagacgacctcgagtgtcttaagagagtgcagagcctctaccagcccctgtccattctttcgccgctgacacc

SEQ ID NO: 137668 - DNA, 1214 bp, Glycine max
  unsure (1)..(1214): unsure at all n locations
  Clone ID: PAT_MRT3847_95322C.1
ttgcatgcctgcagcctacagttgtcttttattgcccatcgataaaggaatgactcttggtgagccaatgagctcaaatcaagctagagaacttcctgaaccagatagtgtgacggcggaacttattgctatctatcaattcccagagtttagttcagaacctcgtaggccgggaatgccatcaagaagccttttcctctcggtgtcagtgtcagccaagttagcatcggcttcgccaaagccatcattttaagcggatgacattgatgagtgatccaacagtcttgagtggtagttctcaaaggagaagggatccgaggtactaagtagctatggaatgaaggcgaactaaaagctttctcccattctccttcgattcgtgacgtgattagccggaacagtcgattgatctgatctactcatatcagagtaccgcgccaatgtcgtttaagacagcggagtttgacagactctgtacgggaagaagggcggctcattaaattattcttattttattaatcacaggtatgagttttagggcgacgggcctacgcctactatgagaagtgcccatccttctctcaggtattctttcgaccgcgtctaaaaaaagaaaaaaacttgaccttttttaaagacatccctcgagctccgcagctttaacaccggatggaagtacggtcagatgaatagaaccaatactattagtctcagcggttgacggcaaggaaggaagtgaagttttcccctatcctgtatgatttttaaaaggagggtctgtaggcagaatagctgccctaggcaaaagactccgaaatcagtgattcattagatagagaagtcgtgaaaagttctccgcgagaaagaaggacgcgactcctctctagcctagcaccctttccctcaaacctgagaacaggcatctcagaaggaaagtttttgaactttcgggcgatgtccttactaaaggaccggataagcagctagatcgattcctaacagattggaaaatctttctttgcttaaaacacaggagagctaactcgatgatcgaccaagccattcaatggcatcggtttttcctagacctcaaagactggcacctncttcagattctagaaaagaaagtagaagaccaggattaacaaaccagacctaacctagttccccttcttttacctcaagcctaaggagaagatcggtacatcgattca

SEQ ID NO: 137669 - DNA, 401 bp, Glycine max
  Clone ID: PAT_MRT3847_95323C.1
aaggaacggatggcccatgctctgccttttctaacgttccacactcgaccacctggaagatgttaaaagggtggtcgcctacatgcttctatcggacacacaaacgaagatgaaggccgcatacctcaaatggaatagggaaggagggcgcaactaactaaagacagatccagcagttaatttccaaagctgtcaaaggtgactaattcatattctaaattgtgccattggacctttacctaaacataattcgctcattcattcaccgagcattactcgttcctgtaaacctttttatatttggcctgggactcaaattctccattattcgaactattttggttttacgtcgaaattcactccggaaagtattatcgcaaagatcaatcttatcctcaaaa

SEQ ID NO: 137670 - DNA, 694 bp, Glycine max
  Clone ID: PAT_MRT3847_95324C.1
cgttatcctctccagaagcgcgaggggagagagaatgacaataactgttttcttagttcctccgacgcctcatttgtgcaactacaaaaactcatggccaatttccacttatccttctctttcttcttcttcttccaagttaattgttccactgtgctctccttcccctccaacatctattatcgaagagggtccttctccttcaccagatgaacttcccgttgttgttgatagctcggaattcacgagtggttgtaaggcatgtggaagagaagaaattgagcaaggatgcaatggtgagggaaggattcagggtgggattgcaacagtaccaggccttggttggtggcctataaaggcttacaggccatgccctgcatttatggcatccggtggtaggtataggcgccaaggacaaagcatggacgaggttgtctccggaagtggtaaaagtaaaacacccaccaccactgactccaacacaagtatcaaaaaggaaagttcgaagaaagctaagaggtaaatgtttgggaggaatattccagtcgtggctctattgaggtgacaaaagcaagagatttaaggaagaggaggggtaaagaaaatgttgatgttgtggtctgctacaaatgtttaaattcaatattcgataaggattatggaaagctatgtacgtcttataaatgcattggca

SEQ ID NO: 137671 - DNA, 793 bp, Glycine max
  Clone ID: PAT_MRT3847_95325C.1
ccacgcgtccgggacacgctagtcattctggataaaagtggaaggacaaaaatagccctggggcttggtcgttggcgtttaattgtggcgtgagggagggagtgtgtgataaaggcatcctcaagaagccaatcccatatgatgagcattagagtgtaccttagtgtaattagtagtgaaatatgaaaatggaagtggtttcattttcacaatcaacacatacccaaaagtaacagagagtgacaatagcagagcgacccaatccaaacacagaacaaacttagtagtaaaagaaaaacatgacgacgggtatcgtacgcgaccagaatctggagaaacatattcacaagcagatggggtgcatggctggtttccttcagatcttcgaccgccaccagatgctcaccggaaaacgcatctactcccccaaacgcctccctccggcctcgcctgagccggagaatcccgcagtctcaccggcgcgttcaacgccgtcgccggcgagagaggtcacgagttcggagccccaggcgaatgttcccacgcttcccgttctcgaattcaaggaaggcacgcggtcctcgtggaagttctcgagagaagctccgaggttgtcgctcgacagcagagccatcgtggacgcgaagggaactctccaccttcacccgcgcgagatccctcccgaaaacgacgccgacaacagcgtcgttccaccagcgtcattgccaagctcatgggcctcgagcccctaccagattcagagcccagacctgggcccaggcccgtggcgaag

SEQ ID NO: 137672 - DNA, 322 bp, Glycine max
  Clone ID: PAT_MRT3847_95326C.1
aaaggggggggattgctctcacctcaaaacacgtttttggtttttccaatcaaaaaacaccgtttatcacatttttttgtatataaaagttccctttccccaaaaacaatctcaatcactttcaaatttcaattgaacttttctacaaaatcattcccaaaatcattctttttaataggagaaagcgtctgtactttgtcccttttagtgaaaccccgaaaattaactaggggaaacaaaggttagcctcattggcattggcaactaaaaaaaaatctttttttaaaaatttacctttctttgacgtttttttttttttaaa

SEQ ID NO: 137673 - DNA, 793 bp, Glycine max
  unsure (1)..(793): unsure at all n locations
  Clone ID: PAT_MRT3847_95327C.1
ctcgaggcgctgaagtgcaggtaatggcggacaaggccagacccggtcacgacccacgcgtccgaggagatgtgtcttctctcccctaaccatccaaaacgacaccgtactgcctacaatgttcctctttcgaaaattcaacgttcatagcctcatccttaaaccctggcaaaaccctaggttcctgagcacgaagaagaaacccccgaaatccggtaccaaattcatcggaaaagccgccctcaaagaagcccaagccgcacttctcgagtacctccactccacacgaagcctcaacatcgtcgacgccgaaaacatgtgcagaaactcaccctccttcctccacgacctcctcgccaaatcccaatcccaaaccctaacgcggcacgtcgacaacaacaacaacaacaacagcagcagcagcagcagcaccaccaccaccaccaaacgctccatctcgcgctacctccgctaccaccccatcaacgagttcgagcccttcttcgagagcgccggcctcacccctcccgagtacgcgccctttctcccgcgcgacatgatttacctaaacgacgacgctttgctcatggagaattaccatgccctctgcaattacggcgttccccgcaccaagatggggaggcttttcaaattgacgcctcagttgtttcgttacaaacccggcgttntgatctcgaagcttcgggattacgaaaagctcggtgttgcgcggaggactttggcgtgtgtggttgcttctagcccctgcattttggttgggggtgttgatgtt

SEQ ID NO: 137674 - DNA, 281 bp, Glycine max
  Clone ID: PAT_MRT3847_95328C.1
ctcgagccgtccaaacacctcaaagccatggacacctccaacttctctattgttctctccgtctccctgagccttcttaatggtgctacttaccaaggcacactcgagcgatagcgtatctttcaccttcaacacgtgcaactcagtccaaccatacattatgctccaaatagatgctagcattgcatcctctggggtgttacaactcaccacagttggcagcaacggtgtgaccacctcggaatctctcggtcgtgccctgtacgctgccccaatacaga

SEQ ID NO: 137675 - DNA, 277 bp, Glycine max
  Clone ID: PAT_MRT3847_95329C.1
tcatacaacataggtttccaaaaattacgcagaagctgaatttaatttccactatctaataatgaccacttcttccattggcagtgcaagcttctagcgtgaacttctccacattgaattcgatttaataatgcatctaattatgttctacacgcattgcctagtattatatgttattttggtcaacagatctacaatcgatcaaacattggatcaaaacgggtttagcacacgttctgctatctctcgccactagtccgatttagatttgggctac

SEQ ID NO: 137676 - DNA, 171 bp, Glycine max
  unsure (1)..(171): unsure at all n locations
  Clone ID: PAT_MRT3847_9532C.1
aactctgatccacaggaaacttccatatcatctttgccaagagatattcatggtgctcctcctgaaagcctagttgttaagctagccgaagtaatcggaaacttcaagacgcttcgaggaatgtctcttttttggttcanggttgttgatgaactgagaaaacattggtct

SEQ ID NO: 137677 - DNA, 410 bp, Glycine max
  Clone ID: PAT_MRT3847_95330C.1
gacaagcagattacacgggttatagggaagataacagcaattgctgctgctggggctcttagaatggcatgaggggcacccgtgctcccatccaaccgggtggttaaaacaactaaatctatgttcacaaaaaaagatggcgatacttacacatataaacccattcctaaaatatctcatgcgcatcacattatggattattctacatgctaaacatgaacaagatacttgtacatctggtgtccgacacgctgcattagatggcgataatacatacactgctagtgccgcacctggttgagctattcagctgtgcacaagttgctctctttcactgctgtgtgaatctgtgaccgtatttggtacatcaccctacttctttgatgtctgttacaataatatagtgcatg

SEQ ID NO: 137678 - DNA, 316 bp, Glycine max
  Clone ID: PAT_MRT3847_95331C.1
catcaatctactcactatcacactgtgttaccgtcatctactgaatgcatattgcataggccgtacacactacattctgccaggaatggacacttatcagctccgatctcacagcacgagcctgacagtgctcgtgttgcaaatatcaatagtccggctgatagcggcccataatactcccaggattctgatagacaaatactcagcattggacttcagtttttaaggacattctttcctggctgagaaaatcacgtcgaagaatcaagtgtacctgggacaactgcaagttctggcttagatcatgctggaacat

SEQ ID NO: 137679 - DNA, 483 bp, Glycine max
  Clone ID: PAT_MRT3847_95332C.1
cttcgttctttttttttattttattggattttcaaaaagaacacattttccccaatacgaattggaattgctctcattcattactgctataaagtccaactgatggaaattaattctatacgttataatactaccctgataaaaaatcatgacccaatcaccaaataaattcatagtttacgcatgaatgaaaaggatggagaactttctgtctttatcctttgccctgatgatatatcctcattacctaaacatatcataaggccctgcatattaaaaatcttatttctttgctaaacaaacaataattctgcaatttgtgaaacaaatcaatcaatttcctaaccaacaagagtgttcctttggcgatgtaacctattgagtccctccgccctctacaaaaacaaaacctcctacctggtggcatgagaagagaccgttccacttcttccagtttccttctagtgggacaccaactttgag

SEQ ID NO: 137680 - DNA, 182 bp, Glycine max
  unsure (1)..(182): unsure at all n locations
  Clone ID: PAT_MRT3847_95333C.1
ctntccactgntggntctgacaccgngttgtggcgatgtnccagacaatcccancaggacnggcgacaganatccctactggcntcnctggtggctcatctcgaacatccacgccagcctttctggggccggccanccaggncgcctgtccntctgtcctccctccagcagcacnccctggc

SEQ ID NO: 137681 - DNA, 216 bp, Glycine max
  Clone ID: PAT_MRT3847_95334C.1
ctggatccaagaccacacaagtaccaccacacagtgtccaatgacacacaacaacacaccgttactaatctctcttggccccacccggagcccttttaaaacggcctcgttatgaaaaccctctcaaaccgccatccatcatccaataccagagatgcacaacgacttgcaagatcctattcctcctcacctacctcccgacgcgaacatcctgct

SEQ ID NO: 137682 - DNA, 153 bp, Glycine max
  unsure (1)..(153): unsure at all n locations
  Clone ID: PAT_MRT3847_95335C.1
atntcagtgtntagtacatatnntacatcactancctacatgtacaagctccttnttcgcncgttactgngggancaaggttcctntgttcatncctgcctgtcaccattatgtttaatttgttggggangtgtnnggnncttattantatgc

SEQ ID NO: 137683 - DNA, 655 bp, Glycine max
  Clone ID: PAT_MRT3847_95336C.1
gagagagagaactagtctcgagtttttttttttttttttttgcaatttgatttttgtgatgacttatacattatgacctatcctaatcacaatttcagtcagcatccatacactactaactccactttgcttgactgagttttttcaatctatttaatcagaattgaattaactacttgacatcagagtcagtgatcatttgcggttatcacaaagcatggcaatgtgaagcattgttgtggagtcatcacatccaagacaagagaagaaaatcaccactcacaaggaaaggatttgccatagccatacaatacagtcacggatctccttattataatgttcctcgatttttattaaacaaggcaaacttatgataaggtccaagatccaactatggcaaaggaggcctttgatattccaatgaatggctctgattcgctgctatacattattttaattactatttgatggattcaaatcttgtcaggagtctcaacataccaagaatttttgagaagattttaaaagtcttttgaggtaaaagaacaaaaataacaacaaccaatacggtcttgctcatgatcccaaaaaagcatttgctgagtagctactgagcaagcccttattagctgcaagaaagaaattttcagctgac

SEQ ID NO: 137684 - DNA, 462 bp, Glycine max
  Clone ID: PAT_MRT3847_95337C.1
ggctcgagggctaggagaatgatggaagcgcaggagcactatgtgtagttcggagctaaccaacgcttctatagacagctaatgtgaacgtgagtgcagagagcttacgactgacaggactactcagagagccgacgccggtgccaatggttgacccgactgagtctacgtcatggccgatctacaaagcagggcatactgtagattgaggtcactttcttgagtctctacataaccggcttaaccacactgggagtgatcatggctaagtattaaggagctttccgttgagatgcaaggagagtcgcttgtgccaacagtggcatgatcattgtcctagtatactgcaacgctggcatgtcagggggacacatgaagccatcgatgacattatggctgtttctggcgaggaagctgaacttgcccatagccattcgctgcactagatgcagtgcttgggtg

SEQ ID NO: 137685 - DNA, 412 bp, Glycine max
  Clone ID: PAT_MRT3847_95338C.1
ggctcgagggaccatcacgacacttagatgtcggtttgggtatgacatctggagcctagcgcaattctgatgtgactggcgacactgagagattatcttgagatgaacgaggccgtcgcgaacagggtgcaaacgggacgcgcggggattggggaaagaggggcggcacttaagtaacacattgtgccctatagaggcctcatctgtatgattaagactcctgacctaccatagaggatcactgactggaacaagcggggggggggaaggcttgagcgtggaaagcactgacggatggttgcgagaacatcaacacttgatttgacgaggctttacgtgcactttgagctatgccggacgcataagatgactgactcatggatgcgtgtgacctgctggaagacgagagaaa

SEQ ID NO: 137686 - DNA, 343 bp, Glycine max
  unsure (1)..(343): unsure at all n locations
  Clone ID: PAT_MRT3847_95339C.1
ggattggnggtgtntnggttgggannnctctncttggtcgctgcggtgtgttgtgtccgtgtgttcgttgcgctcacggtgtcggaactttgcgtgttgcgagatcgatgctgaagtctgctacgtgtgcactggcgcatgtggcactggatgtggttgacattgggcccagtgctgatgctgctgtgacctgcaccacgtcacactctggtccttgtcttccagcaactaattcatgttctgcaacgtccagtgcttgttgaccgctcacttgaggagcaagaacgttccttctgtgggaaccccaatttacctcgctcgaagcactatgtcctcactcctg

SEQ ID NO: 137687 - DNA, 254 bp, Glycine max
  unsure (1)..(254): unsure at all n locations
  Clone ID: PAT_MRT3847_9533C.1
gggggcgaccgcacgcgtacgaaaataatccatcatccaatgtattattttttctcctctacttctanaangatgtgagagaggttcatagtcagatagaagtacacgaggcaaaataatccatcatccaatgtattttttgtacatagaatcatcctctcttactgtaaaagcttaaattgaaatggaaaatttcgatctagaaaagatctatatggccaatcaatcaccactataataaaaaggattttact

SEQ ID NO: 137688 - DNA, 557 bp, Glycine max
  Clone ID: PAT_MRT3847_95340C.1
tttctgatttatgtccgggccaacaatgacttgataggacagagaatattggttgtaacaagcttggagtaaagcttgagttaaagagtcaaaagtggcaatgacaaatacttgtaacttgttgaagttagtggaacttagtgatttatcaagaattgaatgtagtctcaatgattaagataaaccaatacaaatttcctatctcttattcatttattttctcttctgctatttgaactgaccctagggtttgaatttgatttttgcttttgaaaaattatgttttttttataaagatttgaaactatcgtctgattcgctttgcaaaagtttgatatctattttcttaagtcttacttcatcagatgataactttgttgtttatgaaaaggttgtaaattgtgaaaatcacaattcaaatccccttcttgtgatatttgtctttacattggtctagtggtaaatggagaaaaaagggggaaaaggtcgtgggctcgaatccctccaccaacaaaaggctaacaattctaacgactaatatttgctaatttttttta

SEQ ID NO: 137689 - DNA, 327 bp, Glycine max
  Clone ID: PAT_MRT3847_95341C.1
ctcagttgtggcatcaacgctacttttttctgcagcaactatgcataaccctaaggtcttcttcgacgatgaccagacgggcgccaatctgacggccgcatcgtgatggagctctacgccgacgggactcccctcaccggcgagaacttccgcgcgctttgcaccggggagaagggcctaaggcggagcggttagcccatccactacaagggctcgggcttgcaccgcatgatcccgagtggcatgtgataaggtggcgacttcaccgcctcatactgaaccggcggctaggatatttatggcgcccagttcgcctgacgagaactt

SEQ ID NO: 137690 - DNA, 262 bp, Glycine max
  unsure (1)..(262): unsure at all n locations
  Clone ID: PAT_MRT3847_95342C.1
annctccgnagcccgaaatcggcttcgnagttttatnctncttcctctgtntgaagnggactcgnncntngaagatcancaaantnggnacaaatgggtggaagggcnacttggacgtcttncttggcaagacaagtgnacgggtgtcaacntgggnanctnaantcnactttgggtttcaaggaggggnaagtgggtccaanccaatcngtaaactgggatgctctttgcctggggcttaaggcctgggtcttccaatggt

SEQ ID NO: 137691 - DNA, 274 bp, Glycine max
  Clone ID: PAT_MRT3847_95343C.1
cttacttttttttttttttattattttttaatctagaaagaaaaaaaaaaattgcggggtcaataatgtttgcaatgtacaccccaccatgttttcataaacccgaggcctggactacttttataacacaaatatattaatgagtccaatgtatacttaaccaaattaacacataattaaagttccctaaacaattttgtaaaggagacaaacacaggtaaatggtaaccacaaattccttttctggagcttctctctttatttattgcgaatg

SEQ ID NO: 137692 - DNA, 105 bp, Glycine max
  Clone ID: PAT_MRT3847_95344C.1
ttttatgtgtacgaataaatacaattgcgatctaaacaggattaatgaactgaggtgcatacgttatgtactagctagctgtaaaagacgacgcccgagctcatg

SEQ ID NO: 137693 - DNA, 257 bp, Glycine max
  Clone ID: PAT_MRT3847_95345C.1
taccgctgcaagaagactacataacgggacgggacattgtttttctgttccacttctaagatctctttcacgtcagtctcacacgtgaaacacatccttgttctgaaaatatatgctcgtcctagttccactgcgcatctggctcatgtttaacttgcatttttgaattatggccagttttaccccgcaatggtgtttctggcaaccttcaaaattagtttggtgcttcctcacaacatgggtttggtccttatgtg

SEQ ID NO: 137694 - DNA, 341 bp, Glycine max
  Clone ID: PAT_MRT3847_95347C.1
ctcaaggagagaatattccctgatcattgttcagattgttactatttgacaaatcaaattcagagttcgaatagtcaaaatagaggtgcttggtttatgtcttggtaaattgtggagtttatagcattattatgctaccaaaactcactttatagctgaaatttgattggtgcattttttcagcaggacaaacttcaggtgacataagaggttgagtggagttgcccaactgtgattgtccatctgcagaaagataccgagaaatgattggtttttgtaacttgtgtgcagtaacaaaataattgagtgatttatcagaaataggaagttggatgatttca

SEQ ID NO: 137695 - DNA, 522 bp, Glycine max
  Clone ID: PAT_MRT3847_95348C.1
agaccaacaaattggtagtgaaattatgaattgcctcatcttacaatttatttacaacaaaaagctatgagatctaaagcccgatttgtgttattgtataattgtgggctaggctacattgagaaacaaagagcctcagttattgacaagtggctccgttttgtcctcccacttgttcaacctctttgctgcttcttcaacctctttattccaatccgttccaaatgtgacccacactaaaataattgtttgcaaaaccgtgccacctagcattcccaaccatattcccttagcactgagtttgaaatagaaaccgagaaccgaacccaatggtatgccaattccataataacaaccaacgttcacatacgcaacaaaagtttgccatccacatccaacagccaccccagattagacaggttgaatgccgttgagaataatagaaagagcaagtagaggacaaagatctgagacagcagcagccacctcttcaccgtctgtgaaggcatagctaatgacatc

SEQ ID NO: 137696 - DNA, 687 bp, Glycine max
  Clone ID: PAT_MRT3847_95349C.1
acacatgatgaatacgaaatttattgttaaatagatcatttttataacatgtttgttctcccaacatgtgaacacaacgtgactaacactacgcaaactattcgggttagaccaacaaattggtagtgaaattatgaatttggcctcatcttacaatttatttacaacaaaaagctatgagatctaaagcccgatttgtgttattgtataattgtgggctaggctacattgagaaacaaagagcctcagttattgacaagtggctccgttttgtcctcccacttgttcaacctctttgctgcttcttcaacctctttattccaatccgttccaaatgtgacccacactaaaataattgtttgcaaaaccgtgccacctagcattcccaaccatattccctgcacacaaacaccgtcctcaatacgtgcatgcaaattaaatatataccccttcttgcattattaaatcagagctatcttttggatgagaaagatagataacaccaatcgagtaacataccttagcactgagtttgaaatagaaaccgagaaccgaacccaatggtatgccaattccataataacaaccaacgttcacatacgcaacaaaagtttgccatccacatccagccacccctttaacttacgttataaaggaataaaggcattacaaataataagaaaaggg

SEQ ID NO: 137697 - DNA, 155 bp, Glycine max
  Clone ID: PAT_MRT3847_9534C.1
caaccaactcaacagatttaggggagaggggtttcaatagactttaaaccttcaattggttcaacagattaaagttataccattacaaacagtattctctttgatggcataccatatttgtacttatactaaatcatacaaaggtattaaatgtt

SEQ ID NO: 137698 - DNA, 1173 bp, Glycine max
  unsure (1)..(1173): unsure at all n locations
  Clone ID: PAT_MRT3847_95350C.1
gtccctggaaaattctctttgaaaagcttctttctcaatttcctcaagtcattccttggtcttttgccatagttataatctctcttcatgttagttcggtgagtctaccaaactatgaaagtatcccagcagtgattgtgtttggggactctatagtggatacgggtaacaataactacatcaccaccatagcaaaatgcaattttctaccatatggtagagattttggtggaggaaatcaaccaactgggaggttcagcaatggtttaaccccatcagacatcatagctgcaaaatttggagtcaaggagcttttgccaccttatcttgatccaaaattgcaacctcaagatctcctcacaggtgtaagctttgcatctggtgctagtggatatgatcctctaacttctaaaatagcatcagcattgtcattgtcagatcaactggacacgttccgggagtacaaaaacaagataatggaaatagttggagaaaacagaacggcaacaataatatcaaaaagcatatacatcttgtgcacaggaagtaatgacattaccaatacttactttgttagaggaggagaatatgacattcaagcatacacagacttaatggcttcacaagccacaaacttcttgcaggaactttatggactaggagctagaaggattggagtagttggtttaccggttctagggtgtgtgccctcacagagaacacttcacggaggcatatttagagcatgttcagattttgaaaacgaggctgcagtgctcttcaacagcaagctctcatcccaaatggatgctcttaagaaacagtttcaagaggctagatttgtctaccttgacctttacaacccagtactaaatttgattcaaaacccagctaaatatggttttgaagtaatggaccaaggatgctgtggcactggaaaattggaagtaggcccgttgtgcaaccatttcaccttgctcatatgttcaaacacctcaaactacatattctgggacagtttccatcctacagaagcagcctataatgtagtttgcactcaggtgcttgatcacaaaatcaaggacttcttctaatgccagtttcattgtaaaactatcaataataaataaaaattataataattacatgccnnnnaaaatatttttttttttt

SEQ ID NO: 137699 - DNA, 355 bp, Glycine max
  Clone ID: PAT_MRT3847_95351C.1
gcagagacttctgtgtttataaatcattgtttgggatttagctctattctttatggctctgttggtgattgaacagatgctgatcttcgccaaaactttgaccggaaagaccatcactattgaggtggagtgcttcgacaccatcgataacgcgagcgctagcatataagacaaggaagggatccgacctgaccagcatagacttatcttcgcgtgtatacagcttgacgatggacgaacccttgtcgactacaacatccgacaggaatccactctggaccttgtgcttaacctgaaggctggtattcaaatctttgcctataattgtactgtcaacatccttgatctcgaggaa

SEQ ID NO: 137700 - DNA, 154 bp, Glycine max
  Clone ID: PAT_MRT3847_95352C.1
gttaatttgttgagagagagcaatcaagaacattcatggagtcttcacaggagagagcagacaacaccaattaaccaccacctgataggctgatacaatacagtctcctatcctttttcgacaaccagactggctgcgaaatctagttcgagtt

SEQ ID NO: 137701 - DNA, 686 bp, Glycine max
  unsure (1)..(686): unsure at all n locations
  Clone ID: PAT_MRT3847_95353C.1
cccacgcgtccgaacacacacattcccactcaatggtctctaacacttcacaatctctgtttcagctttctctcttttctacaatggcttgcaccaccgtcgtgttgacgctagtcgccgcattgttggtaacctccgtcgtggctcagtctccggcgtcctcaccagctctgtctccaaagcgcacccccgtcgccacacctcagaagtctccctcgccggcgatttctccctccgccgtgtcgccgtcgtcctctcctcccgctccggtggtgaacactccgtctccgtcaccaaactcagtcgactctccgccatctcctccgcagtctccgtccgtgtcaccagccggtgttccctccgtcactccttcagcaatctccgctcctcccactggagcaccggctccctctcaaaacggtgccgctttgaacagattcactgttgctggatctgctgctgttgtggttttcgctgcggctttgctcatgtagagagactagagagggtttcgcggagttttattttttattttttttattatcatcgtttgcgaacgaacgtgaattctagtacttcatttttggttgcttttttcatgcagtgtgaggattcattctttccattattttgtctattgtatttatgatgatgatgaatgatactacatttttatgatctttcna

SEQ ID NO: 137702 - DNA, 456 bp, Glycine max
  unsure (1)..(456): unsure at all n locations
  Clone ID: PAT_MRT3847_95354C.1
acccctacataagctcggaattcggctgcgagggctctagctcagatggacattcttcacacagcaaacgaactgcttaggaactccgtangaaatatggtgcctcgcgtatatagtgagtgacataaacctacgcatcaattatttttactacccctataacaaactactcttatacggctgttcattaccaacatattaccctgaaatctacagaatctaaaccgagtgcggaatttaagaaagcattaattggagcacctcatagtaagaatgcttgaatttgaatctaaagaacataatctttttgctcagcaactttaagtgcagcgattgtaactataaatttacatggttttaatgcatatatattgatattatcaaccatatacctgcatatgaaagggtggcatccctacaattaaatgaggttactggagaagctctgttaaacat

SEQ ID NO: 137703 - DNA, 337 bp, Glycine max
  Clone ID: PAT_MRT3847_95355C.1
tgtgaaaacatcaattaaaggattactaccaatccagttcagatatggtggattttcatttatctgctgtgactcatgcacttcattcagaagataattaccttcgaatacaggtaatgtttgagatatttgttaataaaaaaatgttagtattttatctcagaatgttaattagagtgatttgaatgtataatttttgtctatctttgtctttcaatcattaaattaatttttatataaagtgagtcttgatatataatataaatataatgtgattatatatatatatatagacatatatctataatatatattctctttctttatttatatacca

SEQ ID NO: 137704 - DNA, 618 bp, Glycine max
  Clone ID: PAT_MRT3847_95356C.1
atacgctggcttcgctatctactctacgttcgctccacacatgagcatgaaggcggtctgtctgcgacaatctctgtctctttcttcatttggcatgaccgtaccaagagcctgcgtcttctctaccaacaattttaccctgactcctttccctatctatagaccctactcatctctttctctctctggctctctaacgctaaccacaaagccttcctttcctactgctgaacaactctctctatggcaggtcctatgggacctattgaccgccaacgccctgtcctgaggatacgatcctaccaaccctacggataagaccttggatagtggccgaaccccgttcagtttcacaatgacaggaacagcgctcccgatcatgcttgaccaacagcaactggaacacgtatggcggcccaagcagcttaggaaatcgtcggtgacactctcactccggctgccagacctctttcgggacagccatatgacaccctaacgctgggcagctgtatggcaaagcgcataatctgctctgatcttgctgtgactctcaaaagcgatggagaattgatacgactgaccatcccacagttgacatctgagatgccgaaagaacta

SEQ ID NO: 137705 - DNA, 1198 bp, Glycine max
  Clone ID: PAT_MRT3847_95357C.1
ttttcggtatcactttcaggtccgccactgtaaaagcaccacccacaatacaataacccaacccaagcgattcgattccattcaataatcaataacacaacacgcacattcgattcctcgtcccaaaccctattcccctatttcgattcctattccaacgagatcccaagtaacacagcagatccctaaaattaaaattccgtttcggagagatccaagtctcttcatggcgcctcgtggagccacgctgttgttccttctatgcgctctctgctattctctcatcgccattgctggaaagagctattacgatatacttcaactttctaagggtgcgtcggacgaacagataaagagagcgtataggaagctagcattgaagtaccatcctgataagaacccgggcaatgaagaggctaataagaaatttgcggagattagcaatgcgtatgaagtgttgtctgatagcgagaagaggaatatttacgataggtatggtgaagagggtttgaagcagcatgctgctagtggaggcagaggtggtggaatgaacttccaagatatttttagcactttctttggtgggggaccaatggaggaagaagagaaaattgtaaaaggagatgacttggttgttgatttggatgcaacacttgaagatttgtacatgggaggtaccttgaaggtttggagggaaaagaatgtactaaagcctgctcctgggaaaagacgctgtaactgtagaaatgaggtttatcacaagcaaattgggcctgggatgtttcaacagatgacagagcaggtctgtgagcaatgtcccaacgtcaaatatgtaagggaggggtatttcatcactgttgatattgagaaaggcatgcaagatgggcaggtaaccttttaagtttatatttagactttaagtatgcatgatatcatggcttattacctattttcataaaagcactatactataaagtatatctaatcatgtgtactgcatctaaattctaaatacaaagggctctgttttataattccagttttagttctgttggaattcaaacctatttaaaattccccaaattatagtctctgttcttgtaaccattataaattatacctatttgtacatttaatttgtgtttttacattaaaaagccgagaaaacaaaatccaccgattatagtctctgttcact

SEQ ID NO: 137706 - DNA, 1736 bp, Glycine max
  Clone ID: PAT_MRT3847_95358C.1
caagtcttggcggaatcactttcactgtaaaagcaccataatacaagaacccaagccaagcgattcactaatcattattaacacacacaacacgcacattcgtcccaaaccctaatccccaattttgattccaattccgacgagatcccagggagcatagcagagccctcaaatctaaattccgttcggagagatcctagtctcttcttcatggcgcatcgaggagccacgctgttcttccttctattcgctatctgctattctctcatcgccattgctggaaagagctattacgatatacttcaactgtcgaagggtgcatcggacgagcagataaagagggcgtataggaagctagcattgaagtaccatcctgataagaaccccggcaatgaagaagctaataagaaatttgctgagattagcaatgcgtatgaagtgttgtcggatagcgagaagaggaatatttacgataggtatggtgaggaaggtttgaagcagcatgctgctagtggaggcagaggtggtggaatgaacttccaagatatttttggctctttctttggtgggggacaaatggaagaagaagagaaaattgtaaaaggagatgacgtggttgttgatttggatgcaacacttgaagatttgtacatgggaggtaccttgaaggtttggagggaaaagaatgtactaaagccagcatctgggaaaagacgctgtaactgtagaaatgaggtttatcacaagcaaattgggcctggtgatgtttcaacagatgacagagcaggtctgtgagcaatgtcccaacgtcaaataggtaagggaggggtatttcatcactgttgatattgagaaaggcatgcaagatgggcaggaggtgctattctatgaggatggtgaacccataattgatggagaatctggagatttaaggtttcgtatccgtactgcacctcatgacgacttcagaagagaaggcaatgacttgcactctactgtcactataactctggttcaagcccttgttggttttgagaagaccattaaacacctagatgagcatctggtggacataagcacaaaggaaatcacaaagccaaagcaggtgaggaagttcaaaggggagggtatgccattgcatatgagcaacaaaaaaggagatctttacgtcacttttgaggttctatttcccacgtccctaatggaggagcagaaaacaaagataaaagcaattcttggttagaatacgtgaacaagataggcgttatttcgcttattatgtccttaatgtaacatggttaggtggttatagtaaacgcatacttgggcttctcgtccattcccttttttttgttagttgacaaatagataccttttgcccccgttcgtaatgatgcgcatcctgtaactcttgccatccattgaattcaattgccttcttggcggtgctattttgtcatgtgaacaaggaaaataacactcgctgaaaagaaaaagaaaatgcttccattgttttgtaccgtgcctgaaatcgttcatcttgtgaactaagattagattgctgtaaaacttaatgaagttgatgcatttgtagctgcggaactagattagaatgcataagcaccgtaaccattgtgcactcgtttgtacctgcactcgacggctattaaactttcatttcaatatttaaagaaccaaaaaaaaaaaaaaaaacaagctcacgcgatttgtttgtt

SEQ ID NO: 137707 - DNA, 247 bp, Glycine max
  Clone ID: PAT_MRT3847_95359C.1
cggctcgagctcgagccgattcggctcgagacacagagcaacactgcactgtgtacaaacgaaatttggacaagagtggtggcactccaacagaaccacctatctttctctaccttagcttcctctctttctgacttcagaggaaccagacttcaaactcaacttcagttcaagagaaagcaatgccatccaaaagggtctttctacgtctccgcatcgagcaccaagaaaatcctaataatgggag

SEQ ID NO: 137708 - DNA, 295 bp, Glycine max
  Clone ID: PAT_MRT3847_9535C.1
gctgcaggcattgatgaatctgctctcgctgtgttggaagccgtatggccgggatgctgatcgaatcgagtccttcggagttataggaagagaaggcaaaggaggcttgctctggttccgacacttcggaaaatatggctccagcgatttctccatggctgccgatcaggccaaccagcttctcgaagaccacagccaaatcgagtctggtcctctcggcaccttgggcggcatctacgacggacacggaagacccgacgcatgaagatacgtttgcgatcactcgtttcgccat

SEQ ID NO: 137709 - DNA, 395 bp, Glycine max
  Clone ID: PAT_MRT3847_95360C.1
agcctacattacttgagaagcgcaaaggataggctctccttgaatggaagagtgctagaggagacgaagggtcagactatcatatacagattggggagcagtatcttgccaatgttgtgaaggaatcggtgagatgtcttaatgcttgacatgctgggaaagtttactatgtccaagattggcaggagacaatggacacagagttggatactcataagctggaacatgggcccaagaaaagaaagatcccatactgcaacaataatgaagatgatgatgatgtggaagatataaatgcgtgagaggatgacatgacagatgatgaattagatgatgattctggtaggatgatcgatgatacagctaagactgaagcatgtaatgccagcacagat

SEQ ID NO: 137710 - DNA, 346 bp, Glycine max
  Clone ID: PAT_MRT3847_95361C.1
gccaagaatgctgttgtcatgaatatgccaaatgctgatctttcaatgaggggatattttgttggaaatctcgtctatcaagttcataagatgacttctcgctacattaaatgtacacgctctttattcattgcatttcataatctggctgatgacaccattaatatcgaggcttattcccacaagctggggcaattggtagcgattcaggaaactgctgaattgacatgttgacaacaggaatttgttacagcttgatcaactcaagtgcgtactgcaacaactgtgctggctgatgggtgcccatattcgtatgctatggtgcactgatatgactaccgtctac

SEQ ID NO: 137711 - DNA, 200 bp, Glycine max
  unsure (1)..(200): unsure at all n locations
  Clone ID: PAT_MRT3847_95362C.1
ctgttgtggccactgccgcaagtgcagtgctggctagcaacgccatggccattgaagtgttgctgggtggagatgacaggtctctggctttcattcccaacaatttctccatggcctctggggagaaaatcatattcaagaacaacacangtttcccccacaacattatattcgacgaagacgaaattcctagcagcatg

SEQ ID NO: 137712 - DNA, 459 bp, Glycine max
  Clone ID: PAT_MRT3847_95363C.1
ggtgggggaggcgtataatattttaatgttatttatgatgaagaatacattatattctgctgaaattttatagtttattgtcaagtttatttgaaactgtttcagtagtcttttaaatgtagcacatttgctgttgtcttggagctttcccattgcaattaacatatgtgtgcaggtgcgaggggaaagtgcaaagataaaatagaacacttccttttggttgcaccatatctttaactattaacctggactattttttttggctaaattacatcttcctccttttatatttactgatattcataggttagtgtgctgcacttttaggtttagaggctcatattgatttcaatgagtagtacagtatatatttgcatatcaagttgaagcattttatcctctatttctgtgttttattgttaagtttattccacttgaaactctgcttcaataggtctt

SEQ ID NO: 137713 - DNA, 466 bp, Glycine max
  Clone ID: PAT_MRT3847_95364C.1
atcgcttcactgccattaatggggagcccaaagttcacaactttcagggatctgtatcaatatactattactcatcaaccttcccagtcttttgaatttgaaatggaagaaaagtctagatcatgcaatgtgtgtgacacgtggcactcattttcattatatgtgcatattgaacaagtggcagcaacagcagtgtggggattgatgactttacttataaaacctatgaaggaaagcgaacccgtcagtgctctcctaagacagcatttggttctttgctctgttgagtaccgcatgcaattgtaggcaacacacaagttgtgagggagtaccttcctagttcccaagcgaacaaagcgagtcatcattagcaaaagcagcactatccagtgtccaagaatcttgtcaaatttagttggctaatccccaggggtgcctcgaacaagatggatgatatggttacact

SEQ ID NO: 137714 - DNA, 332 bp, Glycine max
  Clone ID: PAT_MRT3847_95365C.1
aaaggggggggccccccccaaaaaaaaaagaataatcccttcaaaaagggatcccactttaatcctcagcaaaaagggggtaacccccccttttccctaccatgatccccattctccgggggggaaaaccccttggccaaataaaagctaaatcttttttccctcaataaaaaaaacccgaattaatcccccgtaaattttggaaaaaaaatgggctgaatgaaacccaaagtattgttcccccggttttcaattaaaagggtcccccctcatttgcattccggctaggggggggaagacccggaaagcccaccccacccccccccaaaacc

SEQ ID NO: 137715 - DNA, 254 bp, Glycine max
  unsure (1)..(254): unsure at all n locations
  Clone ID: PAT_MRT3847_95366C.1
gtttctattccctcattcactggcctcaaggcangcgcaggcaaagtgagtgccgccgcagttaaagtctcagctccccaagccacaaggttctgcgggcatcnanggttcccncnaagacggtngagtngcntttgngggccactgctncgagcgcagttctagctagcaacgccatggccattgaagtgttactgggcactgatgacgggtctctggttttntctncnnattctttggcccgnggcccntgg

SEQ ID NO: 137716 - DNA, 341 bp, Glycine max
  Clone ID: PAT_MRT3847_95367C.1
ctttttctttctcggactaatgggaggacgcgtgggttaatgtggaactagttcaccgattaacttaggtgtattgagtggtgtagttacttgtttagtatattattgatttatttgatgtcacttaattgagtatgaaagagggtttgcttgatataagactaatgatgggaactgaagagggacaacaacaagggtaggccggaaggtgttggtcggataccttatggatataaagaagacatagattgtgaaatgagcaacgaactgaaagtggtaaatgatagtaaacagaatggttgtggattgattgatgcatagggaggatgagtaacttgatg

SEQ ID NO: 137717 - DNA, 374 bp, Glycine max
  Clone ID: PAT_MRT3847_95368C.1
tttgtggttttcaccttttttttttttttaaccataccagattgcttagttttgcggtttcatgccatgatcattatgacaagaggctgctttggcgccaaaaggagaccgcaacccgcccttcttatgttcctggtgaaattgatggctatacgctggataatgccccgccatgctctgatgggaactgagattggcaaccgggggtactaatccaaacaaaaagatttgacgaggaggttctggggcgggcccccattgtacattatgggaccgaaagcatatggcaacggagactcaaatcagtctgcccaaagcacggagttcgcgaattccagacgggggggcaaactaacgcaaatgttgaacattct

SEQ ID NO: 137718 - DNA, 465 bp, Glycine max
  Clone ID: PAT_MRT3847_95369C.1
tacggctgcgagaagacagaagggcgtatttatatttctagtcaatgtgagatatttagcacctctaggaggttaggaattcttacacaatgtcttgagcctgatatacacatggtgttgaaagcagggacttaaacttagttatcatagacaatctgctttacaaacactgcataccattttgtgacggtcaccatatttctctaccaagtttaattatgcttgtaatttcttatttcggtggctgattccttttgtgtttttactctttagaagagtctagttgttaatttaaagggtcaaccattcaacacctctttttcatgcctctttgtccttttataattttgtgatgatcattctttatttggatctatatttaaattagtatatcagatttttttttatagtaactacaaaggaaaagactgtttaaatatacatttccaatatctaaatctcatg

SEQ ID NO: 137719 - DNA, 207 bp, Glycine max
  Clone ID: PAT_MRT3847_9536C.1
atataaatagttaaacagggacaaacggcaatcatattaaagctcatccccaaaaaaatcagaaacttaaaaaggaacgagggataaaataccataatcgtagataaagagttttaaactcagcgaatccgatcctactgaaaacgtatgaaggcatcgcgtcaatataaccggttaatcccctaagtatggttgcaaaaatgaggg

SEQ ID NO: 137720 - DNA, 508 bp, Glycine max
  Clone ID: PAT_MRT3847_95370C.1
ggccaatcaaaacgggtttcaacctgagactcgtcaaagatgggtaatcacagcgtttacaaaattactttactcagaaaataaaagggaaatcttaaataaaaaatgataaaccatcacataatcggggcctctaagctattatggggctaaaatgaaccaagatttgtgtgcaggcctactaatgaagcataaataccacccttggtaagcaaagggacatgttttccttgctcaccatgaactccattttgaccaactggtatcgaatctgcatcctttatgggggataacctgtgacccaccacacttgtgggtcggaccaccataactcggtctagtgcatcctgagccactctttcagactcaagatcaaggggactggaggcttcatgaaccagtaaaagctctcgatgatgcactagaggtggtgcaatgggcacccgttgtttctgccctaaacatagaggaagccctctctcccctactatggtgcggtaaccatgct

SEQ ID NO: 137721 - DNA, 492 bp, Glycine max
  Clone ID: PAT_MRT3847_95371C.1
aacgaaaaatatcaaatgattatgtaaacctttgtatcgcacaaatattttaaaatggggacaagtcactgattcattagcttaatgctaacagaagcagaaaagaccaacatgtttgagcacacctcatatttcactatttacaaaactaaacttctaggaagttttggtactaaaagctttagtgtgtgtgcaactcttatattagtagtcaccgagactcaagttacagaactttttatttgtttacaaaagcttatacagaaatacatattttccagcaacatcttgatggccctacaacaatacaacatacattacatggaaatattagattacagccagacacaatgcatagatgctactgggttgggtgctttgctacattgccacatgattttctggtacaggaactgtttggaggggatcaaattcaataaagaatgtccgaatctccatcggagcaagttcaaccaccaacttcgtaggatc

SEQ ID NO: 137722 - DNA, 163 bp, Glycine max
  unsure (1)..(163): unsure at all n locations
  Clone ID: PAT_MRT3847_95372C.1
gaagattgcatttgcatcaagatggagatgnaacaactccttngnatgggctttccggacgagttagccggccaannctttggctngcaacggggggaaatncaacgngnaaggcaacgaatggnttctccntttnaaaggccaattttnngnttncacagcc

SEQ ID NO: 137723 - DNA, 395 bp, Glycine max
  unsure (1)..(395): unsure at all n locations
  Clone ID: PAT_MRT3847_95373C.1
aaaaaaaaaaacaactaaccccaacaacacggacaccattaacgacctttaattaatcttgggccttcaagccatggcacaaggcccgtaaaaatgccttaaggcaaccacaaggcaaaaaccaacttttttccgcttggggcgggtggattcaaaaaggcccggaaagggtccatgaaaatatccggaaccggcaacttctaataattccggagagtggcttccatgtaataatacaaaacctcgttgtggccttgcttnttcggttggctttgaacttggttggaaaactcggccaacacaacttgttcgaaacagttgaactccgtcgtgtgcagccgcggcaccgagtcggaagcctggaattacaggcaatccgccgccgtatactccgg

SEQ ID NO: 137724 - DNA, 125 bp, Glycine max
  unsure (1)..(125): unsure at all n locations
  Clone ID: PAT_MRT3847_95374C.1
tgganatnntggatatgggcttcatgaggaagggtttgcttattgctggtcaggngcacganntaangtgnngaataancagaggtagatattgtnttgcctgnaaagttgtttctaganaanat

SEQ ID NO: 137725 - DNA, 331 bp, Glycine max
  Clone ID: PAT_MRT3847_95375C.1
accataataaaaattcgggagttacttttttaacccagaaaaaaatatccccagcaaaaggggttgttcaagctttaaaatcccctcaaaacagtttttagggaaaacgagagaccaatttttcttaaataaggggagaagggtctccaaaaccttcaagggttattgaagaggaggctcccctctgtaaagggcgcttcttttggcggggcgccaattgggagagcgcccttttttttgccgggtgttccttgtgaaaaaacatcctttctatgggggttggagttgaaaagaaaggggggactttttcgtgggccatgaaagggggggg

SEQ ID NO: 137726 - DNA, 451 bp, Glycine max
  Clone ID: PAT_MRT3847_95376C.1
taaaggaaacaaaaccttgcatttttatataacaaaatcactacattacttggttaacttggacctccaaggccatctaagcaggttacatacaataacctaacgcgaacctaccaccccattgggcccaccacaacaactgaactggtacacatcgcgcttacatgcacaagaagcctatgaggctgaatcagttttactttcaataaaagacttcctcactgaacacctaggacaaatttctctatcacgagcctgtattgttctctctgccccaacaccaaataatgcatggatgtgggtgcccattcgcgagaaccatagctgacaggatgcttcgaattctgtaccaagtctcgcatgaagcgcttgcattacggttaccactgctacatgtgcatttaccaatctataggggctgcagtataccttttaccggtcaaacatttaa

SEQ ID NO: 137727 - DNA, 331 bp, Glycine max
  Clone ID: PAT_MRT3847_95377C.1
gaggaattgctttaaagtagagatattttaattttacataaagttataatctttgtctaatatcctattataaagtttacactattttattttatgcaccaccaaaaaacgggaaaaggcttttttctcttaaaaaaaaaaataaattcctaatactcttcgatttcaaacctttaaaagaaaaaaccaattgtgtgaaataaaattttttgccctgtttttgtgccaaaaaactttcaaaaaatgttttaatcttttatacataaaaaggtttttattgtaaaaaaaatttgtttgtgggccaatttttttgtaaccacaattttttttt

SEQ ID NO: 137728 - DNA, 312 bp, Glycine max
  unsure (1)..(312): unsure at all n locations
  Clone ID: PAT_MRT3847_95378C.1
cnnggcnctgaactgtaagaaaaacccaatgaaaacgaccatctatttattttatgcagagcttacaaatctataatgctattgaaaaaacgaaaaaagcccatttttcttccaaaaatannntctcaactccggaactaatggacctggggtttaagacggcttccnnttcacgcggattagcttcctccaagcttgatggttatgattttaggatcctgagccgtgtgnncctgccctgttgggacaccatctgttgcaacagggcttagagaggacctcaaggcatgaccatagtcaggttgcattatg

SEQ ID NO: 137729 - DNA, 705 bp, Glycine max
  unsure (1)..(705): unsure at all n locations
  Clone ID: PAT_MRT3847_95379C.1
cggggataaaaccgttgtccttgacatgtacacacaatggtgtggcccttgcaaagtgatggctccaaagtttcaagaattatctgaaaagtatctggatgttgtctttctaaagcttgattgcaaccaagagaacaggcccttggcaaagagctgggaattaacgtggttcccacttttaaaattctgaaggacaacaaggttgtaaaagaagttactggagctaaatacgatgatttggttgatgccattgacaaagttcgatctagctaaaaatatatatgactattctctttctatgtaaaaataatatgcttgactccctctgtaagtattttatgcaattgtaagctgatgaatgatgatgattggaagatgaagaaatgtcatcatgtgattgttgcaaaaaaaaaaaaaaaaaagcggccgcttttttttttttttttttattcttttttttttttttttttttttnnncnnccnnccnncnncnnncncggcccccnnnnncnnnnnnnncnnncggagggngtcnngcnttttntttttncntnganggagggtagtcntntntatttttagctngatcgaactttgtcaatggcatcaaccaaatcatcgtatttagctccagtaacttcttttacaaccttgttggccttcagaattttaaaagtggggaccacgttaattcccagctctttg

SEQ ID NO: 137730 - DNA, 706 bp, Glycine max
  unsure (1)..(706): unsure at all n locations
  Clone ID: PAT_MRT3847_9537C.1
tgccccatgggcatattgctatagagctgtaccaggagcaggggcgcaagacttctatatcacatgataagctgttgcttggggctgcaagggaagcagtacaagcccaatgggagctggatttgctgagaagaatacttttggataatgggggggggagggatgtctgtggaaaggatggccttttggcaaaagcactcaagatgcgtgtcgagatggagcgagcaagaagggaatttctctgcagtccttcacaggcattaaaaatggagagtacttttgatgctacaaatgaaagggagtgcaacatttgcttttttgatttacacctatctgctgctggttgtcgctgttccccagatagatatgcttgcttggatcatgcaaagcagttttgttcatgctcttgggattccaaatttttcctctttcggtatgatattagtgaactaaatattcttgtggaggcattggaaggaaaattaagtgcaatatacagatgggcaaaatcagatcttgggcttgcgttatcttcttttgtgtcagcaagcaaggaaacaatacataaggaattgaaatccgattcatccaatttatctcattcttccagggccactgggcataaagagatgggtttncatccattaaataaatatattgacaattctcaattggatgaggggccctacaaagaatcaaccaaata

SEQ ID NO: 137731 - DNA, 1122 bp, Glycine max
  unsure (1)..(1122): unsure at all n locations
  Clone ID: PAT_MRT3847_95380C.1
ctccaaatgagccatatcgtgttattcttggtgatgtccgagacaaactgtataacacacgggaacgtgctcgggaattattagccaatgggacctgtgatatccccgaggagacaactttcacttacgttgagcagttcctggagcctcttgaacaatgctatagatcactctgtgcctgtggtgacagacctatagcagatggatggctccaaagtttcaagaattatctgaaaagtatctggatgttgtcttgatctgggcattggagagattggaacacccccccaaaacaagccccaattatggctctgaatctttgtatctcacctaagtttaaatgggttccatctcctgcttccttagatagtgcttcttctttgagaccttcacttggttcttgttttggtaacataaacattgctagtgtgagtttaagcactagtagaagtttgagtttgaggaggagtgggagtgttagtgtaagatctagtttggaaactgcgggcccacagtcacagtgggacaggtcactgaggttaacaaggacaccttctggccgatcgttaaggctgccggggataaaaccgttgtccttgacatgtacacacaatggtgtggcccttgcaaagtgatggctccaaagtttcaagaattatctgaaaagtatctggatgttgtctttctaaagcttgattgcaaccaagacaacaggcccttggcaatagagctgggaattaaagtggttcccactttcaaaattctgaaggacaacaaggttgtaaaagaagttactggagctaaatacgatgatttggttgatgccatagacaaagttcgatctagctaagaatatataaaagtattctctctctctgtaaaaatattatgcttgacaccctttgtaagtattttatgcaattgtaagctgatgatgattggaagatgaagaaatgtcatcatgtgattattgcaaaccgtaattgtttattccccaagtccagggaagcgttcctcaattattcaagttatcaacttgatcatggggtgtctataaagtggtctagctgatatttgtttaaataaaataaaaatgcgtgtgataaatatggatannntttt

SEQ ID NO: 137732 - DNA, 1145 bp, Glycine max
  Clone ID: PAT_MRT3847_95381C.1
agcaagccaagtgcacccgaagaatttgtatgaagttgaactggtattttgccgaccctggggcaaactgccagaaaatgttccctgtcatcccaaacttgcagattttgctaactgtatgaagaagaaaggtccggcatctgtccatatttgtctctatactagtgggagattatcgtccctgtgatcaagatccaaagaatgcttgcaatcatcctaacaatgacattgattacaaaaattctaaacatgtcggtgataggtgtgtccgaacttgaatgtctggaagatttgatttcattctgttagcaatgtggccccgacatcgcttgcagaaaactttgaggatgcgttgaccacaaagttggcaaaagcatggctgaattcgttactgtccttattggggcaataggcttgctcttagggaccgaaggctacgaagtgctagttggaaatatgcacttttgaaaccatctccccagtccccagcctttcctttaatgctcacgtacttatatatgaggcttgcaaggagcaaagacaccacggtgaatgaccaagagattaggaacatgatcactatgcaaagtaatgctcccacaagggacagactccaatggtgaaatttccaccgaggacgccaactaggggcatctagaaagatcgagaaggaagcaggataagttgacaccagtgtaacatagaaggaaaaacatagttacagttggagtgataagatccagattcccaataacgacacacccaatgcataagaaagcagtaaaaaaggtagcaacatgtggttcaccgccatctccaactttaaagtagttcaaaataggtaaaatatcatcattggctattgctgcaagcagacgtggggcaccagtcaggctctgaagagcagcacccatagttgaaagaataattccaattttaattaatgaaggaaaaggccaggcaattgtagctgtaagtagcctgtcagctcgagccgaattaaaagcttctctctggtggcaacagcgccaaaaaatgttccctgtcatcccaaacttgcagattttgctaactgtatgaagaagaaaggtcgaggaatgtccatatttgtctctatactaaatggggattaccattgaatgtgc

SEQ ID NO: 137733 - DNA, 494 bp, Glycine max
  Clone ID: PAT_MRT3847_95382C.1
ggccgcccttatttttcctctttttttttttatttttttttttttttttttttttttttttttttttttttttttggaaaggacgaagtgggggtaaacaaactgggaaaaggccgaaaagggggggatcaaataaaaagattcaaaagagaaagcaaagggtatttaaggggggggaggggcaagtttccctccctagggtcgggacttaaaaagggtcggagtggggaaggggggtgggtcaaaatacccttttctttgccagggtggggcaaaagggtaaaagatagttaaaagttttaaaggaaagggtggaaccaaaggggggaaaaattgggaggtgtcttcaggggggaaaaatcaacggggggaaggccaaatctcacggaaaacccaaaaagacactcaaagggggggagcaaagaccagggaaagtaaccttgaacaagggggccttcccttatgggagccattagaatatttaagggaccaga

SEQ ID NO: 137734 - DNA, 489 bp, Glycine max
  Clone ID: PAT_MRT3847_95383C.1
gtgctatatagtgtttattttgaattatgaaaaggcacaagataaaatttaagtattttttaattattttaatagttatcatttagttattttttatgttcattgttttattatattatataatagataatgagaagtgctaggaacacactatccacactctcctattagttagaattcattgaaatctacaacaatcaggggagagattcattaaataagagacgcgagactctcaaaattgtggtttccaataaatttcaaccaatgatagtgtgttgactgtccaaaagagtgtgttcgtagcttttctcattatataatatcgcacattataatttaataaattattgtttaatatatttcttaatattacaatgaatgtttatataattgtatcatatataattgtttatataattctgatacccactggaaaaaaatgagcaagccattgctgttgaattttttgagtgttgacatatcatt

SEQ ID NO: 137735 - DNA, 268 bp, Glycine max
  Clone ID: PAT_MRT3847_95384C.1
gggggcggtttaaaaacataggggaaatcaaggaaaaaactgtttcctggaaaaaattgtattccgttaaaaatcccacctattatacaacgggaaaaaaaaaagagaaaaccccggggggcctattaaaaaaactaactcacattatttggggtggccgccacccccctttttcaaaaaaaaaaacccggggggcagggttttttaataaatgggccacaccccgggaaaaggggccttacggtttgggcccaaaggtttttttttt

SEQ ID NO: 137736 - DNA, 254 bp, Glycine max
  Clone ID: PAT_MRT3847_95385C.1
gggggaagacgggggacggagaagaaaagaacagacgaaaagcggcacgagggagacgagagtggcgctggagatgctgagtagagtgagcagcgtgcgacctttcctgtttttgtttgttgttccacagggttcctcttcttgttggatactttctcgagcttgtggttctccttttttttcgccaaaacgcacattctctttcacgccgccatcactttcgttctccccaaacgccacggaggcctcgacct

SEQ ID NO: 137737 - DNA, 348 bp, Glycine max
  Clone ID: PAT_MRT3847_95386C.1
ggacgagaacatccccaaggcgcaaagcgcgttgctggtgaggtgcaaggcgaattctgaggctactcttggaacttacaagggggatgccacgcttggggaaggggcttctgagtctcttcatgttaaggattataagtactaagagagaggtgtgagattggttcttttggaatggaattgtttgtttctttgggcctgttttggatattcaagagtgtttttcaaaaaatttctactgaaaaggaaagaaattctccagaacacttctaacattgttttcaaagaggctcaaattgtttttgtttgcattggtaaggatggtgttggtgctgttttgtaagtttc

SEQ ID NO: 137738 - DNA, 1695 bp, Glycine max
  unsure (1)..(1695): unsure at all n locations
  Clone ID: PAT_MRT3847_95387C.1
ggacgagaacatccccaaggcgcaaagcgcgttgctggtgaggtgcaaggcgaattctgaggctactcttggaacttacaaggggggatgccaccccttgggggaaggggccttctgagtctcttcatgtgtaaggattataagtgactaagnnagagaggtgtgagattggtgtccttttggaaatggaattgttttgtttcttttgggctcgagtttctataaatcctcacaccaaattaacaaagcctgctttctcttgtgtcgtctcacaactcacaaaacaaagccttctttttcttgtgtgatctcacaagcccctaaaagccaccatgtcttccttcaagagcaaataccaagatgagttgattgccaatgctacttatattggcaccccaggaaagggtatccttgcagctgatgagtcaaccggcacaattgggaaacgtttggcgagcatcaacgtggagaatgttgaaacaaacaggcgcattcttcgtgagctcctattcactgctcccggttgtcttgagtgcctcagtggtgtcatcttgtttgaggaaaccctctaccaaaaatcagctgcaggagtacccttcgtggacatactgaagaaaggaggagttctcccgggcatcaaggtagacaagggcaccgttgagctcgccggaacaaacggcgaaaccaccacccaaggcctcgacgacctcgcccagcgctgcaagaagtactacgaagccggcgcctggttcgccaaatggcgcgcattgttaagataggtatggaattcgtttgtttctttgggcctgttttggatattcaagagtgtttttcaaaaaatttctactgaaaaggaaagaaattctccagaacacttctagcattgtttccagagaggggccccacgacattgcgaaatgcgccgacgtaactgatgcgtgtgctggcctgcgtgctacaaggccctaaacgaccaccacgtgctcctcgagtaggagcgtaaagtgagaataataatgccctttgcgtgcgaggcggcacgtgtgacggctgaggtcatagcggagcatacggtgagggcgctgcagaggaccgtgcctcccgcagttccggcgatcgtgtttctctccgggggacagagtgaggaagaggcgacggtgaatttgaacgcgatgaatcaactgaaggggaagaagccgtggtcgttgactttctcttatgggagggcgctgcagcagagcacgctgaaggcgtggggtggaaaggacgagaatatccccaaggcgcagagcgcgttgcttgtgaggtgcaaggcgaattcggaggctactctcggaacttataagggggatgccacgcttggggaaggggcttctgagtcacttcatgttaaggattataagtactgagaggtctgagattgttttttttttttggaatggaattgtttctttctttctttttttgaactgttttgtaggtttatggatattctcggtcgtaggtggtaatgtgagaataataatggctttagctgctgctgctgcattggcctgatcggcgtttactttttttctttcttttactatgttattttgttattctatttttacactgcttaatctattttttatattagaaaccaagaaaaatgtactacttctaaattctgagtgcactgtttcttcgaatccc

SEQ ID NO: 137739 - DNA, 941 bp, Glycine max
  Clone ID: PAT_MRT3847_95388C.1
cttctctaattccgaaacaacacacaccaaattaacaaagccttctttttcttgtgtgatctcacaagcccctaaaggccaccatgtcttccttcaagagcaaattccaagatgagttgattgccaatgctagttacattggcaccccaggaaagggtatccttgcggctgacgagtcaacagggacaattgggaagcgtttggcgagcatcaacgtggagaatgttgaaacaaacaggcgcattcttcgtgagctcctattcactgcccctggttgtcttgagcgcctcagtggtgtcatcttgtttgaggaaaccctctaccaaaaatccgctgcaggagtacccttcgtggacatactaaagaaaggaggagttctcccgggcatcaaggtggacaagggaaccgtggagctcgccggaacaaacggcgaaaccaccacgcagggcctggacgaccttgctcagcgctgcaagaagtactacgaagccggagcaaggttcgccaagtggcgcgcagtgttaaagataggtccaaacgagccctctccgctctgcatccatggaaacgccaatggtcttgctcgctacgcatccatctggcaagaaaagggctcggttttatcgttgcaaccgtgtttttcaaaaaattacccctgaaaatccaagaaatcctccagaacacttctagcattgtttccccgtaggctcaaattgtttttgtttgcattgttaaggatgttgatggtgctgttttgtaggtttctatgagtttgtttttggtttgagattctgggtcgtaggaggtaaagtgagaataataatgcctttagctgcattggcctgatcggcttttactctttgactatgttatttgaataattttttttttttttgtttttcaattattacactgcttactttcttcttcctttttgtacc

SEQ ID NO: 137740 - DNA, 676 bp, Glycine max
  unsure (1)..(676): unsure at all n locations
  Clone ID: PAT_MRT3847_95389C.1
aaaaatcatatcaatgtaaactgtcattgcatcaacataaaactcacaattattaaccaatatagtatataatacaatgtaaagacataaaaaaatctaatatttaataatcccattctcagaggaaacagagctcgtcgagtccaccgtaaaccaaatttgcaagtgttaaaatttctgtaaaattcacattaataatgatcctgatgttcaagaatttctattatgttacagatgtttcagagaacagttggaacttaccatcaatttggaagaacataattcattcccttactatatatgtatatgccttgtgaacatggatctatgtacctgttgaagcagatctgttcccaatgttagcttttcttatgtgtgatacccttcaccgtcactcaaagtatgagcatcaaagctaaccaccttttcttgttcctcggaactctcaacaacgacaacaacatggttactcctttgctggtgttccaaggcattaacaatgactcttggtggcggttccatggatgaattcggattcggacaagcggtgacagaagcacgacacaaagggcaagtggcatgnnncnngngccangtatcaatgcnngggnnatgaaaagcatnnntgcatttgggcaacaatctcnnntcttcatnctctncnnnctcgctcnna

SEQ ID NO: 137741 - DNA, 352 bp, Glycine max
  Clone ID: PAT_MRT3847_9538C.1
gggagcaaacccccctttaagcatttatgagtagaaaatattggcccccatatgttttgaaacattggggggagtacatttcacaactgggttaacaaattaaaccatactggatccctaaacaactggggggggggaacaaattcccataacaaaaaaaaaaggggaattcttcaacatgtaaggggaaaaaattaatggagaaataaacttttaattgacttgacaaaactttgggggtagctagcttctttcatctggtttttggggaatgggtcaagaagctaagggaagtccctgggaagggcttgaatgatactgggggggacgagggtggggaataacctctctt

SEQ ID NO: 137742 - DNA, 273 bp, Glycine max
  unsure (1)..(273): unsure at all n locations
  Clone ID: PAT_MRT3847_95390C.1
atgatatctttttcatgggattctcttctctctatacttcccagggcaaagcaaacgtttcgaagccanaaatcaaccaaaagaccaaccaagcaaccaaaattggcacggctgaagcccaaagctttggtttcagacacaaccgggtttttggtaccgctaggancacaaacattatcccaggaaaacccgtgtgggacaagtcattaccaaaacanaaattgatgtnncacagngaaaaccnaatcccttggcagnctcatttccntggnc

SEQ ID NO: 137743 - DNA, 457 bp, Glycine max
  Clone ID: PAT_MRT3847_95391C.1
cgggtcggcgcgcgtactagtgggcggaacgtccgctcgagattaacttatcttcctattatctttttttttttggtgaacacccattcttggggatgcttttattaaattgactatgaacatcctgatgttttgggcaaaaactataaccacggtgactaaccacctttaattggttggatctttaccaaaaataaagatgtctggggagagctcttgaacgaatatgactatatgcggcccctcatggtgcagacgcctttaccacttgactcaatcaagaggggccggtggtgccaccacaaccttcactattgggaaagcttccgccttatgaactggatgaggattacagcatgaacatctgcgctgttgtattcaaaaggggcaccgatacggtgtgggtgcacttggaacaccgcgaatagctgccgccgtgagcaccaccgggaccacc

SEQ ID NO: 137744 - DNA, 274 bp, Glycine max
  Clone ID: PAT_MRT3847_95392C.1
gacactcactcgttcactcttcttcgtctcaaacctcttcgttccttcgattcagtccatgtcttccaaaatggccaaagacccagttcgcgttctcgtcactggagccgcagggcggattggagaggctcttgtccgtatgagtggtaggggagtggtgctgggtccggaggagccggtgatcctccacatgcttgacattcctccagcaggagagtcgttgaatggggttaaaatggaattggtggatgctgcaggggctcgtcgtagaggg

SEQ ID NO: 137745 - DNA, 602 bp, Glycine max
  unsure (1)..(602): unsure at all n locations
  Clone ID: PAT_MRT3847_95393C.1
ctcgaaccggcggaaatgagtggctatagcggcaacatttccgggggtctctgacacataccacccttctggttgtaagcttgtgtgctagctgggcgattaatacatggctttcgtgggggagcactaaaacaagacatgggatcaatgtttctaaaattatgcctgtgatttatggatatatgcacagggaacattcgatggtgaaaaatctgacctaaagaagaaatcttttataacctacattgattatgtacataattacgtttagaggctttacaaacactaacatctatgataaaggtaaaactctaagctaaaaatggtcaaaaaaaatgttcatatatttttttggaatttttggaaattcaattccaaagctaaccagaaaaagaaactgctgttggaataattactatgggggatgtcattgaatagctttttcagggagagatcttttattagacggatcatgactttgaaggctcgagaattgccacaataatgtttttataaaaccaggcagctgnctttcaattacttagcatttagtagaataataaatgctctttcttgtcctggcaaagtgcttacctgtagca

SEQ ID NO: 137746 - DNA, 190 bp, Glycine max
  Clone ID: PAT_MRT3847_95394C.1
cagaacagggactcactcgctacgcagcgttactctcggaggctgtcatcgtctcgggttgtcaagatgtacacatcgaggaagaaaatccacaaggataaggatgctgagccaactgaatttgaggaatcagttggacaggcatgggatgatctagaaactaccaacaaggagctgaaaagggatctga

SEQ ID NO: 137747 - DNA, 108 bp, Glycine max
  Clone ID: PAT_MRT3847_95395C.1
atatatcactacttcatatcaccctttcacgcagcatgttttaatctatttcgacctgattttaatttttaacagtataaatttgagaattgttaaactcctaccgct

SEQ ID NO: 137748 - DNA, 731 bp, Glycine max
  unsure (1)..(731): unsure at all n locations
  Clone ID: PAT_MRT3847_95396C.1
cttcttgtccgagcagttactcagtgctctttccaagactttcagcttgcctgcgagaatggggtggggagatatttacaagagacgggttagagtatttacaatggccctaatagtatacctagatataagggtgtacaacaacgagagaaatggactagcaaatcaagacaagctgcattgtgggagaaggctcatgagcgtaatgctaagcgtgttctaaatttgataatagagatggaaggcttatgggttaaacttgggcaatatatgtcaacacgtgcagatgtgcttcctgctgcttatatacgccttttgaagcaattacaggactctcttcctcctagnacccttggaagaggtctatggcaccatacagaaagatttggggaaataatggatgagttatttgctgattttgtcaacgaacctctagcaacagcatcaatagcacaagtccaccgtgcaactttgctcaatggacttgaagttggtagtntaaagttncaacatgatggtatcaagacaattatactgggaggacttaanaaatgcgaagtcaattgtcgactggattgcatgggctgagccgcaatataactttaatcctatgatcgatgaaatggtgcanagaagcttctaaggaacttgacttcaatcatgaagctgaaaacctaanaacggtggctaaaaatcttggctgcagaaccaatatgatggaaatatgagtg

SEQ ID NO: 137749 - DNA, 252 bp, Glycine max
  Clone ID: PAT_MRT3847_95397C.1
aggtgttacctccatttaagggaatccaaaatttggacgcaataacttgttatgaaaacacattgatagcctctacttgggtcccagctagtgtaaagagctataattgcccaaattggtgggcttttgcgcttccgccttataaaaaatagctttagctatttaaagaggttggtgcgctttttggggaacaaagtcacttcccttttccgccttatttacttaaaccggggtttcatgggggggtttttt

SEQ ID NO: 137750 - DNA, 545 bp, Glycine max
  Clone ID: PAT_MRT3847_95398C.1
tttgggggtgccttgaaggttcatcatgcttcggcgcatataacaaataaaatgggcccataaagaaaaaaaacggggattcaatcgctgaaatatcggacttcccacccttacatactcaaaattacaaaacggttcaatcaaagtttctatgtgacgcgagcccatatcctaaaaggctataggcgggaagcattgtatgactttatcacacaggtttttttaacggctcgaatcaacccacctacaaagaccttgcgatcctgagggtggacccgttcaacctatcataccttaacgaaaaacgcgggtgatgggaacgcatcctactcggttttagcggagatgtccttgagccaagtcaatgacttaaaacccaagtgcctacgtggtttaaagcataatccgctttcaagaaaaaatggcgccgagcccctggcgaaccgattgtcgcttccaggagaggcatgaaccacgcgaggataacgcgggggatgtcgcgctcgctcatgtataggaatcccctgccgctgaacatgccaacg

SEQ ID NO: 137751 - DNA, 206 bp, Glycine max
  Clone ID: PAT_MRT3847_95399C.1
ctaatgagtttatagcctgtctgatgactattctagatttttatagctaaaccaaatgcatttttgagatgtagctaaagtcctttgttagatacctcctttgctttgaaaacaatggtgaaagatagaaattattttcatccattcttgacatgtataaccaacttattaaaaagatgaaaaaacaatttatgtgacatgaatta

SEQ ID NO: 137752 - DNA, 416 bp, Glycine max
  unsure (1)..(416): unsure at all n locations
  Clone ID: PAT_MRT3847_9539C.1
gggggtgcgcatacagctgtggttaatctcatggtactatggtatagaacaaggcaggtatcaacaagtatccgagttcacggttcaaacatttatgggaatccactattaagaaaaagcgaggggcggggtgtctctaccacaagtaaatgcttgttaactttgttatgtgatgtgagagaattgtaagaaggggtggcgagtcccatgagggtggtgtgcgctcattggcctatatatccnnggaagcagaaaatcttttctcaaggaggattgaagcttatcccatggacaaagtgggaatccaaaccatcaacccattgctgnaaggaattttccctgaggggaagaggattcacccacagaaaggttgctagaatcctcaaggggggaaaggaggcctacaataggaacta

SEQ ID NO: 137753 - DNA, 317 bp, Glycine max
  Clone ID: PAT_MRT3847_953C.1
tgattatgaacttgtcaaggattgtcatattagatgactacctcccgcagcgaataccttatacgctaaaccatgtgtcatccaatgggagatctggggttgatctaatgggccaaaccatacttcttactgatctttacacacaccaccaagtggcaatcaagatactcaaggctctaatctaataacgcccatcgcgtacatcgagcaaacgattactaatgcaaacccctaataataaaacttctatactgcaaggaattaatccctacagtgaacacttgtatccgcccagagaagaaatcgacgctcttatc

SEQ ID NO: 137754 - DNA, 343 bp, Glycine max
  unsure (1)..(343): unsure at all n locations
  Clone ID: PAT_MRT3847_95400C.1
agagatagtctccctaaaatacctacagagtatatgagaatggagagaggaccaagagaaataatggaaggttattatccactatgcaagtaacaactgagttggcagngaggagtaatgtaagagtaagagtggttaggttgtaatgggtagggctgaacagaaaattcataactgtccaaaaattgaagcacccgagttgattaagagttaaacagacgggcgataaaacaatttattttatagcttatttcgaataatatgtgtttttattgataattttctcttatttcatgaatattgtccaaataatcntccataagtgtttttattgggaaattgg

SEQ ID NO: 137755 - DNA, 554 bp, Glycine max
  Clone ID: PAT_MRT3847_95401C.1
gagagagagagagagaactaggacgtgggggaaggagatggaggcgcggctgaaggggatttcgagcggggaggggacgccgaactccgccagcgggaggcgggcggagccggtggtgctgtttgttgaagagaacgagccgaaggagtgggtggcgcaggtggagcctggcgttttgattacgttcgtttcgttgccacgtggcgggaacgatctgaagcgcatacggttcaggtacgtactagactgcgttatgatatgtttattgttatgtttggttacgttacgggttctcgtctcgtgccgtgtttgtaatgtggttgttttcgttggcgttgggggttttgatcggacggtgagtgtgcatgttgggtgacgattggttgctgtttggatcgtctaaacagtgatgatgacaatgactgtcttttgctacacctctctagtagggtcgctttcgcctctgcatacgcttcttaggtatatctgaaatgaaacggctctgcatacgctttcacatctggatctaaaattacttacattaaatttatttt

SEQ ID NO: 137756 - DNA, 130 bp, Glycine max
  Clone ID: PAT_MRT3847_95402C.1
gggcttttcccattcgctcacgtgagtgttttgtttgcactctcctctccccttagcagtaccacaggattcagacaggattagatctagaggagaagttttaactgtccaacagcatcaccgcgactac

SEQ ID NO: 137757 - DNA, 694 bp, Glycine max
  unsure (1)..(694): unsure at all n locations
  Clone ID: PAT_MRT3847_95403C.1
ccacgcgtccggagaaacctgtgtctcaagagagtctagagctggcaagagatcaatgtcatcgtcttcattagccttggtctttgaatcttcttcagggatctgcttctcctgagaaacctgtgtctcaagaaaatgataacgtttgggtgttaattcccgaacttaaagcaaagttgcacgcccaccagaagaaagcatttgagtttctttggcaaaacattgcagggtccatggacccgggattgatggaagcagcatccaaaagaagaggtggctgtgtggtatctcatactcctggagcgggaaaaacttttctcatcattgcttttcttgttagctacttgaagttattcccagggaagaggccattagtccttgctccaaagacaacactctatacttggtacaaggaatttatcaagtgggatattcctataccagtgtatctgattcatggtcgtagaacctaccgtgtattcaagcagaaatcctcgattgttattcctggagttcctaagcccactgatgatgtcaagcatgttntggattgccttgagaagatacaaanatggcattcgcacccgagtgttctgatcatgggttatacttcatttttaacattgatgcgagaggattcanagtttgcacataggaaatacatggcttaaggtattgagggaaagcccctggg

SEQ ID NO: 137758 - DNA, 298 bp, Glycine max
  Clone ID: PAT_MRT3847_95404C.1
tacggctgcgagaagacgacagaaggggttgtattaaaagcataagggtatttttgtacagtttagttccccaatttagttgtcctaaccaagtcattaattatactttcattaacctaagggaacagtttagaaaaatcgatgcacttctatgaatacacatatacaaatgtgtcttaaatttaaagaaatttttatgtatactaaagagagcctatatgattttaatgattactgcaatggctaaaatgtttcttttgtcaacaggacctcctcaccacactttgtcaccttttta

SEQ ID NO: 137759 - DNA, 424 bp, Glycine max
  Clone ID: PAT_MRT3847_95405C.1
gtaaaggcaaacctagattctttaaaatataccaagtcacaataacatcattttgctccactaaatattaattcataccgggccacccattgatgaacctttgtagcacctcaaatcgaccaggtctgtacagcaaaaggtgggataaaatctaagtggactcacacacgactttgtgaacagaatatatcatgatttgctactatgaatttccacctgcacgtcttattagacgggaacctaatgctatcttaatatcacctcttacaaagatgtctccacacccccgggactcgcatactggaaaactgtgttcatgtgatagtcggctgtctcctcacatgataggacgatcccctcttgactacaaagcatgatgtgtttgtgctataggagaaccctggcgattggaacggactggggc

SEQ ID NO: 137760 - DNA, 222 bp, Glycine max
  Clone ID: PAT_MRT3847_95406C.1
tgcaaagtgagtgtgcgattcagtactgagtagaggtacatatttccaatcggagtcggagcatctgcgctgcatcggttgcgatcaaggttactggcaccgatactgctatttgatcttcaaggtcttctgtatgagacttgtcgcgtactgtcgtccatagcagtagatgcgcgacaacgccattgtcatggtccgcgacgttctcatctgaatgctgat

SEQ ID NO: 137761 - DNA, 274 bp, Glycine max
  Clone ID: PAT_MRT3847_95407C.1
cccacgcataccgaaaccgttgcgattactgctagatcgccgatctctgggcgtttttttgtttgactgtgaatgacttctctaacctgaaaatctacttcatgatctggtcactcaggctccggaaccgcctctacgtgcttcacaccatgccgacacttaaaccaacacccagacttgagctataccccatcaaccaccacatgaacactagcatattgaccaaccaccaatctaacgctcaattcaatgagtgctaccaatgacatgtgtc

SEQ ID NO: 137762 - DNA, 288 bp, Glycine max
  unsure (1)..(288): unsure at all n locations
  Clone ID: PAT_MRT3847_95408C.1
ttnagaagaatgcggatttccaaagctaataaagganacatcccttggaacaaaggaaganagcacactcccgagactttgcaganaatcaaaganngaacaagggctcgcaatggcagaatcccnaaggttcaaaatggaagctcgttaatctgggcatgcacanactttcagacacnagangaaagttgggcnctggaatgagnagantggggaaagaggcctgggaaggagtggtgccngatcttgctggcttgagtggcggatttnattgcnggagcntctagg

SEQ ID NO: 137763 - DNA, 269 bp, Glycine max
  Clone ID: PAT_MRT3847_95409C.1
aattcggctcgagctcgatccgaatgaccactagtttactgctacagggaccttaccacaaaggataagtccatacgacaacagttgctaaaataactagattatctaaacgtcatagcatcgtgctaaacctacctaatctacttaacacaatgtcaaaaagtctaatgttaagtgaagtcacataacacatgagaaatctaaaatacagttaatgtttacacaaatgagcttctgattgaaaattacttatggcataacgtatgtct

SEQ ID NO: 137764 - DNA, 870 bp, Glycine max
  Clone ID: PAT_MRT3847_9540C.1
gagtaaaagacagaaacaagaagaaagagagtcgagagaggagaggagagaaatttgaagaaacagcaaaggaaaatttccaattttgacgtcttctcttttactgtatgtaatgtgagtcatgtcacttcccaacacctaccactgataattccatgccttcttcttattaaccccaccacttgcctctcagaatttcatgtgcctcatcttgtgttctccacttccctccaactgcaccacaacagggcctggttagtgccattgctgtgacctcctccttcaagtgatgagagggggtctcagaagttcacatttcaggttggaatcagacacccttttgagcaattaagaaaagccagaaagcaaaatctcaaattggtaaggttttgtcaatggggttgaacttgtggtgctacaatggcttcacaaccaagagggttttgggagcataagagatctagtgtttaagttgcttcagggtctgaaaaaggtgcttgagagttgggacaaatctgtgaaggatttgggttgtgaacagcagcaaaatggcatctgatctgaattcggggttgtccaagaaaacatttgtttttggattgaaagtgtgggtactaatgggaataatagttggattattcatcataatcattctcgtggtgctatcaatatgtctcactttacgaaagaagttcagaagagtcaatggcaagcttccacttagccatgtgatatctgtttcagacgagatcaaagaaatcaaagttgatcaagtttcagcaaataatcatcctcaaaatggtgtttttaagagtctgaatgacaaatttggtgacagggagtctgaaaaggttttgaccaaacaaatga

SEQ ID NO: 137765 - DNA, 1686 bp, Glycine max
  Clone ID: PAT_MRT3847_95410C.1
attagccacaacaaaggtcgcaacaactgttcgaatactttataacagggatccaacaagacgactaaacactaggcacacagtgggagaaaaggagagcattcaccattttcttgtggtttggtttcctagagacactaagtactcccatggaacaaaacaacaaaagccttgtttcttctaaattcttatgtttatgtttgttgatcaccttgatcagcattattgttgctccacaagcggaagcagcacgagcatttttcgtgtttggcgattcgcttgtagacaacgggaacaacaatttcttggccaccacggcgcgtgccgattcatatccttatggcattgattctgcatctcatagagcctctggtcgtttctccaatggcctcaacatgcctgaccttatcagtgagaaaattggctcagaacccacattaccatatttgagtccacagctcaatggtgaaaggctgcttgttggtgcaaactttgcttctgctgggataggaattctcaatgacactggaattcagtttataaacataatccgaatcaccggacaattacagtactttgagcagtatcaacaaagggtgagtgcactaattggaccagagcagactcaacgactggtcaaccaagcactagtcctcataaccttaggtggcaatgattttgtcaacaactattacttggtgccattctctgcaagatcacgccaatttgcacttccaaactatgttgtattccttatttcggagtatcgtaaaattcttgtgaatctgtatgaattgggggcacgaagggttctagtgacaggcacgggaccactgggttgcgtgccagcagaattggctatgcacagccaaaacggagaatgtgcgactgagctgcaacgagccgttaacctgttcaatcctcaactcgtccaactactgcacgaacttaacactcaaattggctccgatgtcttcatttccgcaaacgccttcaccatgcatttggatttcgttagtaacccacaagcctatgggtttgtcacgtcaaaagtagcatgctgtggtcaaggagcatacaatggaatcggactctgcactccagcttcaaacttgtgcccaaacagggatttatatgcattttgggaccccttccatccatcagagagagcaaatagattgatcgtggataaattcatgactggatccaccgaatacatgcaccctatgaaccttagtacaattattgctttagattctacaacctaatgcaccattactgtatgagttgtcttcttttcttgtctatgcacacctagttcctacaagatattgtatttttcttgaatgtttaaaactatgacgttaattacttaagtatttttttttttattggatgtaccagtttaggaattgtaacttgtgagccatgtatcgtttgggtgaattgggtcagataattggggcgtagaggctaagcccaaaaactgtttgggcttttaactttaagtgtgatgcacaaaaggtgtatgggattgactaggaagtgtcctaaatttaggtcacgcggatgtattagtaatttacaacaaaaattattccatgcaaaccttagcttaaatccatattgttaactcgttgttcgcaacaaatttgtcatagtaaattattcaaaattgcgaatctc

SEQ ID NO: 137766 - DNA, 373 bp, Glycine max
  Clone ID: PAT_MRT3847_95411C.1
aaagattttgatccgttagaatatatcattgaaaaaatagttttaagtgtaattaagtttgaatcaaagattagttatataactgatttaaaggatcatgtaaaagtattaaggggtttcaccaaaaagaaaaggtcctacttatgataattaacaaaaaaaaaattgtatttttctaatgtctgaattctattatcatgcatcttttcttggaggttcttttgtaggttatttagcctttttcaagttgtttttaccattaagctgcagatgaattacatctgagagcatttaatctagttagttaaattgtgatatgggttatgaatgcgggttaacacagtggttaactatctagaatgaacttttatat

SEQ ID NO: 137767 - DNA, 680 bp, Glycine max
  Clone ID: PAT_MRT3847_95412C.1
agcatcaaaatcaactaaattattgcattcatgatgggggaaaataatatggcataagcataccctcgtttactcattttctttcgtaatctcatcaattcctctttacattggtttttggtcaccagagttggcatcttcacttctctaacaaaatcggacagacgacaacataaaaatttaataacggattaatagtgttttaagagactaaagtcaccattaaccctttaaaaaaatattgtatatgattcctaatctaagaaacactaaaggcacgttaccttgggtcgtgtgacaacattggactcaaattttgcttttacgcttatgctgccctgttccttcagtttcaaaccactgatcaaattgcaatcccaaagcattccattttgtagaaaacctttcagcaacttggcccatggcctaataaccgctgtcaccttggggcatttttttctttcttctcttctttttactggtttcttttctagagtcattctcttcgttcctgaccatctgtaaatccccattttcctttagcttcttactggacttctttgacgaagattttctcttctttgttgaagaacgcgtgctaggctctgcactggtgttgactccgcgcggagtggttcttcttataatctaactgccaattgcataacatatcctcatct

SEQ ID NO: 137768 - DNA, 539 bp, Glycine max
  Clone ID: PAT_MRT3847_95413C.1
ccacgcgtccggtgagagggagcacaaggaacaatgcccggcttttggcgcctgtctgcctcatagcactaccattcgccgaggaaggcagtgcttgccgcacctgccacgattttcacatgatacttcgttataactgaccttcctacatttgtcactaccttccacatcgctttccctatcaacggaccaaaagctaaaccttgacgctgccgatttcagtgacttgcatacatgctgacagatgctttgatagacgacacgtgtcgcctgaggagaatagatggcgatcgctacttcgactgctctgcacatgcctgaccaatcacacaccggtggagtacaacattccacgacaaatacacactgacgtgatcatacatgctactggatcaacatcatgcagtacatgataactcagggcacggtactaatgaccatagagaactcttgatacgacagaggcttgtgtagcacatctagcaaggtgactattattttgcagggataagcccatgtgtttatcactgtcactcctc

SEQ ID NO: 137769 - DNA, 615 bp, Glycine max
  unsure (1)..(615): unsure at all n locations
  Clone ID: PAT_MRT3847_95414C.1
ccacgcgtccgaatagattcaggaaccacaactgcatatgctggtgacacgagtgccaatataaatgtcaaaagtcatgaactcagacttcatgagattaatacacttgattgggatgacctggtggatgcaaatgatcataacacaactactgtgcctaatggaggtactgttccatattttgatctacaagatcaaattttactgaatgacagtttcagcaatgtagccaacaatctatctgcagacattccttcttttggtagtctcactcagcctattgctgggagcaacagtgttccttacaatttttcaagtgttaatcttcagacgatggacgatcaagcaaatccacatgagcagaggaataatacagtttccttaaagtggtgttgattccttggacactttggtcaatgatagattgcaaagtcagaacagctttggaatgtggggtaaaccccaatcatgttctgattcaccatggntcagtagatgacccaagctcttgaatccccaggttcatcccgttcatgaaccatattcatctttgatagggggatagtcagcaatcttctctgccaggacaagtatttactatcactgaagtatccc

SEQ ID NO: 137770 - DNA, 2151 bp, Glycine max
  Clone ID: PAT_MRT3847_95415C.1
cgcggattcaaatattcctcaaaacaacgcattcctttcactgccccttcccaattcccttccctgattgtcaattggatcttcatgagttcaacaaccactggagcatacttcgtcggggtggttaacctatagtctttattattcctgtgttgcgggaaacaagaacaacgacctcttctgctgggttttgctctgcttgctgccaaaatttttgggaactccatttgcctacatcaactttctcttgattcaggccattgacaggaatccatcggcggtggaggttttgggaaacttcggggtggttaacctatagtctttattagtttggtcgtcagcagcagcatatttagatcccttattgttgagtggtgtgagaaatggtgtcctctcagttttctgcttttactttggctggctacaaaccgtctcagactcagttactctttcctgcaaagcttgttgatactgtgaacacagagcatattgagctggatttctctgatgtctttggtcctgttacgttagatttgaataacattgattccactaccagtgagcctatggaagaagtgaacgagctggtttatgatgacccaccagtgatttacactcgctcacattctctggttggcccttcaacttgtgttagtcaatcacttaagcttggcaaactcaccatacatgagactgaggattcattggaactagtggagcatgtcaatggagaggccattaaagacatcaaagaatcttcctttgttgaggaatcattgaaagatgaagatgggaatctcatgaagatccacagagttagcattgacgatttcgagattttgaaggttgttgggcagggtgcatttgcaaaagtttatcaggtgaggaaaaagggtacttctgaaatatatgctatgaaggttatgcggaaggacaagattatggagaagaaccatgctgaatacatgaaagctgagagggatatttggacaaagatagaacacccatttgttgttcaactcagatactcttttcagacaaaatacagactgtatcttgtgctggattttgtaaatgggggccatctgttcttccagctgtatcaccaaggccttttcagagaggatctagcacgcatatacactgctgagattgtttgtgcagtttcccatctccattcaaatggaataatgcacagggatctaaaacctgaaaatatcctactagacgctgatggccatgttatgttgactgattttggcttagctaaacaatttgaagagagtactagatcaaattcgatgtgtggtacattagagtacatggcacctgaaattattcttggcaaaggccatgataaggctgctgattggtggagtgtaggtgttctactgtttgagatgcttactggaaagccgcctttctgtggtggaaaccgtgacaaaattcagcagaagatagttaaagacaagattaagctgccagcatttttgtcaagtgaagcacattcactgttgaaagggctgctacagaaggaacaagctaggcgcttaggttgtggacctcggggtgttgaggaaattaaaagccacaagtggtttaaaccaatcaattggagaaagttggaagcaagagaaatccaaccaagctttaggccagaagtagctggtgtgcactgtgttgccaactttgagaagcgctggactgatatgcctgttgtggactcaccagctgccagcccaaatggtggaaacccctttaaggatttctcttatgtgaggcctgcagcctcttttcttcaaaggaataaccctgcttactagccagcttgaaatggcgttggcttaagatgccaacatgaaacattttcatgtgcccttgacttgtgtgaactttgcaggttgtgggttcattcacttattatgtgcaccttgctgcggctctctgcaaatgtattgagctgtcatgtatgcagaaaataaattactttatttataagtggtatcttctattagggacataacatgatttgcatagcattatttgccataggaattaagaattttttgcaaataaccagctttatgatttggaaatgaagattgaaaagataattgcaattactttaaattttaagtaatttctcctctt

SEQ ID NO: 137771 - DNA, 383 bp, Glycine max
  unsure (1)..(383): unsure at all n locations
  Clone ID: PAT_MRT3847_95416C.1
ccacgcgtccgatggaactagagaaactcgttcattctgctctttctgatctgattccagcaaaggtgcctttcacaaggatcatgcataaattggatgaccacattaataacattagcaatgatcttgtttggagacaaggctaaaagtccttttgtcagcttctctactggaaaaaaaattatattttcaatagatactttcaaaaacacttataccttgtatccaaacagacccattgtctggtctaatgtaagataaataaattagcttgtccatgagtctttggtattgggacttttctactactagactttcttcacttccaatcttgtggttttgctcaattgatacatcagtgtattttcacctannnnnnnnnn

SEQ ID NO: 137772 - DNA, 253 bp, Glycine max
  Clone ID: PAT_MRT3847_95417C.1
gcactattgcttccactggtagagtgcatttggacattctgaaggatggctggagtccagcgttcactatctctaaggtgttattggccatcaaagacatcatcagcaatccagatccatactccccacttatgatgagcatttcacgtcagtatctgactgatagagcgacacacgatgaaatagcagctgagtggccaatgagatttgcaagataggggatgtgcctgtatctaagcatggtcgacattgt

SEQ ID NO: 137773 - DNA, 439 bp, Glycine max
  Clone ID: PAT_MRT3847_95418C.1
cctcgtgcgcacgaggctcaaaccaagatggaacggcgtcattcgccgacgccaatcctgcaatggcatcctcgatgagctcaagtagccttactggttcgagtcgacgatgacgatgctcaacaacggcctcgatgagctcaagtcgtgggaggcctttgttgggttcgaccatgacgagttgttggtctcctcctccaatgttgtgctccccaatggcaccaccctcccaccgccatcggaaaaggcatcgtcttcaccaacttccccctgatcgatctcaagaccaccgtcgacttgacccaaatgcaggctcagatcgaactcattggcaccatgttcagggtggtgccgcacagtgttccgatgctgaaatccatcaacctcgccaatgatggattcctctatcgcagatccaccgctcaagtgcctggttctg

SEQ ID NO: 137774 - DNA, 163 bp, Glycine max
  unsure (1)..(163): unsure at all n locations
  Clone ID: PAT_MRT3847_95419C.1
angtcgcangcacgcgtacgtnagctcggngattcgggctcgagctggannttagaattntaatnncgttgcnttgtncngnccttgtagagttttgnctnacaatntagttngcatggcctcatcncttctagattgtaggcaaaanttanaaacccancan

SEQ ID NO: 137775 - DNA, 272 bp, Glycine max
  Clone ID: PAT_MRT3847_9541C.1
gaaaagcagttctactattattttattgggacgggctatcacataagacccatcttcgaacgggattatttgcttagaaccgtacatcacaaaacccacagaggcctacaaactgttacagcaagcatgcacaaaaaacacagttgaggccgtgaacaacttatggggcctaaaccaactttgattggaaacaaagaacattgaacatggggggtacactacgaaacgggaaatgtaagaaaaccactcctcggtcggggcctggaatgcgc

SEQ ID NO: 137776 - DNA, 549 bp, Glycine max
  Clone ID: PAT_MRT3847_95420C.1
ggtttcaaacagaatttcctcagaagaaagcaacaaaaaagtgcttgaatccttgaagagaagcatgcatgttgataatgaaactgccccgtgccgctggccgctcgcggatggtgatccgagagctgcttttgccgaattttctgcagaccttaagtgggactggcaagcagggcattcctagcctttctgaaagttctaccttgtttggtatgtttgagaggttggtggcaagtggataacagatgattaagaggttggttggcaggctaatggataataaataattaagaggctgtgttgcaggcgagtgtatgcttcaataggtttcctcttaaaaaatctgttcattctcctctgattgaatactgcttgagttgttaatagactatcatatttgctcttctccatcggagatatatgaaaccaaagtcatacaatagtggtgtgtgaaagatttcagccgctcatgtgcagtgtgttcggaatctgtgtaacctgtaattggttataaatttatttataaaagttgatgcattaaaaaaaaaa

SEQ ID NO: 137777 - DNA, 353 bp, Glycine max
  Clone ID: PAT_MRT3847_95421C.1
gtttcgtgtaataatctggaaatgcaagaagcttatcttgtcgatgggggaaatgtgttaccagaattgtatttgcacaatccaaaggaagctcgcccattgagaaggaaagctctctctcgtattgaatggctgcaaaaagctgatgtgcctaccatagcacaaattgagagagttccattccatgccgaagatgatgaatgctcctgaatcaaatgataatattgagttactggtgagcattgatttggtgggtttacacagagcaggtaaagcttttccaaacaaaattgtatttgatgataagcttgtgttggctaacacacaaagaattcttttgatggaaaattttc

SEQ ID NO: 137778 - DNA, 231 bp, Glycine max
  Clone ID: PAT_MRT3847_95422C.1
acgtctgccagaaaacaacataatgacaaacaattagtccacaaaaacctttaacctcttaatattatgctcactgcatcgggtacaacaaagcttggggggggcgctatgtcaatgagattctcctattttcaacacttcactaacaacctatgaatccctgcctatgtctccccataagtataattagacagatctcatgataaggaaatatactatagtctctcaatg

SEQ ID NO: 137779 - DNA, 680 bp, Glycine max
  unsure (1)..(680): unsure at all n locations
  Clone ID: PAT_MRT3847_95423C.1
ggcggcctggggccctcggaccggcagctgctgctcttctacctggagcagtgtgaggccaacctgaccacactgaccaacgccgtggacgccttctttaccgccgtggccaccaaccagccgcccaagatctttgtggcgcacagcaagttcgtcatcctcagcgcccacaagctggtgttcatcggggacacactgtcacggcaggccaaggctgctgacgtgcgcagccaggtgacccactacagcaacctgctgtgcgacctcctgcgcggcatcgtggccaccaccaaggccgctgccttgcagtacccatcgccttccgcggcccaggacatggtggagagggtcaaggagctgggccacagcacccagcagttccgccgcgtcctaggccagctggcagccgcctgagggtggtgaccccaggagggaggcaggggaggggtgcggcggtcccagctccctggctcccatgtcaagagtcgctgtgccacaggcttagggacaggaccccagctctgcgtcggtcctggtgccctggatgcccnagaatctgtatatatttatggccgggcagggtgtggggccatgcctnnctcagagcccgaagcccagggccggccagtggccttccccagcatgcaccacgggcccgggttgggtcaccanacngggct

SEQ ID NO: 137780 - DNA, 136 bp, Glycine max
  Clone ID: PAT_MRT3847_95424C.1
aagagaaagtttgtggcggatggagtgttcttcgcggaattgaaggagtttctgacacttaatttggcgtatcacggttactcgggcgtggaggttagggttaggccgatgggcaccgagattatcatcagagcca

SEQ ID NO: 137781 - DNA, 393 bp, Glycine max
  unsure (1)..(393): unsure at all n locations
  Clone ID: PAT_MRT3847_95425C.1
tgaatngacaaattctatttaacaaaaatattgtttaacacaaataacaaatctataagttaattgcatgagcaaacaaagcaacaaagaacaatttggaattgaaagttgatgataacaaaatcagtgagaaagccaaagaatagtgacagaagagaaaggcaaagattccgacggtgtcaccaaaaagtcaccggagaaagttagataatactgcaatcattctagcatgggtttgaatgctagttgaagtcgtagtcgtgtgatggctgcagttagatacattgttgggagagaaaggcaatgatttagattgatgctttattacactatcttttatgagataacccatatacctgtacatattagaattttatatcattcatttacatg

SEQ ID NO: 137782 - DNA, 584 bp, Glycine max
  Clone ID: PAT_MRT3847_95426C.1
tgactcttttctctgctgcaagcctcccatcttcgtttgctacgccactctggacacgaccgtgacaactgtttgatccaagaacagacacaatgcccgccgacactgtaggaaagaccatcacctgtaaggcagctgttgcctgggaagccggcaaggacctgtccattgaggacatcgaggtcgccccgccaaaggctcacgaagtccgcattgagatttactacactggtgtttgccataccgatgcttacaccctgtccggaaaggaccccgaaggtgctttccccatcgtcttggggcacgagggtgctggtatcgtcgagtccgtcggcgagggtgtcaccaatgtaaagcctggtgaccacgttgttgctctttacactcctgaatgccgcgagtgcaagttctgcaaatccggaaagaccaacctctgcggcaagattcgagctacccagggtaagggtgtgatgcctgatggtgcttctcgcttcagtgcaaggggaaagatctcctccacttcatgggaacctccactttctcccagtacaccggcgtagccgatatctccgtcgtcgccatta

SEQ ID NO: 137783 - DNA, 470 bp, Glycine max
  Clone ID: PAT_MRT3847_95427C.1
tccgtaggctgggaattgggttcgggaaacaaacaacttttctttctttctaatattattatgccacaggtggatttggaaacgttggtttccgcctgcgccggcggttgctccgaccagaaaatcgcctacgagcctcacgtcgacgacggagaccaccatccggactctccgccggcgtcgttctggctctctggcgacgccgagtacgactggtgggaccgcaacgccgtctaccagcggaacgaatcgacgaaaggaaactcgattgtttcctcaacgaacctgaacgctaactcgaacaacaattctcagcgattctcgaagaatttgaagtccaaagcagcgataatcggcttgccgaagccgcagaaggcatccttcgctgacgccagcagccgccgaaaccaccggcctccgggaaacgccaggctgttcccgaagcggagcgcgtcagtcggcggaaaatt

SEQ ID NO: 137784 - DNA, 535 bp, Glycine max
  Clone ID: PAT_MRT3847_95428C.1
cttggcaatataataaccaacaaacttggtcaggttccaactcttcgaacaaactaactagctaggtgagaaaaagagaaacatgccttgcctttacatcaccaccaaccttaacctagatggagttgacaccaaccccgtcttttctgaagccaccactgctgtctctacaatcattggcaaacctgagaaggtactcataaaccttaatttgcctccctttctttgccatgtaaacttataatcacatgatctgtctttaggaacaatttttttttttgagtttttttagaagcgatcataattttctaaataatattgaattacacactcatcccgtacctgtgtaagaatatccttgttggggttgacacgaatttaatttgcactcgcggcttgctttattctatttttggctggtagagcatgatatatacttctcaatacaaatgttgattgttttttgtcttctggcaattaagtctagatgcaataattgagttaatcatcggctaaataaggagtagctttcttc

SEQ ID NO: 137785 - DNA, 1011 bp, Glycine max
  unsure (1)..(1011): unsure at all n locations
  Clone ID: PAT_MRT3847_95429C.1
gtgcttcgtcacatacgcataagcacgttcagctgcttcactccaccgccgcgcatacctactatggcgttgttttcaagtcagggtgccatgtggcactgtcttattccctccaaagcctccagaacagtaaaatcccgcgccggttcagagaactacaataacttagtgttgaagaaagacgagcgcttaggtgctggagagtgtgtcggcgaggttggaagtgggaccacgattgcggccatcgtaacttccgtggggggcccacctgctgccgttggaatcgcccacgcgtccggcccgggcgcggtgtccattgcgggccgagtgtttcggcccgcccggaagacgtggcggcccactagccacgttgtcgaatacggcgtcgtcttggactccgacggcaacgtcatcgatgaggttttggcggttccgatgctggcaccgaggtcctacacgcgcgaagacgtggtcgagcttcagtgccacgggagcgaagtgtgtctgcgccgcgtgcttaggacttgtttggaagccggagcaacactcgctcaaccaggcgagtttactcttcgcgcttttcttaacggtcgtttggatctctcccaagccgaaaacgttgcaagattaattgccgcgaaatccgtggctgctgcagatgctgcactggaaggaatccagggtggtttctcttctcttgtcagatcattgaggagtcagtgcattgagttgctcactgagattgaagctcgtttggattttgatgatgagatgccgcccctggatttgaatctgattatggataaaatccataacatgtcacgagaggtggagaatgcgttggaaacggcaaattatgacaagcttctgcaatctggattgcagatagcaattgttgggcgcccaaatgttggcaagtcaagccttcttaatgcatggagcanacatgcagagtgagaggggcatagttactgaaattgctgggaccactcgtgatgtgattgaagcaag

SEQ ID NO: 137786 - DNA, 461 bp, Glycine max
  Clone ID: PAT_MRT3847_9542C.1
gctgtgtacgccttcttttctctctctctgcacgtcccctctcgaaacaaagtacggtctgacttccagcataatgcaccgtaggctgtcaacattatggtttcgtccttcaatctcggtggcttgattagcaaagccgacgttctctctgacggtctcaaatatgagaagtatcttgtccgctatagaagtcaagatgaaaagagaaaagctacttgtaccgatatggctgataaatactatgatctcgttaccagatttcatgagcttggttggggggtatcttttccttttgcacccagatgtataggatgacttctgctagagaccatcagaagacatgaacactctcttgcttgacaactgggactgaaaccatggctaaacgtttgggttgccggatgttgaatcgggggactcttgagagaaatcgttggattctggtgaacgtctatttccgg

SEQ ID NO: 137787 - DNA, 438 bp, Glycine max
  Clone ID: PAT_MRT3847_95430C.1
ccacgcgtccgccatttgattaagccatatggaggaatcagttatcatatctttctcttgctcttgtgttctggcaggggttcaaactgccaccatccaataccaatggtatgacgactaagattagtgcgtttcatggacgcatcataaataccgagatcatcttatactgtcggcacctcattttgtaaagaggtcttagttagttcatcggacgaggtgccattgctaaggattttccgttcgctaataaaacgcaaactcttctctgtgactggacgatcactgccctgcaccctggacctcgacgggcggttcaacgacccattcatgaccctggagtacttctgggagaagatgcacattatgacaaagggaactgtggagggctcagagtgcttgaaatactttactgactgcgaatctcggcgaataatg

SEQ ID NO: 137788 - DNA, 557 bp, Glycine max
  Clone ID: PAT_MRT3847_95431C.1
gccggcggcgtcgccatgccgccgacgctggcgaccgaggcgctcgacacggacgccggcagcgtggccgcgtggctgagcggcgaggcgagcggcgaagtgcgtggcgagacgcgcggcgaagaggaggcggcggcggcggcggcggcgtcgagcgaggcgcgcgcagagagctccaaggcctcgagcggcggcagcctaggactggcgagcgccgcggcggcactgctgcgcgctggggcagtgaggggcgcagacagcggcgaggcggagccggcgggctcgacgatcagtggagcgtcgtgcagcgtgctgttgttgcacacctgcggactctgctcggcagactcgaagccggacacgccatggctcgtcgagctcgacaccgtcgattcgcgtctctgctcgccgagcgcgcgcggcggcgcgttcgcaacagctggagacgcagcggcgctgctgctgggcgcgtcttgcggctgcgcaagcgccttctcgctgatcagcggcgaaggctcgaggccggacgccgggagcatgcctcgtcgacttggcgt

SEQ ID NO: 137789 - DNA, 254 bp, Glycine max
  Clone ID: PAT_MRT3847_95432C.1
atttgtgactgcaagatacaccattctgtagatggactccgtttggatatctgaaggtgatatcatagaggacagtttactaatgggtacggactactatgagaccgaagctgataaggaactccttgccgacaaaggtggcattcgtatcagtattgggaaaaattcatgcatcaggcgagcaatcattgacgacaatgctcgaattggagacaatgttaagatactcattgctgtcattgttcaagaagctg

SEQ ID NO: 137790 - DNA, 183 bp, Glycine max
  Clone ID: PAT_MRT3847_95433C.1
cggaattcggcttgaggttgttgttgccttgaatttgaaggatctctgccttggaggaactctgggtgctgagcttgtgaagattgtcaaaataaaatctattatgtagcggaataactctttttctgggatcatcgctgaaggatttgtagaattgtaagaatgtggaggttttggatttgg

SEQ ID NO: 137791 - DNA, 245 bp, Glycine max
  Clone ID: PAT_MRT3847_95434C.1
cacgcttcagggatgcagaaaaaatatgaaggaaaccgcaccagggtgttacaattgcggcaaacctgttcactggtcacgggattgccctttctccgctcccaattccaatcctaaccctaaccctaaccctaaccctaaccccgccaccactctcaatccaaatactcgaaatccttcgtcgtcctccttcaagcccaaaatccccggcgaaaagcccaagaaactcccccgaacaaagccta

SEQ ID NO: 137792 - DNA, 163 bp, Glycine max
  Clone ID: PAT_MRT3847_95435C.1
gggggggtgagaaataaaattagggtcccaataataatccaaagaaccgggttaaattttattgggaattccccccaggttgggaatccctttcttggaaaaggtacccacctcaaaccaattttcctttgaaactttttttagcaggaatcagggggggaaa

SEQ ID NO: 137793 - DNA, 875 bp, Glycine max
  Clone ID: PAT_MRT3847_95436C.1
ggtcagaagagcatatattttgttatctcttcttccacaaactttcggagttttctttcgttaattaataaaatctttgcttaattaatttgtccttcctggaggggcaattaattaattaatctctggtgagtatttataaatatggagagcctggaagaaagagtgtttatgttcatggatgaacaatattatttttccaattccaatgaatcagagctgcatatgcatcatcatccctctgtgtctgtggagaacatatcgtgggaaaacaacaccgacttcgatgactcacccgagagaactttgtattggaaatctcagatcgcactgcttcaggtatatacgtactttaaatcttgtttgattgaaatataaccaaatagccattacaaggaagaattaagttattccaagactaattttacaagaattaatctaatgattaattaagattaatgatccattataataattggatttcaaaaaaatgaatgattaaaaaaatattaatcgtaaaaaaaattattcttaaagtaaataaatctctcttcatatatatatgacaaaaatgttgtgtaaaacaatttatatacctagctaatttcttctcattaacacaagattgattaatttaaggatacacgtatggatttgttttcaatctgcatcatcagtccagatattagttcattattctgactagctctatatatagatttcattaatttcttttattggtctgattttagcttaaaagtttttaaattttttagaagattggtcttgatttctatattccttgtattagtgttaattaattggtagctagaatagtattacccaaaagttatttggtagaatagatatatttt

SEQ ID NO: 137794 - DNA, 210 bp, Glycine max
  Clone ID: PAT_MRT3847_95437C.1
ggcttgaaatatttgatgtaaaaaggccaagttctgttgcaggataatagtaatcataagtcataacccttggaggaaaaatattttctcccattgttagtaccatgcctaatactctctggcagacaatgttttgaacaccggagttctaccttttggttaaatcccccttattggccgggaaaaaaaaggaaaaagcaaaaaggaaaa

SEQ ID NO: 137795 - DNA, 272 bp, Glycine max
  Clone ID: PAT_MRT3847_95438C.1
gaccacaaacttgctagatttatatgtcttgaaatacttttagaaattgacgagaattaaaacagaggatatgaaaacgcattaactatgacagcagcatgagctgatttattcttccatgattgtgttccttttcagcttttgattaagttaaggaccaaactttctcacaatccattgaggctttcctgttaacaacacaaagcatcccatgcccactccaaataccattccacatccatatcctatggcaaccagaggccactcgagcc

SEQ ID NO: 137796 - DNA, 272 bp, Glycine max
  Clone ID: PAT_MRT3847_95439C.1
aagaaaataacaacatgctacaagagcaaagacactcagtagaagggggatctatcatctgaattttgttccttcaagcattaagagttagagatatctcgaccaacctaggttactggaaaccgattattagtatcgaattttcttcaactttggccctcttactaatccaccaggatttagacactgcttttgtggatagcagagacaatgttgtctcagaagcaaggagaggacgcaataatcacaaacctcaaccacacagaacatga

SEQ ID NO: 137797 - DNA, 1096 bp, Glycine max
  Clone ID: PAT_MRT3847_9543C.1
cctcaatgcattttgtttcttctttttgttagcattgcctcaggatagggggtggatgaataatttgttgatgtttaacaattgttttgaaatgtcaatcaggtcatgacctgttgaccacactcagatgtttatgtcgatcttctagctctacacaaattagataacatgcttcttgtaagttttacagcattgaataatgcacaccatgtatgactctagtttcacgaactagtccattctaatttttggtattttcacaacaaattctagatacttttgtcaaaatagagttctggtatatagaccaaggggttctagctccagatgttgatggtccatcttcttttagcacttcaacgacaggaggagaaatggtggcttcctgtaccacaagtccctccatgtggcctaaacgaaaactcaaggaagtagttgcagcacaagcgtgattgcacaaaccaaatattaaagactacaatggccattaccaacatcactttagcttaaatggacatccctgactcctatttgggaatctcttccaaaggtatatgatatgaatgatccctatctattcaaaattttcaaacatcaagaaagcaaatgacataatggtaaaattggaatgttaatgcagttctagcagagagcaagaaaatggaatcagaagacaaggttgatgatgatgctcattgaaccctttgccaatattaaatttaggttatatgttattccttttcataatttttaccaatttatattactagttccacagaaaaggatagaagatcttattcataatttttagcaatttatacatgcatttattgtattttgtaaacatgctttaaggtcattttataacatgaatagaatattcaatccaatatttcttatttatattatttttttgatatttaagtgcatataacataaaggaaaaaagtagggattaataattaatattaatacatgcagtccatataaaatcactttctaagacggttattctttaaaaactgtcttagaaataacgtgttttaagacggttaatagcaaataaccgtctttaaaacctttgaccggacgcggg

SEQ ID NO: 137798 - DNA, 364 bp, Glycine max
  Clone ID: PAT_MRT3847_95440C.1
taaagaaagaaagttccgagttcataaaaaattaaaaaaaataaaaagaaaaaaaaataaaaagagaaaaaaagaaaaaataataaaaaaagtaaaaaaaataaaaaaaaaaaaggacataaaaaagcgccaagtggtcgtcataaggagaaagttcggtgaacttgctgagggctaggcctgaggtgtcttattgagggctacgctagaattatctaatgaccaggaccttggatatgaaaattatttaagagccaatgatggtccttgttgaggactttttgtctgcagggacaaattccacagcggaggccttctctaatatggctgaatcttattaattatgtgcacttcgatttgaatg

SEQ ID NO: 137799 - DNA, 1504 bp, Glycine max
  Clone ID: PAT_MRT3847_95441C.1
gggacacagaacagagtgggtagggtgacggcagcagcaacaaaacgcaagtagagtgaggcggaagcagaaaccaaacacaactcaatcacgaaaatgtcgaatttgccccaatcgctgtcgatgggcgcggccttcggcggcggtggcgctccaacgccgtcttccagtggcggcgccggagcacagggctccggcgctggcaaggatcggaagatggcgtccgcggagcagctcgtgctcgaactcagcaaccctgaactccgtgaaaacgcgcttctcgaactctccaagaagagggagctatttcaagatcttgctccgttgctatggaattcttttggtactattgctgcacttttgcaggaaatagtttcaatataccctgttctttcaccaccaaatcttactcctgcacaatcgaaccgagtatgcaatgctcttgctcttcttcagtgtgtagcatctcaccctgatacaaggatgctattcctcaatgctcatatacctctatatctgtatcccttccttaatacaacaagcaagtcaagaccatttgagtacttgaggcttaccagccttggtgtcattggtgcattggtgaaggttgatgatacagaagttataagtttccttctttcaacagagataattcctctatgcttgcgaaccatggaaatgggcagtgagctatccaaaacagttgcaacatttattgttcaaaaaattctgttggacgatgtgggcttggactacatttgtactacagcggagcgcttttttgcggtaggtcgagttctggggaacatggtggcagctctagctgagcaaccttcatctcgtctattgaagcatatcattcgatgctatcttcgcctgtcagataatccaagggcttgtgatgcattaagaagctgtctgccagacatgttaagagatgctactttcagcacttgccttcgtgaagaccccacaactaggaggtggctacaacaattgcttcacaatgttggagtgaatcgggttcctgcactacaagctggaggaggtttcgatcacatgattgtgacctgagtataaaccaagatcttgcttcattggtgctatcagcattttagggtccgttatatctatatttcatggaacttggtttttcagaggaaaaggttgtaaattattggtgcgtggaaaccaagttagaagacattttctttctttatacccctcccctccttgtgcggttaagcttatatcaagacattgaggcagtttttactccttaaatgaactttgagtaggtacattatgatgtcaaattttcaataaagttaaaggtattcttaggaaaaaaaaaaaaaaaaaaaaaaaaaaaaaaaaaataaaaaaaaaaagggagaacaaaaaaaaaaaaaataaaaaaaaaagaaatttgattccgaacctatatataaaacaatacggggggccccctattttttggcctcttaaacccggaattaatttc

SEQ ID NO: 137800 - DNA, 371 bp, Glycine max
  Clone ID: PAT_MRT3847_95442C.1
cccaaaaaaaacagagtgggtagggtgacggaagcagaaaccaaacacaactcaatcgcgaaatgtcgaatttgccccaatcgctgtcgatgggcgcggccttcggcggaggcggcgctccgccgcagccatcgagtgtcggcggcggagcacagggttccggtgctggcaaggatcggaagatggcgtcggcggagcagctcgtgctcgaactcagcaaccctgagctccgtgaaaacgcgcttctcgaactctccaagaagagggagctatttcaagatcttgctccattgctatggaattcttttggtacaattgctgcacttttgcaggaaatagtttcaatataccctgttctttccccaccaaat

SEQ ID NO: 137801 - DNA, 771 bp, Glycine max
  Clone ID: PAT_MRT3847_95443C.1
tcgctcttagctgcacctgtactgttggttgccatttatgcatcaatctcaaatctgttgacttgacagatctattcttcgtacctatgcccacgatgatgtgagtgctggatcctggtttattgggcttgatgtgaagcatgttgatgaggccaagttttgttgctcatcttggtcgacaggagcaatctgtgccggtgtttgagttgattccagtgcattcttgtgagcagacgacaaacgtaattcttaggagtcatcaattgttagaaggtttgcttcctaagattttttaatttctactggaagcaaagtgattcatagagatgtctgttgaaaagttgcttctggttctagatttgatgtccatcgaacaatatagtttcattagcttatgagtacaggtggcaagttgtgcggttgaaggtttactagctgctattactaaaggcatgcaacgtcgtacagcaaataaaaattcggcttgccaccaataaggttttttttttaagagctagcctcctatgagttggtttatatcattctatgtttctttccttcgttacatgggcgtaggggaagatgactcctcttagtagaagaacatccaaaaatgtagtgaaagtatttataggaatgacatggtgactgacaatctcttttgccataaagggaactttgtttttgtatatgaaataggcagggaaatttgagtcataattatgttttattcatacaatttattattagaattttacgattcgctatttt

SEQ ID NO: 137802 - DNA, 419 bp, Glycine max
  Clone ID: PAT_MRT3847_95444C.1
tcgggaatggttgttttgtaggtgcacaatatccaattcattcgaaggcagttagagttggtaacttcagagagttttgatctttctctcttactagaattcagatctagcaacatcctctaaaggagggaaaactctccctaggaagctgcatcatgttggttggtcatgcctatgatagcttttgttgattgcctgtacttatggttcttttgaagcagttgataggaccttgatctttcaggatatataattgttcattagggctgtatattactttggattaacattatttattattaagggggacaagaaagttgagagtaaaaacaaggtatgtgctctcaatgattgtatgtactctaccctcttcgctagtaaattcagtggttaagcattcggttgacactgcatatttc

SEQ ID NO: 137803 - DNA, 505 bp, Glycine max
  Clone ID: PAT_MRT3847_95445C.1
ctcgagccgaaaaaaaataagagaaggacaatggggtggttctatccaaaaaagatgagtactgaaggatacacaaggccagaacatgaccactgctagtttctccttctccaaatttccatttggttgtgatatttggcattgtctttagcttattgtggctctcaaattacacagccatttaccttcagtttctcctcatgctgtctcccatacttgggattctcttctatgatttcatattcaactacttgtggtggaaggctcaactttagtttcacacgtttgaagaatgtggtgtctcatggaacgtagccatatcttgctgctgatacttctgatgtggtgtctcattggtttcttggacctctttggagatattaagtatattggtgtgtgttgttactacaaaggttgtttattaagcttgtatttcagcttttgttggaaaatttatttatttttgttcacattctctctcacaaagcttattattaagtgagaa

SEQ ID NO: 137804 - DNA, 396 bp, Glycine max
  Clone ID: PAT_MRT3847_95446C.1
gctactagtcagtcggccgccctttccatactttttgatttgtttaatttcttttgttcctaactgtttcgggacagacgggcaaaaaacaaacacttgtgctttataaactacaacttttatttactatattttcagtcaaaaaaaaaaaaacagatactcttttgtaaaaaggatagggcccctgtgctggcatttacaatcctgatttaggaaccaatcccaactcccgagaaattttttctcctacgcgtaatctaagggggggcagaaaataaacctcctttgtttacaaaatggtaacaagaacatcttcattgttggacccgctgcgtaattgcgaaataaaactacccctgaacctgtttccttaatgccccccatttactggttttg

SEQ ID NO: 137805 - DNA, 761 bp, Glycine max
  Clone ID: PAT_MRT3847_95447C.1
cggctgcgagaagacgacagaagggggccacactttatcatcctcagacgaatggccaagcagaaatctctaacagggagcttaagcgaatcttggagaagacagttgcatcatccagaaaggattgggccttgaagctcaatgatactctctgggcctataggacaacgttcaagacccccatcggcttatcaccgtttcagccagtgtatgggaagtcatgccatttaccagtggagctggagcataaagcatattgggctctccgattgcttaactttgacaataatgcatgcggggaaaagaggaaattgcagcttcaggagttagaagagatgagactgaatgcctatgaatcgtccagaatttacaaggaaaaaacgaaggcatatcatgataagaagctgcagaggagagaattccagccaggacagcgagtattgctctttaactcaagactaaggctgttcccaggtaagctgaagtccaagtggtcaaggccgtttatcataaaagaagttagacctcatagagcagtagaattggtggaccctagagaagggagcttcgagaagaaatggatcgtcaatggccaacgcttaaagccgtataacggaggacaattagagcgattgacgaccattatctatttaaatgatccttgagagggcctactgtctagctaaggacaataaactaagcgctggttaggaggcaacccaacatttagtgtaaaaatgtagtacctttattttttctct

SEQ ID NO: 137806 - DNA, 306 bp, Glycine max
  Clone ID: PAT_MRT3847_95448C.1
ggctcgagctcaatctcattaatgatatttttctactctcaaacattcactctccaacagggggccgagtactccaaaaattgtaggcggccataagccccaagggacgcaagcaatcaacacttaagagaggagtttgtaacaacacagaacttacactcactgagcaggataccggtacttctacttcaaatatcttttcctccacaatacataataatttattaaagatcgagctcacttttatatatgtccattttaatcaccaatcatacatgatacattttctatgtaccaaaaattaaa

SEQ ID NO: 137807 - DNA, 884 bp, Glycine max
  unsure (1)..(884): unsure at all n locations
  Clone ID: PAT_MRT3847_95449C.1
ctccggttattcaatcgaacagggctgatagaaaaaatttgtagaaaaaagtgttgtgtaggtgatacccttcatatggatgatttagaatgctagtgtaggtgatacccttcatatggatgatttagaaaaaaattatagtgtgagaatttgaagtttcgcatcaaatagtttcttaagaaatcaattgcaaaatgaaatatatagatagatagattgagatcaattatgcatatatttctagtcaatttggattgattaattaacttgtaaagtattagtggctgtatgttaaaagtctaagtgtgactgaaaaaacttcatatgtaccgaaaagaaatgggtttagagaggattaaataagtgagaaaattcactcaattattcactaaaaaatgttgaataaaattttgcatattaaatttacatgagtatcttttaatttatattaatttaaatataagaagaatgattattttctctaaataaaaaggtgcaaaatgctaatttacacctattttttaaataaatatatgttaatagtcctcatatttnnnnatattttttatttttaataaaattattattagataagtctaatttagttgcttaagctatgtttttttttttatgttatagattnnngatatctaatgctactcaaaacgtgattgttgctgctagaagaaagtaacccgtggtggtggatatttatgtgcttgtggcactttgtatttatattgaggatagaagcatttattatatggtggaattattgtagcatggttattatctattatccatnnngatatgagaatggaaaatagtagataaccaatatttatagatgattgtgaatcatttgtatgtgggttttaggtacc

SEQ ID NO: 137808 - DNA, 232 bp, Glycine max
  Clone ID: PAT_MRT3847_9544C.1
ggctcgaggtttaatgccgcttatcatcaagaccactgcacagaagaccgacaaggacaaactccaagcagaacgctactatttgttccacgcacacttcatgagaggccgcaaacacaccggacgaaccaaatataacagaccctagagtcccccacaacgcttggggtcatccacacaaggtcttattgtttaatcacccttaatcgacgctcatctacgacgactaccc

SEQ ID NO: 137809 - DNA, 319 bp, Glycine max
  Clone ID: PAT_MRT3847_95450C.1
acttgtgctatgttcatggtatggaattgccgaagtaaagtcgcagtcacagaaggtatctggtttgcttgtctttggagatatattggttgaagtaagcaacaataactccctaaacaccatagcaagggcagattactttacttacgcgatctacttcggcaagggttccactggcctattttctaatggcaaatccctcatggacttcgtcggagactctctgggcattacttctcctacaccttaggcagatccctccagctggggaaccagagtactttatggtgtcaactatgcataagctggaggcggaatc

SEQ ID NO: 137810 - DNA, 197 bp, Glycine max
  Clone ID: PAT_MRT3847_95451C.1
atgcaccgtcgtagcctggaatttgggttggggccccctaacacaactggattttttgctctagagggactgagcgggacatagagagagagacacgccagatgcatggggcgctggaacggcgacggacgctataggatgaagaacaaccgaccagctatagaggggttgctcgctgcttaatgtgcactgtttta

SEQ ID NO: 137811 - DNA, 671 bp, Glycine max
  Clone ID: PAT_MRT3847_95452C.1
gaattccgtaaccatactaactagtagtacttgtgttgtgccactcaaactaaactaaactcaatttccaatttccttaatcttgttgtgttgatgtacatggagagaattagagtgaaggaggaagaagcagtgacatgtggtggtggttcatcatcatcatcatcttcgtcttcaagcttttctccacagcctatggaagggttgcacgaggtgggtccccctccgtttctgagcaagatctttgacatggtagaagattcttccacggactccattgtgtcatggagcatggctcgcaacagctttgtggtgtgggattctcacaagttttctgctgacattctgcctcgttacttcaagcacggcaatttctccagcttcattcgccagctcaacgcctatgggtttaggaaagttgatcctgatagatgggaatttgcaaacgaaggttttttggcaggacaaaggcacttattgaagaccattaagagaagaagaaatgtgtcacagagtttgcaacaaaaaggaggaagtggagcttgtgttgaagtgggggagtttggactcgaaggtgagttggagaggttgaaaagagacaggaacattttgatggcagaaattgtgagattgaggcaccaacaactgaactcaagggaacaattgaattc

SEQ ID NO: 137812 - DNA, 333 bp, Glycine max
  Clone ID: PAT_MRT3847_95453C.1
atttttagtctctgtgtttgcggctgaggatggcgaacgagtgaccttcttcgcttctcgcaaagtttaaggaattatgggtcaggaaaaggttcacattaacattgtcgtcataggacatgtatgctttcgcatgccaactaccactggtcactcgagctacaagcttggcggtcttgccacagttgtgtattgagaggaccatcgagcgagcttgcggcatgtacaagaggtcctataagcatgcctgggggctacacatgctgaaatgttagcgtgtaagaaggattgccaatgaaattggtctgacgtagcatgaaaccgccaacacct

SEQ ID NO: 137813 - DNA, 565 bp, Glycine max
  Clone ID: PAT_MRT3847_95454C.1
ggctcgagcatcatcactcacacctcgttgactgaatcgcgatggacaacaaaaagtcaaaatggagttggagttcagcaataatcggagcagcatccgcagtggcagcatcagccctaatatccgcgaaacccaaggacccaacatttcacctcatttccataaacttcacctctttaaaactcaatttccctctcttagacgcagaggttctcctcacggtccacgtcaccaaccctaatatcgcccccatccactactcctccacttccatgtccatcttctaccaaggttctcttctcggctcggctcaggttcaagccggctcccagccgccccgctcctgccagctcctccgcctccccgcacgcctccacgcgctcgagctcgctcaccacgccacgcgcttcctccacgacgtcgcgcgccgcgagatgttcctcgacgccgcggttgatatcgccggcaccgccagggtcatgtggtgggaccataacttcaaggtccacgtggacagccacgtcaccgtcgatcccgtgtttctcgacgtcattgatcaggaaaa

SEQ ID NO: 137814 - DNA, 101 bp, Glycine max
  Clone ID: PAT_MRT3847_95455C.1
cgcggtatcgcggctcgcgagagattgtatccaattgagattctagcaatggctgggataaacttaagagttcaattgattgacattgaataagtgcgcaa

SEQ ID NO: 137815 - DNA, 439 bp, Glycine max
  Clone ID: PAT_MRT3847_95456C.1
tgtttgcatgttttgcgcaaagtattacaaaaagctcaacattgactagggaacttatgctatgcttggagctgcttcttttcttggaggctaaaagtggatgacattatctctatgcgtcattatggttgaactctcagataacttaggatattcacctcttattatgcttgaacttcttatatcgaaggctgaaggtgatgcttttaacgaaagtgtctatgatgagcaagctcaattgaagggcattgcattactgcaatcaatgcctaaatatgatatgcagaatatgacagctcatgaatcctgtgagagtggaatggtgggatctttccctcacgtagttgatgtttctgtcttatttaacattctgcggagcaacagacacaatgattttacagtgattgatcacactagaactggatacacacttgctatt

SEQ ID NO: 137816 - DNA, 505 bp, Glycine max
  Clone ID: PAT_MRT3847_95457C.1
acccaacccaaccttataaatcttcattaacaaaatgtccgggatactttttaacgtacataccctcatcaacatatacggtgctgactatgacccttatcctaccactagtatgacagttttcaattgacgacagagtgggtatcttacaccgcaacctccttaactcccaacagaagatgcctgctagaggaactcagttatggtgttagaggggcgtttacacgatgggtactaccaccgaacatattgtgcacattcgcaaattgtctgatttcctcactcgtaagaaaacgactgtaactctttcactcgtaccttgcaaaactgttggccccatgtggatcttggatccgaaggacactgtccaacgagtgtcctgtgggcataccaacacagggcgcccttccttatggtagcaggaagagacggttttgagcttccataacgtccgggcgcttcaattgattctaagccatatcgatgtgaaactccaattgatgcc

SEQ ID NO: 137817 - DNA, 381 bp, Glycine max
  Clone ID: PAT_MRT3847_95458C.1
aattcactattcaccctacctcatttttctttcccttcactccctcctctttcccatccccacaccaaccaaccaaatggaccccacactctccttccaccgccgatcctcctccgacctcctcctcggccccttccccttctgcccctccccctcctcctccgcggaggaactcaacgaggccgaacttttttgggccacggattcctccgaatcggaaccccaacgccctgcgccctcgccaaaaccccacctccgcaacttcgatcgccccgtggattccggaattctcgtcttgctaacggaacccgattcccgcggcggtctgctccgcggcaagtcccccgttccgacctcctcgcggatgacgattccgtcgct

SEQ ID NO: 137818 - DNA, 630 bp, Glycine max
  unsure (1)..(630): unsure at all n locations
  Clone ID: PAT_MRT3847_95459C.1
cctcgagccgaatcggctcgagaaacctcactctctgattcagtgactctgatctctctctctctctctctctctctctctctgtgaaaggactaagatgggttcagtttctctgaaaataggagatggaacagccagattccaaagagcaacactgtgttcttcagctgttaacattctcatgatattctctgtcatcaccaccaacctctttgctctctatgccttcaccgcttccccaaatcaaccccaacactctctccttcaccacaacaatgcccacaaaaacatctctctcatctctgaacaagtctcactcatcctcagagagatcgatttatcccaaaagaaacttgcccagatggagaaagagcttcttggatacgaaagcattgatctttcgagacccaacattgcatccgagctcaaactcttcctccagaggcaccagctccctctggggaaagactcaagaactgggatcactgagatggtcccatctgttggccacacgtgtgagaaaaattcagactngctgtctcagttcatgaattacaaggtttttggagcttgccctgatgattggagtgtggcacagaagctgatcttaaagggtgtgagcctctgcct

SEQ ID NO: 137819 - DNA, 533 bp, Glycine max
  Clone ID: PAT_MRT3847_9545C.1
tcatcatcgtacgccacacacatgacacatgacatgcatgtatcttcattaattccttagcgaaaccacacgtacgctagctatttttttaattatttattcttatcttggtctattaatggctgtcaacaacaacaagcttgttctgttaacattcaccatatgccatttaatagtaacggtggtcccagagctgctcgatttgggactccagggtcgtctcagcgttgacacgtgggaactggaggcggcttcagtggatttcgggaggctgagtagaggggagccttcggaggtggtgcaccctgccacggcagaggacgtggctagggtggtgaaggcagcgttcaagtccccgttcgccgtgtcggccagggggcacggacattcgataaacgggcaagcccttataaaagagaagaaaaggggtggtgattgaaatgggaaaaagtgatagtggtgacaacaacgatcacaatggtgatagtaatattatcagagtgtgtgagaaaggaatgtatgtggatgtgtgg

SEQ ID NO: 137820 - DNA, 473 bp, Glycine max
  Clone ID: PAT_MRT3847_95460C.1
tccaggaaggtttcccgtcatcactgtatgacgtcctccttctttggggggggggggggggggccaaaccaaccaacaaaagaggcaaaggaaacgggtataggagaaaccgcatctaacggttacagacccaaaggaaacggggtataagaagtggtaacgccggaataatagggcagaccataagcgaaataggtgaggaaagacagggatagccattgggtacagcttaaagtaacaagtggatccaacaaggcagcaccagataatccgccgcgtgtgatgacgcttgcagcaagtacaatacgccaaccgcgtaggttacctatacgagggattgtgagaagtaaaattgtgttatgcgtaatagggataaacgtagtaacgtcgcaaaagttggttaaggcaacacgcgggctaagtacggtaagacgtgcgggatagtgtggaaactaggtgtatgtagaaggcat

SEQ ID NO: 137821 - DNA, 276 bp, Glycine max
  Clone ID: PAT_MRT3847_95461C.1
tttttgttttttctctctttttttttatgaaatcttttatctttcattttctttttttctaaaaaccgagcaggggggtcccatcctaaagcatcgggtccattttgttcttttgcccaacatggatcaagaaacccccaatctttttgtaagggatagacaacctgaggggaattttgtggtatgaaaggcctacctcatttgaactatggaccataatgtgtggcaattcaactgcaccattccggtagataaaacttggaacaaagccccttg

SEQ ID NO: 137822 - DNA, 358 bp, Glycine max
  Clone ID: PAT_MRT3847_95462C.1
acagaccgcggcatatggaaagcaactaccaatgagatatcacagttattggcgaccacttatcttcgtgacccttacaactcatgggtcagatactctcaattatttgtacacatcgctatagtgcattggtgcaaaaagctttgcgtttaaaaatactaagggcgagcgaacacttccgtattggctgggcttagtgctatcttgcttgcaaacaaaacgtgcacactccctaacgcctacggatgggaagatactgggcctctgctggaaataagaatgccattaaccaccaccctggtatctacttcactctgatctgataacttgacgcacattacaggaaagggggaggcct

SEQ ID NO: 137823 - DNA, 838 bp, Glycine max
  Clone ID: PAT_MRT3847_95463C.1
ggctcgagttgcttcacaatttttgattcccctctagatcttttcctcaaactctgggcacattactatgctaaaggctgtgataccgccgcggaatatgaagcagccatgaaaaagctagcagcgaagttaatgtgccttatgttggcttcccttggtattcccaaggaagacattaaatgggctgggccgaaaggagaattcaacggggcttgtgcggctttgcattggaattcttacccgagttgcccggatccggatcgggccatgggtctggccgcgcacacggactccactctcctcacaatcctgcaccaaaacaatgtcaatgggcttcaggttctcaaggaaggggaagggtgggtggcggtgcctccgcttcccggagggctcgtgatcaacgtcggcgatctgctccacattttgtcaaacgggttgtacccgagtgtgctgcatcgagttcgggtgaaccgaacccggcagaggttctcggttgcttatctatatgggcccccaacaaacgtccaaatcagtccacaagtaaaattggtaggcccaacaaggcccgttctttatcgatcagtgacttggaacgagtaccttggcaccaaagcaaagctttttaataaggctctttcagctgttaggctttcttcatctattaacggtttgtttgatgtaaacgaggataagagtaacgactttcaagtgggctagaatttagatagccataggcttgaactttttttacccttctcggtcaaatcttgtaccagccataaaaggcaaaaatgaaaataataaaataaaatttcaaagacccatgatttgcttaacc

SEQ ID NO: 137824 - DNA, 270 bp, Glycine max
  unsure (1)..(270): unsure at all n locations
  Clone ID: PAT_MRT3847_95464C.1
tncacctgtgantgcnaatgggnagcaatanaattctgactantggtgattagacagtngaggnttagtcctattcncanagtgnngatgacttgggcaaggngcccccatagtactagtnngggaggagtacgttnggtagtccttctcgatncttntcaaattctcatnttggnaanagtttcgaagcanatgcagaaacacacagcagaagtttttgatgagtcnncntggggtgcattgnncancgacgangatgtggnntnagtg

SEQ ID NO: 137825 - DNA, 756 bp, Glycine max
  Clone ID: PAT_MRT3847_95465C.1
attttgtggaacagccgaaaccgtgtggaggtgtgtgcttgacttgagtattgaaattgttgattgttaattggaagtgaagaagaaggcaatgccaggtcctggtcctcaccttatgtatgccatgggttctggtttgtgtctcacaagcatcagcaatgggaggtttagtccccaccacacactcttctacaccatcaacgccttctttggccctgatgttggttctttcacggagtggcttggttcactctttggtggctctgctcatgcttttggatctgcccttgaagatctcactcaccatcccctcttgtacatccttcttttgggacttcctctctcttttctctattctcggatatcctcctatcttctccacacgcagcttcttgattctctctccagagtgccccttacgaggatgcaatgctttttgttgatatcagctggctcttttacccacttctttcttgatcatctgtttgaggagaatgggaaaacaaccacgtacacatggattttgagcactggctggtggcagagtagagcaccagttaacccagatgctgttgttgtagttgtcttcttatgtgcttgcttaattggtggctttttttacctcaacagagcaaatgcctcaaactccataaagaaaaagtcatatcagtcaatgcttcttgtgatgtccatagcttgtttgtactgcttttggtgtgcaattcagatatactggatcagtccacgtcgtccagc

SEQ ID NO: 137826 - DNA, 379 bp, Glycine max
  Clone ID: PAT_MRT3847_95466C.1
cttacgcggtgttagcgtggttcagctttttggtctgtactcttttcttcaccgtagcgaacaaaacaaggctcgccttgagagaaatagagctaataatcccaactcaaaattagaaaaaaaacacagatcacattcacaatgtgcaggttcgaccgagcaatcaccgagttgtcccccgactgccatctcttccaggtcgagtatgccctcgaaagccgtcgcaagggcaacgtcatcgtctgcgttcgcggcaccgacaacgttttcctctgagtttagaagaaaaccaccgcctagcttcaagacttcaggccggtgaggaagattgcgtatatggacaaccacattgcgctggtatgtgcggcgctgaaggcct

SEQ ID NO: 137827 - DNA, 1922 bp, Glycine max
  Clone ID: PAT_MRT3847_95467C.1
cttatggaatcggcagccaatcttcctgatattttaccttcaaatattgaagctatggctcattcattcattttgacactaattgtcttacgcatgaagaacctgaaagacagagataacctggttatctgcttcttccagcttccactgtctctctggactatgttgttgtacaaaattgatgcaggaataatgccccctgcttgccagaagtctatctatgtattgtttgctggcatgtttgcgtttgcctgcaaaatatatcagattcatgatctgaatgatgtgtttgcgtcattgccaatgtctgatgttgatccattcttgagtgtcagtgatgattatcatgtatatgctaagatccatgtggatgtgagagaatatggtactgctgctgataatcagttagcatgttcaatgttgtcagagttacagaacaaaatacgggaatgtcaatcgatcataagggatgctttggttcataatttagctaacgtcactgagctggatgcagatgaactggctatgctattgtcagagaaattcaagcctgatgaagagtttgtgttcggtccacagtcaatgcttgatcagaatcaaataatttttcattcccaggagtcactgtcatttgatggggattttccctcaaattcagcaggtggtgaagatgacacaatcagtgaagcatctgtctctgacctttctcgatttattccaaagatgccaatatccccttccgcacctcaagttatcagcattggacaacttatggaatcggcattagaggtagctggtcaagtggctggaacagctatctccacctcgccccttccatacaacgccatggctagtcagtgtgaatcactcgggacatgtgcaaggaagaagctttcaaattggctggcctttgagaatcattacagccaagcacctgataaatcgtttctggcaattgctgatattaggaactcagcacttgagaaggtagcaaatggtggtgggcatgcccaactgccaagggacccaatgaagctgcctcctgcaagcccctttgacaatttcctcaaggctgctgggtgttagattaggtggtttcatgcttacatctttctgctatgtatagtttctaatgttaaatgttcttccagacaggagtttctagggtgctgtatcaagtccttgtaaaggactagtaggtagttccagccagtattttgacttcagtgatatatataattgtagaatgacaatttctctaataaattgttcaatactttatggtattcgtctattaaaggctatttctccccatcaattgccgaaaatattcaaaaatgccttgtcttctaccatactaattgagatcatcaagtgtcttgcatctcttttcactgaggacatggatctggttgtcagttatttggagcatttgaccaaggtaccaaggtttgatgtgcccttatttgtcattattacagttattttagagacagaagtgtcctaaaggaatcaaaagtgattttttttattattattagaaatgtctcagtacactcccataatttccaatgcaatcctatacaattttcgataaaaactttctatttattgatttcttaaccatgttttaaggacactagttagcaagactcttcagaatttaccgaggtatgttctaaaataaatccaactctttaaatacaatgctggtattattatggagatataaggttgactcagggagggggagaggtcacgggtttgaattccctcagttgacatttctaataaaattaacaaattaatatttactgataataaaaaaaatgctgacattattatatttatactatttttgtaggtgacaaatggtggtgggcatgcccaattgccaagggacccccggacgcgtgggtcgt

SEQ ID NO: 137828 - DNA, 374 bp, Glycine max
  Clone ID: PAT_MRT3847_95468C.1
gagacggttggtgtgaagtggaagaggaccttctgtgcatcataccaaagaaattgagtgacattatgcattgaaagtatcaagtaacaaagcaagcaggttgaggaggttaccagtatatcctaaagtatagaacttcaattagttgttccttcagtctctctagagtaaatttgaggcttttcctcggctaaaatctatgttcactttatacaagttaccactaaatactatgtttcctctactcaatttgcaccctgctccaaatgactatgagtttgctgacgcactgacgttgtagcagtttcaaatgatgaattttgtcaccaggaaattgtgctgttgtctaatattgtggcaattattcctttgct

SEQ ID NO: 137829 - DNA, 247 bp, Glycine max
  unsure (1)..(247): unsure at all n locations
  Clone ID: PAT_MRT3847_95469C.1
ctagaacttgattacttgaacattccctatgacagatgaggncggttgttctggatttctggccaagtccatttgggatgagggtcantactgcanttgctgaaaagggtatcgaatatgagtacngagaagaggacttgaggaacaagagtcctcttctcttacaaatgaacccggttgacaagaagattccggttctcatccanaatggcaaacccatttccgaancctcattgctgttcagtac

SEQ ID NO: 137830 - DNA, 299 bp, Glycine max
  Clone ID: PAT_MRT3847_9546C.1
ggcaatggttgatgttttatgggggtgcctggagaccggcccaaaaaaaatcaacttggtctgttactagcacaggggattatattccactgcacatgattatcacacattctacgtggtgctacaaatagttaaatgctaaaatgttccaaatgaacgaggaacttgagatagtccataatctgctaaaagcagcaggcttacagccttttatcctatgcccccactccacataaacctgctaaacacagaaacattacataagacaatgcacgtcctacagactagagactggagcg

SEQ ID NO: 137831 - DNA, 341 bp, Glycine max
  Clone ID: PAT_MRT3847_95470C.1
gtttatagaccgggagctatgtctctggcacatgcctttgcagactctacgcctcgcgacgccgcatgaggccctacttaaaagcaaaggcttcagggaaggaaggatactgagcgatcaagaagatctcgactaaggtggtgctggagggtccaagctcaagaaatgaaaagaaggggttatacagattgtgccgaagatggccttgatgcgatgaatcagagtccagagggctctctggccaaacaactgagtgggcagtttgttacgtctgaaatagttagttcacagggcgatagcgatgatactccacaagtgacatcaataattaagcagatatg

SEQ ID NO: 137832 - DNA, 451 bp, Glycine max
  Clone ID: PAT_MRT3847_95471C.1
aattcggctcgagacggctgcgagaagacgacagaagggataatttgaaaaatgtttgaaacttcatattttgaaatatccgcttatagcaatttcaggatcatttgctcgtaccaatattcgtatccatgtgtaatttcccttagttcaacacttcagcctactttcctcccctccccctatatgcatgtgtcaaaggtttatctgcttgttaattgtataaaatcctttaaaattataagaaaatggtatatcaaaggtattgtgatatacatcagtcatatttattttgaattgtagaaaattacttcttgtacattagacatcagctaaaaaattggggaaaatatggaactgtgcgtgtaagactaaagaaattgggggaaaatatgaaagggtcccccgtgtaaaactaaagaaattggggaaaatatggaagtgggattgacgt

SEQ ID NO: 137833 - DNA, 438 bp, Glycine max
  Clone ID: PAT_MRT3847_95472C.1
ctcacgcgtgcgtgcacgcgttcgaggatacatgcttagatactcttatatacgactaaatatttcttacatagggatgcgaaaatataattcacttatagtggctgctaaatgtaattaataggacaacgttttacgttcgtgaacattatcaaattgctgaagatacccattttaatagctggggtaattattaagatgaccgcacctattgtaatatccaacaggtgcacatcctgaatggttaatgggaatcgcactgtatcggtggataatgggacgcggattggatcggtacattaagcgcggccgctacggtggtcactcgcatagcgacagctcacttgctagcttgcttgcctttgatgccatgtttgtcttcttttcctttctagctataaatttaaggtttcctcttcgagttctaaatagtgggtt

SEQ ID NO: 137834 - DNA, 344 bp, Glycine max
  Clone ID: PAT_MRT3847_95473C.1
agaaaacttaaatatctttttcatacatgcaatataatccattttgattttactacctaaatttcactttttttaaaaaaaaattattttactacatgaaatattttagtagttaccggcagccagatccttaactagaagtgttttttttttttcttttttcttttcttactatagggtttcaagcaacatgagtttggataagaagatggatgcatgttgattctttattttcattttgcctcaaatacataataaatgtgacgtaatgtagtagtagtagtagtatataaaattacattgattcaataacacctaatatagctttatatttaaaaaaaaaa

SEQ ID NO: 137835 - DNA, 673 bp, Glycine max
  unsure (1)..(673): unsure at all n locations
  Clone ID: PAT_MRT3847_95474C.1
ggcttgagcatatatatatatatatatatatatataacacaaactattagcatagcattatagtaggagttgcataatattttcttttatgaaaatggcgcgtggcaagaatctgttcctccaaattctgtggtgtttttccttgatcggtcttagttcccaagcacagaattacacttttgttgtgagagaggccaagtatacaagactctgctccacaaaaagcatattgactgtgaatggagaatttcccggaccaactattagagccaacagaggagacacaatttttatagatgtttacaacaagggcaacttcaatattactttacactggcatggggtgaagcagccaaggaatccatggacagatggcccttcatacatcactcagtgcccaatccaacctggaaggaaattcacacagaggttgatttttactttcgaggaagggaccatatggtggcatgctcatagtgaatggttaagagccactgtctatggtgctatccacatatatccaaataagaataatccctacccttttccccaacccgatgcagagattcccatcatatttggagaatggtggacgagtgacgtcaacgaggtcttcagacaatctatggaaactggaggagccccanacgtatctgatgctctcactataaat

SEQ ID NO: 137836 - DNA, 123 bp, Glycine max
  Clone ID: PAT_MRT3847_95475C.1
atatgctttaccggataaacattcctgctcatacaatgtagagttggaagatcaagctgttttcacttgtcagactaatatgctatcaatagtaactcatacacgaatgaagaaaacaaacca

SEQ ID NO: 137837 - DNA, 886 bp, Glycine max
  Clone ID: PAT_MRT3847_95476C.1
cttatctccatgaggattagtatcacattattattcacataacattgaatctccaaatccacacaaaagcaccgagacgacaattacaaaccaacatgagaaaacgataaaaaaaaaaaaatttaataataatcaatctctcctcgttaagcagcatcacgggccttgaatatattattgggcctaactaagggcaaaggccaatttgtccctgggcttatgggcttgtaaccgggcccgtaccttgacggggacgactctttttattttgaatggctttcatgatgtccaagcagtttccgggcgagggcgtacacgccctgggcctcctcgacaatcggggaggtccctttggggaaggaatcattgcaactttcatagtaggatacaacggagctgaacttgaaacgtgcctctatgacgttgcgctgagccacttgacttttggcctccgccatcgagtccatgatgttgccgtactgctccttacaaatctggagtgagtcgccgagatccttcgagtttccgggcctcgccaggagcacgcttatcaacttcgaggttttctccacctgtttctgggtcacgagcatctccacctcgagggccttgtaatagttgaagcggggcaggcccagcacctccggcaggatggtcctgtagcacagcccaacattggtggtgggcttgcagaggctgtagaggcgggcctggacggtgcgggggccgcgggccgcgtgggtttggaggaggagggaggagagggagacgaagagaattagggttttggtgaaagtgaaagcgaaagccattgtgtatattgtttttgttattccttctcctcttaataggaaagagggttaggagaaggaaaagagagatagac

SEQ ID NO: 137838 - DNA, 629 bp, Glycine max
  Clone ID: PAT_MRT3847_95477C.1
cggctcggcaaaccaagctaaaacgaagctttgccaacaaatcataacagagatcactatttctggggtaaaatacaatttcatgacgggaacgctgctcatcccagataaaagccccaaaacctgaaccctatagaccataactagacgcaggcactactatcgaatgggagctctgacttataatattgcttcccagtgggacctgctatgtgacatagcacactacggacagcacacaacactccttcaaaaagacactcctggacattgttaactccatccaaaacgcacacaatgccgattgccttgaagggcccataacacttaaccaacaccaacgccaacaagaaggcttgcataacatgagagcttggtcgcatattcacttacgttcccgagccttacttaagaaaccctgccacagagactacaaatcgataaacttatctcgactaggtagcgactcagcacaagtcaaatcattacaaaattgactaaatctatgatctgaaacagcagaatctatctcggatctacagcccagcgagtcaaacactcacgttataaatcaacgcgctacaaggtcctgttgtgtctggaacgacgcagggaagcatgcagtactt

SEQ ID NO: 137839 - DNA, 422 bp, Glycine max
  Clone ID: PAT_MRT3847_95478C.1
gagtcttgtgtgagtactcatttgtatttttttttaatgttgaacactcaaatttctagtctatcaatacattattattatggagtaaaatccatttatattgataccattaaataatttcagtttcattttctttttttgttaattttacataaattccacctaacaataaataattttttggactatttctcgatttgtacgtgtcatccttgtgcagtggccatactaataataaataataatgtatattggttaaattattttataatttccattatttttacttttcttcaaacaaagcgtgagttcctcttagaaaacaacaaccgctttataaatagcttctcgcacttaggaagggttgagtatgttagaaatagattcatgaatttgaaatgagtattaaacaattaaagtat

SEQ ID NO: 137840 - DNA, 181 bp, Glycine max
  Clone ID: PAT_MRT3847_95479C.1
gttttgtcgtttgcttctttctttgattaatgatgactagctttaaggttgcatgtgtggttgcgatgatgtgcatggttgtcgccatgagtgttaaacccatgggcacaggcgcaatcacgtgcggggaagtcgccggcgaagtttcttcgtggcttcagtaacttcggaagcggcggaa

SEQ ID NO: 137841 - DNA, 281 bp, Glycine max
  unsure (1)..(281): unsure at all n locations
  Clone ID: PAT_MRT3847_9547C.1
aaaaagaattggggtaaaaattattggggcttgttttttacaagctttatgattggggtaactagtaatatacacactgacgggctaatgaaattttataccgggattcaatcaaaaactggcatgggggaaaaggttgctgacttttacaggtatacttatcctagtttctgatggggggataggacaaacttttttactttatgaacacataaaattaaacacttttgattttgatttatgttggaggagngcaaaacaacttttgaaatcccatataa

SEQ ID NO: 137842 - DNA, 425 bp, Glycine max
  Clone ID: PAT_MRT3847_95480C.1
acgaggaattttggaaagtatcaaaatggtatatatgaattttattttcaacaaaaattaagaagcaagtgaattaaagttgaggacgacaatttgttcatatgatgaactgaagtagaactaatgctataatgggtctcttaatggaagaatgttgggaagaggatcagtaaggtaaaaatgggggtcaaacaattcttccaaataggtttaatgaaagtggttgggagagacttagttctgagtgggttaccttttacaactattgcggaagaggaaaatagaatgcttattatgtatgtacaaaataattgcaaaaccttgtctaaaaggataaagttggtgacaaacaaggtcgttgttgaagcaaatttgagtttgttggtgagagaaatatgctggatgggggattggttgctaatgaa

SEQ ID NO: 137843 - DNA, 594 bp, Glycine max
  unsure (1)..(594): unsure at all n locations
  Clone ID: PAT_MRT3847_95481C.1
tgagcgacacaagggaattgtcgtaaaaagaaaaaagaaaaaaaaaggagaaggtagagtatggctgtgaatggtgcgagcgtgatgcggcggtgcagcgtggctgcgaggttgttcatgacggcggacagggtggcgccggcggtgcctcaggtgtgtgggcgcggggacaagaagacgaagaaaggaaagaggttcaagggatcgtacggtaacgctaggccgaagaaagagaagatgatagagcgcatcaaggacaaggtcgaagttcccaggtccactccttggcctctccctttcaagctcatctgattccctattttattctaggctttccgctcactcatatcacatatctactctctcgttaccattttctattcaattcgattttcacttttatgctctctctttggttttatcatcaaaacaaatagtaggattttgcaattataaagttcccataaactatatgtttattcaaaagcttgttagtttgtaatagataagcaattggttgagttggtaaaaaactgtgtacttgtaacccgtccttttaattgatccttggagagtgcccttgttgctnnnnna

SEQ ID NO: 137844 - DNA, 296 bp, Glycine max
  Clone ID: PAT_MRT3847_95482C.1
cccaatagcatgctcacactatagttctaaacattgctcgtgatatattacatcgcactcatctttccacacattactcctatcctgaagccaaatgaaatgacatccgaattcctcggagaattccaattccacattttcaagaaataacgacgcaaaaatgttcatatatgaatcggaattatttgttttcttattacccctatcctgaacccaaaggaaatgaaatcggaatccctcgggaaatcccaattccacattttcaagaaataaggacgcaaaaatgtccatatata

SEQ ID NO: 137845 - DNA, 254 bp, Glycine max
  Clone ID: PAT_MRT3847_95483C.1
aattgtatcaatcgtcactgacgcaaaacgcgggggtaaggtagaaagactcatactgaggcagtcatgtactcgtgtactgtaaaggatggaagaagtagagggtagcgacaacacacagaaaaaagagggaaggagaggatcaactgacttcatacaaaaaaaggtgccaatgcaatgagcacaacgaaatttgcaatagtgaacaacatgtttttttgactgaaaacggtcaatgccaaagatgtatggat

SEQ ID NO: 137846 - DNA, 121 bp, Glycine max
  Clone ID: PAT_MRT3847_95484C.1
attgtgtaatagcatgcaaactttatatttctagaagttatgaatggggttgtatgaagaaattgaaaattacctgaacaattatatcctgggtttgcttttaattaggcaattgaagcaa

SEQ ID NO: 137847 - DNA, 432 bp, Glycine max
  Clone ID: PAT_MRT3847_95485C.1
gctagctaaagctgatatgattatcacatagaacttgccaaaaaaaaaaagtactgcaaaaaaagggaaaaatagttggataaaaaacaatgattattaatttctcaaagttgaggaagaggagcttaaggggcaggactttaattatattagtattaatttacagtagctgtggcggtggttaatcatcaaaagctctctttttgatgcgagcgtgagtgaaaggcaggtttgttatggaacgaggagggggtttgaagaaaccccaaattgaataaagtggttttgatttgagggaaaagcttgaatggaaggaaggggttccaaaagtaggaggatcagaaatggggttggggggttctgtaactctgactaaggcttgaatgggtattatttattatgctgaaatcaatgttgtttgcataattgact

SEQ ID NO: 137848 - DNA, 352 bp, Glycine max
  Clone ID: PAT_MRT3847_95486C.1
caaaggtttaacccctcattgtaaaacttgttttttcgggaatgtttttttgtttaaaacttgggattccaaagcttgaattttattgcccccggaataagttttagtttcccttttttttaaagggtaagggtggctttccccaatttaaacttttggcaaaaaaggggtttgccccaattttttttttcttgaaatccatccaacttttgttccaagccttccatgataactttaaattcttccaaggggccccgccaagtttaataaccttttcacctccatttttttttttgggaattttttccatgtgggcatttctttttttttcccctaaatcaccatacttttt

SEQ ID NO: 137849 - DNA, 921 bp, Glycine max
  Clone ID: PAT_MRT3847_95487C.1
cgagcagagaattgccatatatgattacatggagaatggtaacttgcaaaacctgctttatgacttgccacttggggtacaaagcacagatgactggagcacagacacatgggaagaagctgacaacaatggcattcaaaatgctggctctgaagggcttctcacatcttggagatttcgccacagaatcgcccttggcacggctcgagcattggcatttttgcatcatggttgctcacctccaataatccacagagctgttaaggccagtagtgtgtatttggactatgacttggagccaaggttgtctgattttgggttggccaagattttcggaagtggcttggatgatcaaatcgcgcgtggctcgcctggttatgttccaccagagtttactcaaccagaattggacactccaacaccaaaatctgatgtgtactgttttggggtggtgctctttgagctagtgactggaaagatgccagttggagatgattaccctgatgataaagaagcaactttggtaagttgggtgagaggacttgtaagaaagaaccaagcttcaagagctatcgatccgaaaattcacgacacaggaccagatgaacaaatggaagaggctcttaagattggttatctttgcactgctgaccttcccttcaagcgaccaagcatgcaacagatagttggacttctaaaggatattgaacctactgctagttagtgaccatgttatttcatttttgtttttaatttctctttgatttttctacttgagagcttctcatgctaccttggagaaaatgtaaagcagttatgagttcttgaatattgatctcttttcatttttcccccccaccacttctggtagataaacaaaactttgatgatgaatatacagctagacgtgatctttgcact

SEQ ID NO: 137850 - DNA, 115 bp, Glycine max
  Clone ID: PAT_MRT3847_95488C.1
gttgaggcaaagccttgtttgcatggttattaacaaaattccttggggatgctaaaccagggaacgggggttagcccctttttgatccaatgcatcatgtcccatggtttaacat

SEQ ID NO: 137851 - DNA, 319 bp, Glycine max
  Clone ID: PAT_MRT3847_95489C.1
caatgagaaactgcatcaacatctgaatttacactttgtacatcctcactcactttgactcgggctttcttaacaggcacgtgggtctcacttacaactatggtaatggagacacctatggagatggctacttacaggttcttgctacaacccaaacttcatggcaggcaagtaaaaaaagctttcaaggtactgctgatgcaaagaagcagtttctactggctcttttatgatccacgaagctacgatatatgagatgacttgattctttcttgagatcacctttcccgaatggactatatggactttgttcaaaatc

SEQ ID NO: 137852 - DNA, 933 bp, Glycine max
  Clone ID: PAT_MRT3847_9548C.1
gcagctttggttgttttgggaattgttactcggtgaacccattcttatcattgcaccaacccctccccagtgttctgaggtcgttgctagtcttgtccattactttgcagtgttgacttccatccttattttactattcacgatcctcagtttgcacacttaaactcaattcgagaaggggaaaccttccccccaatggttttaggggtgacaattcttttcttccttaaggctctccataaaatcccctacattgtctcagttggaagtccacctcctagttcaaacagggtttccctttcgactaggtcttctacaggaaaggtttctagtagacctgaaggtcttgggcttcaacaactttctctgcagaagttttctccttcaagtttattgaatgcaattaagctatggagagacggtcctctttgtctcatgacagaacataaggaagctatatggagtacatattctgcgacaactaagccagatacttctatcttaaataggcttatagatgctggggtgtcaccaagagttgaggagtcaatgtctgttgtgaacaatgagatattacggagacacttcttggagctcatgacaaactttttggctccttttagcccatactttaggacttcaacaccatcagaaggatcttctccttatgtagatcctccttctctacctccattcaatgccgatgaatttctttcaagtttatcagcaagaggtccaggaaagtttatattaaagcgaatgaaatctaactggcttgacttatacaggcgattcctgaatggacccaactttatgccatggtttcagagaaggcgtgctgttgctgaacaagaacaagatagattatggagactagcaagaatgaaaaccgacatacaacagcttatttctagactgcctgaattggaaatt

SEQ ID NO: 137853 - DNA, 546 bp, Glycine max
  unsure (1)..(546): unsure at all n locations
  Clone ID: PAT_MRT3847_95490C.1
gaaagcaaattattcttcaattaattctattggctactaatgttgtaaaagataatataatgagtaacataatttattctaatttaaatgaattttaacataagaagatttttcgtaaaattggtgagtgtgatttataattttgggtcttttacataaatatttaatttatattttatgtaaatatattctcttattatatgcttttaaatgaatttaaaaaacacataattataaatacacaaaatggattttgatgctagttaatatatttcttgaatgaattttagttttcatatttaccaccttttcgttaaattctgagtccgttcctgaatatatagtatataaataaaaacaaatgtgaaagtattgtaacttaaagaggaataaattaagattagcataaaaaaatgaatgaaagacttatagcaggcccaccacagatccaccaccaaaaaaaagaccaggaaaaaatgaagacgagagaaacannaaataaagatcacatttgaaaggatggaagttaactaccaccaacttaac

SEQ ID NO: 137854 - DNA, 487 bp, Glycine max
  Clone ID: PAT_MRT3847_95491C.1
ctatgctcaagtgaatattattgagcatgcctcaattcataatcattcaacccagtaacacacttttgcgtatttacaggggaccatggttggcatccaaagtccataagaaaaatacaagcgcggttctcacaacatacaaaaactttcttaaaggcattgtataaagccttaatagccacatggggcacaaagatcaggatttaccgaatgcacgaagcgtatccggaagagcccatctggcattatcccctgggaaaacgcaattgcctaaacggccctttccaaggatcagccgaaagaacccatatgctaccttcttataccactgccgtgacagatttgaacatgtacacattcacgggctcaagcggggcttggggtaacccatacagtcataaaatatctccaacactgttcactggagaaacaaaatccaacctaggcgatatgacatgttaacagacattaccgtgccagctgcaac

SEQ ID NO: 137855 - DNA, 429 bp, Glycine max
  Clone ID: PAT_MRT3847_95492C.1
ggttcatattacttttaggcgtactatcccacatacaaaataaaaactctcttcacatagtttacgtttcccaaacgctgtacaatatgtagcaaatccgacatctcatataccaattagtgggacactgtccagccacagagaatacgagctacacttgctacactatatacaggaattatgaaatatctacctataaaaagcatatacaccgaagctcgctaaacgtggaaacattgttgcacccacatgatagacccagtacttgggaataaactcgattctaacgcctcctattatgggatcccttaatcgcagcttaggtaccctggaaaccggctgctaatgatctccttcagctaatacactcttcagcactgtcgatatgcatgccttaaagctagtggaaccatttggccatgcccatgc

SEQ ID NO: 137856 - DNA, 441 bp, Glycine max
  Clone ID: PAT_MRT3847_95493C.1
aataggataaaactcttccattcatacaaataagaactatttatttagtggaagaatagtatttgattctcaaagaatacaaaatttccttaaatcaacgataatcaggtaaggtgagtggaattaatctatgagcttgtggattggatgacaccaataatatgaccctagaaaaaagaagaaaaagacctttccgtattaccatttcagcaaagattgagtgtgaacacagccagggttttatcacttattgtcattatgttttagcacaacaagtgggaccttagatgttaattagatttgagtccaccccacagaccgtgtttgaattgtttgtatataaaagcatagtttgagcacatagaaaatggcactcagtagagaattaaataaaatcaagaaagcatgcatatgatgaagaaggtgtgtgggtttgcaata

SEQ ID NO: 137857 - DNA, 234 bp, Glycine max
  unsure (1)..(234): unsure at all n locations
  Clone ID: PAT_MRT3847_95494C.1
gaggntccaactacaccagtcctagctgtggacacttctcctcccactactctagtgcttcagctgatagatgaggaggatggtcagacacatgaattttgattcctgatgatacttttngctttatgatttattattataattttnngcgnngtacagtatttcctttttgtctacntatactgctaggggnatttatgggtaattagtttgctcatcctgaagcattttgag

SEQ ID NO: 137858 - DNA, 249 bp, Glycine max
  Clone ID: PAT_MRT3847_95495C.1
cgcttcttccatttaacataaaaggacacataaacccttacaataggaacataccaaacatactatcgcgcaagtggcaacctatgcaaggcgagcctcggaagcatctcaccacaaaagccgccaaaaagtcagctccaacgaccgacctaatgaagaagccgcatgacttccatcctagcacaatggcgctcatgaagatccggaagtaccaaaagaacacggagcttctgatccagaagctcccat

SEQ ID NO: 137859 - DNA, 994 bp, Glycine max
  Clone ID: PAT_MRT3847_95496C.1
tcggttaatcgcacagtagaagcccgagaaacgacgtcgctgaagctgtgctgaaataacgagacattttgtgccctaacctagagaaaacctaaaagcctcgttggcggtagcggcagtgacaggagaatgggaaggtcgagaagaaagtacaagcaatcgagaaccaaggtccgtgtgggactccctaagaagaaccctaggcttttcaaaccctctttctccgtgcactccctaagaagaaccctaggcttttcaaaccctctttctccgttccacccaagctcttgcgatccctcgcccaagagccccaatgggacgaccaaggcaccgttaacaccaactactcctccttcggcgttctctccgaccctaactccctcaccgaactctcttccgatcctcaaaccatcgattccggcagcgatctcgaagaagacgacttgaaatcagccctaggaaagaagcgaagggatgggaggagcgcgccgcctcagcctctgactgcaatgcaacggattcatatcagtcgtctcgtcggtaaatacggaaatgattatcagagtatgttggtggatataaagctgaatccgatgcagcattcaattggaactttgcagaagctgtgcatgaggtatcatatatatcaaaataagaaccctctccttaaggccaaatgaagtgggagcttaattaattaatccattgatggagttgcacggatggaggcccaaatttttgtcacagtgaggatgtgtttctctaccatgttcatcgttgagaaattttgttaatgcttttgaatctatgaattatattatgtggatttttgttgtgatagattaggcattctggacttctgctcttcagtcttcctaacctgctgccaccaagattatgtagcattttatacatgcatgcacttttggaattctaaagtaattattataaaattaaatttattatataaactcgggtcgttctatctctctcc

SEQ ID NO: 137860 - DNA, 261 bp, Glycine max
  Clone ID: PAT_MRT3847_95497C.1
cacccaaggaaaaggcaggaattctcattcaaaacaaataaagaaaagggggaatacatagagaacactggtccgcaactatcacaagttgaacaaacatcacactaaaagaaaattttacgagaccccccaacatttttttacacaatcacattcacaacatcaacactcaacacctttggttcctatgacgtattctgaacaattaaaaaaatatctaaaagtttttttacaagactacatttaacacgtaaaaacaag

SEQ ID NO: 137861 - DNA, 157 bp, Glycine max
  Clone ID: PAT_MRT3847_95498C.1
gatggatccagacgcgtcggcaaaggcatccgtggagcactactacagcaccttcgacagcaacctgaacgggttagcggattagtatcatgagggtttcatgctgaccttcgtagggctgaagatccagtgcgcttgcagcatcagtcagtaaact

SEQ ID NO: 137862 - DNA, 1141 bp, Glycine max
  Clone ID: PAT_MRT3847_95499C.1
actaacggcacgcgcggacccgttacatcctccgcggactcaccttcacacctcactacgctcttcaacctcactctcatcgccaaggaccctagctcccacctcatcttctgcctggtgctgctctccctggcggtgcctcaccctcctcgcggtggctctcctcgccgccattggcgtttacctccgattacgtactctaccgccctcaccgtcccgaattctccgtcacaaacctccgcattgcgaagatgaacctcaccacttccgccgactccccttcccacctcaccacgctcttcaacctcactctcatcgcgaagaaccctaacaaccacctcgtcttcttctacgacccgttcgccatgacggtgttctcgaactccgtccccgtcgggaacggtccggttacagcgcgtacttcggacaagaacaaccagacgaagcctccgcgcggtgctgtcggggtcgcaagatctggacacggactcgttgactagcctgagatcggggctgaagatgaagagaggtttccccgtggagattcagatggacaccaaggtgaagatgaagatggattggctcaagagcaagaaggtcggaattcgagtcacctgcgacggaatcagaggaaccgttccctccggcaagtctccggcggtggcctccgtcgtcgactccgagtgtaaggtggatcttcgaatcaagatctggaagttctccttttaataataataataataataatgtctttttttgattgattgattgttattatcattgcaaaaattcgttattatctatcgacatcaatttcaataatcaatccaatcaaccatcgatcccttttctctttttttttttttttttttttggttttcataattgcattgggggatgatatatccttacttacttttcatgaaatgtgcacaaggtcaaatttgtatggggagaatgaattttgagcttgtaatatgagatttagggctgaatcgaaggccctaaatttagtttttcttttttctttttaatttgtcattgtagtttgttgatgtaatttgtttcaaagttcttattcttatagtaatgcaactgaaaattatattttggttttggaaaaaaaaaaaaaagggcggcc

SEQ ID NO: 137863 - DNA, 277 bp, Glycine max
  Clone ID: PAT_MRT3847_9549C.1
aataaccggcccgacccacgcgttcgttgtgatcgtctcacataagaacctataattctcattctgctgttatgctcactcggggcaaatttcgcgtaactcgtgcggaggatcatctctgcgcacatatgtgaggaacctaatgctgatctaactgggactcacatgctcctcaggctgctgccatactgcattgactatggacttgcatacacacttactaagactggtactataaatcatgtgagactaatggatgttgggtactatgcatatt

SEQ ID NO: 137864 - DNA, 200 bp, Glycine max
  Clone ID: PAT_MRT3847_954C.1
tggctgatgggtgtccatatttgtatgcaatggtgcatgacaattcagcgcctacaacaccaagtgatattgttattggggtggaggagacaaccataaacaataggcgtgcctatggggtcaggcctggcattttttgttcttgggttttgggcaccatacctcagaccattttacaaaaaactgtgtggagtaaaatg

SEQ ID NO: 137865 - DNA, 415 bp, Glycine max
  Clone ID: PAT_MRT3847_95500C.1
gcggtctgaattgccgcttatgaagcacctgttagccagcctcaactgtctcttgagagaggccttcctgctatgagtggcacacttcactctaagactgctttccatatccatcattagcttactgacatggttcaatgtgctcacgcgcggcattttgtggttctgaaaaaaaatgggacgctccttactgaagctggaccgtgctcttacacctggaggatattctgcttcaccctcacctactggcaggccacagccttcatcacgggagaacaaaaccgatcatggtccaccctatgcaagggctgacccaacaactctgatggactcttttagctcagcaagatgaaactttcatctggctgcacaccgctgatattgcacgctatgcatctcgacgctgcgtactata

SEQ ID NO: 137866 - DNA, 1215 bp, Glycine max
  Clone ID: PAT_MRT3847_95501C.1
cgtgtctctttgctcttttcccctatctctcaactaccaaaagttagcactaacaacaacctattcctttctctccgtgtttagttctacacaaagcaccaacactggctagcaagaagggcatggcaacatgtgggagcctgcatcacatcttcgacacccttttgccagaaaagtcaaccctgcttgaatccctctcatggaaccaaataaaacccctaaaatccacagaccaaacccactccttcactgaatatttggagaactccatttcaaggagagtccttcatcttcaccatccactccccacgtttcatcaccatcatcaacacacacaactgagataacaaaattcggctcgaggcacaagaatagtgacagcttctcatccttgagttctgagagtttgcacctttgcactgagggtcttggctttgagagttcagatgatgttgaagacttcaaggatggaatgagtgagagttgtgaagtgtataaggagaaagagggtgtcaaaaggtgtgtgagttcaagggtgagtgagtaccctcctcctatttcttgcatagggaggagtgggaagccttgggtgtgtttcaggtcctacagaagtgaagggaggtttgttcttgaagagataaggattccaacacatgagttcttgcatgcttgtagagaggatggaaggctgaagctgcattttgttcatcatgaggatgaacccatagaagaagaagaagaagaagatgatgatattggtgtagaaacaatggatgaagaggaggaagaagaaaacatgggagagaaaaatgatgattaattgtgtggcagatcatgaagaaaatgagattgatgctcaagtgatgactagccacttacttgatgaaagagcagaaaatttgaatgctaaggaagatttacaaaaataagagaagaagaaacaaaataattttaagcaatgttgtgtttttgtatcttttctttaatatgttggcttttgtctcttaacttctaaagattttgtctgatggaaacaggagttgacacctctgatcgagttttcattcacatcaactgtgacttaaacttgattttcagacttgtattgataagcatgtaaatcttgttataaattttcattgcagttaaaaatctttttctgaccttgtcagaagaagtgtctttcattaatctaaatattttatatacaaaaac

SEQ ID NO: 137867 - DNA, 495 bp, Glycine max
  Clone ID: PAT_MRT3847_95502C.1
aattcggctcgagctcgagccgcagtgaactacataagaggcctcatgaggatgcagggcatgaagaaaatacctggttatagtttgattgaagtagggaacaaggtatacacattttttgctagtgatgattcacatccttcttgggcagatatttatcaattattagaaaatttaaggcttgaggtggaggcagaaggttatattcctgatactagttgtgttcttcgtgatgtaaatgagccaatgaaggttaagttgctctggggacatagtgagagactagccattgcatttggtcttttaagcacaccttgtggaagcttgattaagatcaccaaaaatcttcgtgtgtgtgttgactgtcataatgtaaccaaatacatatcaaaaatagttcagagggaaattattgtcagggatgctaatcgtttccatcactttgttaatgggatatgctcatgcaatgatttctggtaataaggacttgctgag

SEQ ID NO: 137868 - DNA, 142 bp, Glycine max
  Clone ID: PAT_MRT3847_95503C.1
ggctgcttgtctctacatcgattgccgacgggacaacgaacctcgtactgtaaatgaaatctgctctgttgccaatggagcctcacaaaaggaaattggccgagctcaagaatacatagtaacacaactggattgggagaac

SEQ ID NO: 137869 - DNA, 292 bp, Glycine max
  Clone ID: PAT_MRT3847_95504C.1
ttttaaagaaaaaaactacagcactaagccgttgataagccaattctcttgatccaaacttcacctgatgttaacgagaatactttatgacagacttaaagctcttcaagagctaaacactcgttaactgagacagtggattgagaggtacaaatgaagaactgccttgtttagactatccacgttttggaaagacaaccgatttacggcgggagcagggaaagttattttggaagcaaggaatatgttttttgggaactgaccagacctcctacaacagatgagcaaaagc

SEQ ID NO: 137870 - DNA, 413 bp, Glycine max
  Clone ID: PAT_MRT3847_95505C.1
aattcggctcgaggtggatactgagggttacagcgacggaagtgatggcaacactgcaggggctaatcaaacaaaaaggaaaagatgccgagagggaacactgaccactggtatgactcttattcactgttgcatcttgacgaacaaaagagttgtgttggattagaattatacttttggtgttatcactgtgcaatgatgtcaactagatcattgagtatggtactatggtcttgataagttgatattatcctattacttatgcacagttaatgaagttacccgagttttaaccttctgtttagttggacaaatttgatacttggatgggctttttacctggttttcatacttaatacagtcaagcttttggtgtcctttgtatgcaattatcaagaaaatgacatacttgc

SEQ ID NO: 137871 - DNA, 457 bp, Glycine max
  unsure (1)..(457): unsure at all n locations
  Clone ID: PAT_MRT3847_95506C.1
ccttgaagaganggganagccangaatctatggagatngggggcnagccaaaacagagagggaagcagngggcgaggctgcgaaagcnggcaccaagaagnnagcaacgaaaaacgctaccgngccggggccacaaagagcgcatactcnagagcagtgttttccagatgggtgaagcgaagattgcagcaagtgtttgtgttttattatgagagatatggcttcgtgttgcctcggaaggagaggtggaatggttctatatccaagctgcactctgatgttagggataggacagtcctacagagactttcctcatggtacaccagaatcaaaatcagaaaatgaaaagggttcactacgaacaattgttataatgcgccctccttgttcgtggctgctacggcgatggctaagctgatttagctatcatcagatgcgaagaaaagcaagaaagaga

SEQ ID NO: 137872 - DNA, 259 bp, Glycine max
  unsure (1)..(259): unsure at all n locations
  Clone ID: PAT_MRT3847_95507C.1
tcgctgagttcaaagacccgnggaacngacagcaggctaacattgngcncagcacaaagggccccaaccagnngaacagagacaggcnggacacagncnncagcaagaacacagagncgngcagcaagccacncaaacacncncgcaccagcaggaaggccacgcgacaaaccaccagaagccagagannnnccgagagaaagagagggagaaagnggaccaaggaaagaaaacgaaagaaacagaccggacacaacac

SEQ ID NO: 137873 - DNA, 1813 bp, Glycine max
  Clone ID: PAT_MRT3847_95508C.1
attcccgggtacgacccacgcgtccggtttaaccttcctggcgtcacgcaactatacgacgttaggcggtaggcacaaaaccccgtttcactctttgaccttcctctcgcgtcgcttccgacccaacaccgacgctcgcgtgaatcctttttcgttttcgggtatcgaaaacgaagaagcaaagagaaccaaagcgccacgcaattgcacttcttcttcttcttcttcttcttcttctttggcaactcagaatcgcttaaacaatgacagaggatagcatcgttagggtttcttcttccaacgaaacctccgcggccaacgaggcttcgcagacgcggcagagaaagaagagaaagtgggatcaaccggcggagtcattgatgccagttgggatgacagtccctggagcactccctttgagcaatgccgtgactcttggaggggttgcatttcccgccatggctccggtgatctccggcactcttttgacgaatcctctggcagcttctgctcagcttccgcaacatgcagctgcagctgctgttgccgcgcaaaagttgaatcaacataagatccaagatgaattaataattgctcgagaaattgtcataaatgatgcagagtcttctgttcgctacaagttgacaaaacgccaaacacaagaggagatccagaggtgcactggtgccatagttataactaggggaaagtatcggctgcctaatgcaccacatgatggagagaagccactgtaccttcacatctctgcaggagctcatataaaagagacagcagaacggattttagctgttgatcgtgctgctgcaatgattgaagaaatgctcaaacaggtgcaaaattcacagtcaatttcttccgtcacaccttctgctttggttaatggagtgaagatgctgagtacatgcgtgtttttgggctttgatgctgatccttcattgaacattgttgctcgtatacgtggaccaaatgtaagcccttccctacccaagtgatttatctagtcaatgttggaggttgggttcatctatgacctgatgtgaattagtctgccacaaattttataagacgattgctagagcctagaagtttttttaggtctctttcgatttgtgatgtgaccccttggtcatctgctgtttttgttttcatactactatagcctttcactcatgtctttgttctcaacttatgatttgatggtgcgaaaatacttcagtgttactaggagtactgattttccaagagttgattaagcaataaaagggcagacggactgggggactggaggagtcaggagtgttgttacagtttatggttacatgagaaatactaggaacacactctttgtcactctgttttaaacacaccctcttttatttgttgaaatttatggaaaatgaccaaattttgtggtcgcacatcatatttaatgattctctcttgattttgtagtttcaataaattttaaccaattagagagagtgtgttcctagcacttctcatatttacatatggcattgtaatacttgttaggtgctgaaagtgatattcagatggatggaattggaaaatggttcttctgatgacttttgaagcacattttgtatgaatactttaatccaagagattggggtgaaagtatgtccacacacaatcacaagtcacaagaacaaaggatgtttatcaaatatttatttacaagaataaaaaatagagactgaacattctctgattcacgccgaacacatcaatcatcaatgaataaaactgtattaccccccccccccccccc

SEQ ID NO: 137874 - DNA, 542 bp, Glycine max
  Clone ID: PAT_MRT3847_95509C.1
gtcgacccacgcgtccggctcgcgtgaatcctttttcgttttcgggtatcgaaaacgaagaagaagcatagagaaccaaaacgcgacgcaattgcactttttcttcttctttcgcagctcagaatcgctcaaacaatgacagaggatagcagcgttagggtttcttcttccgacaaaacctccgcggccaacgatgcttcgcagacgcggcagagaaagaagagaaagtgggatcaaccggcggagtcattgatgccagttgggatggcagttcctggagcactccctttgagcaatgccgtgtctcttggaggggttgcatttcctgccatggctccgatgatctccggagctcttttgaggaatcctctggcagcttcttctcagcttccgcaacacacagttgcagctgctgttgccgcacaaaaattgaatcaacacaagatccaagatgaattaataattgctcgagaaattgccataaatgatgcagagtcttctggtcgctacaaagtgacaaaacgccagacacaggaggagat

SEQ ID NO: 137875 - DNA, 487 bp, Glycine max
  Clone ID: PAT_MRT3847_9550C.1
gctctaaacctatacccattgaatgtatactgtactgggcatcgttagagttcccatggaaggactccaaggagaacagctcccattggacccttcatgactacaacaggcctttctcatgctatcttctacaagtgggctcgagaaccctttgataaacaatttacctctgataagcgcctctcaccttgtgtgtgataacattgtgagaacactaatggctgataccattctcatactatacacttgactttaccaatcatgatcacatacccagcccacgtagccgacctcaaggacccttctttctacatgatgtgttcttgtgatacttatcagaattgagtactgagagttctaacggaattttgtatctagtgcaattcacaccttcaattagaactcatgtgatggcatcctatgtaagctatagtgcatagatacattgatgacatgaaaatactgtggatcccttgatactcactta

SEQ ID NO: 137876 - DNA, 435 bp, Glycine max
  Clone ID: PAT_MRT3847_95510C.1
gcccttcctttttttttgggggtttttcttaaacttgcctcctttcctcccccattttggtttttctttctggggccccccttatgtctttcaaaatcagggactttcattcaaaaaaaatggttaacccccgggttcttaatttaaacctgaattcccaggcgttctctctggggttgagtcccagcctgggacagttgggcctgatccctaggggctttaaagagggcttctgcccggccatggtttgggaagtccacccctaccaaagggcacctttgggatcccctttttttaacaggacttggcaatgatctcaccccacccctttggtacttctcttaaacaaccggcttttgtcattctctaaaagaatcttgcctgacctttttggggccctttatggcccggcccaagaggttcttttttaaccgg

SEQ ID NO: 137877 - DNA, 221 bp, Glycine max
  Clone ID: PAT_MRT3847_95511C.1
ccgagatcaagcactctcagacaaggcggatactcgtcctcggtgtggctcatggcattgattaggcgagtccagttgtcagcgacataattcgtacacccggtatagcgatggagttggacctctgagttctctaactctagctaggattgagcaacaagaacaagtatcgtactacgaacgagttggaagtaggagtggtttttggcaagcttttgagt

SEQ ID NO: 137878 - DNA, 201 bp, Glycine max
  Clone ID: PAT_MRT3847_95512C.1
tacaaccaccacaatcgctcctctactcttctgtacctgtgcttgtctcatcttcttctccgcttcattgtcagaagcaacagtagttggttatggctacaccatctcaactgtcaacaattatcccataaagaattctttgactgcaaaccttaacctcatcaaatcctcctctgtttccggacccgacattccacacct

SEQ ID NO: 137879 - DNA, 354 bp, Glycine max
  Clone ID: PAT_MRT3847_95513C.1
gagtacatagagaaaatgagtgaactctggaaaggaatcatgtccatttttcgcacataccacagtgaactattcttcttgaacttctcctctgtgaaccgaacgtgataaaattcaggatgagcctgatctgtcatatctagttaaccctgtcagaaaggcgcgacaagttcctcttctacatggggctcaagatgaagctcgagctattaaaccgtcccgtccccgtcttcgactccgatgaacgcccctgcgagcgcctcatgacctactccggggacatcgacacctacgctcctggcgactcctacgacgtgtcaatggaggagagcgactttcggaacctgctggaga

SEQ ID NO: 137880 - DNA, 530 bp, Glycine max
  unsure (1)..(530): unsure at all n locations
  Clone ID: PAT_MRT3847_95514C.1
tgggactcagattcggatcatgtatattctctctgattctgtggtatatagtgtataaaagcaccacgtcggaaactgccaaaaggcacatgtnaaaaaaaaaaaaaaaaaaaaaaaaaaaaaaaaaaaaaaaaaaaaaaaaaaaaaaaaaaaaaaaaaaaaaaaaaaaaaaaaaaaaaaaaaaaaaaaaaaaaaaaaaaaaaaaaaaagaaaaaaaaaaaaaaaaaaaaaaaaaggggggggggcttttaaaagaacaagagattaagggncgggggactggaaaaaaaagcttttttttaggggccccaaaatacaattcccgggcccgggttttaacaaccccgaagtgggaaaacccccggggtcccccaatttaaggcttgtaaaaaaacccccctttttcaatgtgtggaaaaaaaaaaaaaggcccaacaaaacccctttccaaaaatgtggcgccccccaaaaggggaaaagggaccccccccttttaatcggcctatataaacccgggggggggggggggg

SEQ ID NO: 137881 - DNA, 503 bp, Glycine max
  Clone ID: PAT_MRT3847_95515C.1
ccacgcgtccgcggacgcgtgggtcgttatcataaattgtatctgtggcgcgcattgattctcatccaccaatggcgttcaccgtcggcatcggcagcggtggggctataattccctgcggcaacagaaccaccgcaattccttacatccgtggcggcggtggtggtctcctcttccctgaccgaacgagaagcagaaacctccacctccacgtggcgtgcgcgaagaagaagaagaagctcctagagaagatagaacttgaattctgggaatggttcggcaccttcctcaagtattcctggattattgccatcgctgtcgcggtaccaaccaccctcttcaaccttcgtttcttcttcccaattggattagggatttcttaagttatgtttccataaatacttgttatatataagtaaatataaagtttcctcaaaatcagcttatagagacactatctgagaggatttaccctgttaatctttgttattattgttgtcatc

SEQ ID NO: 137882 - DNA, 182 bp, Glycine max
  unsure (1)..(182): unsure at all n locations
  Clone ID: PAT_MRT3847_95516C.1
ggaccaaatttcccacggncanatttgggncatggttgcttnaggaanaggccctttaacaaccaatntaattttgggcaccctaagggtaaccctaattgttatttnatntcctcgtggttattattanaggaaaaaggcaccaaatgggtntggttgaacgaaaacttnttntttccctt

SEQ ID NO: 137883 - DNA, 166 bp, Glycine max
  Clone ID: PAT_MRT3847_95517C.1
tcgaaatttgccacagactgtacgtcgcagagcagtcggcgaaaactgtaacacgattgacgcacctattgatggttgtttttcaaggagtctttcgaggcctgcgagatagcagtcacataaagcctttcaataggaaaagaggacagatgggggggagctagac

SEQ ID NO: 137884 - DNA, 319 bp, Glycine max
  Clone ID: PAT_MRT3847_95518C.1
gttctagatcgcgagcggtcgccctttttatttttttttaagagtatcattttagggggaaggcatgaaacatgatgatgcctatcgcacaatgtggtctctatacaaataccagcgctctattgtgcgaacaatatacacctaaaatgcacagggtgcctgcctgccatatcatacctgcgcatcatcgcattaagaaccttgcgtgaagagtgcttttaacaaccacagagcctcatacgaccggatcggtttacatgagacacgtgaagacttacataatgtacaaacgtatatgctggacaccttataagcgatg

SEQ ID NO: 137885 - DNA, 256 bp, Glycine max
  unsure (1)..(256): unsure at all n locations
  Clone ID: PAT_MRT3847_95519C.1
ctctagcctgatggaatctgaatctcttcatccgacctagacatattaataatacgagctggcaatccagtatgggtcaacgctacctgacatctgaagtgctttgcttttggtatcaatgcctcgaacagccagaggaactcccttgcgngctcgaaagacaccgtgataagccagatacctagtcaagtgcaggagcttgacgtccctgcgtctgcataagatattgagaacctcataaagagccatggtgagt

SEQ ID NO: 137886 - DNA, 383 bp, Glycine max
  Clone ID: PAT_MRT3847_9551C.1
ggcccccccaaaccaaaagaggtgtttatggggggagagaaaaaaacaagggttggggggtaacattttaaaaaaattcccctccaaaaaaggggtgtcaaagggggataaaagaatttaacaaaaatttgctaaaaaatacgggtaaacccaaaaacggggcccgccaagggggtgaaaaattaacctcattcagtgccccactcaagggattttccctaaagatataacgttttaagtccaaaataactagctcaattttgggatggaaccagtttttttattaaaaaacctgcctcttgaacgggtgaaatgttttgaaagccttcctctcaaagagttatgccaaacttttcctttaaacccttttctttttccaccgg

SEQ ID NO: 137887 - DNA, 492 bp, Glycine max
  Clone ID: PAT_MRT3847_95520C.1
tttctcttcaaccccacaagaccacaacccattttttctcccttaacctcaattttctcatcctataacaaacttttttatttcacgttgtttttaatttataatttctcgtgatgggcaattacatttcttgcactttggctcctcctttgatgaagaacacaagggcaaagcgcgtgatcttccctacgggcgaagtgaagcaatacaaggagcaagtgatcaatgccgcggaactcatgctggagtgccctactcacttcttaaccaattccaagtctctacacatcggacgccggttttcgcctcttggcgctgacgaggagttggagtgtggcaacgtctacatcttcttccccatgagaagactcaattccatggtcaccgccgctgacgtggcggtgctcttcatggccgccaacatggccacaaagcgaatatctagtcgagaagatttaatatcacgtgatcactcaattgatgttattggaa

SEQ ID NO: 137888 - DNA, 386 bp, Glycine max
  Clone ID: PAT_MRT3847_95521C.1
tgctatttattaaacattcgacaaagcaaccgacattaacaacctaagacgccaacgggagaagaactacataccaacttataagcaccgttttggaacaagaccctaatccccagcgacctacctgaatgacttacaaatcaacaaaaccgcaccacacacaataaaacccagagatcctgtgtctaacacacatggcttttatttgccgcaccgaggctttcatcccagcatttaccaaacacatccctcttagaaacactatttcctacacgggagtcatcaaatatcttgggaaccaaacaggctaaaatagaaaccctcgaaaaatgagaaaacaagatctctacggcgcaaactttctctgacaataggatggttcaaaa

SEQ ID NO: 137889 - DNA, 358 bp, Glycine max
  Clone ID: PAT_MRT3847_95522C.1
ttgttctctcttacaccctaagcccattcttttggacattgttgcataattgttctgagattcctcaggtgagatgaggaataacacctctaccgagtcgtctatattgctgagtgacgaagctcacgccctgtatgactgctccttgtgacacaatggacactgacaccgacagcgaagctgtctctattaagcagcggtcgcatataccttacatggacgctgtcggagacggaggacaaaaggtaaacctagatcattccgttcgcatcgaaaacggcccatggaaaagcgcctatctcccacatcaagcctggacagaagcacttgtatgcgatccccaaaacttcacgcagga

SEQ ID NO: 137890 - DNA, 233 bp, Glycine max
  Clone ID: PAT_MRT3847_95523C.1
gaactgtcgatcatacttctactctccgaatccgctacacttgcatctcacatgggtgcaagcaccaacactagcatattgaaacccctcatatttcatcacccagagcagcttctgtattcccaccggtcttatctacgcttgcacaccaaatctaagacccactgcggagcgaattctcggccgatggtttcgaaagccacggcggctccctgagccttgaagacagaaaa

SEQ ID NO: 137891 - DNA, 337 bp, Glycine max
  Clone ID: PAT_MRT3847_95524C.1
gcatgtaaaaaaggtattatagcttatagcctaggttatgtattacatacattgttcttttgaggagcacatgcatgaatttagttttactacatgatggtatctttttataatgcaaatgtttaccaattgaacaaactagattgcaaggtttaacaccgtagactaactgattaagggtcgcatgcacagtgttgtatttcacataaggatatagagcttaagctttcactctaaaagaagacttaatttcaaagtgtagctgatccttctttacatatgaagagtggagtcttgtctggattacattcacggttggtgcggactctataagttg

SEQ ID NO: 137892 - DNA, 1254 bp, Glycine max
  Clone ID: PAT_MRT3847_95525C.1
cgcttccgcttggttgcagagaaacacaaacactgaaacactcaagtgagttcgatagtatatttgtttttctttttcacaaagatggtgagaaccccatcttgtgacaaaagtggaatgaggaaaggtacttggactccagaggaagatatgaagttaattgcttatgtcactaggtatggctgctggaattggcgccaactccccaagtttgcaggtcttgcaagatgtgggaaaagttgtagattgagatggatgaattatctaaggcctaatatcaaaagagggaacttcactcaacaggaagaagaatgcatcattagaatgcacaaaaaacttggtaacagatggtctgctattgcggttgagttaccaggaagaacagataacgaaataaaaaatcattggcacaccgcactcaagaagaggtctcaacaaaacacactcataaatgaagaaaccaaagccatcaaatcaaagaataaagaatcagttcacaacaacggtgtatttgttactcttctagcaacttctcagatttcagataattcatcattatcgccagtttcatccacctgcagcgagttttcctccataacttctgatctttccactgctgccagctgtatggaaaatttggtgtttgaagatgatgacttgggttttctggatttatacaatattgatcctatgaatggaaatttgtggacagaactaaatctcgatggcatttccttcaatacaccatgtgaaatagtttcaggagatactaatagcactttccaaagctcaagttctagcaatagcaacacccttgattctccgcatcaatcaaccagcgaaagtattgttgtgaataatgactttggtcgctttctcgattcatacgaagaggcaacagtcgataacttttggacacagtcatatgtagctgacatgtcccacgttccaagcgaactatttgttccctccgtggcagaatctgaatattttactccattatatgatgatctgtggggtcaaactcatttgtaccatgaaaatcattgcttattctgatgaacaaaattactccatctctagagatcaatagttttgagagtgttattagagttggtgattccaattcttgatccaacctagatggatgaatctttttatatttttggcttaggggtttgtatagtattgtagcagttgctctcctatatttctcttgtaccaattttttataaagtgaattgcttctgcttt

SEQ ID NO: 137893 - DNA, 394 bp, Glycine max
  Clone ID: PAT_MRT3847_95526C.1
agctccccaagccacaagggtctgcggcatcaacgcttccctcaaagacgttggactcgctgttgtggccactgatgcgagcgcagtactagctagcaacgccctggccatcgaggtgacactgggcactgatgacgggtctgtggttttctctgccaactctatctacgtggtccctggggaaaggatcgtgttcaaaaacaacgcgggcttcccccacatcgctgttgccgacgaggacgagatgctgagacgggaggatgcatggagaatctccgtgagcgaacaagaccttcttaatgtgggtggagagaggtacacggccctttggatgtcgagggaacctacgcgtgtactgctccctcaccagagagccggtcttgtgggactagtc

SEQ ID NO: 137894 - DNA, 276 bp, Glycine max
  Clone ID: PAT_MRT3847_95527C.1
gctcgaccgcactcgtccgctcacgcgtcctatcttcctttacaactacatccttaaataataataaggacctactataaggcttctttccatcattgtggtggtacatctatcctattactgctacttaatacaaaaacacatcatatctcaaaaccacatgacaatctcttacattcaaaaaatgcctgttacaatcaaactacaacagcatatataaagactactatgaactatcatacaaacactgtatgatatactgaaacgtttaatact

SEQ ID NO: 137895 - DNA, 356 bp, Glycine max
  Clone ID: PAT_MRT3847_95528C.1
tgttttttttttttttttttttttttttttttttttttttttttttttttttctttttggttttttgttttttttttgacgacaattgaaaaaccgcttattttttggcgatgttggaagacccgccctctttacccgggatcacaagggggcgtttccgggcccctggtccgtcttggttcctatttagaaaaaaacaaaacatggggggaggggtctggaaccttgtgtttcaacccggcggggggggggggaaacctttcgggactcaaaatagggggggccccccccccatttttggttattatatggggggggggcccaattttctttggggggggggaggaatttttttc

SEQ ID NO: 137896 - DNA, 237 bp, Glycine max
  Clone ID: PAT_MRT3847_95529C.1
ccttcgtgtccggtgagcgagcgcgaccaaaaaatcctaggtactgttgaccaagagactcatgattaatgttttgaaaggaaccaagtggatgataccctcgaggaagctactgacatgtggcaaacaaaaaggttctaggggatcggcccgcgtccagaagaagcactatcagtgcatgtgagggtttactggatggaacttcaccgctaagatgtagaacaggttgaaggagaa

SEQ ID NO: 137897 - DNA, 457 bp, Glycine max
  Clone ID: PAT_MRT3847_9552C.1
atatcacctgtccccatttcttgttctctttcctatcccaccaatttaaaaaatatctcttctccaaaaacaaaaacaaaaaaattaacagcttggaagtaaaatattatttttcattgcatgtcatgttttatttggatagacagaaaagaggacaagtaattccaattcaatttgcagttcaacaaactgtctaactcaccccatttaaataggtccacctagataaataatcaaaacaatcagtaactattaaaagaccataaaagtataattcttcttctctagggtattcagtataaacaagaattaggatttcaattaagaacaatacttgaataagtcataaaagtaaatctaaatctagactacttggttgaacaggccatgaagttcacctgcataattggcctagtttaaccaccataaaaattattttaacattcttttgttggat

SEQ ID NO: 137898 - DNA, 1608 bp, Glycine max
  Clone ID: PAT_MRT3847_95530C.1
ggccaacactgaatttcatagcttgaatccaagttgggaagaaaacaatggtttcagcttcgcttcaattctggtcttggatagcacctactcctatatcccaccgttacacccataaatttgcttccctaacctcactcaaattagccactcctgtttcttctactaataccgtttatcttcccaagcctctagttgtgcgttttgctctaactgagtccgactcgcccaaatccatagaacctgaccctcaaactcttctccaagaaattgctgacagttttgatcttccttccgattacttttcaaagcttcccggcgatcttcgattagacctaaacgacgcggcgttcgacctttcaaacggacctgttttagatgagtgtggccaagagttgggagagactttgctgaatctctctcgagcatgggaacttgctgacacatcaacctcccactctttagtgaaaaagctccctttgattgaggccaagctgacgggttatgccaaatcagcacttggaaagcgtttggtatctgccggaagaaggtttcaatcaatgggacagtatggccaaggtgagctgcaaaagattgcaaaagcaatgattgcagctggtagagttctgactgctagttcaacgtcagcagtgatagttgaagaacccaaagaggaagctagggtgctgaaatttggagaattgcaggttgaagtaaccccagataaggccaatattggggctgtaattgggtttctttttgggattctttgttggcaaatagcgcggggagttcaaaacgttcctgacagttcattgcagtatgcaaatgacaatgctttgctgcttgctaagtctttaaagggagcattgcttgctatattctactcctcaacgttcttgtctgcatttacctcggtgggacttgttctacttgggttacagctcaaatcaaagaaaaataaagattgagttctaggtgtgcccttccctcagttttgcttgtaaatggagtagatgcacggtctacgtttgtgagtaataattgtatattattaaagtatataactcatcacatggttgtaaaaactttgttggcaaatagcgctgttggttcaattcgtccctgacagttcatgtcagtatgcaaatgacaatgctttgctgcttgctaaggtgctttgacataacttctcacttgcatcacttcaacttgtttctgttgactactggtttctgatcctcactaaatgttcggctgcagtctttaaagggagcattgcttgctatattctactcctcaacgttcttgtctgcatttacctcggtgggacttgttctacttgggttacagctcaaatcaaagaaaaataaagattgagttctaggtgtgcccttccctcagttttgcttgtaaatggagtagatgcacggtctacgtttgtgagtaataattgtatattattaaagtatataactcatcacatggttgtaaaacaatgcacatagtagcaatacttttgttcaacttggacctatctagatttggttgattttctttcatctttcctgccaattttctaacgtggaatagtatgtttacttaacg

SEQ ID NO: 137899 - DNA, 164 bp, Glycine max
  Clone ID: PAT_MRT3847_95531C.1
gaatccggtcgcccactcgaagggcaatgcgatcttaatttttcatttcagaaagaggtccataggaaagctgagaatgtggttttggtcgcaggtagcttgtgcaccacaaacggaaggaaaggttccattccctattcacttaccttttatgcgtaactcat

SEQ ID NO: 137900 - DNA, 746 bp, Glycine max
  unsure (1)..(746): unsure at all n locations
  Clone ID: PAT_MRT3847_95532C.1
ccacgcgtccgggccaacactgaatttatagcttgaatccaagttgggaagaaaacaatggtttcagcttcgcttcaattctggtcttggatagcacctactcctatatcccaccgttacacccataaatttgcttccctaacctcactcaaattagccactcctgtttcttctactaataccgtttatcttcccaagcctctagttgtgcgttttgctctaactgagtccgactcgcccaaatccatagaacctgaccctcaaactcttctccaagaaattgctgacagttttgatcttccttccgattacttttcaaagcttcccggcgatcttcgattagacgtaagttccgtgcaatgctttgctgtgtccgttcttagcattatcatgcaatcgtttccattgttaatcaatagcaaattaaagatgcttccttgctctgaatcgtgtatgtttctcaattttgtgaagctaaacgacgcggcgttcgacctttcaaacggacctgttttagatgagtgtggccaagagttgggagagactttgctgaatctctctcgagcatgggaacttgctgacacatcaacctcccactctttagtgaaaaagcttcctttgattgaggccaagctgacgggttatgccaaatcaggtaaatcgatgagaaagtaattgatgagtttttaatcgaacacttcctccaaaaaanaccctcccctaaaattataaaggattttagcttg

SEQ ID NO: 137901 - DNA, 302 bp, Glycine max
  Clone ID: PAT_MRT3847_95533C.1
aaattctacaacgtcataactagcaaggtgggggcccacactgggttcctgtgcctcgtaaggttgatgagcacatgttcattaccattgggttcaacacagaattttgtgattccaagaatcccaacaatgcctcgtgtaagggcccaaatggtcaaagattttctgccagcatgaacaacgagtcatttgctgttcccgcgggtgtgaagttttctttgttggaagcattctatgaaaacatgagtggagtttacactacggatttccctaacaagccaccagttatgttcgacttcaca

SEQ ID NO: 137902 - DNA, 109 bp, Glycine max
  Clone ID: PAT_MRT3847_95534C.1
gggatcgcctgaagctctgtttggtctatcggattcgtttgtcgatccaaagaacaaggtctatggcgcttactttttcgtgaatggagctgacacgttccgagatccc

SEQ ID NO: 137903 - DNA, 246 bp, Glycine max
  Clone ID: PAT_MRT3847_95535C.1
gattcacacaactaactaataaagtcttccatatccccccataaatgaagagcaccatcttctttgctctctttctcttttgtgccttgagcacctcatacctatcttcatccatcgctgatttcgtgctcgataatgaaggtctccctcttgacaatggtggctcatactatatcttgtcagacataacaccatttggtgcaatactagcagctcctacgggaatttaaacatgccctctcactg

SEQ ID NO: 137904 - DNA, 343 bp, Glycine max
  Clone ID: PAT_MRT3847_95536C.1
ggaaacttaatgcatgggtcaagtaacaccaagcgggatgaactggaagggtttatacaggagatctgcagacggacagtttgttcaagaaagaaaaaattttagagtctagctttccgtcgggcccattaagatgaaagcattgttagcataacgtccaaaatgttgccatacccatctcatcagtaacatcattatcaaattgcactactttggattgtaagctaatttaaatcaaggactacatttagattgacgtggtgttctggtcaagactcatgtggttgcacaccaactactggtaagacaaaggaggcagttacgggggctctaatagccgaac

SEQ ID NO: 137905 - DNA, 242 bp, Glycine max
  Clone ID: PAT_MRT3847_95537C.1
ctcggagttctgctcgagctgctcgactttataaactgattagtaaccccatacacatacgcatctagattcttccgcgtggtgtgaatatgcgttccgcacacaccactctccccgtcttaattcgacgtttcctcactctttcactctcttgtgtcagctgcgatatgcaccctcaatttagccagattaacatctctgttacatggaggtgaaacaaatttgttgtcgagaggaatata

SEQ ID NO: 137906 - DNA, 774 bp, Glycine max
  unsure (1)..(774): unsure at all n locations
  Clone ID: PAT_MRT3847_95538C.1
gactctcttgtaagcgagtgaacataattaccaagtgcacatatagatatatgggcatgatgagaatgagtggacttacatggtcagtgctaaagagtgagctgtgaaatagaggggagagaaagagagagaatggaacaaattccattgtttaatgagaaaatgaaattggctcagaaagcagccatggctaaacgatgggaagacttcaagaaaataatgaaggacgaccaggagaacttgctcaagcagtttgatctgtttgagaacagtgccatccatgttgcaactcgctctaacagcccacgactcctcagagaattgatagagatgttaccaaaagaagaaaggtggcaagctttgtgcaaggaaaatcgcgaagggaacacggttttacacgaggttgtgttttgtaagaagaagaaaatggctgatgttgtgtttgagattgaagatgagttgttattgcaacaacaatcatcatcactagaggaaaagagaacattgctagatatgagaaaccaccgaggtgaaacccctttgttcatggctgcaatgcatggaaagctgaagatgctcaagcatatggccaaccgtacaggcacacgaaatatggaagattttcgaaaacatttgcatcgatctgacaaatattctgctcttcatgccagtgtcatggggcaacattntgatgttgcaatttggctagtaagaatgaatagagaacttgctatgganaaggatgagaaggaattaacttgtcttcaattactt

SEQ ID NO: 137907 - DNA, 1343 bp, Glycine max
  Clone ID: PAT_MRT3847_95539C.1
cacatgaatctcataattagtcttttttgtaataagttgataagttccaataagcttagattaagattgtttgcaaaactgttccgttgaacataactatgattttctcaaaagtaaaaagttacttctacgttcacgcctataattgtattttcttcattgaacaagttcatgcctataaatatgttttcttcattgaagttttcatcggatatcaaaacatgcactaaggcttcttgttcgatgtaaaccttttggacttggatgacaagcttgaagtctccttgaatgctgatgggcagaacctatttacactacaatctccacagtgaggccgtagaggagtacagattgctcgtccaaatcctaccaaaagagtatttattggaacccattcttccttcggaagccaccgttgcagcgcttgtcttgtttcttccggtgtcaaagttttctgttttgagcctggtctcgaaacccatccaagacgattgcaaatgcggtggacatgagtatctacacatatcccttggacattgttccatccaacaatcataaccagatgagcaatcttaggacctactcctggcagcaagagtagttcctcaattgagcttggtatgtctccatcatacttcaagagacaaatattggcaattttcttcaagttactagcttttcttttataaaatccaacagggtaaattaactttttgatggtttcttcatcagctttgtccattgcatcagcagtaagcagatcattttcaccaagacgttgtgtcgctccacgagtaacatgctccttagtttggcttgataaaagggaagatgtcaggacagcaaatcttctttccttagggggtacagtatcagcagctttctcacgtgaaaccggttggtgttcatctgcagaactccgcatttggcgaatcccttgaagaaccattttccaatgtgcaggggcctcactactaatttgaggcaattcatttgtgcaaatcatcggatcttctggaaatttctgatgggagactgaagcaggagtgaaagtatggagatgagattttgaggaaaagcattttcttgttttggcacacaccgaggagacattgattcgccccaaagaaaccaccaacattgttgttgttgttgtttttatgtcatgtcataataatcaaattcaaaacttgattttgtgttttttacaaatttcctcgcttccgaatttcatggccagagattggttcacagaaattatgatatttcactcttcccttccaaacgtcacctcgcccgcaacgaccagtaaactaaaacccgtgacttcaccggacgcgtgg

SEQ ID NO: 137908 - DNA, 984 bp, Glycine max
  unsure (1)..(984): unsure at all n locations
  Clone ID: PAT_MRT3847_9553C.1
cctatcccaggttttggtcaagtcccaagtaccacgaagagaggtttaacagctatcaatcggtgctttgtggtctttcttggccttcagacagaatcatcatacaagttcttgatgattctactaacccaacaatcaaggagctggtgcaaatggaatgtagtagatgggcgagcaaaggggtgaacataaagtacgaggtgagggacaacagagacgggtacaaagcaggggctctgaaagaaggcatgaaacgcagctacgtgaagcaatgtgactatgttgccatctttgacgctgattttcaaccggagcctgatttcctctggcgaactgtcccatttcttgtcaacaaccctgaacttggtctcgttcaggcacggtggaagtttgtgaatgccaatgaatgtttgatgaccaggatgcaagagatgtcactggattaccatttcactgtggaacaagaagtggggtcttgcacttacgccttctttggtttcaacgggacagcgggtgtatggagaatttcggcgcttaatgaggctggtggatggaaggataggaccacagtggaagatatggacttggccgtgcgagccagtctcaaaggatggaaattcttatacttgtctgacttgaaggttaaaaatgagttgccaagtactttcaaggcctaccgctaccaacagcaccgttggtcttgtggtccagccaatctttttaggaaaatggtcatggagatcataaataacaagaaagtgtcattgtggaagaagatacatgtgatttacagcttcttctttgttcggaaggtcgtagcacacataaacacgtttgtgttttattgcattgtattacctgcaacagttttggtgcctgaggttgtggtcccaaagtggngagctgtctatatcccttccatcatcactattcttaatgcagntgggactccaaggtcactccatttgatggtcttctggattc

SEQ ID NO: 137909 - DNA, 847 bp, Glycine max
  Clone ID: PAT_MRT3847_95540C.1
gttaagatccttgttatcattcgttttcttttgagtctatgttcttgtttggtgtcaaacccgtaaatttttttcttctagtaatgatataaaattgttgatgaataagatggtgggtggattaggatcaataagtccatcgttgctcatttaatgggtattttggttttctgccagatctgattcaattccgaaaattcggaactattgataattccaaattcactatcctttatgtgaagctttctatatttgtccaagtatatgcaatcacctatccccacacaatctctatcgatctatttctccagcttttaatttgctgaatatttttcattctttttgtttcaactttagaatgaagtatctgcacagatgctgaagccaataatgagttgattataagggaattttatttcaaacctctttcacttttgaagggccaagacgaagcatatctaaagactaaattatggtttatgatatgaggattgtgtggctgtaattgctgctctcttcaaatatcagtaactgtgcaggtcgttgaaacttgcaagttgagcagggaatgtggtatccatgtcatcattatcattaggagatatttttggaacaactgctttgaatttatcatcaattttaaactactactcagtctgtaaatgttagcccagttttaggcacgaggcgcaaattaaccagttggaaccaaaaaaatatgcttttactattagaattttgtgttcagattctgaaagtaaaatttccttgtttttctttttgatgtgtaagattattggtattcaaagttcagacactgtcaacattcgattggtaactagtttag

SEQ ID NO: 137910 - DNA, 377 bp, Glycine max
  Clone ID: PAT_MRT3847_95541C.1
gttaataccatgcgcatgcacagaatggtttgatgctataccatatgatcttgatccaggggtcttaactgttcgaggggcacactacatatggatgattatggccatggttggatcgctactagctacattgacctactactggatgattaacatgcccgaaaccgcttatgataccgctctagggaccaataacacgaggcttgcagctgtagactatgtctcatagtttgcctgtttgaaatcaagctgaaccacaagactcggagcatatggctaactcatatggctagacctccaaggactttctcagtcgtcatgtactgcatctactctgtacatctcagcacatggtacttgctcgatattgcgttcta

SEQ ID NO: 137911 - DNA, 439 bp, Glycine max
  Clone ID: PAT_MRT3847_95542C.1
ggctcgagcggctcgaggttgaagcccctcctgcagtagaaactaaaacagaagaagaaacaagtagtgttgtcaaagagagggagactttaatttggttggtttgcactatctgttttgtatttttatagggttcacaacaaacatgtatttcttaataataactgacaaagttgtttcttgtttgtgtaaaaaacgaatgaaagaaaacacacttgtgaagcaaactacaaaacaagtaattaaaagaccggggggtcccccctgtagacatttcagaaatcttggattaaattccagacccgtgcctggtcaaatgaccatggttcactgatctcgattcaatttgaggcttggcttctccttgtggataccttgagagtgtgtgaaattgtattccgttcacagtctcccacaatatccggacccgaaagtttaa

SEQ ID NO: 137912 - DNA, 1134 bp, Glycine max
  Clone ID: PAT_MRT3847_95543C.1
agatggtgcaggttcagtccattaccttgaagcatctctccctaccaacccatactttcgttcctccaaagttcaacattcctttgaaccgcaatttgtctttcacgcctaaattcacattctcaacatcactctccgtcagatgctaccaccctaaccttgtccaacccaagccattcccaccactgccacaacgccctccagttgcagaattgccacagcaaagggtgtacgtgggttactccgtttacacgaggaagggcgtgctcaccgtgactcctagacctccggaatttgaatcgaaaagttctggggcgttcaaagtgtccaaggaaggttatgttgtgctccagtttgctccctcagttggtgctgatgagcccatatatgattggaaccaaaagcagatattctcacgtgggtttttgaatgagccttttctaattcattttggtgtaagggatgtagattttatgaatgatttattttttaagtctatgagcaatgaaattgaagttagaaaagttttgaaggtggagccacttctggatgctactggccacttatttagcttaagtaattctctttattcttaaacttttgtttctgttattggtatcattctgattttactttcctgccatcttgaagttgttaggatactctgtacttccggtttgattcagttcacaaatcagtatttggtgtaaactgcaaatagattgcttagtgatgcaatattttaacagtgatatgactcacttcaaggtttagcttacccatttttatgccaatacctgcaatataaaggaaaaatattaaatgctataaacattaaagctggtggaggcagtgaaggttttttcatggcagtgcaacaatttaagggggagcctgacatatcctctttcggggtggatgtagggattcagagttaagagaccgcagaaaaagtaattggtgagatggggagtaaaagaaatggtgaaggaggtatcgtattttttggtattggagtgttcagtgtgtggagggtgaagtttgttcttttaatcttgtattattaggaaaaagtccgatgatgaaatcttctttaaggtgtgtttctggaaagttcacagcagtttggaaatg

SEQ ID NO: 137913 - DNA, 362 bp, Glycine max
  Clone ID: PAT_MRT3847_95544C.1
ttccgctgtcacatcaggacacacgtcgatagtgctgcgagaaacgacaaaagggggttctactgtgtgactgtttgttgttgtaactcgttcatcatcttttgttgttctgtgtttgtgtatgttttttctctcaactgaaaatgtcttgctgcggtggtaactgtggttgctgaagctcttgcaattgcggcaacggatgcggaagcatgcaagatgtacccagacttgagctatactgagtcaactagcaacgagaccttgtgtcaaggtagtggcacactgttaaggttcaatttgagggtgctgaaataggtggcccgctgagaacgatagttgcaaatgtagaccaaactgctcct

SEQ ID NO: 137914 - DNA, 2444 bp, Glycine max
  Clone ID: PAT_MRT3847_95545C.1
gtcttataagattaggttagaaattttatttgaaaatgaactccgataatcaacaacaatcggaggaaccaggaaatgcacaaaaatcactggagcattcggcagatattgctcaaccacaatccccaaatcaaacaactgctggaacatccactttgacggcagaggacacagaaaagccaaaatgtgcggtttgcggtgaggaaaatgccaaaatgcattacggtgttttggcatgcttgggttgcaagggcttcttccgtcgtgcactgaaaaagctgaatgaatatgaatgtttgcgcaacaacaattgcatcattgataaacaggaacgaaattcctgccgatcttgccgccttcaaaaatgtctcgatgttggaatggatccagcagccgtccgtcctgaccgtgatttcactggcaaacaacaattggcccgtcgattttcccattcaaaaggaagcagcaaccataaatcctctcagccaatgggaaaatgcagtggagagcgaaaaggaggaggaagggatgaggagaccgccggcaattgggcacatcgtcttccggtggaaatgcgcacaatggtgatgactttgcagaatattgaggcaaaggttgttcacggcgatacggcaaaagatgcagcagaaatttatccattgagggtcaacacaatccgcgagatcatcgaagagccaaccaaattgaggggaagacgcaccgaaatgcgctatgagccatacagaatggcaaaaaatgaggaattttcggtgattgtttatcgtcgactgattgccgccattgattgggtcgaattgttggccgaacgaatgggtgggctttcaattgaggatcgtattgcactggtcaaatcctgttttgggcccttgacgttgttcaaatgttcggcgaggacggcggttgtgaccagcaatgagaatttgctttgcctttgcaattttgcctatgttccacgcgaaatcaacaaagcatacaatgatgcatatcacctggaaaatggcctcgtggatcggctactcaatgaattggttgctccatttcggaaaattcatttagccgaggaggaaatagtttgtgtgtcggccataattgtgctgaatccaatggcaagggatttgtcagaaaatgcagccgaaaaagtttttcagcttcggaatcgagtctacacaacactttatcaaattatcaaagaatgtcgtccaaattgtaacacaaatgccacatttggaaatttgcttctctatttgccaattattacgtctctggccaatgcaatgagcgataatttgcgttttgcacaaacattttccgcacacggaggaagtcctttgctgaccagtctattcggctgttttcccgttgaaccatttgtggattcagaaatggcattggtcaaggcggttgaggggaaatgcattgctgaaaaacgagtgcaaacagaagaagagaagaaaatcaaagcgaaggagaagaaagaaacagtgttgcagaaacaaaaacggcgcaaatccgatgcaggcacccaaactgaatggaaatcacaattgaatcaaattacacgaaaacgtcgtctctgtccattggcctctgtggaagaaagcaatgaatttcacctgctgaaggccccatgctcttataccctcacggaaatgttcgacgatcgaatcaacaattgtggtgttgacgaaattgaggaggaggaagaagacaatatggaaaagaattatggaaacaatgcaacattgccatttgggacggaaaatcggcgattgattcggacaacaagctatcaacaaatgcacctccaacaaggaattgatgagcaacaagagttccggagaccgtcagccacttggacaaatgcaccttcacaaaaccaatcacaatcgcatggtcagcaacaaacacaaaattggccacagccacaacaacagcaatgttggccaaccaattcagcttcaacttcaaagggaattcccgcgatacttcctcctaccacccaaattcaaggcctttttctcaatgagccatcatcctcttcgcaacaacaatattttcaaggagcacgacaatatggcgatagccaatggactgtgccaccctcatcatccatgcaaatgcaatcaaattttacgccaatttatttgccctattcatcttcaatttcgccacattttgcctcaaatattcccacacaaattcattattctcaatcagcagcacaatatttccctcaacaatttgccccatctttttatccacctgaaccacaaagtcaacaacaattcacatatctcacggttaatcctcaacaacaatttttcaatgataataatactaataataattaacatttattccatttcaatatgattttgtgatattaaaatgtgatttaataaatgaataaatatttgaatttt

SEQ ID NO: 137915 - DNA, 397 bp, Glycine max
  Clone ID: PAT_MRT3847_95546C.1
gcacgagaagaagctttgtggcaaggtatgaatagcctttgtttggtgatactttttgccgtgttaaatttgagctgtttagataggataatttcatgtggccaatacagctacttttagttcatctgtagcctgcccagacaattagggttatggtcaagactcactctctctgaccttgttggaatgcaagccatgtgttggaggttaatgagtgagaaaatgggtatacatgcaaattcaagtaacctggatttaactttagaggaacactgcttggtaatgaaccatggttttgaaaacaagtgaagcagagccctgactgctatgattggggttggttgtttggacacaggagcttgacttggttaatggttgtctaaccatttcagcaaaa

SEQ ID NO: 137916 - DNA, 248 bp, Glycine max
  unsure (1)..(248): unsure at all n locations
  Clone ID: PAT_MRT3847_95547C.1
tnttttttttttttttttttttttttttttttttttttttttttttttttttttttttttttagcgaggaaaaatgatctcaatctaggccttgcatttgtggcggggcttttgcccaaacaaaaaaacaaatgtgttcccgtttgacaattggcttgtagagaacctaacctgccaaattttttctttcctccctacaaagttttcaacaaggggaagggtgagagcaaaaccttttgccccctggg

SEQ ID NO: 137917 - DNA, 811 bp, Glycine max
  unsure (1)..(811): unsure at all n locations
  Clone ID: PAT_MRT3847_95548C.1
acgaggttaatttgaaagaaaacaaaatatgttatggttaacttttaaattgtatgatgttagtgcagtatacagttattggtaattcccattgtgcctctcttcagatatcatgccatagccattagagtgtactttcttcatgaggccttcccacgcgtccgataaatatacatgtttatgtttgttacattcaactacaatatcctccttgaattggcacaatgctaacccatctctgctttccctgttgactgttgcagatccgcggaagttgagactcattataggtaaatagatcgagttttccttgaacttgtttcgctactttgtgcatatttatttctcttaaccaggagtacttgcaagttgcaacacactctctaattgtattaaaattcattaaaaactacaaatttaagagagactcattaaatatattatgggactaacaaaaatttgcaattttcaataatttcattaaatatgattagaaaaaaaatgtgttctagcatttcttttaatagtacataatatctccttcattccaaaattattgatcctttaacttaaaaaaatccaaattgactgttgttatcaataagtagcttattaattttgcttaatctgtgtgaataaaccttaaacatcatttgttttagaatgaatgttgtatgaaaaatgataggaacacattatttatgcacttgttaagtttattaaaaattacaacatttntgtgggtcttaattcttatttaatgagtctcacttatatttttgaagtttccaataattattaaatatagcga

SEQ ID NO: 137918 - DNA, 436 bp, Glycine max
  unsure (1)..(436): unsure at all n locations
  Clone ID: PAT_MRT3847_95549C.1
aaaacgacgttcacggcgggtgttatagcatattccgcggagaaggagaggagaaaaaatctgagtgtgtgggaattctgtgttcttgaagaatcgcgcggcaaagcggaagcgcaggtgctcagatttaancttcaactccaactacaaacannaaataaaattaatttattctaggtgagtgattaaagaaaaacccctagcaagtatcaatgtggaagaagcatcacagcaaagacagagtgttcatcaccaaaactgagtgggcaacggaatggggagcgctaaatcaaagaaatccactccttaaacgtttcctttatgctgtcgttcattactcgttgaaaccgtctacacctatgcaggttcatatataattactcctatttgaaaatgcaacatcatactgactcttcacatagactattcttacttc

SEQ ID NO: 137919 - DNA, 1250 bp, Glycine max
  Clone ID: PAT_MRT3847_9554C.1
cttctgttaagccctctccgtgtaggtttcgacccagcagaatcacatcgcggaatcgccccacaaaaacgtgggagccctgaatcgtgcgtgttttgcgattctgacttgtttttcatttttactttttgggcctttgaaagcttaaaaacctaaacgcccaagactcaaaacaaggcagaaccgctcaactgcgccgtgaaactcttcttctcattcacattcagttgcgcgaagcaccatcaggctctgcaaatgctctgttttatgcaactctgtttggagggcacagaaggttacataccttccaatggtggatttggagggcacagaaggttacagcaacgaaacactcattaacttgactgactcaactgagcttttgtttcttaagttgccttcttccaatgattttttatctgacatacatgggcagaaattgtttctcactcttcataatgatggtaaactagccagcttcgaggattcatcaggtaaagtatatgattttgtaagctattctgctcaggagccagacgaaacagtttttgttccctctacagaaccaaaaataggaaagatttcgatgcgagtttccactgtccattaccctggtcctaaagaacttgaaaagctcaattcaactaacgcaaaacatgcacatggaaattcttctggagtcactgggacaacttcatctcgatattttcctatgcaaagtggtggagcagcttcatcaaaaggtagcagacagagaagctctctaactgaagctagtgagccatcaagtatttcaaaaagaagacacgcgtctaaatctaaatccaacttgtccgagacttcacatgagcacagcactggcatttcgtccatgtccccaaatcattctcatgaaggaaaggcaaagagaagaaaacataaggaatagtgtttcctatactcgccattggcctatttaatagtgtaatatttagaggttacattctcccaggcctttaaatatgtccggaaagactagtgctaaacttttatgttgcaaaatgataaatttaaatgtttgcattctcttttttgtcttttttttttgcaaatgttcatttgcttcagttggacaatgttcactgatgtaaggagtaagaccctttcgtgctcctatgtatacttaagggcgatgttaattttgttgtgtttctcttgtggtttggtttttttactccatataatgtttttgaaaccattctggcatcgca

SEQ ID NO: 137920 - DNA, 256 bp, Glycine max
  unsure (1)..(256): unsure at all n locations
  Clone ID: PAT_MRT3847_95550C.1
ggcttcgaagcgcctgctcaatgaactcaaggacttgcacaaagacccaccccctccttgccccacctcatctgaggacatgttccattggcatgcaccaattgtggcgtctgcttatagtcctccttcaggaagtctattccttatcactatccacttgccttcggattatcctttctcgcctactaatgcatcctttaggactaangtgtttcacccaaacatcattatgcataggctcttttgtgctgatatg

SEQ ID NO: 137921 - DNA, 420 bp, Glycine max
  Clone ID: PAT_MRT3847_95551C.1
aaaaaaaaaaaaaaaaccttctttgggggcaggggggaaaaaaaccccccccaatagggggggggggggggaaaaaaattaaaaaattggccagcccccggacggggggggggatccatccaaaaaggcccaaacccaaaagggttttttttaacaacctagggggcccgaaaggggaggcggccccccccgaaaaaaaaaaaaaccccgagaaaaggttaaaaaaacccctcatggttcaaacctgcttttaaagcgggggtatgaaaccaagggcttctcccaaaaaaaccggaaacggttttttacgggaaccggaaaccaagggggggaggaaccttttttttttttgcccccccggggaaccctccccctttagccggaaaaccctgccccggggtttctttgaccgggttgggg

SEQ ID NO: 137922 - DNA, 293 bp, Glycine max
  Clone ID: PAT_MRT3847_95552C.1
tcatcaccaacctttgcacccccttctcataaccccgcctgcgattactattattctctcagatttttcgggaaaagcctatgctcgaaatctgctgaggaaatccaacgtggatgctggaattgccacactgtccctcactcggaacctttcctcgtttgcgagttgtgccagtgcattcagcccgtggatagctccattgactattttgacatatttggggtggagaggaagtatgacatagagggtgagaatttggagggcaagtacaaagattggcaaaagaaactgcc

SEQ ID NO: 137923 - DNA, 258 bp, Glycine max
  unsure (1)..(258): unsure at all n locations
  Clone ID: PAT_MRT3847_95553C.1
tcacacactctcgttgtcgtncaataccagcatcaacagtcttgcttacttgtatatttgaagtgactgatacctcgnncnncagtctcctncgcgtcgttactnantctcgctgttcaagtacgcccaatacataataccgacaaaaccacttccgaaaatgaagtccttcgttgctgctggcctcgtggcgctgttgctgcctaccctcaggcctcttccgatggtgggtgtgcgtcctcnntggacgggcacttt

SEQ ID NO: 137924 - DNA, 465 bp, Glycine max
  Clone ID: PAT_MRT3847_95554C.1
catttgtcccactgtctatgattctctcctaccattcgctcttcccaaactttctcacccaccgtatggagcgcaagagagaacggcccgtaggctgaccgacgaggaagttccccggaagcagctgaggactaccgtcgaccgctcgcttgttccgtgaaccgaacgtgtagaagaagccaccctgggtgaggtcatcaaccgtgaccctgtacggagatccagaagtaccgaaatagctggaagcttctgatgctcaaagctttcgcttcagcgtttgggtcgagaaatcgctccagacttcagaaccaatatggggattccgacaagcacagactcacgcactctaacaacccgcttaggtttacttgcgtggccgctttgaatacactaacctttgggctattcacgctaagaggcgaaccatctatgtgctaggatatacgactgctcataataatcagg

SEQ ID NO: 137925 - DNA, 365 bp, Glycine max
  Clone ID: PAT_MRT3847_95555C.1
cgtttcgaattaccggcccgacccactcgttcggtacgtacgtatatctatccatttagcttagctagctgacgaccatggcgtcggtctggtctgtctccatcaccgccagttccttcactgccgcgcccgctcgcgcagtggtcagcaggaggtccttcaccgtgcgtgcctctctccgcaaggccactgccaccgccgccgtggccgttgccgccagcgtcctgcttgccggcggcggcgccatggcccaggaggtgctgctgggcgcaggcgacggcgggctcgtcttcgagccctaccagttcaccgtcaaggccggcaacaccatcaccttcaagaacaacgcctgcttcccgcacaac

SEQ ID NO: 137926 - DNA, 739 bp, Glycine max
  Clone ID: PAT_MRT3847_95556C.1
ggatacgtggacgaatgggaaatagctcctcgtttctcagatttgctggcaaacactagtgtgcagtttttcaaagacagagtaaaagttttgaatccctctgatcattggggaatgaatggatccaaagcatctagttgtggaggaactgttcatcttgaaagtggtcttcttattgaatatgactggctggttcttgcgttgggagctgaagctaaactggatgttgtaccaggggcaatagaatttgcaattcctttctcaacgctagaagatgcacgtaaagtcaatgataaattaacaaaattagagagaaagacctttggtacggactttcaaattagtgtggctgttgttggttgtggctactctggagttgaattggctgcaacactggcagagcgattacaaaatagaggaattgtgagagctattaatgttgaaacaatgatttgcccaaatgccccacctggcaatagagaagttgcactaaaagttctttcatcaaggaaagtcgaacttttattgggttattttgtccgctgtattcggaggctcagtgatttagagtcttcagatcccctgacaggagtagatgaaaatagtactgaagtagtgcctgattttgagaaatatatattggagctacaacctgctgaaaggggaatgcaaagcaaaatcattgaagcagatctggtattgtggactgttggcaccaagcctcctcttcctcagctgg

SEQ ID NO: 137927 - DNA, 440 bp, Glycine max
  Clone ID: PAT_MRT3847_95557C.1
accagcgtaggtacccgaacctatcaactccaacattgtgtgatgttcttttctactacactcggagttgcgacaccaccgtgcacgacgtcaccaccacaactagttcgcaagactccaaacccttctccctcgtgttgttgtttatacaattttgttcaagattttttccccttcccttgttttttgttcacgattaaagatctgtctcacctccttttgttttttgttttacaattcaagatttgttccccctccccttgtttttttttgttattgattcaagatcagttttcccatatccgttccccccttttttcaacagttttcttcttgttgttgtggtagttggtggtcctcgccatgagtttgagaagaaaaaaatgaaatgtcatcgtggaagatagcataatggtgtccagttgttgatgatgagattc

SEQ ID NO: 137928 - DNA, 623 bp, Glycine max
  unsure (1)..(623): unsure at all n locations
  Clone ID: PAT_MRT3847_95558C.1
aaactccaccgtttggtggattttcatttcatttagaatcaacaagctgctaaataaattgtgaatacaatcatgtcacatctaaatggtacaaattacacaagcctttacaaccaatttacacaagctggattctctaaaattttacagtcatacaattatcacagcagcaaaaagaatatatatttcactctgctgctaaagcaggacaaataaaataattaatgttggtcatggatgaagcgtattggccaggcaaagaaagagctctcttttaaccatagctcaaccgggactctgaggagcgtgttgatgtctgagtctgacgccgtggaatcccaatttcacaggcattgactctggctgcaaagcggagagagcagagtgattcgccagctgaagattgatcaggtgatacgttgacaaccatcaacgttttggaatccccaccaagatatggctggagaaagtgtgtcagctttgaattcctaaaaggaacatgctcctctttctttgccaaagcanatatgacatcgctcaaagacgagagactnttgttgatagcctgagtttcctttaaccggtccccaatttgccccactcctttgacggtcttttcactt

SEQ ID NO: 137929 - DNA, 368 bp, Glycine max
  Clone ID: PAT_MRT3847_95559C.1
gggggacggggaccaacccttttacttaaaataaaaaacattccaatttacttaaaaaaaagggtttcgggccccacaaccccaaaaaaaagcttctacctggggggaaaaccgggttttacgaggggccccacaccggttttgtcccaaagggggggggggggccacaacaaccacctgggtcaaaaaaggacccgtttttggaaggcaaaaatacaacggcgggggctaaaaaaaaaccccccttttaaaaaagggttcacccccccccaatttaaacaccccggggggggttgggcccatttaaacggggggttccaaaaaccccgccgggttttggtccccggaaacaccggggggggggcccc

SEQ ID NO: 137930 - DNA, 2985 bp, Glycine max
  Clone ID: PAT_MRT3847_9555C.1
ggctcgtgataataactttttttatcagtgttctgctcttggaagaaaaaaaaaaaagtggcatgcaattaacaaactagcaccaccaaaaacaccactcttccctcgtcaattttctgctctctcattaatttcctcagtgttctaagatccagagaggagcaagatggaatcgttccaaggtgacagggatgacatttcctaccaaatgggtttgatttggagccaagtgaaggagccagtgatcgtgccaatgctgagagttgcagtgtttctgtgcttggccatgtcgttgatgatgctggtcgagagggtgtacatgggcattgtcatttgcttggtgaagctgtttagtcgaagacccgagaagcgttacaagtgggagcctatgaaggacgacattgagttgggaaactcttgctatcccatggtttttgtccaagtccccatgtacaacgaaagagaggtttatcagttgtctattggagcagcatgtgggctttcttggccttcagataggatcatcatacaagtccttgatgactccactgacccaacaatcaaggagctggtgcaaatggaatgtagtagatgggcgagcaaaggggtgaacataaagtacgaggtgagggacaacagagacgggtacaaagcaggggctctgaaagaaggcatgaaacgcagctacgtgaagcaatgtgactatgttgccatctttgacgccgattttcaaccggagcctgatttcctctggcgaactgtcccattccttgtcaacaaccctgaacttgctcttgttcaggcacgctggaagtttgtgaatgccaatgaatgtttgatgaccaggatgcaagagatgtcactggattaccatttcactgtggaacaagaagtggggtcttgcacttatgccttctttggcttcaacggaactgcggtcggactccgtgcaactctttattgactttcaaatcccttgttccgctgtaactctaaggtaactcctcttgctggtcttcaggattctctttgagtattccatgtctctggcatcgaggaaaggccaacgattagtggtctactagatcggtagtcgagcgaatgaatggattgtcacactaaaagggtaaaccaccctaagagtcggtttaggataaggattcatcacatgttggaacttcttgttggattctacctcttcttctgtggctgctatgatattatgttcgggaaaaaccgctactacatattcctatacatccaatcaattgctttcttcatcatggcctttggatatgttggtattttcgatcccaacacctagaggacttgacaacacttcattcagatatctacatattgtaatagtgttcacagtataatctgtgacattaatttaaagcttgtgttagtataaatgaatgggtggtcattgttcatggttctgcatattcagagtcggtggctcgaaacagttttttttgtgaatattcaacagagatacataaggaaattacagaagttattatcttggaaatgaagcatacagaaaatgaatacagcattctacaggcattaatcttccctgggcaaacatctttgattggacacatggtttataagattttgtagttctttttttttctttttaattttattgatatttccttcttttgcctttctttacttgaatttgtttgaagaaataataatcatcttcaataaatggggtagattacagaatttaaaaaaaaagagtatggagaatttcggcgctgaatgaggctggagggtggaaggatagaaccacagtggaagatatggacttggctgtgcgagccagtctcaaaggatggaaattcttatacttgtctgacttgaaggttaaaaatgagttgccaagtactttcaaggcctaccgctaccaacagcaccgttggtcttgtggtccagccaatctttttaggaaaatggtcatggagatcataaataacaagaaagtgtcattgtggaagaagatacatgtgatttacagcttcttctttgttcggaaggtcgtagcacacatcaacacgtttgtgttttattgcattgtattacctgcaacagttttggtgcctgaggttgtggtcccaaagtggggagctgtctatatcccttccatcatcactattctaaatgcagttggaactccaaggtcactccatttgatggtcttctggattctctttgagaatgtcatgtctctgcatcgaacaaaggcaacaattattggtctacttgaggccagtcgagtgaacgaatgggttgtcactgaaaaacttggtgatgctctcaaggctaaagcaggaggtaaagcacctaaaaagcctcgattcaggattggagacaggattcacttgttggaacttggtgtcgcattctacctcttcttttgtggctgctatgatgttatgttcgggaaaaaccatttcttcatcttcctctttatccaatcttttgccttcctcatcatggcatttggatatgttggcaccattgttcccaactcctagaagggtttggcacttcattcggctatttcagcttctgtgccttcatatcaacgtgtattatagtgttttcaacatagttctggctaatcacagcttgttagtataaaaaagaaagggtggtcattctttaaggtgttgcataatcagagtcagtgactctaaagagttacttttcttgtgaatatactgcaaagatatataagaaattactgaaattcttctcatgaaagggaagtacacagaacaagaacgcagcgatcatgtggcatcgatcctactacggggagcaaacattagatggattgtttatatgatattgtagggttttttttgttttaacttttgcttctctttacattgtatttgtttgaagaaaaaaataagcagcttcaagaaatgggataagatacacagactttcattttgcatt

SEQ ID NO: 137931 - DNA, 646 bp, Glycine max
  Clone ID: PAT_MRT3847_95560C.1
agtctctcagtgctaccagccaccaccactaaaccctcgcaaagccctaaaacttcgtttctcatctctcacaaatggcttttcgttcggcttctctgtcgcgctccttaatgtccaccgctagggcctcacttcgacaggcggctccgtcgtcaccccttccccgcctctgtccgccgccactcgccgctcctcgcgtccagtcccgccgcttttccatgcctgcttccaggaatttggggcaattggggtgcatacaatcgcttttgccgctgactataacttgcatgacgtcacacgttgctgtcagtgcgcgtgcttgctgcgaactgtcccatggtgatcctgattcctgaggtacgtgaggaaactgttggatttgcatagttgcctttgatgatactggtgaccaataatttatgaatagtgttatctgcgaagtaacggttgtaggattcttgaatgaggctcatctgttatgctatttttaatttgttctatttcttactcctgagaaaacctctttttctttccaaattgaaacagcattcaggattagttcttgattgttcttgtatctggtttttggttaaattctgtacatttgtcgcctatctttcatgtattttgaaataatttgtggatc

SEQ ID NO: 137932 - DNA, 666 bp, Glycine max
  Clone ID: PAT_MRT3847_95561C.1
agtgctaccagccaccacgccaccaccaccaaccctaaaccctcgcaaagccctaaaactgagtttctcatctctcagattagattccgatagacacagaaatcgcttttcgttcaggttctctgtctcgctccttaatgtctacagctagggcatcactccgaccggcggcgccgtcgtcaacccttccccgcctccgtccgccaccactcgccgcccctcgcgtccagtcccgccgcttttccatgcctgcttccaggaatttggggcaattagggtgcacacactcgcttttacctcttggctctgggcataacctgcatgacgtcacacattgctgtcagtgcgcgtgcttgctgcgagctgtcccatggtacgtgaggaaagctgttggatttgcatagtgttgcctttgatggtactggtgaccaataatttattaatagtgttatctgcgaagtaacggttgtaggattcttgaatgaggctcatctgttatgctatttttaatttgtgttatttcttactcgtgagaaaatctcttctttctttccaaattggaacagcattcaggattagttcttgattattcttgtatctggtttctggttgaactctgtacatctgttgcctatctttcaagtattttgaaataatttgtggatc

SEQ ID NO: 137933 - DNA, 264 bp, Glycine max
  Clone ID: PAT_MRT3847_95562C.1
tcgcccacgcgtccggtccgtagtgaagtgtttccattatcatccggtgcattccacgtgtgtacgtgagttcccacctgggccgtaaccactcttcggcgtggccttcaccattaatggaccaaattccctaaacattctttttccaatttcgaatccatgggttggtcttttttccacgcgctcttcaccattttctttctactacgcttgttggtatctccttccacacacgcccttaaacttccctttcgagtcaacgat

SEQ ID NO: 137934 - DNA, 365 bp, Glycine max
  Clone ID: PAT_MRT3847_95563C.1
gacagcgaagtttgcttttcttttttcaaaggatcattcattgtccgtgcatacttacaaaagcattagatgctaagagaacagtattagaacagtgcacaacagcaattcaggcatacatactcaaaactaaacaaattagcaatttatcttgattaatttatggtttactatcttgcctctaaagtgatggacaactcatttgagctgaattcacacttgctggatgaagaaaaatcttcttggtgtggataaaaagcggggagcttgggcctgggcaatggtctgtcaccattcagcattagaaccacacttgacatgttgggcctgtcctctggtctctcttgaacacacaagagtcccac

SEQ ID NO: 137935 - DNA, 596 bp, Glycine max
  Clone ID: PAT_MRT3847_95564C.1
cccgcgtccggcgaaattgaaggtgatgatggattgtggagtgaagagacgtgagagtgtgagagaggaagatgatgaagtgatgatagtaacaccattgggggctggaaacgaagtgggtcgttcatgcgtgtacatgtcctataagggtaaatccatattgttcgattgtggaatacacctaggtttttcaggcatgtccgccttgccctatttcgacgagattgacccttccaccctcgatgttcttctcatcactcactttcacttggatcatgctgcgtccttgccctacttcctcgagaaaaccaccttcagaggccgcgttttcatgacctacgccactaaggccatctacaagctcctcttgtctgactttgtcaaagtcagcaaggtctccgtcgaagatatgctttttgatgaacaggacatcaatcgctccatggataaaattgaggttattgatttccatcaaacagtggaagtgaatggtattcgattctggtgttatgctgcaggccatgtccttggtgctgctatgttcatgggtgacataacctggtgttcgagggctatacaccggagactattcacgt

SEQ ID NO: 137936 - DNA, 132 bp, Glycine max
  Clone ID: PAT_MRT3847_95565C.1
ccacgcgtccggagcactgctgcaaagaccctgccgaagccttaggggacgttagtacgatgaacttgttaccttcgccgacggccacgggggtaaacgatgaactgcttacaccaaactacaccattgatc

SEQ ID NO: 137937 - DNA, 314 bp, Glycine max
  Clone ID: PAT_MRT3847_95566C.1
tgcacgcggccgtgagctcggctcgagcgttacgtctgctagaacctcacgcaccttatactcagtgaaatatcacttttgactaccttgacggaaagggtgtgacattttgatattaatattactggcgtctctaatttttctaaagatttatggacccacacgtctatgcccagccagtttgattatttgattacttttggactgagtatttaaccattggacattatatcttcaggggaatgcttgttcaggatccttcaaagggaaatgatgggggtgaaattttcaatcaagcttagccacttggggct

SEQ ID NO: 137938 - DNA, 286 bp, Glycine max
  Clone ID: PAT_MRT3847_95567C.1
tggcgacactgacatgcttaacaccatgcaccaagatgctatggatataacatccaaaacactccattgcttgcatgtgactgaacccattaagattactagatttataaataaggactacgatacgatgcatggacctgactggcagtgtattgtaggcactgattttggttcaatggagacacactgtggtggctgtttcatctatatctgcttaagcaactcggcgatcatgctatgcagacgctatgctgctacagacgctcctgaaaatcgatgctcatca

SEQ ID NO: 137939 - DNA, 158 bp, Glycine max
  Clone ID: PAT_MRT3847_95568C.1
ggttcccacctcacattggaaaccgacgagcatggcggcctgatgctacttgtacaaatatctctccttgctgctgcttgcaaagccagacgctcgtaccattatcactcgctctccactcgagaagctacgtgccaagcatcaggaccagcaccacc

SEQ ID NO: 137940 - DNA, 303 bp, Glycine max
  Clone ID: PAT_MRT3847_95569C.1
gcacgctgcgagagctactgactggcttattcgccagtttgtgcgtcggataggagtgcatgtcctcaatgatataaacaggccattgaagcatgctgctgttcaaacctgcataattggatgcactgcttactcaatcagactctaaaaccacgctggcaaggcagaacaaggaaaactggttgcagcgctgagcatgctggggactgctacgcgtgaacatcaaggacttatggtgcgtatacggacatgctatatggggaccctcttgtgcatccggcgcccgacagctattgagccaat

SEQ ID NO: 137941 - DNA, 419 bp, Glycine max
  Clone ID: PAT_MRT3847_9556C.1
tcgattgaaccagacatgaattcaaggtttcagcttttgagtaccactaccaatggtgattttgttcaaggaaaagatcttgcaacggttaaagttaatgtaacatgtgctgctgttggctagacatcaagttacactccaactccattagtggaatctggtatgcaaaaagacagatgtgtaattgtggagtactttggaaggatgtcttacgttgctcataacgttaatcagccccaagagaaagatttgttggagggaaaattttttctttgataataaattcactttctagaatggaaaaagtttcctctacataagcacaattttgttgtggaaaaaaccttaaatatgaaataactggtggctgggtaacattcttaaaagaattttcttgaaaggaatatccagaaaaaccc

SEQ ID NO: 137942 - DNA, 928 bp, Glycine max
  Clone ID: PAT_MRT3847_95570C.1
actagatctttgatattactaaatctattaagttctacatgctctttttttttttactctcttggcgagccgtccagaagacaattggctgcacaggtgcatggaaaaaagaaagaggataattgaagaattggtgcttgaggagtgagtgatgagagggtgagttgggaagatggagggtgcaaaggaggagctagaaagaagaagcaagtttctcaaaagcttgatacagaagaagaaaaccatagagcaacaagagcagcatgatcacctacaacacaacaacgttcgtgtcagagcttgtgacatgcctctccctcttcagagccgtgcctttcgttgtgcacgtgatctcctggattctatgccaccaaagaagcttgatagtaaacgcctggctctcacacttaagaaggaatttgattcttcttatggtccagcttggcactgcattgtgggtactagttttggctcctatgttactcattcctttggtggtttcgtgtatttttccattgacaagggattgatgtccttctcttcgaagacagctgttgaaccattagaccattcatagcttccacaattgagttatatgcacatctccttgagaacttaaaataatttaatattttaaaccaactgatgtgtgaaattacaaattgtaagatttaaagacatttgtactctgaagtatttgatgcacttcagtttcgagtgggagagtatttgagtgtgtaatttgttatgacaagcaaaagatactctttcttcagctcagaaatagattattttagagttttcactctcttcagtttcgagtgggagagtatttgagtgtgtaatttgttatgacaagcaaaagatactcgttcttcagctcagaaatagataattttagagttttcactctaaaattgacaaaaaa

SEQ ID NO: 137943 - DNA, 992 bp, Glycine max
  Clone ID: PAT_MRT3847_95571C.1
accccttccttaccctcgggcaataagtcgcgcagaggtcctacaagggaaggcattgtaagaagttttacacggaggaagggtgcccctatggagatagttgcacctttcttcacgatgagcaatcgaagaatcgcgagagtgttgctataagtttgggccctggtggttacggtggcggcggcggcggcggcggcggtgttggtggtggtgccagtggtggtaatggtggtgctaatgctgctgggaatgggcctaattcgaagccctctaattggaaaaccaggatttgcaataagtgggagatgacagggtattgcccctttggcaataagtgtcattttgctcatggtgccacagaattgcacagatatggaagcgggcttatagagggagaaaatttcgatgctgcttctgcagttgctggtgacacaaataagggagtgccttcaaaagcttctgccgataatgtggttgcagcagttactcttgtcgctcattctgatgtgtatcatattggagtcccttcacaaaggccttcttccatggtgattcagaggccaggacagagagcacatcagaagtggaaaggtccagataaaatcagtaggatatatggtgattggattgatgacatcgaatagagttttaatcccattcatggaaacgactgatgagggcttatgtactatcaaaacgcaatatttttcattcacatgttaatttttcttaagatccttaacttccaacgggaatagcattttagatcgtttcattgataactgttttgtaggtttatgcttggtggtgtattcaccttccttaatacgttgattctctggtgtctaaatgtagcaacatcttcccttgtatttgcatccgatagtatcccataatttttattttagcaaaaaaaaaaacattaggattgttttgctaccgcgtaggatctggttgtcctgatgcaatgaaaacccctttacgattttctg

SEQ ID NO: 137944 - DNA, 419 bp, Glycine max
  Clone ID: PAT_MRT3847_95572C.1
cccacgcgtccggattttttccctcaggcgtgtagttttcgtgccgatttgtaaattctttgcggagtttatgttagaatttttttttgttaagtttttagggttttgaatcggtgagatgaatcacaacaacaacaatagagcgaggtaccctcccgggatggggcttgggcgcggtggtttcaatccgaacccgagccagaacccgaacttgaaccagaacccgagcctgaaccagaatcatcacgcgttccaggctcggccaccgtaccaccaccagctaccttacctacatctcccttcttttctctgtctaatgtctgtccttgtccattgaattttaagcatttttctgttgtgtgctagctctgttcttactattgtttcatgttaaagtgttaagtgatacaattgctttc

SEQ ID NO: 137945 - DNA, 204 bp, Glycine max
  Clone ID: PAT_MRT3847_95573C.1
aattttctgagatacttctgtttctgtttcttttcctttttctcgtgcctctcatccaagtttgattcctctgataagttaaccagattcttaataggtgataaggttgagtaggccattatttcttctagaaggaacgaaaagcaatacttttgctgctaagcatctgaaaacctattcccttcgctatatttatttattgct

SEQ ID NO: 137946 - DNA, 301 bp, Glycine max
  Clone ID: PAT_MRT3847_95574C.1
ggtaaacaactttaatttttcatttcaagattatttttaggggaatgggagcacatgacttgataaacaaaaagcaaattttctaaataaaatatgcgtttctaaccccacatcggcatgagaagcagagacccaccttttctctcgtgaggctatgttttctagaaacacaagtctccactctaatatctccatctacgcccaagacctaagaatattcatgattcctttatcaccccggccttatatgatgtgatttacacctcaccaattattattctatcccataaactggggacac

SEQ ID NO: 137947 - DNA, 447 bp, Glycine max
  unsure (1)..(447): unsure at all n locations
  Clone ID: PAT_MRT3847_95575C.1
agacaatgtagaggaaggagcttccactatagtgaatggctcgaatgaattgtcaatattttggggaggtcttgttagaatcgacgtcttgaaggttttgattatatacttccaacttgtacatcttggaattggacaatttttttagaattcaacccctattccatgtctaaataatgccattagtcctgataatttcaggttctcccagaaacttgtttgacattttatggacccaagagaataccaattcatatggtacccactgagcaagcagttgaattttatcagacagaacttggatttctgctgaccccaccaagtgggggagaaaatgctgagaactggaaaggacttgaatcagaacgtaaattgcaaataaaattcgaagttgtggacagaccagctngtgatatagctatatcaggtctaggatggtttactgtt

SEQ ID NO: 137948 - DNA, 391 bp, Glycine max
  Clone ID: PAT_MRT3847_95576C.1
gacagagaagggtttcgtcgggggtcacgtttcacaatcacgttttgcgcatctctcactcactgactcctctgctgccgcatcatgtggggttccatcgcgaagtcaagggacaaggcatgagatgcttcatatccagggagggcaatgcgggaaccagatttgatccaaggtctgggacgtagtgtgtacggatgacgggatcgaatcaacggggaggtaccatagggacaatcaggtgcaacgcgatcgagtcaaagtcgactacaatgatgcgaattgcggtaggttcgtgcctaaggcagtgctcaaggattcggacccatagaccatggacagcgtcatctatggtcactacagtcatatattccggacagataacatcgtcctc

SEQ ID NO: 137949 - DNA, 328 bp, Glycine max
  Clone ID: PAT_MRT3847_95577C.1
gatagcacaagattactcatacgcaccttgcagattgacatttctctcacagtcgtctttcatggcacgtacaatgaacaccgctcgcatatcgaccggtgggaaggctcctaggaggcaactcgcaacgaaggctgcaagattctctgcaactatcaccagtggagtcaagaagcctcatcactaccatcatgcaactgttgcccttcgtgagatcagaagatgcagaatagcaaatagcttctgatctggaagcatccctttcagcgatttgtacgtgaaatcgcgcacgacttcaagattgctttgacgttccagagtcacgcgg

SEQ ID NO: 137950 - DNA, 545 bp, Glycine max
  Clone ID: PAT_MRT3847_95578C.1
aagtcctgcaggggctacagtacttgcacaataagggtgttgtgcattgcgatattaaaggtggcaacattttgattggtgaagatggggccaagattggggactttggatgtgccaagtttgccaatgattcctcggcggtgatcggtggcacgccgatgttcatggcgccggaggtggcgcgtggggaggagcaggggtaccctgctgatgtgtgggcacttgggtgcactgtgcttgaaatggccactggttttgcaccatggcctaatgtggaagaccctgtcacagtgttgtaccgtgttgcatattccgatgatgttccagagattccttgttttctgtctgaggaagcaaaggatttcttggggaagtgtttcaggaggaatcctaaggagaggtggagttgtggtcagcttctgaagcatccgcttcttggggaattcagttccaatgataagaaaattcaggaatctaattcgtgttctccaacaagtattctttgacagggcttttggaattctatggaaaaagcaaaaggagag

SEQ ID NO: 137951 - DNA, 355 bp, Glycine max
  Clone ID: PAT_MRT3847_95579C.1
ataggtcaaacaagttctttttttttttctcaatttatttcatgcatgtacacatcaagatatatagagatagtataaaaggactagcatcagattacatgcgcatcgatggtgactgtagcacgatcctctatgatggaacaccttgcatgtctccgtgctaataaatcttccatttcagatttagaacggtttcgactttgtccatttcgatagggatgcgatcttgcgaccttcgaactttcatgttcagcgtcaccgtcagaggaggaagctgaagagaatgtggaactagttgcgaagacatttgaccaactagctgtagaccgaatagtatccttgacgccggaacatc

SEQ ID NO: 137952 - DNA, 401 bp, Glycine max
  unsure (1)..(401): unsure at all n locations
  Clone ID: PAT_MRT3847_9557C.1
tgctagttgcccttagtattgtgcganattngagncacgacgagagcggggaattcgtctcgagtaaatcataagaaggaggagagactaatactttcagaggccaaagcagtatatttcggggggttcttataatagctaacgccatggttgccccccaccaatagcaggcagtgttagaaaaatcggtcaaaaattaagacgagttcgaagaaacattttatgattcggcagagaagatagtggaggttgtagtctacaagtacgatgacgatgagaattgagggagagtgccaaaaatatcgtggaagaagctatggctgtacaacggcccgggttttttgaggagcatagagaatctggatcatggaaacttaaagggggaccttcaggcgggtgcc

SEQ ID NO: 137953 - DNA, 406 bp, Glycine max
  Clone ID: PAT_MRT3847_95580C.1
cccggacgcccacctcctaagctgcggtcgccctttgagcattttttttgatagtgtttaggccaatgtagcatagaaacattactttccaccaaggggcctatagatcctggggactatggagaatctgcagagaaatgtgttgggtatcaacaacatcaccagtgttggagagatcgaagaccaaggcttaggcttgatatgcagtgcacttaacgccctaacttttgcggtcacctaaatctacatacacccgaccattactaacaaagctgctggcgggactggtactaagggattgaatacggttattatccgcaaggtcacacttcccaccttgtgagctgtcgaacaaacgcccgattgctaattagaatctgacacttactgactgatttccggctct

SEQ ID NO: 137954 - DNA, 112 bp, Glycine max
  Clone ID: PAT_MRT3847_95581C.1
cttttgttagagtacaacaggaaattaaatgtatattatgcagtgacatggctactactgagatattcatctaaattcctttagtactctaacagaaggaacttcaatgaat

SEQ ID NO: 137955 - DNA, 700 bp, Glycine max
  Clone ID: PAT_MRT3847_95582C.1
gacttatagcaaatagaatgtctggccttgttgcagtgagatacattagacatccaatcaagctcctataatatccttcatcaattttatcagcaccgtctaccttgttgaacttctccttttgattcattggtgtgctaacagatttgcattcctccatttgaaacttcttcaaaatttcttttgcatatttcctttgacagattaacactttgttctgactttgcttgatctcaattccaagaaaataagtcatgagaccaagattagtcatttcaaaagcttgcatcatttcttgcttgaactcctcaactagccttgcatcatctctagttactaaaaggtcatcaacatagagagaaactatgagaaagtaatttaaacaaatttaaacagattttgtatgggatagcttttggacagatttgacaacttaagtgaagaaacaagagtagcttgcatttctccaagtggagtctaaacaaatataaacccttaaaatttattgagtttaataaaatatggatagaaagttagtgtagaataattttgaatggtgagatttgcaactgcgcaccctgcaattacttttacaactgcaagggatccacatcctgttcttgacactactgttctcccgtcaaattaaaataagtgaagcaactttggtcttccaatttctttaggtagactgggatgg

SEQ ID NO: 137956 - DNA, 468 bp, Glycine max
  Clone ID: PAT_MRT3847_95583C.1
ttttgtttttatattttttttttgtgttgttgttttttcttgacagtgatttttgtgagggaccaaaggagggtgggttttgaaaatttttttggggttacaaaaaaaaggtttattcaaccaacgggctgggggggttttttttaaaggttttttggggggggtcaaatgcttaagattttaaaattgggctggaaaaataaaaaaaggggttttttattttgttttggggggggaacaaaacttttagggaaaactttttggatcccctttgagggggcttaaggaatgtccctttttttctaaaatccaataaaaagtgagtctggagcccaaaaaaaggtgcccaacccaaaattttccctttttgaggggaggggagagttaaaaggcttaggcttattttttctatataagggggcggggaataaaaataaaaaagaagtggggccgattttggaggttttg

SEQ ID NO: 137957 - DNA, 410 bp, Glycine max
  Clone ID: PAT_MRT3847_95584C.1
agaaaggctaccccgaaaataaggcgccttccttggagcacaatggcaaggcgtagggagaaagccttgacttgaacaaatatgtgaatgcaaactttgaacggacacctttgtttcccagtgatcctgccaagaaagagtgtcgggagacacagatatcccaagttatatacattcagaaaaaacctgtgcgggtcattgaaaggggatgctgtacaagaagccagacccgctttggaatactaggagattgctcttggacaattcaaagatgacccattcttgcacagacaaactagattggcggatattgcttatactgcatgtgttgaaagaaaacaaaatgaatgcgctgaggagttcaaacatgacatcacataacgaacgtctaaacttgcaacacggattga

SEQ ID NO: 137958 - DNA, 624 bp, Glycine max
  unsure (1)..(624): unsure at all n locations
  Clone ID: PAT_MRT3847_95585C.1
ccacgcgtccgctctgctttccttcattgcaaaccaagcttcctttccagcttggtctggtcctgccctcagacacaacacagtacccaccaaccgtttttaccacatttactctttctcttctctaattagtaaaatacaaccattctctctctgcctctctatttttcccatcaaaataagatttttgtctggcattcccttccattttctcttatattaatattttttacattttatttttttgtttaagtgtggcccacttgttacctactgttgtgccactacatcttttgcagcatctggattttgctgtagggtatgtgtgttgctcatcctccggtaatctttgcacattaagtctctcgtcggttcaaaatgaggcgtgaaacctgttgcttctttgggtagaggattcaggagtctagctaccttggatcaccacaaagtatgttcagatgtgtgtttcgaagtcttgagtaagaggagtacttaacttgaatcctgtacttgagtgggaatgtcttggttctaccagctgaagaacttgtggngatgatattgattgactcggtgcaaccaattatgtcatcccacagttctttgaatatggaattgtcaaag

SEQ ID NO: 137959 - DNA, 125 bp, Glycine max
  Clone ID: PAT_MRT3847_95586C.1
ggaattcggatcgagctagcccttccttagcttaatactcatctatctacaatatcataatatcttctactagctagtttgattgttatgatcacaatagtatctatctgcaatatattgttata

SEQ ID NO: 137960 - DNA, 375 bp, Glycine max
  Clone ID: PAT_MRT3847_95587C.1
aaagccatgattaaatcatcattcgtatgcctgatcacaaaacaaggtcgaaaaacggccaagactgtcgccagctgctcgctgaacagtgaaattatgctcaatatgactcaactgtcatacgcgagtgcacccaattattgccaaagccttgactgctaggggaggaaactctacctttttgtcttaaaaatgtgtgtccctatagcacaacacttgaagaaactccctcatagactttggtatgacatacactatcatgaaacaatgcagtggcatcccacaacaattgggagctagtaaagagaacaccctggaacggttgagagttcttcggagacggaaaatgaggggagatatttagtgccggccaaa

SEQ ID NO: 137961 - DNA, 345 bp, Glycine max
  unsure (1)..(345): unsure at all n locations
  Clone ID: PAT_MRT3847_95588C.1
cagtcgcangcacnnaatacgtaagctcggaattcggctcgagaacattcacagaatggggggnntcntcntgnngaaaaattnttgtngnaaaattttngaacntcnangngaagcnccagcactgnttttgaaaccctagngggaaaaangggnaacncctanggggtttntnacananacacaggggcttnntttncccngggnaaaantttgnanaaaagcttgggaantaccccatgngggngacaaattttccggaattgccnncccaaaaaanncgttttcnaggggtntttcanaggggtnnaaggccccccttcttnangggggtnccnggnttnt

SEQ ID NO: 137962 - DNA, 406 bp, Glycine max
  Clone ID: PAT_MRT3847_95589C.1
gaaaatccaatttatagatttatttttgggcaaaaaaaaaaggggtttccaccgggctgttgaaacctttgttgacccaattttccccctcaggcaaactttcctatatgctgttttccatttgccaaatttaacagtctcctgcctgtttctttttatttttttttaaaccctaattcccgttgactttcaacaactatttttttaaataaaagccaaacacccgttctacctttcttttacttttccaaggcctttacaattctcgtaaaacaaggggttgcccccttttggttaaaagggcgatgtcaattacttgggattccgtctggagcatcggctttttctgtacatgtagaaagttacttactaacggtgacttggtctcatgatcttcatggatccc

SEQ ID NO: 137963 - DNA, 2390 bp, Glycine max
  Clone ID: PAT_MRT3847_9558C.1
ttcaggttctctttccgaaaataatgcaacaggcccaataatgtatgtagagaatagtatcaccaccatttctgtttcttagtttcaaagctcaacaatggttacaaactcatcaaaaagcactatgaaagatattggatgatcttcgataaataattgctccctgatcatcatcatcatgggggtgttactggagaagctcatttcgttttggactagctgcaagctaattttgataatgtcaatttgtatgtagtcgtggatcatcataggctttttgttaggaattcttatgcctgtcgaaaaaaactagcttgcttacaactagtattgtcactcaaagacaaggggctgtggcaaatcacatgaaaaacaccattttttcaacgaccaagaaggatcaatagaataaagctttcaagtcataggagtggaaaatggacaactgaagcattggctgtcgtcaccacccagaggtcttccttcatcagcgactgtttgctttgtcttgaaggtaaaacgttgcggttcaatcttaacttagaattattgtatcccatctcaattgaactgaggtggaaatatacaaactaatctatggttaacaacttaagccgatagagcccattccaaagtggtgtaaaatgctaacactctcattgttgatttcataactgatgcttcttgattcgtctgttcagatataacgattctctaacgttgcataatgttgatcaatggtagatacagatactatgttgcttatattggcactgagtggtcaaaaattagtgctcgggtcagagagaaaactgagaaaattgaccgaaatgtcatgtatatcgctggctgaatttttgttaattgtactatttgtggactctaaggttgctgaacataaaactttgataccaataggcattggagttttacctctttactggctgttttctattacaatgataggcagtctaacttttggcccagggcaaaggcatccagaggaagaggcatcttcttccaccaccacagaataaagatgcaggggaatctcaacttgcttctgatgaagtgatactgagcgagttggaagatgagaagcctaaggaagtggacatgctccctgcatcagagaggcagaaaatcgtatcgcgcacttgcaacaaagactgctccaagcagctgcagaaggagcagtgagggttaagagaaggagaggaccacacagaggggaagatttcaccttgacacaagcattgatcaaagcagacttttggcttcttttcatttccatgatcatgggttctggatccggattgactgtaatcgacaatctgggtcagatgagccagtctctaggattcgacaatgcacatatatttgtttccatgatcagtatttggaacttccttggccgtgtcggaggaggttacatatctgagcttgttgtgagggatcatgcatatccaaggccagttgcattggctgtatttcaactcattatgactcttgggcatgttttccttggtatgggatggccagggtcaatgtatgttggcacgttactagttggacttggttatggagctcattgggcaattgttccagctacagcctctgagttgtttggtttgagaaactttggtgctttgtacaatttcattactatagcaaaccctgcaggaactctggttttctctagtctcattgccagcaccatctatgatgctgaagcagagaaacaacatcgccaaaatatgatgttgcttgtgctgaatgcaagtgagcctctaaagtgcgaaggttccgtatgctttttcctaacatccatgatcatggcaggattatgcgttgttggagcaggcctatgcatggttctggtgttaagaacaagaattgtttatgccaacctatatggaaaagcttcttctagcagacttcgattatgagagtttgggctgtgtattttggtgtctgtatacttgagaaatcagtgttgctgattttaattcaagaatgattgaagaagctgagccaatcatctgatctgaatccgtctccagtgagtgtggaaagccaaagaagggataattttactcaaaacaaaaggagaaaaaaaaagtgtgttttgtcaaatctgtgtattcttttccatttttgttgtgttatattctttccttttgcaagtaaaagtttgattggcattgaaatttgacactcagaggtattgcaaaatatttcacttgttttgttgctaagaaagcaaaagaagctgttctcgttagtggtagtcctaagattatgtactgtattttttttattaaaaattttgatgggatattccacaagtatcaatgtgagttaagactatgattaggtagagtcttttt

SEQ ID NO: 137964 - DNA, 386 bp, Glycine max
  Clone ID: PAT_MRT3847_95590C.1
attctttttttcattcttttttttacatttttttttttattttttttttttttttttaaaaaaagctaccactaaacccttatttttttttgcaaatccgggggaacactacaattcactattttataaactgtgacatttaaagtacccaacgatttacttttcccttgaaaactgaaaaccaaacccttattcctacaataagggtttttgacaaaactgacaaaggaacttaacatgaaattttaaaaaagctagcataactttttgcatccaaagaaaatatttgccccctaaaagtcatataatatgtttgggaatagtcaaagcttaacggttgttgaccaaatggagcctgaaaaacaacatgtttacggacccgtggg

SEQ ID NO: 137965 - DNA, 287 bp, Glycine max
  unsure (1)..(287): unsure at all n locations
  Clone ID: PAT_MRT3847_95591C.1
aattaagatgacttaagtttcatcttaaatttttttcattccctgtagttaattctggcatgtactagtcttagaagtaaacacaagctaaaacaacttgacaggaattccccaagtggcttgttttccaaagtactgagaacaaaaccctaagttcccctaggtcttgtaactcagcaaggcttgtgaatgtgaaaataacagtgcccaatcacattctgctttaaaaaggtaaatacagatgagatanaangaaaaaaaaaaganacacgaaaagnnggaagnnc

SEQ ID NO: 137966 - DNA, 419 bp, Glycine max
  Clone ID: PAT_MRT3847_95592C.1
ccctgggcaaattatcaaaaaacccaaaaaaaaaaacgggtataacaaacaaatatccacggaatcacatttaaaagttccgaaaaaaaacaagttaagttttaatggaaaaaccccctacacatcctgggaaaaaaaaaaaaaaaacccccccgggttaaaacaggggggcaaaaaaaaagctccccattggggccccaaagctttaaaaaaaatggggaacgtggctgaaattgctttccccacaaaaacataaggggggtttttcaaaccccattaacacttttagggagctaagcttttaaaagctttttaaaacacattttccgaaaggccattagaaaaaaggaccctctccaacggggcctttgaaagcttttgtcggtcttcaaaaaaacgcctcctttttgaaaaggggg

SEQ ID NO: 137967 - DNA, 174 bp, Glycine max
  Clone ID: PAT_MRT3847_95593C.1
gttgagcacggaacttttaaacagcggccttagttgggtgcgtgcttttgagatcaattgcgcaaacaaaaagaatggtgtaactccggcagcccttccaattttaataccgccaccaaattctgtcccccaaattacgctcttccaaacaaaatggcgggttggtgcaacccc

SEQ ID NO: 137968 - DNA, 709 bp, Glycine max
  unsure (1)..(709): unsure at all n locations
  Clone ID: PAT_MRT3847_95594C.1
caggctctctcttccctctttcatccccccgataagaacaagcacccaccgtttaacgctaatttttgagtgtttttgttttttgcagcaacaaacaaacatcttttaccttaaacaacaatggccgatgccgaggatattcaacccctcgtttgcgataatggaaccggaatggtcaaggctggttttgctggagatgatgcaccgagggctgtgttccctagcattgtggggcgtccacgtcacactggggtgatggttgggatggggcagaaggatgcgtatgttggggacgaggctcaatccaagaggggtattttgactctcaaatacccaattgagcatggaattgtgagcaattgggacgacatggagaagatctggcatcacactttctacaacgagcttcgtgtggctcctgaggaacaccctgtgcttctcaccgaggcacctcttaatcctaaggctaatcgtgagaaaatgactcagatcatgtttgagaccttcaacacccctgctatgtatgtcgctatccaggccgtgctttccctttatgctagtggccgtacaactggtattgttctggactctggagatggtgtcagtcacacggttcctatctacgaaggttatgccctcccacatgcaatcctgcgnttggaccttgcagggncgtgatctcactgatgccctcatgaaaatcttgact

SEQ ID NO: 137969 - DNA, 536 bp, Glycine max
  Clone ID: PAT_MRT3847_95595C.1
gacacacaggcattcacacaaacataaaaaaaaaaaaaaaaacacacacacactctcatacacacgttgtcgcgcacacattccttcattccgcagcaacaaacaaacatcttttaccttaaacaacaatggccgatgccgaggatattcaacccctcgtttgcgataatggaaccggaatggtcaaggctggttttgctggagatgatgcaccgagggctgtgttccctagcattgtggggcgtccacgtcacactggggtgatggttgggatggggcagaaggatgcgtatgttggggacgaggctcaatccaagaggggtattttgactctcaaatacccaattgagcatggaattgtgagcaattgggacgacatggagaagatctggcatcacactttctacaacgagcttcgtgtggctcctgaggaacaccctgtgcttctcaccgaggcacctcttaatcctaaggctaatcgtgagaaaatgactcagatcatgtttgagaccttcaacacccctgctatgtatgtc

SEQ ID NO: 137970 - DNA, 963 bp, Glycine max
  Clone ID: PAT_MRT3847_95596C.1
atttaatacatatttatttctggttctatgtaccaaaaaatgagcagttttggttaggtgcaattgtgcaagaatactacactagataatttaaagtagatagcaaaaagtaaacaaaccttaggccataatagtaaagtgtattaaagtaaatggttcttgaattgcattttgctttatttatcttttggtcttggtagctacgataggagtgtgacaatgatattctggaatgagtttaactttgcagagtcattcatctcaatcaagtttgaagagaatggggtggcatcgtgggaaaagagcacagtgtcaaagaaggtgtcgtcgtggaaccatcaaaacaaggagaacaagagagtgatagagcatgggaagtcacgtgacacgtttaggtggcgaaagaggatagggcacatgctccagctcattcggtggaagaagagcggtggtgtgtgccacgtgggcaccaaggtggagggggtgaaggtcagaaagggttggatgaggactctgacaaagaggaaaacaaccaccttggaataaaggattcctcgctttgcagtgtgcactgtaaagttacatcatagtcatactctcctagagtcaaaattagctttgttactatctcaaaaatgtgctttagattaagagctatctcttcataaatgtcaatcgacttctgatattgttctagctgagcagcaaactgggcaactttttgtttgcattggttcgcagaagttgtcacttcttcattttgaaaaaaatcagctgatttttcatagtaaacaagagcctgctcaatattctgttcaccctcgtacaattcagcaatttcctgtgtataaaatagtgaacccagttaccacatgttaatagggattcagacaacttagtatactttaaatatctagcagccatagagagtcttccaatgtcacagaaaagatttacagctcg

SEQ ID NO: 137971 - DNA, 657 bp, Glycine max
  unsure (1)..(657): unsure at all n locations
  Clone ID: PAT_MRT3847_95597C.1
gataggatgagcaaggagattacagcattggcaccaagtagcaatgccagggaacattgtggaacgaccactcaagacaatgttccctggcattgctgataggatgagcaaggagattacagcattggcaccaagtagcatgaaaattaaggttgtagcaccaccagagaggaagtacagtgtctggattggaggctccattttggcatccctcagcaccttccaacagatgtggattgcaaaggcagaatatgatgaatcaggcccctcaatcgtccacaggaaatgcttctaatgatgcagagagtccaggaaattttaatatatactccgcactacagaaataccataaagtggttgaggaagttttattttctattctttaccattttttaaccatgttttcgtgtttcctttattaatatgttgggataagagcatgaaagcaaagcatgatatataagatttttttttttttcattttattgtagaagagatngtgtattgttattgatttgatttggttgaatcaaattctcttaagcattttgattagaatagtggtatgtattttgatttattgttctgtgaacgaagagtcattcttgttcagtgttcacggaccaatcttttatataatatacttcatatttggcc

SEQ ID NO: 137972 - DNA, 1782 bp, Glycine max
  Clone ID: PAT_MRT3847_95598C.1
ttcgttaaaaatagagagcagcaacacataagctacgcacacgtagcttccttcatttcggaaattctaagcaatcaataaaagtacggctgcgagaagacgacacaagcggacacatacatcatcaaaaaacacacacgacacactcccatacacacacgttgtctcgcacacattccttcattccgcagcagcaaacatctttaccttaaacgacaacaatggccgatgccgaggatattcaacccctcgtttgcgataatggaaccggaatggtcaaggctggttttgccggagatgatgcgccgagggcggtgttccccagcattgtggggcgtccacgtcacacgggagtgatggttgggatggggcagaaggatgcgtatgttggggacgaggctcaatccaagaggggtattttgactctcaaatacccaattgagcatggaattgtgagtaattgggacgacatggagaagatctggcatcacactttctacaacgagcttcgtgtggctcctgaagaacaccctgtgcttctcaccgaggcaccccttaatcctcaaggccaatcgtgagaaaatgactcagatcatgtttgagaccttcaacacccctgctatgtatgtcgctatccaggccgtgctttccctttatgctagtggtcgtacaacccgtacaactggtattgttctggactctggagatggtgtcagtcacacggtgcctatctatgaaggttatgccctcccacatgcaatcctgcgtttggaccttgcagggcgtgatctcactgatgccctgatgaaaatcttgactgagcgtggttactctttcaccacatctgcggagcgggaaattgtgagggacatgaaggagaaactggcctacattgctcttgattatgagcaggagttggaaactgccaagaccagctcagcagttgagaagagctatgagctacctgatgggcaggtgattacgatcggtgctgaacgattccggtgccctgaagttctcttccagccatccatgattgggatggaatctcctggtatccatgagacaacatataactctatcatgaagtgtgatgtcgacatcaggaaggatctctatggtaacatagtcttgagtggtggttccacaatgttcccgggtattgctgataggatgagcaaggagattacagcattggcaccgggtagcatgaaaattaaggttgtagcaccaccagagaggaagtacagtgtctggattggaggctctatcttggcctccctcagcaccttccaacagatgtggattgcgaaggcagagtatgatgaatctggaccatcaatcgtacacaggaaatgcttctaagttataataatggagtatgaaagatggaccagggaaattactatttatacgaacactacaaaaataccatcaagtggttgaggaactttcattttcctaccctttaccattccttttatctatcttgtttttgtgttttcctttctttgatatgttgagataagagcatgaaggctagcaagatatgtaagattcattttttttttatcccgttttgttgtagaagagatgtgaattgttaccgatttggtttggttgaatcaacaaattcttttcctgaagtattctgaataaaataccggccaaaaaaaaaaaaaaaagtggtatgtattttaatcaattgttctgtgacgaaaagtcattcttgttcagtgttcgcggaccaatcttttatataatatacttcatatttggccc

SEQ ID NO: 137973 - DNA, 553 bp, Glycine max
  Clone ID: PAT_MRT3847_95599C.1
ctgttgttggggatgaagggactactctgctgcgaacctcaagtggactgactgtaaagagaatgcaagagggatctcctggcagaagtggcaatcttttaagcacagtttcacaggttactaatgctcccatgcaagacatgtcattaacctcccgtaaactgttcactgaagatggccaagaattgatctctcctgaaacagaaatgcttacaatacaaggaccagatggggttgtgtatcaagttcaaggacaactcgaggacggagcccagacactacttgtacaaggggaggatggtgaacaacggtgtgtttatgttaccactaatcaagaaggtgaggatggatctactgtgctcaccttagattctgcatatgctgatgccctgtctcaagtggattccaaccaggtcagcattcttggtgatggatctcaactcctagtacaaaatgaagatggaaccacaactctaggagattcccaactcatgtcagtcatggaggggggagataaagatgatactcaagctcaaattgtagctcaagtcgt

SEQ ID NO: 137974 - DNA, 420 bp, Glycine max
  Clone ID: PAT_MRT3847_9559C.1
aacgggaccaattttataacaatttttttggggggaaaatccaaacccccccaaaacctttttttttgtttaaaacaaaaacaaaggggggcggaaaaccccgggaaaaccccttgccccaaaaaccccaaccaatttggcccaaccaacccccccgggggggactccagttgtttaacctttccaactaaatttggggggaggataaaacctaaagggggggggggttccctttttttctaagggaaaaaaaaaacccgccgggggggggaaaaattccttttcgggttttgtccaccctttgcccaaatttttcccccaaaaaaaaatttttttgtccaagggtgaaacttccttttaaaagcttttttgttccccagggtttaataaaaagcccggttggcgtcccctcccccctta

SEQ ID NO: 137975 - DNA, 109 bp, Glycine max
  Clone ID: PAT_MRT3847_955C.1
gtttcttccggtttcctttggaaaattcttaatgttgcttggaatcttttcccctgtagcctaagctcccaaaaatgttcattggggcatgatccatctaatttgggca

SEQ ID NO: 137976 - DNA, 1167 bp, Glycine max
  Clone ID: PAT_MRT3847_95600C.1
atgggagaacacaacacaacagagaagaaaggggccaaaagacaaatcagaaaccgaaaaggaattgaacaaaacaaaatcgttcacaaacacaaaggcaccaaccaacctcttcgaattcgcgttttcttctctcttcgcctcgccatcaaatttgattttgtgcaattaacccctagtatgtttggatggaggaaattgcatgggaaagggaaagggaaagggagaagaatgtggggtgattggaagattctcaaggcaggggatgaaagagaattaaaaggagataatttgaatgtgatagatccatacctgtttcagcaaccatcaagtaacatagattcccatcctccctccttgcgccgttcacacttctttgaagtaccacacataaaccaaatatatacatgggattgtggccttgcttgtgtcttgatggttttaaaaactatcggtgtcaacaactgcgatattccaacactggctgaactatgccgcacaactagcatttggactgttgatttggcatatttattacagagatttgctgttgctttttcctacttcacggtgacatttggggcaaatccaaactattgcattgaatcattttacaaggaggaactgcctaatgatctagtgagagtggatttgctatttcagaaagcaatggaggctggcattgatatacagggtgtgaactcagttcagttggttgcaattttaccacatacattgagcactggtaataagtcaattagtgcagaagagatttctattctcatattgtctgggaaatatgttgctattgcattagttgatcacaacaaattgagtcatgttttgcaagatgttcctgtgcctggtgttttcagcaacaactctggctacacagatgtattcttcccaagtggaagttactacctacaattgtcctatacatgtcactatgtgttgatatgtggctatgatgctggagcagatatgtttgagattagagatcctggcagctctaagaaacataagaggatttcttcaaagtctttagaagaagctcgcaaagcctttggaactgatgaggatcttcttttgatatctttggagaaaagcagtaaccatcatcaaccttttatgcaactatccaatgatgtcaataccgattcttga

SEQ ID NO: 137977 - DNA, 555 bp, Glycine max
  Clone ID: PAT_MRT3847_95601C.1
cattacccctcctatgaatcgtaagatccaagcacgaacaaatctttcaaggccttcttggttacctgtaaaatcatgaatatttgcaaaatgagaagacaaccaactcaatttaattgagttcccatcaattgcagcatcgtcaggcatgacacccaataattcatgaaacaactcaaaccagtcaatatttgtatttccaattaaaggtcttccatccacaggaataccaagtagcacagaaacatcttgaagtgtaatagttgcctccccatacttcaaatgaaatgtatgcgtttctggcctccacctttcaataaaagcattaaccaatgctccattcactttcaactgcgccaatttcattatcgggtacaaacccgaaatttgtaataaaggaataatttcttcgggcggtgcttctctatgattgtacagtggtgtggctcgttagatttttaacgtcctatcattagcaccattccaaatatgttgggatatatgatttttttgcatccaccataaatcatcttctaatggtcccgatgtcacgtc

SEQ ID NO: 137978 - DNA, 599 bp, Glycine max
  Clone ID: PAT_MRT3847_95602C.1
tctccacgtttccgctgacgcgatggaaaacaatgaagaaaatgaaagaagtagaagaaataacgtgatgggagaacacatcacaacagagaagaaaggggccaaaagaccccacgcgtccggaaaaggaattgaacaaaacaaaatcgttcacaaacacaaaggcaccaaccaacctcttcgaattcgcgttttcttctctcttcgcctcgcagtgtatgtactgcaatcctcccaatttggttgagactccacatatgcgacaaggactgcactctgttctagacctttgtttgaaattaaacattttacattaactttggtcattgatgtggcccatatgcttgctattcaacaagattctcaaggcaggggatgaaagagaattaaaaggagataatttgaatgtgatagatccatacctgtttcagcaaccatcaagtaacatagattcccatcctccctccttgcgccgttcacacttctttgaagtaccacacataaaccaaatatatacatgggattgtggccctgcctgtgtcttgatgggtttaaaaaccttcgtgtcaccaactgcgatttccaaacactgctgacta

SEQ ID NO: 137979 - DNA, 457 bp, Glycine max
  unsure (1)..(457): unsure at all n locations
  Clone ID: PAT_MRT3847_95603C.1
ananaatacactcccttttggaattcctttccctaagataccctacaaattaatcttcagagcacatgattttacactcccttttttcaatatctcccagcctcttcaacggcactcccctgccatcagcctctaaccaccacgcactgagagagatcaagagagaggtattgggttgttaatggatagggggaggatgtttatcactcaactttattattttctttcaacatcagataatcaaatttttgactcattggtttttctttttttggttcttaccaaatttcaacctcttccctctctttcacgatgcaatagtttgtttttcaaattggatgtgcatctaggcaggtgattaattaccaggatgttgtgggaaaagaattagagagttatgtgtcccaatttgatggctacatattgcattagcactggctgggcaatggaatataaa

SEQ ID NO: 137980 - DNA, 566 bp, Glycine max
  Clone ID: PAT_MRT3847_95604C.1
cacaaccgttagtttggggccaaaagacaaatcagaaaccgaaaaggaattgaacaaaacaaaatcgttcacaaacacaaaggcaccaaccaacctcttcgaattcgcgttttcttctctcttcgcctcgccatcaaatttgattttgtgcaattaacccctagtatgtttggatggaggagattgcatgggaaagggaaagggaaagggaggcagtgtatgtattgcaatcctcccaatttggttgagactccacatatgcgacaaggactgcactctgttctggacctttgtttgaaattaaacattttacattaactttggtcattgatgtggcccatatgcttgctattcaacaagattctcaaggcaggggatgaaagagaattaaaaggagataatttgaatgcgatagatccgtacctgtttcagcaaccatcaagtaacatagattcccatcctccctccttgcgccgttcacacttttttgaagtaccacacataaaccaaatatatacatgggaatgtggccttgcttgtggcttgatgggtttaaaaactattcg

SEQ ID NO: 137981 - DNA, 636 bp, Glycine max
  Clone ID: PAT_MRT3847_95605C.1
ttccttttttttttttttttttttttttttttttttttttttttttttttttttttttttttttttttttttttttttttttttttttttttaaaaaaaaaaacggggggggtaaaccggaaaattgatgcccagttgcaagggaacaacaaacggaagggggggttaaaattttttttttttttcataaaaaaacagcaatccaaaaatttatgaagagcacaaaccctcctagttcccccccaaaaaaaaaaagccaagggaggttcccaaaaccctttataactttgggggggtttaaaaaggagggcttggagtcatttgaacaaaaacaaaaaccacaggcggaagtcccccccataaagcttaaaaaaccaccctttgcctataaacgggggattgcccctcaaaggggggagctcccacataaagggtaacatgccccccatcaccataagcatccttgacggaaacccattctgcattgagggggccctttatcttggtccgcagggactgtaaaaaaggaaagtccataaaccccccctcgttgaaagggggggggcgggatttaaaattcccaaaaaaaggggtaaaaaaaaacgggccgggtctaaaaaattgatttttggaaaa

SEQ ID NO: 137982 - DNA, 584 bp, Glycine max
  Clone ID: PAT_MRT3847_95606C.1
cccacgcgtccgcccacgcgtccggaatgcgtgacagacttggctcaggctgccgcgtgccgaaacagcgcggcggcaacacacttaaaagtgatttccatctgtacaatttttgttaccagcgtgatgggcgtgtcaacacccgtcatgctggcacgatattttcaaggaaaatctctgtatgatattgccatcttattgatcaaatgctttgctgctggtgtaattcttgccacctcattggtccacgtgttacctgacgccttcgccgcactctctgactgccaggtggcatctcagcatccctggaaggactttcccttcgctggcctggtgaccctcattggggtgctaatggccctgctggtagacaccgttgctagctcgcatatggagcacgggcactacacgccggtggagacgctggagaaggagggtggcagcagcgcgtggagcattgagctggctggtggtggtggtgaagtgcagagggttgaagaattaatgaggttgaagcagagactggtgtcccaagttttggagattggtataatttttcactctgttatcataggagtgactat

SEQ ID NO: 137983 - DNA, 352 bp, Glycine max
  Clone ID: PAT_MRT3847_95607C.1
agctatgcactactgaggccatctaggtgacccacattgacagaatcctgattaactggggtcactatataacggcctatgagactgctctgatcagtggctcctgctcatgataagttgtcgctttgaactgtgggatatgaatgctgttgctattcatgattcggtataaaacacttacctactaattactatctgatatgactcccatggtattaatgtaactaatatccatccattggttagattgagcattctacttcattctatggactctgttatagtctctcacgttatccgtatggagattgagagccatcatctagttcacgatatgagcggtcttatcctc

SEQ ID NO: 137984 - DNA, 236 bp, Glycine max
  unsure (1)..(236): unsure at all n locations
  Clone ID: PAT_MRT3847_95608C.1
taggcactgctaaaacttgtccttttcctttccccccgcaaataataacataaaataaaatccaacacatttaaaatatagcacgncancaanggtgtcnncgnaacggatatagcataaccgtttgaacagtctttangaaaatcaatctgcaaactggatcatcttgtaattctcagatcatagatctatatgtatgagttttgaagagaaaaaaaggagaaatttgatctttg

SEQ ID NO: 137985 - DNA, 388 bp, Glycine max
  Clone ID: PAT_MRT3847_95609C.1
gctgaatgtgtctctcttggacgagctgaagataaagctgttgtacactcaatgctgtgctcaatgatgctgaggagaaacagatcactaattcaggagccaaggcatgtcttaatgagttgaatgatgctggcctagactcttatgttgcggttgatgtagttgggatactttcttagaagatgttggtgtataattcaaagtctgttgatcccatcaaaggatctttaccagaggctcttgccttgtccaatggccttcattccatgatggctgttccatatggtttgtgttgtttatgcttcacccctctatattacatatttaggtggtaccgttaatttgctagtatgcttgctgataaataggatgatatgattttagacac

SEQ ID NO: 137986 - DNA, 466 bp, Glycine max
  Clone ID: PAT_MRT3847_9560C.1
gatagtatgtttttacaaacaaataaaacatatttttgatccaaaaattgattaatgaccccatcccagacttccatgaagtactaggattttttttccaccttcacaagtatgcgtatcttatccatatctcctctctacttctaagtccgctagttgatttttttcaattttccaaatcaccaatattgactttattaagcatacagtatgattattggcttgtgcaacatatcacactttccactactcaatcattcacaattacttttctttgtcaggtcaggtaacaataacatatacggaatggaaatcgagttaacctaacatttcgcaatattaaaaattcaaaacaagtgattaagtgctttggcagaatgacttttttttttattatttatatattgtcgaggtttctctatagcatcctgtactagtgttttaacacgtctaattttgaacgata

SEQ ID NO: 137987 - DNA, 662 bp, Glycine max
  Clone ID: PAT_MRT3847_95610C.1
gggagaacaggtgaatgaaatcctgtgccgttcttcagtctggagtgccttcaaagatcataaacatgatttgttcatttctgagtcacaaacagcaggatacctcacaggacctggagttgctggctaccttaccgcaggtacatctacatcagtcatgtctaacctgccacctcctgtagaccatgaggcaggcgaccttggctatcagacttgaaatattcacgagagacaataaacgctgaaaggccagtgccaagtccacattcctccagctgatacgttgaagcaaactcttactgcctttctcctggtttcatgacagtgttattcctttttctataaatatatttttaggaaaaaaagtcagtgatcctaattgtatcacattataagaaagcactctgtggatcaacataagtgggtacacaagaattttttttttcttggtgtatgtaagcacatttgttcctttatatctgtttacaaaactgtgaatcaaaaagacaaaactttcttcctagtttttgtaattttttttttgaactagcatgactgtagggttgagctacagtcaacaaaaattgggctaagtcacttttccccagaaaagaatatttccctctcctgcatcaagtctgcgtggccatcctccccccaca

SEQ ID NO: 137988 - DNA, 345 bp, Glycine max
  unsure (1)..(345): unsure at all n locations
  Clone ID: PAT_MRT3847_95611C.1
gggtttgttttttttttttttttggggccaccaattgagttcataagattaaacctttcaattgtctgtccttgggggagacattaactgatagcggcaatatatcttaagccgcggaaagtaatagattttgtgtgttccgcagtaaagggcaatagaattgttgagatttactactaaagaggcaaaggaagtgtaacggacttgactttttggccaaagtgtcgtctcaaataagttatgccatattcataaaaataaaagttatgccactataaaaaagcgccgtgcttggaaaaggaagngaatcctctgtctctctctgttcctttaataaatgctctc

SEQ ID NO: 137989 - DNA, 255 bp, Glycine max
  Clone ID: PAT_MRT3847_95612C.1
ccggaccgaactcccgttcgacccacgcgaccgcccgttcaaaaacacgagagagaggacgaccgagggagcatttaaaaagcacgggcgggacaacaccaaacacaaacaaaggaccggcggcccacgccgacgccacaaaataaacaccccccacccccagccccaccgtagcgcccaacacaggcccgcccacacccagggccccgagaacccagaaacgcgaaaccccagagacccgcacaccaaaagcac

SEQ ID NO: 137990 - DNA, 224 bp, Glycine max
  Clone ID: PAT_MRT3847_95613C.1
agtatctttaatctctctatcagagctcccataaatcatatatgcatttattgtcaggtgatgtgattccaaagactacgttgctctttcaaggccgggtcgcccctgcatattcaaccactccggcgatgagcctcggctcttgcctcttgcagcttgacaagcgaatggcatgcctgctgtatggtacctgctctgatcgtcactgacgtgcaaccgtgact

SEQ ID NO: 137991 - DNA, 385 bp, Glycine max
  Clone ID: PAT_MRT3847_95614C.1
ggtttgctcaatgatctcctccccagctgttaccaccgtgaaccgtgccggcgcctgcatggtcgctccattcaccgcccttaaatccatggttggcttcccctggaggaagaccaccattgacattaccttcgttgctatcaacggtggctgagtacaatgcatgcttgtgtcgccaccaattgctaacaagaagtttgagactctttcctactcgccataccttaatgatgcccaactgttatacgaagtcaaataccatctaaagactggatggatcccttgctcgcaattcgacacggaccatggtctagggtaccatgatcacaacagggcacctggctactattatggactctactggaccatgtggaagctgcctatg

SEQ ID NO: 137992 - DNA, 716 bp, Glycine max
  Clone ID: PAT_MRT3847_95615C.1
gcaccagagaggtttttcactccaacgatcgtaacatataatactgtcattgaggtgtttggcaaagctggagagattgagaaaatggatcaacactttctgaagatgaagcatctaggagtgaagcctaattctataacttattgctcacttgttagtgcttatagcaaagttgggtgcattgacaaagttgactcaatcatgaggcatgttgaaaattctgatgtagtattggatactcccttctttaattgcataattagtgcctatggtcaggctggcaacttaaaaaaaatgggcgagttattcttggctatgagagaaagaaaatgtgaacctgataacatcactttcgcttgcatgatccagtcatacaacacccaaggcatgactgaggctgttcaaaacttggaaaacatgatgatttctgccaaaagtagcttgggcactaagttgattggatgctagcatagataattgtgattgaagacttaacaattctactcatggtgatcctgatttggaaatctttgagaacttcagcagggattctatagatgatatagcattggagtgcatgttgcttgaagatataaaaaatgttgggttttatttatcataatctcaagtgtagtttcaatcaattttggtgtcctgcataccattatgtatgcaactcagtcaaccaattgggttagggtgttcaattttgaaag

SEQ ID NO: 137993 - DNA, 549 bp, Glycine max
  Clone ID: PAT_MRT3847_95616C.1
acaacatgaagttttcattctctggtattttgtgataaaattaataaccaagaatgacatactctgaaatttactcctctcagccagttaatatacatgagttcctgacccaactgtttgaaacaacacacaacctctctagattcactctaagaagatctggcggcagttgaatggctggtataaagggaaatgtttatatttacactttgagtacatactacataaggctagaaaaagtacttaattcacttattttatatacaatttctggtttttctatattcagaaaaactaggcatggaagttgattcaattggttcaaattgttgaaaacctttccccctactcctgtatatatatgctacatgttttcctcatttggtttgattgtccaaaacattactttcccttccctctttattgccagagctgcaaaatgcttgaaatttcaagtacttataggcaagctgctggtctttgaacacccccatagactggtttaatattggtacatctggaacccgacggcttgggtccaaggttcag

SEQ ID NO: 137994 - DNA, 314 bp, Glycine max
  Clone ID: PAT_MRT3847_95617C.1
cttgctgttttttgaaaaacatgatttttgggtggggggcattatttacaattggtcctttcaattgcctccccattttgggctgcctggatctatgggtttattcatttcccattgtgcgtatcggtctctaccttcttaactttgtgcatttagttttttttttttggatttgttttttttttggtctgtggcaaactgactggcccaattggatgggctcgggttccattctttttccgggttccggttcctatcccttgggtttttcccttctttggttttcgctttttctcgttctatttgttttcccc

SEQ ID NO: 137995 - DNA, 246 bp, Glycine max
  Clone ID: PAT_MRT3847_95618C.1
atctgatcttattgggggtttatttggatttttttttttttttttgaaaattttattattattgaatataagaaaatgttcccgggttaacaccttcctcgggggcccctattatagcctttccaaaaaagaaaacccatggggggacctgggatataaccgttcaacgtttaggggctttaatatttgaaaaagtattggatccccttgctgtaaccccttaccactttaaaattctgggattta

SEQ ID NO: 137996 - DNA, 235 bp, Glycine max
  Clone ID: PAT_MRT3847_95619C.1
tctcccacactaaaactatcttcgacttggctttttctttaaaccctgcccgcaccttccaataccacaatcacctatccaccaccaactccatttccccatcttcaccaatcctatcaaacctcactccccataaaacctctcttttacccatcaatccactcttacattataccaatatatccccaaccacaccaacaacaacaacaagcgtcgtctctcaaacacgctctct

SEQ ID NO: 137997 - DNA, 352 bp, Glycine max
  Clone ID: PAT_MRT3847_9561C.1
taatatgaatttgtttgttttctttgctgttgttgtaattttggtagcatggccatgccatgtctcaggctaccaaaggtttcctctccgaatgaaaactggctatggtgagcgttcttcggaggtaatatgcgcatgttttacgcttgctgtggaagcacacaacatccctgcctttaaaaccattcctgaggagtgctttgaaccatcaaaggactacattaatggcgttcaatttagatcatactctaaaacaggttaccaaccagctttcttttatgctagtgaacccgaagtgcgtgacaacgacatattttattcggcgtatgaggatccccaccttttttatatt

SEQ ID NO: 137998 - DNA, 197 bp, Glycine max
  Clone ID: PAT_MRT3847_95620C.1
ctctcttttctttttcttcgaaagaaagagaaagagaaagaaaaaagatatccgtaagaccttgatccagctcatcatcgagtgcgactacttgttgtgcttcttgcgtcagctcgcttttcttccaaccaggacatgggagcagatgaagatatgtcagctttgaagtctaagctgacccaatcaaatgaaacttg

SEQ ID NO: 137999 - DNA, 221 bp, Glycine max
  Clone ID: PAT_MRT3847_95621C.1
ctctatatatccaactttttactcattttttcaacttcaaatttaaagtattttttgagtcattttctaatttaattcccacaaacacttctattccaacccttaaatctcacttttttaacacctattaatacccttacactacattcttcattcatcattttacatattatctaatattcccataccaatcacccttcccaacaatttctcatccttaa

SEQ ID NO: 138000 - DNA, 191 bp, Glycine max
  Clone ID: PAT_MRT3847_95622C.1
ggtttgtgcagatgagatgacatggaagccgtaataggctcccaccactttttccactctctccctctgctttctctcacaatatttgccctgcgtctcttcttctgtctagatatttaggctttcctcctcgtcgaccaactcttccttatcttctataaactggttcgcgaaagatgtatctggttggg

SEQ ID NO: 138001 - DNA, 363 bp, Glycine max
  Clone ID: PAT_MRT3847_95623C.1
agctggtcccctggcgggtccgggccgggatttctggggtgttccacgcgcgcgttcgaaaccaggatacacaagcacacaggggggcgggttggcagggtatgagcccaacagccctgaggagtggaaaatcagaccggatcccgtgtggtgggagctgagtgcatgggtgggagggctgctgtcatctgggcagggtggtggacgccctgtggctcagagccaaggcagcatgcgaatgggaagcactgatgctcacagtttgatggtaccagggcgcagattcatagatcatggacattttaccaaaaatgtaactaaggaagtgcgaggtcaacatggcacatctgaaaaagagttact

SEQ ID NO: 138002 - DNA, 1935 bp, Glycine max
  Clone ID: PAT_MRT3847_95624C.1
caaccagtttcaacctcatgaatacaacactggtccacgcgaagaagagagtgagtgaagaagcattatttccacttgacttgggtgtctccgcctttctcttctcaaatcaaatcaatgagcatggcttctctccccaattcccccgctctttcattctcctcatctctctccaccaccgccaatctcctcccatgtcgccgcttcaccgcattcccccgccgccgcgcctcttcattctccgtgcaagctaagatccgcgaaatcttcatgcccgcactcagctccaccatgaccgagggcaaaatcgtctcctggatcaaatccgagggcgacatgctctccaagggcgacagcgttgtcgtcgtcgaatccgacaaggccgacatggacgtcgagaccttctacgatggcatcctcgctgccatcgtcgtcgccgacggcgaaactgcccccgtcggagcccccatcggtttgctcgccgattctcccgaagaagtcgccgaagccaaagccaaagccgccaaatccgttccctctggctctcccgcccccgcctctccctccgacccttctccggcgactcctccgccacctcctccgccggccaagtctgtttcagaaggtccggcgaagatcgtggccacgcctcaggctaagaagctcgcaaagcagcacaaggtcgacattgcaacggtcgccgggaccggtccgttcggtaggattactccggcggacgtggaggccgccgccggaatcgcgccgtcaaagagaaatgtggctccggcggcgattcctgctccggcgactccagctcctccatcgaaagctgcttctggttctgctgcaccggctccgattccgggttctagtgttgttcccttcactactatgcaatctgcggtggcgaagaacatgatggagagtctatctgtgcctacgttcagggtggggtaccctgtgactactgatgcgttggatgccctgtatgagaaggtgaaaccaaagggtgtgacaatgacggctattttggctaaggctgctgcaatggcacttgttcagcacccggttgtcaatgccacctgcaaagacggcaagaattttgtgtataacggtaacatcaatgttgctgttgctgtggcaattaatggtggtttgatcacccctgttcttcaggatgcggataagttggacttgtatctattgtcccaaaaatggaaggagctagtggaaaaagctcgtgcaaagcagctgcaacctcatgagtataattcaggaactttcacgctttccaatttgggtatgtttggagttgacaggtttgatgccatactgccaccaggccatggtgctataatggctgttggagcatcagagcccactgttgtggctgctaaagatggatgcattggcatgaagaaccaaatgcaggtgaatgttaccgctgatcatcgagtaatctatggggctgatttggcttcattcttgcaaaccctgtcccagattattgaggaccccaaagatcttactttctagtccattttccaacagtgaaaaagcgttttccttttctggcttgattccctcatcatggttgtgggattattaattgttgacaaggagaaatcgaggagtcaattgctattcactcgggattttgcaaagaacgaaaagagttttaaataggaaaagctgagctatagtttcttaaaatgatatcgaatatgccatttacatttttctttaatgctgcctgatttttttttttttgttttttgggatgttcattattgtctaataatgttaattatttatgtaagcttaaagcttatttttggattctaaatcttgaaaagtgaaactcaatgaacgttgattctgttatggaaccaggaaaggttagtgatgaagaaaaaaaaaaaaaaaaaaaaacac

SEQ ID NO: 138003 - DNA, 299 bp, Glycine max
  Clone ID: PAT_MRT3847_95625C.1
ggaaccaagaattgagaattttgggcatacaggggaaaattagggggaatacaacggataatcccaacttataaaaaaaacacctgggggattggtgttaattttttatcggaggggtgggctgaaaaataaacttaaaagggccctaattaagctcctaagcctaggaattctcggaactaggcgaaaaaaaaaaatggccatcctttttatttttactagggagggggccccccccattccgtagaacaaaaaaattttgagactctgcggggaaagaaaaaggaaacattttttcc

SEQ ID NO: 138004 - DNA, 486 bp, Glycine max
  Clone ID: PAT_MRT3847_95626C.1
attcgagctcggtacccggggatcctctagagtcgacctgcagtacttgataaaaatttaatatttaatgactctgtcaagttaataaatacattatgcttaatcaatgagtagcagaaaagcatgtgcgtgatgcttctcttcaagacttatttaatatatgtaaacactgacacaaattccttcaccaacttgatccaccaagaagagcaatgaaggaaaggatagatgcaatgagacaaaatgcagcaccataatttcaattatttggtattgttagacttgagtgggatttctctcagggctggccaccatagcttcccaaatcaaatccaaaagaaaccatcataatttactaaccgcccatgtcaaaatcactagtgaacaaaaaaggagtaagggacacacatgacaaaatccacacccttacttgtatatgttggggatctattttcatctaaaagaatttgtgtgctgcaagttttg

SEQ ID NO: 138005 - DNA, 237 bp, Glycine max
  Clone ID: PAT_MRT3847_95627C.1
caaaaaaatcaccaaatactactttatttatacttactgcatacattaaaaattggaaggctcatattgactctaaccacccatcaattcaatatcaacccatacctacttcaaaaaaaaaaaaaatcaactcaaaacaaatacatactcaaatatcatccactatctactaatcaatcttacttcatctccatatcaacatcataatcttacataatctcacctactaataatata

SEQ ID NO: 138006 - DNA, 776 bp, Glycine max
  Clone ID: PAT_MRT3847_95628C.1
aaaatcattttctttagtgagtaaccactttttattttcattccttttagtatgctcatgatagttcttttaaaaaattgaaggccaactctatggtacctattatctatttttactttgtattaatgactttaacaaattaaatttggtgtgcagatcatggattactcgtctctaccacatttctgtagaagagaaggttctggatcatccagacattctgagagtggtagtgaaaattgctattccttggatcatcccttccatcaagggctctacaaccacatcaagcagcaagccagactccgtgaagctgttgaacccatcaagcagggatcgtttcatgtagattttccagtacctccagatgatgaagttgagatcgccaagactatagagtcggagttacacaagtttgagaacggaaatgatgtctaatactttcttttaggatctactgtggagaccttaaaatcagagatcttttgctagtacaaccaatgtagaaggactccacatcagaattacttttatcaggattcggaagaattagttagcgttgtttatgtatgttaaaagagaaattaagggttagtcaatttaatgcaaatcccagctttacatcgtatcacaatgctagagatcaatgttaaatataatattttatccttgtgtttcctgggcttttgcagtgtttggtcttgatatttcttgattttcttctaccagtttcaaagtagagtagttgtaatttaggttaaaaaaggaagaaagat

SEQ ID NO: 138007 - DNA, 254 bp, Glycine max
  Clone ID: PAT_MRT3847_95629C.1
agcttgcataataatttcgtacacttcttctcttcttttctctaactttctttcttaaatcaaacaaaacataaatgaatagggtgaaaccaagtaacctaagacaatgagggagggaatggtcacgtggaaacaattgaagttactgtacgatagggctgctcctcagtcctcattattattcgtttccaactttcaactacctcatttacactagcaactcctttcttcactataaaattctcaacttggtt

SEQ ID NO: 138008 - DNA, 239 bp, Glycine max
  Clone ID: PAT_MRT3847_9562C.1
ttttcttttttacatggttttaaaaaaggggttgttaaaattcttattggcgggttttataaatgatcaagttccgcatctggagccactgaatgctacaaagaaggtttggaccaagaatttgatggctaatttccaaacgaattgttagtgcttgtaagaaaaagggtgttttgatactactgtgcacaaccacggttttctcccaatccatttatgctatacgtactcgggacaag

SEQ ID NO: 138009 - DNA, 102 bp, Glycine max
  unsure (1)..(102): unsure at all n locations
  Clone ID: PAT_MRT3847_95630C.1
aaatangactaaatgctactacagactgatcgaaaggtggatttcatgcaacatgccggttgtttccaaagaagagcacctactatgacgccccaagaacga

SEQ ID NO: 138010 - DNA, 695 bp, Glycine max
  unsure (1)..(695): unsure at all n locations
  Clone ID: PAT_MRT3847_95631C.1
gcacatccaaaattaacatttttattaaatcaagtttaaaaatgttcattgtagaaaagtcaacaagggtattaagaaaatcaaaatataccttttttttttacaatatatgtatatattagcagcaaactacttcagagattttcttttgcggttagttattttaaagaaagcataacagtgttatgttagtgtggaatgtcagaattcccccttcaccctttactttgtgacttggccttctctacaacactttataccaaagattaagaacaaactttgttttgactaaaatgtagtgaaacagtagctggtaaaatctctcaccacacgtcagttatgcatcattttcaaacgtaacaagtgagcaccatttaacatttttcaggtgtaataacagccaactgtaccacatagtatttggcttactgttttaaaaacttggtaacatacaaaattttaaacaaaggagataaatacttcaatcctatattgcttgtccattattaaaactttttaatagaaattctatacataacctgacaaactctaggcaaagatatatantgtgtatatatacatgcaaaagtctatgtacatatccacatacatctgcaactttggatttttaaaaaactaattgaatgtatcattcactggctgaaaagtttcatcacccagtgaggaatactgac

SEQ ID NO: 138011 - DNA, 160 bp, Glycine max
  Clone ID: PAT_MRT3847_95632C.1
cagtgctaataaattccaacaaacctttatcaccatcccaaccacccttcacctattctttcacaattactttggccaggattataatacttccattttaattacatccaccagaaataacaaagcaggagaaaatcaccaatacaacctatctttagcg

SEQ ID NO: 138012 - DNA, 356 bp, Glycine max
  Clone ID: PAT_MRT3847_95633C.1
ataaaaaaaactggatccatcggaaggaaaaagatttgttgcttatcaattacgggaacataaccaaagggtttacgtttgttacagtcctatttatgatgtggctccacaacgcataatatgacgatgctgagatttgaaaaaacggttgtggctaacttgaaattttgaccttgatagaaatgtaacaagccaaacaagatcctgaataaaaataactcggtgctgctagccctcagggttgacatgcattataagattgatttgaaaaggtccaattcttttgctcccaaacggagggaaagaaatatccctttacggccgaaacccttgcaaactgggcctctttttttttg

SEQ ID NO: 138013 - DNA, 460 bp, Glycine max
  Clone ID: PAT_MRT3847_95634C.1
caggtggtctattcttatcttagcagaagtatgcagcaaagatcattgaacaggtcgacatgtcatcttgtaagccatctcttactccggttgactcaaaaccaaagctcaatgctaattccagcacaccatatgctcgatccatctcattatcgaagccttgcagggactcttcaatatttcaccttcacgagacctgatattgcttgtgatgtgcaacaagtgtgtttgttcatgcatgacccgagggaagaacacatgcacgctctcaagcgcattgtgtgctacattcagggtacttttgatcatggcttgcatccctatccatctttcacatctactcttctctcttatacagatgctgattggggtgggtgtctggataccagacgctctacattgggttattgtgtgtttcttggtccaccaaacggcaagctacgttgtcacgaactagtgt

SEQ ID NO: 138014 - DNA, 234 bp, Glycine max
  Clone ID: PAT_MRT3847_95635C.1
atcgagccgcaaaaatggatatgcaatttaaatacaaatcaagcaatgtgacaccacagactacaagcaatgacagcaattcaggagtggaggacagtgaagaagaaggaaatgatttgggtgtgcaaagtactaatttggatgtccatgattttaggtttctggacaacattgctccacctagttactattctccctttgagatggctgaagagatggcggagcagctgtgga

SEQ ID NO: 138015 - DNA, 369 bp, Glycine max
  Clone ID: PAT_MRT3847_95636C.1
aagctcaccgatgcaagaatgtgtaaatcagttggaccagggtaccttataaaaaatctacaaagtcacgggaccctagtcattgagggagtaccaccaaaccctaaattatccttaactgactgctggttattgtctagtagccgccaaccacaggaagtccttgaccagaatacatgaggcttccgatcttgcaactgagggaaagaataagaactgagaaaccggacgggaaaatccagccttgggacagcacaaatgcggttttgccaaaaacaggcataaaagcggccgaattaacttggggtggcgaaaacccagaggatatgacagggctaaaccctccttttgggcccatagcccaatcca

SEQ ID NO: 138016 - DNA, 799 bp, Glycine max
  Clone ID: PAT_MRT3847_95637C.1
tatttttatcacaaactgcattaatggaatatgcatgcatgcataataatacataacctaatgaacatagataatacatagatagctggttacagagaaaagatgacctagctaattgcaaaataacatagcccagaatggaagacacacgcataatataactaatacgggtacatgacatttttttagatgatgcatagtagtattaccatggttttaaattacgttccgcaactgcaattatgaccgtaacgtcaagtattttaatactccgcaatcatatcatgactgcaatttcgatcgcatttgctgcattttcccacaatgtaaaggtttctttgcttcatcacaactgcaatttaaaactatgaatattactaattaattgttagcatgttaatggcctactccaggactgtggccaggagttgtgggcctaaaagcttcaacatctccggataggcttctaatgctacggtagcttgggatggcattagcactttttgttgcaatgctcattgctttggtagcatctggtgattgaatggttatttgtctcaaattccttccctcactaccgagtagttcatgggacagaaagaggagtacaaagagcaagacaaagtgagtgagacgtgccatgtgggagaatgagaaagaaaagaactcagctaaaagaaaactgagttcaagggttaaaggtggcacgggggtggaaaagatgggtgtttgaggaaggatctgaagggagattgataccttcgacggctccctcccttagagctcccttcagtacaaa

SEQ ID NO: 138017 - DNA, 303 bp, Glycine max
  Clone ID: PAT_MRT3847_95638C.1
agtcattgcatgtataccgcgggcataaagggctccgagcggacattattgggagcatcatttcccatgttctgatttaatcactgccaatatgatgatccacataactgggcaaaaaccaaagaatgccactctgacagacacctcgtacctcaacacatgcaatccaggggaggacattacaactgacaagtgcatacagcctacccgagatgaatttcaaatctttgtgactatagctctgccgtctgcaattcagatttttaactcttcggatcagggtggactgggcatataagtgca

SEQ ID NO: 138018 - DNA, 107 bp, Glycine max
  Clone ID: PAT_MRT3847_95639C.1
cccacgcgttcgggctctacgtgccgacactctcatcgtccaatcgcgaacgtcaaactacagagctatggggatctgaagcttatgttcaatgaccaaggacaagc

SEQ ID NO: 138019 - DNA, 374 bp, Glycine max
  Clone ID: PAT_MRT3847_9563C.1
acatcagactgcgggaatcattggctggaccacgctgagtttatttgctgaacactctcctatttgatataggacttcgggtcagatttaaactttttctgtttctttctcaggtatatgcttaacagcaaggtcaagctggtgacatcttggattagggctcccactctcctatctggtataggactgcgggggtcgactttcctattactgtactttctttcactatctacatactactgatccgaatggtccgcgaaagtggccttaaatgaaaaacacttgcgcgttggtgcaagtgtatagctaagctaatttgctcaggggacaacatgctcactgtgaaaacactttttactcgctgtgtgatggac

SEQ ID NO: 138020 - DNA, 455 bp, Glycine max
  unsure (1)..(455): unsure at all n locations
  Clone ID: PAT_MRT3847_95640C.1
cccggtccgaccaagccttccggatttatttcttggctcattgtttgcgtggcacacacgacataaatgaatgagttcagtcgaagatatcagtgaaattgaaatacaaggttttttcttcaatatttttggaagccaaaagttaccttttgaattttaacattgattgattgcgaactatttgctcagcttctgcatgtaatggagcaatggtattaatcttgtggcatgggtaaaaattgtaaatttcttataatatctaaatcacacgaaaagtaccaagaatttagtccattagcctttgctgctattatgcagatggatactgtttcaatgtttcacgtacaaaaacagaaaaataaaaatggttaacagtgtctataacaaaaaaaaagcttnnactcaaaaataacatgcaaatctttgtcaagactttgactgacaagaccatcacc

SEQ ID NO: 138021 - DNA, 310 bp, Glycine max
  Clone ID: PAT_MRT3847_95641C.1
tcgtagctgaattcgtcagaaaaaatcttcccctctccttttccttttcccttccctttgtgattttttaccacgggggcttaattttgctattttatattctaactactctttgtattcttatgttctttccagataccaaacaaaccataattatggcacaataatacctgttcacaacagaaacaagctttcacaaaaaaagagccaataaacttaaattttccacatgtcaattgttccttatatttcaaaggataaaaaactggatgacacataaatgatggggttttcttttcaccccaccata

SEQ ID NO: 138022 - DNA, 304 bp, Glycine max
  Clone ID: PAT_MRT3847_95642C.1
tcggcacgagtggatctagcactggtaaaatccttcatagccagtgaagttgagaagtgcatacacattgctttgttgtgtgttcaacaagatgaagcagatagaccgaccatttccactgttgttctaatgttgggaagtgacacaataccccttccaaaacccaaccaccctgcattttcagttggaagaatgaccttaaatgaagcatcaacttcaggaagttccaagaatctttccatcaatgatgtaacagtctctaccatgttaccaaggtaattgggaatattatttcaatccttga

SEQ ID NO: 138023 - DNA, 238 bp, Glycine max
  Clone ID: PAT_MRT3847_95643C.1
actgcttcaccttactgctctagaaaattcagtgctgaaacatggcttcggctactctctgtgtagccaaaccagagcttcaggcaaatgggaaaggcttcactgaagtctctggcctgcgaagctcatcaggctaccttccctttactagaaaatcttcagaggatttccattctgtcattggcttccagacgtatgcagtaggaagcagttgaggatacacgaagggtgtgacaga

SEQ ID NO: 138024 - DNA, 798 bp, Glycine max
  unsure (1)..(798): unsure at all n locations
  Clone ID: PAT_MRT3847_95644C.1
aagtaatgaacctgtagacaatcaattgccgcgatgttattctttgtgccataatatatccttgctatccactgacatgggtattgtatatttcatatctgatgatcaagtgttcggttttcgatacaccgtatctctgaacattttttactaactcggaactgatgtgaaccctctggttggtcatgactgatgatgtcatgtgttctccaaacgacaaggacttgtcgctgagtcctaatctagatatcacgatagatgatggttctccaaacaatgaacaactacttgaggttgaggatgagggcaatgagcttgagaatgaatgtgggcaattgtttgagattgatggaagtgaacctgaaaatgggagggatgaaacaacaatagttgatagtcatagtggagaatctcaagggaaagactgccctccgccagttgtgagaatggagtttgatacctatgatgatgcctacaactattacaatacctatgccaaggatattggatttgctattcgggttaaatcttcgtggaccaaacgcaacagcaaagaaaagcgtggtgctgtgctgtgctgcaactgtgagggtttcaaaacaaccaaagaagcaaatagtcataggaaagaaacaagaacaggctgtctagcaatgattagattgagattagtggattctaacaggtggagagtcgatgaagtcaagcttgatcacaaccattcctttgatcctgaaagagcacanaactctaaatcacataagaagatggacagtagggccaaaagaaaagttgagc

SEQ ID NO: 138025 - DNA, 226 bp, Glycine max
  Clone ID: PAT_MRT3847_95645C.1
tgctccatccacagactactgagcagggcatactcgcgtggcactcaacccagcatatcagggaagcccctccttggacatgagctcgaataactgtagtcgagagtgcttgagggacctgagggattaatggcatctgcgaatgcgacgaccagagggcctggctcaggctcacggagccaaagtcatgatggtcgaactcagttgacagaaactgtttatcgat

SEQ ID NO: 138026 - DNA, 247 bp, Glycine max
  unsure (1)..(247): unsure at all n locations
  Clone ID: PAT_MRT3847_95646C.1
nccactcgtccgcactatctaaacataagctgtttccagtctccgacagtataacgatcttcgactgcacncttacattaaaccgtccgcaaaccttccgatcctacaatctcctatccaccaccaaccgcatttccccagcgtctcatctctatcaaacctcactcccattcataccgcgcttttttcgaggaatcctctcttccgttattccatgatatgtccaaccacaacaacaacaacaaca

SEQ ID NO: 138027 - DNA, 329 bp, Glycine max
  Clone ID: PAT_MRT3847_95647C.1
cccacgcgttctgccagataaaaacttaagcatcggctaccctaacctcgtcttggtctctagtaatatcagatgtgggggtcggatctatacttgacccacatcctatccagatagagctcaagctttttaaccgctggaacttagaggatattgatgatactcacattttactgactcattacattgtagttgctgcatacatgcacgcctcatatgctcttcacaccgtctgaagttacttcgtgaagcgagacaggaaggcgcaattccccattgttgtgaggctcaccaactctctcatgctgcacgggtgaaacaacggcaag

SEQ ID NO: 138028 - DNA, 197 bp, Glycine max
  Clone ID: PAT_MRT3847_95648C.1
aaatcatgtttatagagactgagagatagggagagggtgactgaatgttctactaaacggctgcctgcaccgtctactgaacacaatccctgatcacaagatgcttcatctgaaccccatcaaagacacagcttagtcacttccaacaaaaacaaggacatttcctgcagaacagcaaaggggcaacagcacaatgc

SEQ ID NO: 138029 - DNA, 470 bp, Glycine max
  unsure (1)..(470): unsure at all n locations
  Clone ID: PAT_MRT3847_95649C.1
acgagctttcatgacttactcccccagtcccttgaagttttaagtcaaaacattactttttcagataaatcaaacagaagttaaccttcccacacttgaagccaaactctaagggggttatgtgataaaaaaaatactctatgggggtaggggtggaagtgataagtaaaccaacttcagggggctttaagtaataaaattaaatttcgtttttgtattggtgaggtcacattgtgtgcatgtgccttgtcttcctttgagttaagaagtaaacattttcacttaaaattaaccgtcaaggngtttatgtgatcaaatgaaaaccgaccttttctctcttccatttttgtgtggagatggtgttgagaaaggggctatacttaaaggatgtaaaatacattttttcctaaaaatataagtttcccatttgtagtagttgtagactgtgttcataaataatgtttattgat

SEQ ID NO: 138030 - DNA, 417 bp, Glycine max
  Clone ID: PAT_MRT3847_9564C.1
ctggcccaggagatgagatttctaaggccaggggagaagagtcgtgtctgtggactccttaggcacctcgccatggagtcttccctatcctaatggctatcgctgtgggctccggggaacaccatatatgcgttagggtgagcattacgttcttatacccaccatactttaaagaggccttcccacaacaagttaccatgccgatttcttttggatgatagctaacacttgttaccactgaggtgagaaccctaaattttcaaacatcatatgcctatacaagatcccaaaaataaatgaacccatccttttagccaccagttacatgaacatccctattgtgcaggccgcaatcccttttgtaagacttattagtgggccctttatattcttgtcacagttcacctgtggacctgt

SEQ ID NO: 138031 - DNA, 246 bp, Glycine max
  Clone ID: PAT_MRT3847_95650C.1
agctggcagcacaggatttgctagatcaaaatgtcttttgctaggaagcatcgagaatcaaattctgttatgcagatattcctgcagatatggataattacatgtagcaattgggcattataaatatatgtaaataactagcaaatgaataagaacaattacactccttcttcattaaaaaaaaaaaaaaaaaaaaaaaaaaaaaaaaaaaaaaaaaaaaaaaaaaaaaaaaaaacaaaaaggggg

SEQ ID NO: 138032 - DNA, 2270 bp, Glycine max
  Clone ID: PAT_MRT3847_95651C.1
gttcctgtttacaaggctgttaaaagccggggagtttataataacattccctagggcatatcacgctggcttcagtcatggtttcaactgtggagaagcagtgaattttgcaattggtgattggtttcctttaggggctgttgctagcagaagatatgcacttcttaacagggttcctttactgcctcatgaagaacttctattttaagaagcaatgcttcttcgtacatgcttggaacttgaagattctgactttccttcttctgacttgttttctcataatagtattaagatttcatttgttaacttgatgcgtttccaacatcgtgctcgatggttccttacgaaatcaagggcgggtataagtgtttcttttcattcccatggcacgattctctgtagcctctgcaaacgtgactgttacatagcttatgttggctgcaactgtcacaagcatcatgtatgcctacgtcatgatgctgattctcttgacttcaactgtgggagcaaacacacactttatttgagggaggatattatggatatggaagctgcagccaagatgtttgagcaggaagatgggatattggatgagataaggaagcaaactaaaagtgaccagaacatgtatgcatatcctttgtcaaatatgtttcagggagtcgaggccaatggttacacgccttattgtgagctaaaacttgattctgttgttgaattttatgcaactccagagcactcaacaaataatcaagaatacagttcacaaaatcaatctgtcgttgtacgttgctctgaaaataaaaaaccagtggtgtctgaggtttccttttcttctgccacatccactctttgctctctttcagaatctctcgagagcttttctgctcccaaaaatgctgaggagcatattaacaacaatgcaagtattattgattttgaagagtttgctgaaagaatatccaacagtgcatgtgaatcttcattatctcctgctgtgtatcatgaaagctcggttaaaccactgggtgatcttcagaagagatttgatacaaaatccattgtggacgagagtgatgattctgattcagagatatttagggtaaaacgcccttcttctctgaaagcagagaggagaaatatgaatgatgctatgtcttcaaaacatactgcgcagcagggacttaaacgactgaagaaaatccttcctgaaggaaagagcgggcaaccaatggatttcagtagaagcaatgaatcaagttacaaatacggtcaccctgttaaccataaaggtcatgctgaaatttcgtctagggacagatttgcaacgggtaatggtattcccatttctataagatgtaagaagttaggcaacgaggaaataagcatgcaacgagatcacaaccggagagataggttgcagcagacatttagggaaccaccttccatggagcttgagccaaagcgccttaaagtccgaggcccttcatttttaggcttagagagcagcagatcgaattgatgtttcaagttggctcgaaatgattgtggaacgccatcaagagtctgactttgctaacttcattttagcttattggctttctaacaatacagtaaatccaaatgattgattgagagaaccagcaaagagatagtttgcagcagacgtttatgaatctacattctttgtgcaggccttaacatttgcggaaagtccgaggcccttcatttttaggcttagagagcagcagatcgaattgatgtttcaagttggctcgaaatgactgtggaacgccatcaagagtctgactttgctaacttcattttagcttattggctttctaacaatacagtaaatccaaatgattgattgagggaggaagcagcggcaagatattaacgtattagggtatgaatttacattctttgtgcaggccttaacatttgaggaatctgcacgagtggtgatcctctgggttctcgggccgaggtgtttttccaactttggttggtgaacctgacttgcaaagttaggacttagaaatcggtttagcgacatttatttccatgtaaatttgttttcttcttttcacaagtcgttttaggtcttcttaggaacgtgggtctctccattgttttctcattaaattctatcacagctgcttcccccttctgatgttaatccattctttttgtagcaataggtcctttgtacctagaactacttgaataaagttcaatgaaatttctcattttcactctaaaaagaa

SEQ ID NO: 138033 - DNA, 1371 bp, Glycine max
  unsure (1)..(1371): unsure at all n locations
  Clone ID: PAT_MRT3847_95652C.1
tttatgaaatggaaagtaattactttaaaacatttttggggcaagttatatcattgtaccagcttgttgatgctcaatgctatctataagagtcctataatacaaataaatccaatcctttactagataatagtataacattctataccttcacattgatagagctgcatataggagttcattccaagtatcaggtagtcctggtaggcaccaatggctgcaatcattaccggtgtgatccactccatagacagaaggatgtgcatcttttcttagttgtgacagaagtgttatgtcaagtagataaacttgattcttcatgttcttcaacactttgttcactatgtttgctgctggaggtagacctgctggatatgttgaccctgctgatggttctagttctccactacaactctttcttggttgattccactcctgaccttgataatgagtaggagaaatgccttgaaagaaaactttagttttggtagagtcaaccttttgatcaacccatccagcccatgtggtcatccctttgaaaaatgcatccaaacgatccatatcctttactagattggaaccgttccttatgtaatcccatccttgagaatctcctttgtgggtccaccaatgccatgagttgaagatcaacatgtccatgcctgtccaagcatcaccagctttgatggagtttagtgtgagcactcttccaacatcttctctatctatgtccaccaaatatggtgtgcggtatagttgtatggttactccatagtcctcgaaggtcacagtggagattgcttgtctcctcacaaagctggtggtggcattcggcaccgacgcgtgaagcatgcaggacaatgattcccacatgttcagactcaatgagtctcccacaaacattatcttcttgcccttccacttgttcaagaaactcactccatcgaacctgggtaaggcacatgaatcaggcttccaagagtatttgagatactgcctgtcgggtctcccatacttttggcaatcaaactcagcatctataaaggggcagcttgaggagtcatagagaggatgtgaagaagggtcaataacccaacttccaatgaacaaattacatctattcaactcctttctccccttcaagcgagccacattatgattattatcattattatgtgactttgctgcccttgcttggtgcaaggacacaaatagagctaagcaaaacaaagagagcaaaaccagggtcctgactttggaacccataatatggtgttgtgttgtggtacctactatattttgaggtccccagaagatgagagggagagagagaagtaagagcctgccaagtcgngccgnttccgnggttac

SEQ ID NO: 138034 - DNA, 989 bp, Glycine max
  Clone ID: PAT_MRT3847_95653C.1
ccacgcgtccgtacggctgcgagaagacgacagaaggggactcacgtaactacaacacaacaaacatacatagagaaattcactcatataaaaatcatcacttcaaataaagctagacctagaaagatccagaggtagctacggagagaaacaaagctcatggctggtttgcaaagatctgaggtgtctttcaggagacagggttcatcagggcttgtttgggacgacaagttattatcaggggaattgaacaagaacgaagacccaaagggtgctcatggtggtgaccttaaccttaaccttaacgttagaacaacaccacccatccagagaagtcgctccaacggcggctaccgcaccggaaaagtctcgccggcgatcgagcctccctctcccaagctctctgcttgcggcttctgcagcgccttcggaaaaacaggggaaaagggtcgtcgcgcaaagccccgtgcaaagcatcgatcaaggtaggttttttctggtcgccggagatgctcttcaacttgtcatgtttctacccagttttatagaagagtgtagggtttgagtttgagttcatataaggaaaaacagaattgtcaattgtagctctccgtttctcttctgagtctctgtttacgagttttagtttgtttttcgtttttcttttgtttctgtggaagaagatattatgatggtttgtggtgggtgggtgagtttggttgtaattatgtgtgtgtatatatttgttgggtcaaccaggaattttggtctctgtacaaagtaaaatctccaacaagatctatctttcacagatttgggattggtgcaatatgggcacgtgatttagtaatcaactccatatatattgtcattcaccaaaaataaaactccatacatatattgtatgagatcatatatatctgataaatatgaggaacttaaaaaaaaaaaaaaaaaaaaaaaaaaaaagggccgctctcgaggatcca

SEQ ID NO: 138035 - DNA, 837 bp, Glycine max
  Clone ID: PAT_MRT3847_95654C.1
aggggctttttttttttttttttttgcacgtgagaatgttgtattaactagtgtttttgtgcaataaatccgaaagaagacaaagagagcaaaatgaaaagtagcaaacctcgaaggtcacagtggagattgcttgtctcctcacaaagctggtggtggcattcggcaccgacgcgtgaagcatgcaggacaatgattctcacatgttcagagtcaatgagtctcccacaaacattatcttcttgcccttccacttgttcaagagactcactccatcgaacctgggtaaggcacatgaatcaggcttccaagagtatttgagatactgcctgtcgggtctcccatacttttggcaatcaaactcagcatctataaaggggcagcttgaggagtcatagagaggatgtgaagaagggtcaataacccaacttccaatgaacaaattacatctattcaactcctttctccccttcaagcgagtcacattatgattatcattattatgtgactttgctgcccttgcttggtgcaaggactcaaatagagccaagcaaaacaaagagagcaaaaccaaggtctttactttggaacccatattgtgtagtggcacctactatatttgaggccccaaaagatgagaaagaaagagagagataagaaaaggccttgtacgttgttttgtttttcgtcacttgtgagtgagtttatataggggagagaaacacaagaaaaaagttgtctctaagggtgggttcacatggtgttgctagtgaactttgattgattattattttcttaacatgagttggggcatcagggctcttggatggattcgtt

SEQ ID NO: 138036 - DNA, 645 bp, Glycine max
  Clone ID: PAT_MRT3847_95655C.1
gtacgcaaatgcaccgcgctacgctaagccttgggactcctctagaagacggcacgcaccttttttttcttttttattttattttattttatttctttatttcttttctttattttttttttcttttttttttttctttttttttaaaacccccggacaaaaggggaaaaaaggggggcccaaccccatttttgaactggaaaaaaaccaagggcaaggcccggaaaaaaaaataacaaaacagctgcgcaaaaaatccgagaaaaaatatcaaaaaaaggcaaggaaaggcctaaaaccctacaaaaaaggaactataaaatgttggttccttaggcaaaaaaaaggggcaagggaaaaaccaaaatggggtattttaaagattcccctttcccaaaaaaagctgctccccggggataaaaaaaaggggggaaaagcgggggggccttttcctttgctctggggggcccggatatcgaaaaggcccccaggggagggacagctcctttttgcaaaaccaggggccaaaacttaaaactttgaaggcttatttgcaaaaaaaggggggcggctttttcttttcccctcggggaaccatacccaacaatttcaactaaaaaggggatgcccctttcccttgcaatt

SEQ ID NO: 138037 - DNA, 314 bp, Glycine max
  Clone ID: PAT_MRT3847_95656C.1
ttcttttcgtccgtttggaaggatgtctcacgctgctcatcacgttactcagccccaagagacagatttgcaggagggaaacatttcctttgatcttaaatctggctctagattggaagaagagaactctactaaagcacaattggacagtggaaaaaccttcaaatatgatatcactcggagctggttcacattccacagaagattttgctgtaaaagaagatcaagaaaaacccaaaaagattgatgccagattgagacaaagaatagatcctgaatacaatgaggatcatgctcagatggaaacaaaactg

SEQ ID NO: 138038 - DNA, 1314 bp, Glycine max
  Clone ID: PAT_MRT3847_95657C.1
ccaatcaccctctctaaaacaatcccatattctcttgtctatttgattgcccttgtgttccctttacaatttaaatttcttttacttgttttaatcattttccattcacaacacatatcatcatcaacatgcctgaggctcctggagactccaccaaagactatgttcttgaagagaagaacaagaaaattttggacttcatagaggatgtgaccaacaacgcagatgaagtccagaagaaggttctctctgaaatcctgtcccgcaatgcaaacgttgagtacttacggcgacacggtgtcaatggccaaaccgtcgaccctgacaccttcaagaggcttctccctgtcattacatacgaggacatccaaccagacatcaaccgcatcgccaatggtgacaaatctccaatccttacctcaaaacctgtcacagaatttctcaccagctctggcacatcagggggtgagagaaagttgatgccaacaattgaagaggagctaggaaggaggtgtatgttgtacagcctcttgatgccaataatgaatcaatttgtccccgacctagaaaagggcaaaggaatgtacctaatgttcataaaatgcgagtccaaaacacccggaggcatagtggctcgcccagtcctcacaagctattacaaaagcccttactttagggacagatcctacgacccatatacaaactacacaagcccaaatgagaccgtcctatgtcttgattcctaccaaagcatgtactcccaacttctatgtggcctttgccaacacaaagaggttctaagagttggtgccatattcgcctctggcttcatccgtgccattaggttccttgagaaacattgggcccttttgtgcaatgacatcaaaacaggaactattaacaactcaatcactgattcttcagtgagagaggctgtgatgaggatcctcaaggctgatcccaagcttgcggattttatccacaatgagtgtagtaaagggtcatggcaggggattattactaggctttggcccaatacaaagtatgtggatgttattgtgacggggactatggcacaatatatacccactctggattactatagcaatggcctcccacttgtgtgcaccatgtatgcttctagtgagtgttactttggggtcaacctcaaccctctttgcaaacctagccatgtgtcttacactcttatccccaccatgtgctactacgaattcttaccggttaatcgaagcaatgagcttgctgcttcaagacctttcacaacttctctcaatcaggcacaaacagcagaat

SEQ ID NO: 138039 - DNA, 515 bp, Glycine max
  Clone ID: PAT_MRT3847_95658C.1
ggctcgagctctctcgtcggaaaacgaaatggagggtatttttcggacagcagtatccgatgaacgggcattggctgatagggaacaccaagagaatgcctctgccaatggtgaagttcgaggagttgcctgctttcctgaaagacatttatttcatcgcaaaccattaccgttcggaatggtctgtgaacgaggcaccattgacatgtctttatgtggcccaactacacatttaacattacgacgcatgtgggtaggatattagtatttgcagctacgacagtgctcggaggttgattatcaatatatttccgggaccgcgaatggagatgctcacgatggggaaagaaattaacggctctccccctggcaatacgggattactggtttcgcatattagacacattttggctccggccatggttcatccctcgaaatattttcgtgccaaaacactttccattttgccatggtttctttgtttagatggaggaatgtgctgtttggcctttaat

SEQ ID NO: 138040 - DNA, 272 bp, Glycine max
  unsure (1)..(272): unsure at all n locations
  Clone ID: PAT_MRT3847_95659C.1
attnccngnntntacanncacccantctcatcnanacntaanttanancacnntcaacnctnntaccantatccatnttctacatctntnaantgccatnttcacccaattatnaacangaaacnnacccnccnccaaacttcctnntncaantcntaacccnactnaacaacaanncttacacctatnncncnaactttntccccanaaantnanagaaaaaaaaaaaacntnaaaccntgntnaactataatttaaananaaatttcnnt

SEQ ID NO: 138041 - DNA, 453 bp, Glycine max
  Clone ID: PAT_MRT3847_9565C.1
aaattttaaacatttcgatatttatatggatgaaaaacatattttaacctataatttaagtttaaaaaaatgttatctaggctcagattcgtccaagcctaactccaaaccaaaaaacaacacatttcaatatcataaggacgaaaaacataacaaaaattttgcaggattatgaacttttcaatatttataaagacgaaaaacatattttaacctttttaaaaatatatttataattatatagtatttttataaatagattgaaatcgttaccttcttttatgtctacttaatcaaattaaatatgatatgtgattagaaaatatgagaggtttaatttttttccaaaagtgttatattcataaattcattttaaatgaatttttaagcaaagaaatactagaaatatattttctaacccatcctttaactaactataacatcatgtaataa

SEQ ID NO: 138042 - DNA, 306 bp, Glycine max
  Clone ID: PAT_MRT3847_95660C.1
ttgggcggccaatcaagtttttaagaatcaattaaaaaatcccctttattcaaaaagaattttcccttccccttttccaaccccccctttaaaccagttttttgaccccttaccctacctttgtccttttggagggaaaccttttttggtggtggcccccttcctgttcccctaattgaatttccaccagcaatttgccctcaaccaaatggcacctcttatataacaaaatgcgcccccacaaaaaaaaatattccctattctttaaaagccttgcttttgcttggcaccaaaaccttccttcct

SEQ ID NO: 138043 - DNA, 240 bp, Glycine max
  unsure (1)..(240): unsure at all n locations
  Clone ID: PAT_MRT3847_95661C.1
gcagaccgagctagctagctagcaagcaagcacagagatggaggcaaagcgaggccatgccctcatatgcttggcacgtgtttcactcttcctctgcgctctaaccctatccgctactcacagaagcaccaaggatcaacacatcgcgagncacctgnaactcggggacaacgaactactgcgcacggagacgcagttcaagggtttcatcgagcattacgggaggagctactccacaga

SEQ ID NO: 138044 - DNA, 384 bp, Glycine max
  Clone ID: PAT_MRT3847_95662C.1
gtaccggaatcgccaattccggcccacgccccacgcgtatcgggggactgcgctgctttcctctcaaactgggctccaaaatcttgtgctagagggatgctcaacagtatgcactataattgaccttcttggaccatcaggagcccccctgataggctgaaatgctgatggtaatacaggagaagtcgggagagcacacatgtaacatgctggtgttacccacagatacctgtatcttctactgggagaggttaaaggaatatagtcatttactccgtgaccggtgtggaattacaaggaatactttgggttttcctgggacatgatcaatgtttctcgggataccagtaagtatctttggtatacaactagagatgatatagg

SEQ ID NO: 138045 - DNA, 258 bp, Glycine max
  unsure (1)..(258): unsure at all n locations
  Clone ID: PAT_MRT3847_95663C.1
ccacaaacacaaaacaaaaccatatagctagagacagaccgagacaaaacaggtgttcttccgcaatcaatgcgcgtcaaagacgagctttctcacaaacccgaaccgatacatctatccgaaaacctcacacacacatcttacacaaacccaagagtgcatactccagttatacgaagcttaacaatgttgctgccacactcactcttcctcgccatgcaatgcaatcncatgatgagtccgaccagctgctcaact

SEQ ID NO: 138046 - DNA, 788 bp, Glycine max
  Clone ID: PAT_MRT3847_95664C.1
tgcatgcctgcagttggaaaaacatacccagctgatgttggtgtatagcagccttctttcttaaccatgtaaaactcaatcctggtgaagctttgttcctaggggcaaatgaaccgcatgcatatttatcgggggagtgtgttgaatgcatggcaacttctgacaatgttgtgcgagctggcctaactcccaaacatagagatgtccagaccctttgttctatgctcacatacaaacaggtaaaatgatacatcaaggctgttgctgcatcttttcaatcagatgttcagcttactttaaggaatttactttttcctttggtcattattttataggaatgccaacaatgacatgttaaaccttttacttcagccttacacctgatcactaagcttaggcaccagtcgattgtctttcttttttgaatttcattttggccatggattgatccatattggtgacttctcttctgttacttgcatacttggacttcataatgccacatggattgcttggttggctatttgtttgagtaatatttactcaactgttggcatgtgcatgcatactagtaggcatgcatatataggtgaagactgcatacacattttgagggaagactacccttgcttgaaatagtcactccatttatgccatgaatacgagattgggtgtttgaggacatttttttcttttctctattttcttacagggttctcctgagatcttgcatggagtttctgttaatccatatgtaaataaatatactccaccatttgaggaatttg

SEQ ID NO: 138047 - DNA, 172 bp, Glycine max
  Clone ID: PAT_MRT3847_95665C.1
tccaattctacttcccacacctcactgcacattctccattctccattctcacttcccccacttaattggcgcgtaaaaccctagctagcaccttcgcttcttcatcgctgcaactccacgcgccagatctgcaagcatttaaggcttaagctatgcaccactacgcatagct

SEQ ID NO: 138048 - DNA, 488 bp, Glycine max
  Clone ID: PAT_MRT3847_95666C.1
gggaaaaaaaaattgcaatgggtttggaagcgggaaattcccacaatacaatattaccataccttccctttttaattaaagcaaaactaagggggacccaagggttccctttttaaagaggaaaaaactcccgtttaggccccgggcccaaaaaggtcatgattcgggttccccggatttgaaatcccccctaaaaacctttggggaggtttcaaaaccccaaaggctttttatccccataccggtttttggggggcgggggccaaaggttctgcgaaaaaggttcttttttttttttttgaaaacaattactttagggggtaaaccccgctcttccaccgggggggaaaccacaacatttggtacaaaggggttccccagggagcaagaggtatcagggccccccccaaaaaccttggggaggggaatcttatcattaacattaacaccttttaacctctgaacagaaaaaaggccccccgggggaa

SEQ ID NO: 138049 - DNA, 519 bp, Glycine max
  Clone ID: PAT_MRT3847_95667C.1
ccacgcgtccgccacttcaaacctccctcggattcctcaaaataaacgaccaaggaaacctcgtcatcataaaccaatcccagaagcccatatggtcctcaaatcaaaccacaacaacaccctccaatctaattcttcagcttttcgattcgggaaacctgggtctcaaagaaccaaacgagaatgacccaaagaaaattctctggcagagcttcgattacccaacagacaccttgttaccgggcatgaaactaggttggaacttcgacacaggcatagaaaagcacataacctcgtggagtgccacgaacgaagacccttcaagcggggatttttccttcaagctcgatccacgtggccttccggaaatattcctctggaacaagaaccagagaatctaccggagcggcccttggaacggcgagagattcagcggggtgcccgagatgcaacccaacacagattccatcaaattcacgttctttgtgggccaacacgaagcttactacactttctcaa

SEQ ID NO: 138050 - DNA, 495 bp, Glycine max
  Clone ID: PAT_MRT3847_95668C.1
gccaatatcaacaaagggccactaccagcacatcatgccgggctggaaagaagcaaccgcggtgcaccagctatcttccaactcctatgaggcaattctacacgatgactggtgtatcggcagtgtacctaatggaggctatgtgaccggcgtgcttatggaagtcgtacggacccactttagcacgtctcttgcaaagcagaatcagccgcatacaatagctcttcatgttgaatttctgagacggacacaggctggtcctgcttatttcaatgttgaagatgtcaaattgggccgtcagacatcgatcgtacatgtttcaatggagcaagatggccgacaggagattgttgcttatgttaccaactccaatatcgataaagaggagggcttctcgtttaacacggaatacaagctggctccatctttacctgacgtcgatttgaagaactcgagaccgataccgatcccgactgggtgcgatggggggacatg

SEQ ID NO: 138051 - DNA, 786 bp, Glycine max
  Clone ID: PAT_MRT3847_95669C.1
gctgtagcctgtgagcagccagatcagggacagagtctcagcctcgccgccaccgctgctgccgccgccgcccaaagactgccgagccgcgtccgtgtgccgccacccactccggacacagaatatccagttatggataaaaatgagctggtgcagaaggccaagctggccgagcaggcagagcgatatgatgacatggcagcctgcatgaagtctgtcactgagcagggagctgagctgtcgaatgaggagagaaaccttctctctgttgcttataaaaacgttgtaggagcccgtaggtcatcgtggagggtcgtctcaagtattgagcagaagacggaaggtgctgagaaaaagcagcagatggctcgagaatacagagagaagatcgagacggagctgcgtgacatctgcaacgatgtactgtctcttttggaaaagttcttgatccccaatgcttcgcaaccagaaagcaaagtcttctatttgaaaatgaagggtgactactaccgttacttggccgaggttgctgctggtgatgacaagaaaggaattgtggaccagtcacagcaagcataccaagaagcatttgaaatcagcaaaaaggagatgcagccgacacaccccatcagactgggtctggccctcaacttctctgtgttctattacgagatcctgaactccccagagaaagcctgctctcttgcaaaacagctttcgatgaagccattgctgaacttgatacattaagtgaagagtcgtacaaagacagcacgctaataatgc

SEQ ID NO: 138052 - DNA, 331 bp, Glycine max
  Clone ID: PAT_MRT3847_9566C.1
cccgctctttccaggcaggcttaaatgataagctggctttgacccgtactccatggaatggtccgggatgggccacacatgactgaggctgggcagccatggactgcgttgcgattatactatgtttgaagagttgattgccaaacacgttatgagcttgctgtcacagatgtttaacatgtcttgtggagtgagatgctcattggatgttgatatgacacaccactgtgccagtcgaaagctccaggattgattttacagaacttgataaatttatgagttctatgtgtgtatacctgtgtggattaacgatcacagtgttcatgaatat

SEQ ID NO: 138053 - DNA, 470 bp, Glycine max
  Clone ID: PAT_MRT3847_95670C.1
tggaaaggggtaataatggatcatgagctaccaaagccgtacctgatagtgacttgagccctgcacgtctcttcgtcactggcgcggctacgatacgaataaactagaaattaccatgtgccaaactgaacaatctgagaattggaaagtcctcaaagatccactgctgctggcatttgcaagcattggtgacaattgactatgaagcgtgctgttaaaccttgctgagggttttaatggtgctgatctacgaaatgtttgcacggaggccggaatgtcagcgattcgtgcagaacgtgattatgtaatccatgaagatttcatgaaagcagtaagaaagttgaacgaagccaagaaactggaatctagtgcacactacagtactgattttgggaaagagtagagagattacttcttttccgttttggaagccatggagtacggagcagtgcattatattttagatgtct

SEQ ID NO: 138054 - DNA, 925 bp, Glycine max
  Clone ID: PAT_MRT3847_95671C.1
aataacccacgcaaaaaccttaaattgcccattaaaactgaaaccccttttgttttttgccttagattacaactgcaaaagggtcacagcttctcgggtttgtttccttttccacgcgtccgcaatttttttatgtgaatcctcacaacgatgtctgggttggaggaattgagaaaaaagcttgcacctttatttgatgccgagaagggtttctcatcaagttcaacattggacccttgtgattcttacacattctcggatggtgggactgttaacttgttgagtagatcatatggggtttacaatatcaacgagcttgggttgcagaagtgcacatctaggtccgtggatgaaactgatcacagtgagaaaacgtataagtgttgttcccatgagatgagaatatttggagcaatagggagtggtgccagtagtgttgtgcagagagctatacatataccaacacataggattctggcattaaagaagatcaacatcttcgagaaggagaaaaggcagcagctccttactgagataaggacattatgcgaagcaccatgttatgagggtcttgtagaatttcacggggcattttacaccccagactctggacagataagcatagctttggagtacatggatggaggatcgcttgcagatattttgcgaatgcatagaagaatacctgaacctattctatcttccatgtttcagaagctcctgcatgtaatgaaaataatcttatatttttgttttcagtttttaatttcaaaatgcactaagatatgctacttggccttttatcttttggaagggtctaagctatctccatggagtcagacatctagttcacagagacataaagcctgccaatctactagtaaatcttaaggggggagccaaagattactgatttttggtatta

SEQ ID NO: 138055 - DNA, 104 bp, Glycine max
  Clone ID: PAT_MRT3847_95672C.1
ttttaacgttaaggcaaacccaacacttaatatgcagaggactgcaatcgcatggtttgtaatctacaacacgcattgtacaacgtaacttaactattgccttt

SEQ ID NO: 138056 - DNA, 168 bp, Glycine max
  Clone ID: PAT_MRT3847_95673C.1
gcgtcctttttttttttttttttttaagcaaaacaagtatacattgaggaatgtgttatatggaaatgattatatgatgttgaatctagatgctatgatgtgtacgcagatgtcagagagtcatttatatacttacaaaagatataatcacaaggctttattttagaa

SEQ ID NO: 138057 - DNA, 275 bp, Glycine max
  Clone ID: PAT_MRT3847_95674C.1
ttaaactccttttgtactgatatctaatacttctcatcttgggagtctttacagaaaggccttgggatgcctcctgtatctcctacaataaccccaatttatattccaaaattcaagaataaactaacacaaaacattgaactggtggatgtactattttaaattcaaactgacaaaacctcactaaaattttaaagtctttaaaaaggatttttctctaatatattttttacctcaatagttcaaaatgacattcccttttttacaacccaatt

SEQ ID NO: 138058 - DNA, 185 bp, Glycine max
  Clone ID: PAT_MRT3847_95675C.1
ggttaattcatatgaagatgtttaaatgaaatcctgactgtaccattacagcaaacacatatttaactgagtacctaggggacgaacatcatctaaacggttaataatgtattctgcacaaactaaattactgaaaataaggctgagctcgattcggccggcaaaggtagtaatctttccttttg

SEQ ID NO: 138059 - DNA, 395 bp, Glycine max
  Clone ID: PAT_MRT3847_95676C.1
ggaaaggaaccataaaaaacccaaaaaacattaaagaaaaactttacatgtccccccgggggaaaaaaaatcccataaaacaagcggatttttggaacaaaaaaaatccagcccccaaccaaacaaaaaaaccaaaaaaaacagtaaattttcaaaatctaggaaaaagggcccaaaggcccgaggaccccaaccacataaaaattcaaggggccaaatttcgaaaacccccaccccctgttatcaaaagaacaaacttgacaagtcttgacccaccaacggcccctgtaaataataaccccaaccccgagggccaacccaataggaccaaaacccgggggggttaccccaggcaaaggaaaacaaagcggaggcttgctttgacccccctaatt

SEQ ID NO: 138060 - DNA, 496 bp, Glycine max
  Clone ID: PAT_MRT3847_95677C.1
ggcgacagaggctatgctgcagttgggaatcttaatcctaactctctccttgttcttcatcatgcacaacatccacacccaaacaactcaagcccgaactcgaacccgcaataagaccagtcaatccgaaccgaaccgccacctggcccaagcatcgcgccacctggcccgggccagatccacctcgcaccgagcccagcacgccaagaacgcgctggcggaagcagacaaggccctcgccgtctggcccagggacccgcgggcccacatcctccgggcccaggccctccacctcacaggccaacgcgccgccgcaatcaaggccctcgacgcggcgctctcctcggcggcggccaggtcgctctccgccgcggagcgcgtccgcgcgctcgtggagagggcggagctgaaggtcgccatgaaccagcggcggcgagtcgactcggccgtgaaggacttggtggaggcggtggggctgagtggagggagtgacttg

SEQ ID NO: 138061 - DNA, 185 bp, Glycine max
  unsure (1)..(185): unsure at all n locations
  Clone ID: PAT_MRT3847_95678C.1
atgccagatgtcatagacgtgacattcnctgcacccgtgcctcagacttggagctcgagctgtggcgaaacgataggctgctgatggttagacgtccccttatcataacgcacagaagaggtggggagttacgttatcttcacctgggtgagggacagataagccactccctatttcacacacac

SEQ ID NO: 138062 - DNA, 1253 bp, Glycine max
  Clone ID: PAT_MRT3847_95679C.1
gtaagctcggaattcggctcgagaaacacctttcactatctatcttctttccttcacctaagcagatcaaccctaatcctatatcacatattcatatctatcttactactctcatagcttcaatttgaggctcacgcacgaatgaataaggatttgagcatttgagagagatcatcatatggagaataataagatgatgggtgtgaagaaagaggactatgctgccaatataggatcttcatccctcccttcttgtaataattatccattctttgatttctctgaagataagggctctttagggtttatggagctattgggtgtgcaagactacaatcatctccttgatttccctctatcgtcacacgtgtcagtgcctcaaacctctgcggttaaggaaccacctgagactaagaaagagtgttccgaggtaactaataacaaccagcaacctgcgactccgaactcttcatccatttcctccgcgtccagtgaggttttctatgatgaacagaataaaactgtagatcaagcacctgaacaccaaaagacaaaggaacagttgaaggctaagaagacaaatcagaagagacagagagaaccgagattcgcgttcatgacgaaaagcgaggtggatcatctggaagatggatacagatgaagaaaggtcaaagcgctggaaaacacccctatcgtcgcgtggagtgatctttcagcgacccaagcattgtggtgtcaacttatcaagtgtcaacacacgcatccaagcccagttatgggtcgctccaacatctttggtacggtaatgtctggatctgctggaaactacatgtccctatattatcatcagcaacaagtcctcgtcaacgcattgtcttttttgggtttcctctcttgtttctcgtcttcaagaaatgccactttttttcaagagactgccttgttaagtgtctatgggcttcttcaagatgttgttccttcacatatgttgtaaagaagactagatcattatattttcactactgtttgtatgtgatttcttataaatagtttttgtaggagaatatatattaggcatatgttgtctgctctggtatacttaagttttagttttcattaccatcatgatcatacttgtaaaacccgcgttatctttttgcgcgcgcgcatatatatatatatatatatatatatatatatatatataggccttgccatgaatattattagtgtaacatgatggattttgatcc

SEQ ID NO: 138063 - DNA, 482 bp, Glycine max
  Clone ID: PAT_MRT3847_9567C.1
gctgcgagaagacgacagaagggaccatgacctattcaatttccttcgttttaattttccaacccataacaggttgtcatcatgtcagcatattccatcaaattcttgatcagatgttcatcttggttcatatttcatacctgttttgaagttatacgatgtcaattcctgctccttggttatacttatgtgatgtgtacaagagatataaatttggtctaatgataaaagaaaaaaaaatctcattcaaattcacactaacaaaaaattaatgatattaataattaatatttatcaataaaaaaaacttaggtgtcgttatgtctttatatatagtagttttcttttatccgtggttatataaaataccctataatacacggatatgctagaccttctatggtagtcatcaacaatgatttataaattatggcactttaatgtaagtcgtacatgcagatcgagtattgtgtattcatgta

SEQ ID NO: 138064 - DNA, 632 bp, Glycine max
  Clone ID: PAT_MRT3847_95680C.1
ttcgtccgtttcacgcgtccggttgccgtcaatctgaagctttccctgatttttgtggctggcttttgcctgctgaacatcgccgtctcctattccgggaagtcgttcacaccgacagaaaagggaccgccaggccctccggggaagccggtaatcaaggggaagccaggtgtgtgcaagccccaatatgaaacaactttcaagtagggtacgactacttccaagtacgacaccaccacttccaagtacggtacaacaacacccgaatacgatacgacaacatccaaatacgatacaacgacttccaaatacgacacaacaacttccgactatggtacgacaacttccaaatacgatacaaccacttccaagtacgatacaaccacttccaagtacgacacgacaacttcaaagtacggtacgactactcaaaagtaccgtggcaaacgctttgcggatgccgtgctcgttcgggctgctcgcgctgagtacgacgcctattgcccggccggtcccccgggagatgccggcattgccggaccgcccggcccccccggcgagccgggcaaatgctatggcagcgggtccaaagagtccaaagaaaaggagtacaaacccagcaagcgcagcat

SEQ ID NO: 138065 - DNA, 267 bp, Glycine max
  unsure (1)..(267): unsure at all n locations
  Clone ID: PAT_MRT3847_95681C.1
attccattttctctgtgnaatttcctaacttntgcctttnaagatgccagtctttcgtcaagnncctcaancggnaaagacatcnacccntggangtggaaagcncngacaccatcngacaaagtcaanggcnagatccagggaaagggaagggattccccccggaacagnaaaggtctcattttcgccggnaagcaattgangacgggcgnaaccttnntgactacnacatcagaaggagatactctcaactgtcttcgtttcgtg

SEQ ID NO: 138066 - DNA, 301 bp, Glycine max
  Clone ID: PAT_MRT3847_95682C.1
tgcgtaagctgggtattcggctcgaggtaacattcctcagactgcatcgaggtcaccgaaagatagcatgctctatatcgcctagacaaatttcaagctctggcgtgtccacggctctgtccactccacaagcgcactcgggcctgttccgaatctcatacatgctcgtcgtagaccgctactctactaaggggctttgacgatccactgggtaagcgactaacatagcctggaaccacaacaactgctcagactcgactatagctgctgagtctgcttcagctagcactgttacacccat

SEQ ID NO: 138067 - DNA, 382 bp, Glycine max
  Clone ID: PAT_MRT3847_95683C.1
ccggacaaatcctatgaccatcttctggcgatctatgggtcttagctacacccatcgcttattgaatggaatgcttaccgttcctgttgccacacttaattggaactatgttagaaatgaccaacctagatttgagaccacctaccatattgcttcgtgtatcaaggacgaagtggaagactttgaaaaggctggtatcactgttatccaaactgatgaacctgcttggagagagggtcttccactgaagaaatcacagcaggctcactacttgtactgctctgtccatgcctagctaatcatcaatgttggtattcagggaaccaacaataaccacactcacatgtgctactcggactttagcgacataatgcactccata

SEQ ID NO: 138068 - DNA, 680 bp, Glycine max
  Clone ID: PAT_MRT3847_95684C.1
cccacgcgtccgtacggctgcgagaagacgcagaacggggcacatcagtattcatatttcatatcatataagatagcaaagcctataacccatggagtcaaacaacatgccagacttgaacggtgtcactaagaagactaaaggtcgacaaaaggtccacacacatctccactacttgtctaaccaaattgctattgagaagaagcgctcaaaggatttaaatcatttagcgaaggttgcagaggatcagttctggtgggctaggcctattgaaagcatgaccaattcccaacttgacaagtataagaagatgttagaggagtttaagagacaactcaaagaaaaacgtgggaacctcaactgatgatgccctatttaaagttttagtcaatgttttttaatttaatatgttttagaatgagcactagcttaatcaaattaatgtttggggtgtggttaggattgattatctaggacttatgttttcgttatgttgaatagtcttcatcatgtgttggtaaactatgtttcctttatgttgtttctttgctttgttagtggagtttgtaattgtgatgtagtttctacatgatgtagtgtttgaatgaaagggcatcttaaatacataaaaatccaattctattagaaattccaacctttcgaacattggttgggcaaaa

SEQ ID NO: 138069 - DNA, 199 bp, Glycine max
  Clone ID: PAT_MRT3847_95685C.1
tccacgcgtccggccacgcgtccgttcttatgaatttaacgacaccacctgcaaaattgggaggatcgacaacgaactccgacgcttacatgatggccgaagcacaactgacaataaccatattggatcttgcgcgacaaggtgtcaaatacacgcagatcaaaaaggaatgctcttgaagcgaccaaggctctgttca

SEQ ID NO: 138070 - DNA, 331 bp, Glycine max
  unsure (1)..(331): unsure at all n locations
  Clone ID: PAT_MRT3847_95686C.1
aaacaaaaaaanaaacaaaaaggggcacggggagaacaaaaaaacgcagaacccccaacacccaaaaaccaaaagacccgcaagaacccaaccagggggagcaggagggcaaaacggcccctaagagcaccccctgaggcaggacgggacagaaatgcgacaacagaaaacccccaccaaggccaaaccgccccaaagcccccggacagacaaaccggtcagaacagggcgagtcccccaagagagcggccagacccggggggccgctgcaaatcaaccggggctcccaccagccccggagcggaggcgggcccgagacaaaaaaacccca

SEQ ID NO: 138071 - DNA, 370 bp, Glycine max
  Clone ID: PAT_MRT3847_95687C.1
gcatcagcctggattcgtcctttctctgctctttgtcctctctgacacatttggggccttggttactgtgtttttgcaccagggtattgggagggacgtttagagttgctgagtctggctccttctctgggaaagacgatcagtaccctccaccacgaccactcactgaggctgacgagggtcacaaagtgggcccttttacaggcgcctattgctgagttcattgcacttttgtcttcctcgacattactgtgcccacagttatagggtacaagcaccagccgggtcatgctgatgcctgtggtggggttggcattcttggcattgcatgggcctttggtggcatgatcttcatccttgtctactgcac

SEQ ID NO: 138072 - DNA, 275 bp, Glycine max
  Clone ID: PAT_MRT3847_95688C.1
ctcacctttactcctcagtaaatcaggaatgggaaattaaaaaccagtgaattgaaagcacatctgaaagatgcaattcaccatggagctttgtctctggcccttatttgtctaattttggaggtatttgataactgagtaggtgaggagattaaaagggagccatatagcactgtcaccccttatttgaggaactgatgtttgaaaggctgttcttttctctctgaatgtcatttctttaaaaatacatgtgcatactacacacagtatataat

SEQ ID NO: 138073 - DNA, 109 bp, Glycine max
  Clone ID: PAT_MRT3847_95689C.1
gacgtagcgcattagcagcatctatactacatagcatgatcaaactgataaaaagcgctgtcgttgtgtcattcagtctgcgttggatgaacttcacaatcacatcatc

SEQ ID NO: 138074 - DNA, 801 bp, Glycine max
  unsure (1)..(801): unsure at all n locations
  Clone ID: PAT_MRT3847_9568C.1
tctgtagtgtttataagcctattatttcactgtttaaggtcaataaccaggaaagcagcatgtcacgactgccaacattgagaaaacaagtgaaattgcttcaaaaaatgtcgggggaaagggtgatacactaaaagtagtaaacaacaattgaagattacaggtccactacagaaccaatgacaagttagacacacaaatgagctctaccagtctgaaatccaataaaaaaactcctagattacaattaaacaatacaaatcaaacagaaactcagtcttacatgattcaagccatggccattcacgtcaaaattttcacccctttactgttctttgaaccacttctgttttccatcttaagtggcaaaggagcagagaacagaagcttctcttggtgcgcttgaagctgctctttcaccacatttctgcccacctttacaaaaagccttctagtgttcctctccccatcatcgctgctatgtggcaatcctccactatcgaacactaacacttcctcatgatcctcagcaccctgagaagaatccaccccattatcttcaactgcaccactcacattctccgaaacctctccttgctcgtcactagatgaacaacttccatctgaacatgccacatccccactataaacctcacaaatattcctattctcagcanacctcacactcttcttcactccaggttcacctcgcctaagaggcacaccccatttttgtttggggacacctcatttcttttcaccatcaanacattggttacaccatcatcatgaatgctctcc

SEQ ID NO: 138075 - DNA, 148 bp, Glycine max
  Clone ID: PAT_MRT3847_95690C.1
caatcatttaataatccaattggatagctggaaatattaaatggcaactgaagaccccagtgtattgggtcacgatactgatcgagtcagtaatcagcatctgtgctagaagaggcatgtagatctaattcattcggggatgaatcag

SEQ ID NO: 138076 - DNA, 712 bp, Glycine max
  unsure (1)..(712): unsure at all n locations
  Clone ID: PAT_MRT3847_95691C.1
cggnaattcccggngtcgacccacgcgtccgctatggtttgcacttgctgttgctaccaacagttgtgcatggttatctactgctattcttgtcaccaacatgagaaatttccctgtcagtagaggcacagttgcaggaatcctgaaaggttattcgggactcagtgctgcagtttttactcaaatttacagcgtggtttttcacaattcttcatcgcaagttccttttgtttcttgccattggtattcctgtcttatgcttcagtaccatgtttcttgttcggccttgtactcctgcttctggtgatgattctgctgaaaaggggcattttttgtttatccaaggtgctagtgtggccatgggtttatatattcttgctacaactctacttgacaactttatccacataagggacagtgtttcatatgctttgttggctgtgatgattcttcttctcttggctccacttgttatccctataaagatgacactgtgtcccagaaaagcctctagcacagaaattcctgaggaacatgttggatctacagactatttggttcaagatggcaaagacaacgtagagccattgctatcatcttcatcacctagtggtcttggaagttttaatgatgtggtggatggttcagctgaggtggctatgcttcttgctgagggtgagggagcagtgaggaagaagagaaggcccaaaag

SEQ ID NO: 138077 - DNA, 916 bp, Glycine max
  Clone ID: PAT_MRT3847_95692C.1
cggccgctcgagccggcgggccgggaatattcatcaaccctgctttcccgacgaaagcaaattcttcaatttaaacacagaaacaaaatcaccaccttcaaagtcttctctctcgagaatcatcgaataaaactcagaaacgaaactgagtattagaaagtgtgttgtgttgtgttggcagggagaagaataaggaatggaaaagacgaaagagagaatagggataaggaaagggttggggatagggagagaatgccgaagagacaagggaaagggaggaaagaacacggaagcgggggaagaacgaggcggacgacgagaagcgggagctggtgttcaaggaggacgggcaggagtacgcgcaggtgctccggatgctggggaacgggcggtgcgaggcgatgtgcatcgacggcacgaagcggctctgccacatccgcggcaagatgcacaagaaggtctggatcgccgccggcgacatcatcctggttggactccgggactaccaggacgacaaggctgacgtcatcctcaagtacatgcccgacgaggccaggctcctcaaggcctacggcgagcttcccgacagcaccaggctcaacgagggcatcggcgccggccttgacgaggaggaggacggcaccggaaatgattatatcgagttcgaggatgaggatattgataagatttaagaaggaagagaaaaaaaagttagggttttggttttggtttgtgttgctgatgcctctttttttgtttttgtttttgtttgagattatatatgaaattgttatgatttggtgatggattcactttatggtatgtgatggtgttgcctctgtgtactgtggcatatggatatggtgaatgaattttaatgaaataagagccggttatatggtgttatagttactgg

SEQ ID NO: 138078 - DNA, 566 bp, Glycine max
  Clone ID: PAT_MRT3847_95693C.1
tgcatccaatacctaatgcaaatatgtgagattcgtggttttcaaagtatgttaggtagcattgattatctacattggaaatagaaaacttgtctagtagcatggaaaggtcaatattgtcatggtgatggcccacccacaatcatgcttaaagtcgtggtgtcacaatacttacggatttgacatgcatatcttggggttgagggttcaaacaacaacatcaatgtgctcaacgaatcttgtgtttaaagacgttatggagggagaagcccctattgtacaatttgcagttaatgaaatccaatataacatggggtactttctgacatatggtatttatctagattggacgacgcttgtgaagaccatcctaaggccataaggtcataaaagaaaattgtttactcaatatcaagaagcaacaagaaaggatcgcatttgaagtacttcaatctggttcgcaattatacgtggtcttgtgtgtggttggagcatgaacacatatcaagcatatattatatgtatgtatgcatcatattacataacatgattgtgaaagatgaacc

SEQ ID NO: 138079 - DNA, 211 bp, Glycine max
  Clone ID: PAT_MRT3847_95694C.1
ctgcgagaaaactactgacggggatcttgcaacagaagaacaactagttctgaactaataacgagaagcaaatggttttctcaatgatctcttccccagctgttaccactcttaaccgtgccggtgcccgcatggtcgctccattcactggcctcaagtacatggctggcttactcaccaagaagaccaacaatgacattacctccattgc

SEQ ID NO: 138080 - DNA, 318 bp, Glycine max
  unsure (1)..(318): unsure at all n locations
  Clone ID: PAT_MRT3847_95695C.1
tagangnattgtangtnagntcggaattnggnttgagtttgttttggnatcttcgntgnaantgtgtannttnnntctttttncgaatntgaatagaaatggttnggagantgagatgttngttttnaggnngagatnaannagnttntnagtntaataatnaaananttnggagagaanatagganggaaanantnngnnnnnngngtttnnnnnngnnnnnnnnnnnnnnnantnnnnnnnnnnttnnnnnnnngnngnnnnnnnnnnnnnnnannnnnatgnnnnnnnnnnnnnnnnnnnntnnnnnnnnnnnnn

SEQ ID NO: 138081 - DNA, 231 bp, Glycine max
  Clone ID: PAT_MRT3847_95696C.1
gcgataacggagagtaatatggcttagatgatcatattgacctgtatattcataaacctgttgattatttatttgtgtggtttttattcatgctaggcccatgcatgtatagtcaagcattttagtttgtgtgacacagttaagagggatatttagagcagttcatatgactaccaatcactcttgaagagcctttatatctttcacaccgcgataattaaaaggaatgat

SEQ ID NO: 138082 - DNA, 1102 bp, Glycine max
  Clone ID: PAT_MRT3847_95697C.1
ggcggtgttttcgatgcaaggcttcggcatattggccagctccaccgtgaccatggcagtgtgctccatattcggcgcagcgtccaagaattccgaggctgacgtggcatggagactcatactcatgctcggttctgtccccgcagccatgacttacttgaaggatctggcacatgaaatgaatgagggaaacctttgaaagctaaacatccttcattcttccttctaaattttgtgagtttcatcaacaggttgaaggtgttgtctgccctagacacagcaaggacacaatactaccacttcaaagccatcatcattgcagggatggggctcttcaccgatgcctacgacctcttctcaatcactctcatcatcaagataattggaagggtatattacggccaccgcgaaggtgaaaaccggtacgaaaccccaccggaggtcgtgtccgccttggtcgccgtcgccctgctgggcaccgccgtcggccagctggtatttggccggcttggcgacctcaaggggcgacggcgagtgtacggattcgctcttttgttgatggtcttcagctccttagcttctggcttctccatttgcataagaaaaacctgcgttctcctcactcttggcttcttcaggtttttcttggggctgggtattggaggagactaccctctgtcttctaccataatgtcggagtttgcgaacaagaagacaagagggtcgttcatagcggcggtgttttcgatgcaaggcttcggcatattggccagctccaccgtgaccatggcagtgtgctccatattcggcgcagcgtccaagaattccgaggctgacgtggcatggagactcatactcatgctcggttctgtccccgcagccatgacttactactggcgcatgatgatgcccgaaaccgccaggtacctgctcccattcactttttcactttacaacttcatcttttcttttaatttattcattattcaataaaattatacacgcccaggataaaaatttgacccattcattcataatatatttttaaatttattatatcgtaaaatataattgaatgaaagtataaaattatttttgatag

SEQ ID NO: 138083 - DNA, 273 bp, Glycine max
  Clone ID: PAT_MRT3847_95698C.1
atgcaacatactgctgccatggctctctcatccccatccttggctggcaacgccttcacgctgggcccatcatctccacatctgcgaacggtcagcattacgaaaacctttccaattcagggctcctcaggaatcccatcctccagcccataccgaatcaagtacttggactcattctctggcgagccaccgtcctacccaacccgtcagtacctacgctattaacgtcgtgacacagctggactgtccgcatatccacacatcttcgccaac

SEQ ID NO: 138084 - DNA, 222 bp, Glycine max
  Clone ID: PAT_MRT3847_95699C.1
acccactctgcgaataacagtctaacataaattcctcttcatcatcgcatctatcaccctgaaacctgtccatttcactgttgacaagtcctcacttatacgccttccctacctctcaatgaactcctcttcattcatagttgtctccaatccttacaacaacatcaagactgacaagccttatgtaattaatcttaccattgcttttatgcaacgacttta

SEQ ID NO: 138085 - DNA, 145 bp, Glycine max
  Clone ID: PAT_MRT3847_9569C.1
cgcgtccggtggtggtggaggaggagggaatgaatagggttggtggaaatggtgttggaaacagtgggggctgactagggagctggagagtgaggctgtgtgtggtctgcggtcggtgctatatgtgggtgttgatggggctact

SEQ ID NO: 138086 - DNA, 268 bp, Glycine max
  Clone ID: PAT_MRT3847_956C.1
gtggtaatggcagcgtcactacaagcagcagctacttttctgcaacccaccatcttgagcaggagtaacactttgcagcaaaagtctactcaatccatttccaaggcttttggcttggaacctgttggagctctcaaaggtcacatgctcccttcactctgatcttaaggacttggctcacaagtgtgttgatgctaccaaaattgcaggtatcgcccttgccacctctgccctcgttgtctctggggcaagtgctgaagtgttccca

SEQ ID NO: 138087 - DNA, 763 bp, Glycine max
  unsure (1)..(763): unsure at all n locations
  Clone ID: PAT_MRT3847_95700C.1
cttgctgcctgcggttctagctaagagcttagaaaacccacaaaacagctgagtagggcacttggtcttcttcctttagcccaacaggactttcttcaggaataggtgaagaaattgaaaagctatgcgaagatatgaagacagctggatttaaggcagctctagctgaagaagagattttagagaaaatcgagtcagggataagggaaaacaatgttgaccgttcctacgccaataagttgctacttgacattactgatgctgttgggattgggaatgagaggtcaacaataaagatagaacttgaagagtttaagagtgagattgaaaatgcgcgtgttaggaaggacttggccgaggctatgcaaatggatcaaatcattgctttgttggaaagggctgatgcagcttcatcaactaaggacaaggaactcaaatactttgcgaaacgccaatctttgggtactcaaatcatggagcctttgcagtcattttattgccccatcacccaggatgttatggtggatcctgtagaaatttcatcagggcagacatttgagagaagtgccatagaaaagtggtttgctgaaggaaacaaattgtgccccttgaccttgattcctttagacacatcaattntgagacctaacanaaagttgaaacaatccatacaagagtggaaagatagaaatataatgattacaattgccacattgaaagaaaaaatcctatctggaaatgatgaaaaagtgctgcatgatct

SEQ ID NO: 138088 - DNA, 848 bp, Glycine max
  Clone ID: PAT_MRT3847_95701C.1
cattccaaaaaagttgtgtggccatcgcattcaattaagtaatgttcatatgagctacacaatatggtatgatgaatgtttggttatttacaaagaaagaaggatgaatctgttttcaatgcttatgactagatcaatccccactgtacagcaaaaatattggccctaccaaaagagtattagaggaaaatgatttaaccatgttctccccttgtacttcatgcagacttggaacttctgtatctatggtcatacagcaagaatgaagaggaatgtggatttcggatgtcaagatccatcccctgtcacatctgattattgctgagcatggacgcatggtatgtgctctggattataggctcctgcagcagctgagattgaccaggagaatcctgttggttagaaaagatgtttggtggttgtaaggtgttagaattagattgatggtcgagcacacgattactctgttcatacatgcagtgaaccacttgattggcttaaaaccgtacaaacctggtagcatgggataggcgtgaactgaggagacgaaaaaggaaattagggtcttgaatgcgaggcagagcacgtgatcgacggaaaggaacaaaatatcgtgcagtggacgcacgacactgtccataatctttagtgaaagattggaggaactgcgacgccgtgatgtgacgttggattgcagagttaattagttgcaaaaacacatgatttggattggagctgcttctatccctgagtacgaagaaacaaaacaaagggaaataacaactccgcaaaccctaacacgatggagaagacgattctgctcctcttcggagattagcagataaaac

SEQ ID NO: 138089 - DNA, 136 bp, Glycine max
  Clone ID: PAT_MRT3847_95702C.1
cactcatggtaatctaggatctagcccctgcatatctgttgagataaagccctaatgtggatttattcctctttcaggtgagtcgagtcgtgatatgtggcagcgacaacgagcgatctgatctcaggtctttagc

SEQ ID NO: 138090 - DNA, 242 bp, Glycine max
  Clone ID: PAT_MRT3847_95703C.1
aaaaattttcccccccaactaataattaatgccattagtctgtctcacacatatcacatcacacttatatactgagaacaatgtactgaatgtacaatctcaataaacttcactcaaccaatattctgacttttgaccttggtcctcctttccacacctcactgcaaactcccatatcttctcaaacatcttttgattctaagcaaaactctcaatcttttcaactcacatctatctatatc

SEQ ID NO: 138091 - DNA, 898 bp, Glycine max
  Clone ID: PAT_MRT3847_95704C.1
ccggaggccacaccgcactttcgggctgccctttctcttctttgaactccatggaaccccctctactctgccgccgtcggggttggttctggccatcataggccttgtttacacaatttaaacctatgaaatctctcatcccgtcaaccgctaacaaagccccaagaaaatttctccaatcaaagcttttccggagccctacctgcgcccttgggactaaagcttttttcgtgtcaatcgcaacaaaacctcactaggtactttactggtgccatctatgttctgaatctcgtcaagtgcagagcaagggcggtgatgttgcattatttgttcatcgtggaacgaagcttttgggtggtgatgagattcaaagggattcgaatggttcatgcatagcttcagcggtttattccctctcgttgaatggatatgttggttgaatgggcagcgtaaaaaggctccaactccagaggccgaaaagatgatttcacatagggaagagatcttttcccaccccaaaggaacctggtctgtcacagagtaggaagaaaagcttgctgtaaaagcatccaaggtgcactcgacacaccaatgggaagccaaatatctattcttgtgagggagcaaccataagcggtttatactgtataaagctactacttatggggtcatggggtcggtggatgatcaaattgacttcataatgggtgatttcttcctcttgacacataaattaaaggtttaattgtaagattgaggaagaatgaaaaagtgacttgacaggtgtaaggtggttcatgcaatgagatactaattaagtgacaatatgtttttttaaactgttgtacattaaaaatggatctattatgaattatatagtatttgttttaaataaaaa

SEQ ID NO: 138092 - DNA, 564 bp, Glycine max
  Clone ID: PAT_MRT3847_95705C.1
aaaaccttaaaatcagctttgcatactattgcaagtattattgagctgctgaacacttggtatgatccttatacattgacacgaagggtcaactatattacagttacataatacagcaccaatttttggccttcccacttcccataaaaaaggctctaactgtaacctataaaatttaaacaacttgcacagttcttttccctaacacaacaatcagtacactggaagtattcaacatgaattagcagctccattttacaagtcttcttagatggaataaatgccaaaagttcaccattggtatttggcagcaagaagcacctcctcatactgctgagcagcattgtcccaactaagatcttgtgtcattcctctcctttaaagcccttcccagctcttcttatactccctataggtccataagcaattccctaatgcatgtgataacttaccttaatctgcactatcaaatgtccacccaaggcctgactcattaaaaggatcaaaaggctgcacagtatctctcagtccaccaacagcatgcacaacaggaactgttccata

SEQ ID NO: 138093 - DNA, 435 bp, Glycine max
  Clone ID: PAT_MRT3847_95706C.1
cggacgcgtgggcgaaacaggtggggtcgtacaaagcgaaggaacgtctgtggaagacgcgtgctgtcgattctgtcctgcaggaacattctggatacctccagtcgattcaaaggtcgttgacggctaccaataacagcccgtggaagcgtaacgacttgttcctacccaacgaacgtatctggagtacacctcgtccctctcagatccgaacgcattcgcagtattcggacccctttccccatcaagagcgtcttcggcgccaacccacggaagccgaaattcgaccagacgcggttcttgcaacgctcgattgggaacccttcgaacgagcctggacctcgcctttgccagcccatgtgaccacggctattgctcgggactaatactactggacaccgaatgttcccacgtaccgtgctatggaaaaacgtt

SEQ ID NO: 138094 - DNA, 401 bp, Glycine max
  Clone ID: PAT_MRT3847_95707C.1
acaggggaatttaaccatggcttcgagtctcactaattccattcaccgggagaggttggaatttccctcccctagtttaggatgcttttcaaaaatccaaaaccgcacaactgtaatggatgcataaaaaaattcttaaaaccgataagtttttggcacaagtaactgaaaacaaaatatagggcgtcaaaccaaaggtttggaccttcaccttgacccggaacaaccaaataaactatttagagagtgccaaattcctaggttattccataattattcattcaaccatcaaaatctgagcttcactggctcccatctgattctgcggcagcacctgcaaagcagcccttttattctctacatccttgacatcattagacttggattccgatttgttattt

SEQ ID NO: 138095 - DNA, 534 bp, Glycine max
  Clone ID: PAT_MRT3847_95708C.1
attgatcatgactggatcggattgacttaattagattataaaatttaaaaattaacatttttagaatagattgtttaaaataattttctttaagatatacaatataattacataaaattacaaatttgttgcataaaaaattttcaaattttcattatttttaattttttgtattttttatagattaaattataatatttatcttaattttttaaattcatcattttgattctttttatttttaattggaacatttggttttctagttttataaattaacaattttggtctcttggaaaattaactaataattatgattgatagagttactaaattaattataaattaaataaaattattaatcatttaaaaactttaataaaaaattatgtggtattgctgtatgtggactcacgtggggtggtagaggtagaagatgtatttaaggaggaaaaaaaagttcattgctgtgaagaatttgagaattagagctaataaatttttattaaaaattttattaattcaataattctg

SEQ ID NO: 138096 - DNA, 169 bp, Glycine max
  Clone ID: PAT_MRT3847_95709C.1
ctttgcacaaattctctgactatgtctgttaatacaaacctgcgtactgatgcatggagtgtgtaattattgaaacgatcccgatatcagtgtgcattcatatgtgtcactggactgactggcacttcaatgcaagatgttcatggctcaacataacggcacatttact

SEQ ID NO: 138097 - DNA, 430 bp, Glycine max
  Clone ID: PAT_MRT3847_9570C.1
gcacgaggaatgataactcattcttggctgataaaaacttggaggaaataagaatgaaaatcgatatgcaccaaccccaagaggtggcaccaactgttgagaagggaggagaaaccatgtatctaggagatcaaggacttgtgaattatcatgtccaaggacctgagaccaatggggatgccatgccaaatctctgaaatggtctatggaaaacatcgatggttgtggggatgggatgttaacaattgaagatgttattgttaaaagtgattcttaacaaatgcatcccttgaaaatgatgttcttcttggcaaggtttcaaaggcatctctcttgtttgagttgttcagtgttttattttcatgtttttttgtctttaaattaacgtgttcatgcttagacacatgaataataccaaataaaattaaaa

SEQ ID NO: 138098 - DNA, 718 bp, Glycine max
  unsure (1)..(718): unsure at all n locations
  Clone ID: PAT_MRT3847_95710C.1
gggtggaaattcagctcgaacgaaattagtgtcttatctttacttccctttatctccaataaaagataagtaaagaggagcaactgtcataccttaatttcgtcaaggacaattgtttgtcaacatgcggacctttgctgaccaaattgaggtgcttaacactcatcgccgcgtaatctgtaaagtttcacgacgtttcgaaaggaaatcagccaaaaacacaaaaatgggggggtgaactgatcaatttagggaggtgtacctagtcctaagcccatctagaatattctagagggaggttgcttcaggtggaagctacctagctcgcttgggcgagctcggtggcaaccacctccttcatttttgctataaaatggcgattaaggctgaggggaaggggttcaacactttggatattcagttttcacttaaagttagtgagaagaagaagaaagaaggagaaaatcaaagccgaggcgcttctgtgatcaattctgtggacgttcttcgtttgttcttcatcattcgtcgatcttcaaccggttagttttttattttgaagctttgaattcattctatgcacccttaggggtccattcttgctttgtatgctatcatcttcattcttctactgtcagnattcttttctttcattntaagcaagtttcgaccgaacgtttaagcccgtatctcacttaatcaatgtttaaatgaattt

SEQ ID NO: 138099 - DNA, 275 bp, Glycine max
  unsure (1)..(275): unsure at all n locations
  Clone ID: PAT_MRT3847_95711C.1
gcttggctatcaagaggaagaagattgatctcagcagagttgtttagcttatccgattcatccangacaagatactcaactctgctgagagggggggccttcctcgattaatccgatcagctatccgagcccctatctttcaagcacattcattctactatcaaggcatgctctaatccctcatttatacgctcactgatcagtgctacttcacctgattttgtagaagatcgagctctccatcttatgcatcatgctgatcgtttaattcccca

SEQ ID NO: 138100 - DNA, 339 bp, Glycine max
  Clone ID: PAT_MRT3847_95712C.1
ggctcgagctccaggctatggttacctgaatttatttttttaatatccgcaattaatagccagggttttctccaatgtggggcacactcaccctaataactacacacctgattctcgcactcggtatgttactcatcttacgccatacgctgatacacgatgagtcgatccttttccctctttattccttctcaatttgattatgcgattttttctacagtttttgctttccatttgaaacatttaattttatcccctatatgaatactttataatctagtgttttctcttgataacaatatttatttctttcatttattaaggctttttaatattata

SEQ ID NO: 138101 - DNA, 226 bp, Glycine max
  Clone ID: PAT_MRT3847_95713C.1
agagcaagttcatatcgtacgtttatacaggatcagccaagaacagagtgtactttgtgattttcagctacataagcctctacccacgtaaacggccccattacaacagtctaatgacatgacatcaacgacatgggcgaccgctataaaacaagacagggcctttgctggggggtggcagaggaacagaaggatcaaattcagactgttgaaactatttttgcct

SEQ ID NO: 138102 - DNA, 227 bp, Glycine max
  Clone ID: PAT_MRT3847_95714C.1
gcccaacggttccgccaagcttccgtggtggattgggttgttggttgcgtttatgacccaaatggattattagggtaggattttgtggaaattaacagcctggttcgggcattactgggcccaagaggtccaaatttcagattggacgggggaaaaggaccggctattggcttgggtcctgaaggaggcttggcttttcttaacgaaaaactggtgccaaacttggg

SEQ ID NO: 138103 - DNA, 186 bp, Glycine max
  Clone ID: PAT_MRT3847_95715C.1
attcttccgtgggactccacgaaagaaccttcttctgctgggtgcccctaacaaatccctatatgaattgtttggattgggaggctaagtggataatctatgttcattagtttatttaatgaccaaaatacccatatatgtaagttatgttttatattttgaataaatgatttttttactgattta

SEQ ID NO: 138104 - DNA, 482 bp, Glycine max
  Clone ID: PAT_MRT3847_95716C.1
ctgaaactggatgtgcacataaggccggttgtacagggcacagccagtggcattcacagtatttttaatcgattccatcgcagataatgtggaaaaagagaaacaactctgtacacagacaagttgtaccagctatgaagattgaggctcacatggagcttcgactgtttacggtgtaacctgagatgagtgaacagctagcaaacggaacaaaagccaggaatgcctttccaatagaagcaggggccatttttgtgaacttatgagacccccaattagatgtccaatcgggaacccacgttgctgttgatgatgatgccaataacgcatcatatgccagaccctgatccatgaccaaactaaaatggttccgaaggtggtgactgcttaagctttttccctgggcaatttgacatgagagaccacatgcttgtcatgcttaaaatgcggttaccatcccatgccctgataaacatttccta

SEQ ID NO: 138105 - DNA, 325 bp, Glycine max
  Clone ID: PAT_MRT3847_95717C.1
taacacctaaaattttattcattaaaaggaagtgcttgttttgtgacatcacttcacttcttcgaacattttatatacatttatcatcatttaaaatattatgaaattcttattacctccttctgattggaaattctgacaggggattgtttttaaacatattttctttttgaccaaaatttcaatttgacattttccacatatctatttaacaatatacttgaataccttattaacactaaaatcttgttaccatgtgcctatccaattacatttattatccatctcctccaatttttcaattataaataaaggtttctccttt

SEQ ID NO: 138106 - DNA, 275 bp, Glycine max
  Clone ID: PAT_MRT3847_95718C.1
aaacaaatctggttgtaactctaattattgtaaacacatctgggggtaactctaattcgcagaatattggcaagtctagtgactattactgctattgttcaaataacactacaataataatgaagaaagaaaagcaaagccttttaaaggcctactttctaagtagtaaacctatttctaagcttcccaacccctcagaagggtagaacgggcaacacggttcactcctagagtgaaggcccccattcgcaagtcacagttatgaattttacaca

SEQ ID NO: 138107 - DNA, 374 bp, Glycine max
  unsure (1)..(374): unsure at all n locations
  Clone ID: PAT_MRT3847_95719C.1
ggtcgaatcgagcgaatcggcccgagatttccttattcatgtggatctcttatattcttgttagttgaacattttttgtgaatcccagttcaagtgcttttatgatttacgataaaaaaatcttttttactgctgaagaccttcctttttggaaatggagtaaaaacatctcttgtcctgttttctgtattttgtatcaaaatacaaatgcatgtacaaggttgaatcaaacctaaataagcttctcttgcaggacttgccatgtaatttctaagagtagttngtgtgtgttgtgtttacatacctatgcatatattatttatttcttggtcgtagaattattgcttttttgaaatttgattctatcctggaaa

SEQ ID NO: 138108 - DNA, 300 bp, Glycine max
  Clone ID: PAT_MRT3847_9571C.1
gggcaaaaaccaaaaaggggttcccaagccaaaaacccaaaaagggctgaaaaaataaaatcttttttaaaacaactggcggctccgcccaataattcaaagacagttttatttgccgttcactttctaaaaaaaacgcttttcaaaataaaaaaaaatggccgggagaacccctttttccctataaaaaaaaatgcctaggtcccccccaaagatttgggggccccacacaagaaaaagctttttataaaagacttggtcctccccatccaaaatacggggttttccttccccaaaatt

SEQ ID NO: 138109 - DNA, 291 bp, Glycine max
  Clone ID: PAT_MRT3847_95720C.1
ctcttgtctattattaaatttgcaacagaccccttatcccaaccaaaaaacaaccaacacgaaaaatttcccaccgggacatacttaaccccaacaaggggcggccattttaaacaaacgcgtacccaaacaataacaaataaatccgcccctgctcaaacacagaccaaggctgtgggtccccccagtcacctttaaaattccacggggaacccccccagagcatactatttttagacacccaccggaaacatagcctcctcaaaaaggcccctgcttgcaaaaccaggg

SEQ ID NO: 138110 - DNA, 379 bp, Glycine max
  unsure (1)..(379): unsure at all n locations
  Clone ID: PAT_MRT3847_95721C.1
attcttaacttatactccgaattatatggacataatgatggataactctcctagggctnttagatccttcttacgtggtgaatgctcacgtggtgatgagggcttgaatggactgggagccgggagacttggtgtgacttcactcgcaccattgtgttgcctacctgctgcatggtctatatagggatgccatgacaatggctgcgtctaacgaatcatcactgatgctcaaggatctaacaagatgctcaactcagctgcagcaagtattcaaaagcaacttcctggtgttaagattgcaatcctcgacatttacaagcctttctatgacctcgttcaagcccattgctaatctgaggatgtggaggccaaccaaagg

SEQ ID NO: 138111 - DNA, 549 bp, Glycine max
  Clone ID: PAT_MRT3847_95722C.1
tcgacccgcgtccgccacgcgttcgcggacgcgtgggcgccgtcgccgactcttgcctttcccacgccctcgatcttggcggctggagagccatggcgatgcagtccggcaggcgagcctcgtagccaggaggggtcagttccccagtcacccaccccacacacgaagatagcgagcttgtagcgtgattttttttgtaggccgtcgaactcgcacctatggcgaccgcgaacccctttgacctcctcggcggcgacgacaacgacgaccccgcgcagctgctggccaaggcggccgtcgcggcgcagaatgccgaggcgaagaatgccgcggcggcggcagaccattatttgtttgatcagatcagcacttggacagtgatttacggatagacaaaattcaaagttgaccgcaaacataacttgatactgcaggcagtacatgcatttcacttccgaccaaaagtggggaattgggattggtctttgatttctggagctggtggagctgcagagcgatggccctcaccatatccacccctgaaaccgc

SEQ ID NO: 138112 - DNA, 236 bp, Glycine max
  Clone ID: PAT_MRT3847_95723C.1
gaccataacatacaaaattcaatggagggggagccatgcacacgttattattcaaataaaaacactacatcccatatgaaacatatactgtttggacactctacgaataaataatactttcccacaactagacctttttttataccactaaacaaagaatttacacgtgtccaccaacaaaacacgaatcaactgataaaaaaatacccattaaaacactcacttaaactgcacat

SEQ ID NO: 138113 - DNA, 289 bp, Glycine max
  Clone ID: PAT_MRT3847_95724C.1
caaccatgacaagctctgaattctatttatttcatttcacaccaaagggtactttttatgggctttttttcatctcattttacatttttgttgtgccccgccaagtggaaaaaaaattttttttaaaggaacttggctgggtaaaaaaacacaacccttcgcgaagaaaacaaaaggggggggggaaagcggttctttcttacttgctggcacaaacattccctaaaaacatggtttggtaacatctaacatgactactgcatccactctaataacaggggatgacact

SEQ ID NO: 138114 - DNA, 474 bp, Glycine max
  Clone ID: PAT_MRT3847_95725C.1
ccggggcgacccacgcatccgcccacgcatccgctttttttgattgtgtgtttgatttttctctcacctttaaatattgggctgctgtggtaactctcattgctaaagcgcctgcaagtgctgcaacagctgcagaggctgcaagatgtacccagacttgagctacaccgagtcaaccaccacctagacctttgtcatgggagtggcaccagttaaggctcaattctagagtgctgaaatgtgtgttccctctgataactatggcttcaaatgttgagctaactgcaccttgcaactcctgcacttgcaattgaggttggtgtagagctaaatcttcaaataaagatttacccttaaaatattattatatactacatcttctttttaaaactttaaaattattttatatattattatctttatactattccattttatcttttaatcaatattccttaaaaatatatttttatt

SEQ ID NO: 138115 - DNA, 801 bp, Glycine max
  unsure (1)..(801): unsure at all n locations
  Clone ID: PAT_MRT3847_95726C.1
ggctcgagcatttgcatatactaatatcagtcatttttttctaaaaataaaattctaagctattttcatttgcactcttttttctacactaatgtatccatcacccaacctccttccatgtccttttaattctccatctcagtttcactcctctcggctccttcttattccaacctctctcattttgagagcacggaatcaatgaagaaaataattagaatattttatcagcgttagtaaaaccgtcacattaaaataaataaaaaggagcgaaaattaggaagaaatatcttgtaagggagagaaaaatgcgagtgaaagagatgcacccgctgtgctgtatctccctcgagagtccaggaatcggcaaacattcgccggagcgggagccggcggcgcttttccgaaccagtagcctcccggcggcgggatctcatggcaatgctgctcagggatcggagaccaccgtcgccggcgttctctacaaatggaccaactacggcaaaggctggagatcccgctggttcctcttgcggaatggcgttctctcctacgccaagatccgctgtccggagaatctcaacctcctcattccttccgacgacgttcgcctcatcggagaaatttccaccaaccgtctcgcacgagtggacggcgccgccactgtcacacgacggaagcaccgcaaaacttcttcttcttcttccggcgttgtccatctcaaggtaactaactctatatatacccacgcatgacgcgcttgttgattttgttttgttccattatctaattntatcgatt

SEQ ID NO: 138116 - DNA, 323 bp, Glycine max
  Clone ID: PAT_MRT3847_95727C.1
ctcacatacctttcctacctaagaataatttcaattcatattcaccctccatctctccatctattcacttcactactctcaaatctaactctacatttctacaatctctaacacttctttcaaatcaacactaaacatttcacaaacaaacaatacttcactcataaccacatctaaaatttttaacaaccttaaaaaattcctcacaaaaacaacaccaccataaatattaatcaacttataaatatccatcttataatcactaataacaatttcctttaaaaacaaaaccccttttatttctcaaacaccaaattttaata

SEQ ID NO: 138117 - DNA, 347 bp, Glycine max
  Clone ID: PAT_MRT3847_95728C.1
tctaagctcgaatcgctcagggactgctctctctaacaatggatgcaggccagaaatgtacagaccaactcacaacacgaggggcttggaggaaaataatgtaacttggggcgagaacagctgaagaactgcagctatgaccatgtagtaaccagttactgaatatagccaatggttgattgcacaggattgaagaaatgtactcatgatgagaatgtaaaatagctcagcattgcaattcatctataattctgatgctgctatacaatggaaacggtgctgatgacctactacatcacaagtgccatgagtcatggattaatggacataaatgctatggcagctct

SEQ ID NO: 138118 - DNA, 846 bp, Glycine max
  Clone ID: PAT_MRT3847_95729C.1
cacgcgtccgcaagcacgcgccctctgtgtctgtttttaacactcgcatctcttacgaagttacgatcactcaaatccaaatctgtctttatgcgtccccctcacaatgcggaaatctgctgcagacagattcaggcaccttttcaaccgttcactcattcttctgcgccaccgtcaccatcaccatccctttccttcttcttcttctctctccccattttctcgctctcgtttcttctcctctacgccgttctccatggcttctgattccccttttcctgtcaccgctcaaaacatcaaccccaaggttctgaaatgtgagtatgctgttagaggagaggttgtcacacttgcccagaatttgcaaaaggatttacaggccaatccaggctctcacccatttgatgagatactttactgcaacattggaaatcctcagtctcttggccagcagccaataacttttttccgagaggttcttgcattatgtgaccatccagctatattagacaaaagtgaaacacagggtttgttcagtaccgacgcaatacagcgagcttggcagattgtggatcagattcctgggagagcaactggtgcctatagccatagtcagggtgtcaagggcttgcgtgatacaatagctgctggaattgaagagcgtgatggttttcctgccaatcctgatgacattttcatgacagatggggcaagccctgcagtccataatatgatgcaattactcattggatcagaaaatgatggtattctgtgtcccattccacagtaccctctgtactcagcctcaattgacctccatggtggcttcctggtaccttattatct

SEQ ID NO: 138119 - DNA, 137 bp, Glycine max
  unsure (1)..(137): unsure at all n locations
  Clone ID: PAT_MRT3847_9572C.1
nnncnnncttttttttatgataaactagtatattaatcataggtggcatgctaaatgaattatcatgggcgggggtacactaacttatgggcacattgacgccataaaacatgtgtgagagtggtacttcaacaaat

SEQ ID NO: 138120 - DNA, 3087 bp, Glycine max
  Clone ID: PAT_MRT3847_95730C.1
gtctttatatataaccctcacaatggcggaaatctgctgcagacagagttttcaggtccataatatgatgcaattactcattagatcagaaaatgacggtattctgtgtcccattccacagtaccctctgtactcagcctcaattgccctccatggtggctgcctggtaatgttttctacatacagttcctttcaacctttcactacattcttctgcgccaccgtcaccatcatcatctctttccttcttcttcttctctcttcccatttactcgctcgcccacgtgttcaggcaccttttcaaccgttcactccttcttctgcgtcaccgtcaccatcataatcaccatccctttccttattcttcttctgtttcatccctctccccattttctcgctctcgtttcttgtcctctactcctttctccatggcttctgattcccctttccctgtcaccgctcaaaacatcaaccccaaggttctgaaatgtgagtatgctgttagaggagaggttgtcacacttgcccagaatttgcaaaaggatttacaggccaatccaggttctcacccatttgatgagatactttactgcaacattggaaatcctcagtctctgggccagcagccaataacttttttccgagaggttcttgcattatgtgaccatccagctatattggacaaaagtgaaacacagggtttgttcagtactgatgcaatacagcgagcatggcagattgtggatcagattcctgggagagcaactggtgcctatagccatagtcagggtgtcaagggcttgcgtgatacaatagctgctggaattgaagagcgtgatggttttcctgccaatcctgatgacattttcatgactgatggtgcaagccctgctgtccataatatgatgcaattactcattagatcagaaaatgatggtattctgtgtcccattccacagtaccctctgtactcagcctcaattgccctccatggtggctgcctggtaccttattatctagatgaagcaactggctgggggttggaaatacctgaactcaagaagcaattggaggctgccaagtctaagggcatcaatgttagggctttagttgttataaatcctggcaatccaacggggcaggttcttggtgaggcaaatcagcgagatatagtagagttttgcaagcaagaaggtttggttcttttagctgatgaggtatatcaagaaaatgtttatgttcctgagaagaaatttcactctttcaagaaggtgtctcggtccatgggatatggtgagaatgatatcaccttagtatcttttcaatcagtctccaaaggctatcacggggagtgtgggaaacgaggaggttatatggaggtgactgggttttctgcagaagtgagggaacaaatatataaagtggcatctgtcaacctttgctctaatatctctggtcaaattcttgcaagcttggtcatgagtccacccaaggttggagatgagtcctatgactcattcatggctgagaaggagaatattttgggcgtcccttgccaggcgtgcaaagacactagaagatgcattcaacaaattagagggtgtaacatgcaacaaagcagaaggggcaatgtacctgttcccccaaattcgcctgtccgaaaaggctatcaaagctgcagaggctgcaaatgcaacacctgataacttctattgcaaacgcttgcttaatgccacaggagtcgttgttgttcctggttctggttttggacaggttcctggcacatggcattttaggtgcaccatattgcctccagaagaaaagattccggccatcgtcacccgcttgactgagttccatgaaaaattcatggatgagttccgtgactaagtcctacttgaattttatccgtcaatttaagggtacccaattgatatttgatgaggatggattttgtagttagagaaaatagtctcttttgttttcaggaataaatttgtcaactccttatagttgcattttgaatatgcaagacttgaaaggatatttgattttctccattcttatacttgtattaggtcctatataaatctctttttaatcgaataaacttcgtattagaataccaataacaaacttttttcagcacgttatattttagaatttctaaggtgcatttcctctttgccccaatggaagtttggatttccacttcaccagagttcgttttgaagagattctcttacactatgaactgaccaccatggcccctaaaatatttacaaattttactatcatattcccactctaagagaacctttaccaattttttttttgctttcttttgtgatttattctgaacagacactagaagatgcattcaacaaattagagggtgtaacatgcaacaaagcagaaggggcaatgtacctgttcccccaaattcgcctgtccgaaaaggctatcaaagctgcagaggctgcaaatgcaacacctgataacttctattgcaaacgcttgcttaatgccacaggagtagttgttgttcctggttctggttttggacaggttagtttatgtacttattctttttgtaaaacacttctctttaatttagcatgacataaattcatttactgatatagaccaacaaaattaatgatttcattttccatccttttgataattataaactgattgtattgttaaattgttgttgtgtcttgcaaggttcctggcacatggcattttaggtgcaccatattgcctccagaagaaaagattccggccatcgtcacccgcttgactgagttccatgaaaaattcatggatgagttccgtgactaagtcctacttgaattttatccgtcaatttaagggtacccaattgatatttgatgaggatggattttgtagttagagaaaatagtctcttttgttttcaggaataaatttgtcaactccttatagttgcattttgaatatgcaagacttgaaaggatatttgattttctccattcttatacttgtattaggtcctatataaatctctttttaatcgaataaacttcgtattagaatacccat

SEQ ID NO: 138121 - DNA, 199 bp, Glycine max
  Clone ID: PAT_MRT3847_95731C.1
ctgttaccaaatccaagggggaaatgaggctggatcacaactcttttcgaattaaaccgattacttacaactaattgtatagcacaacctcatagcctttattatgccttaaattaccaatcctgcatttgacaactctttacattatagcccatacatactcttttatcactctatttaatcatatctttactccaat

SEQ ID NO: 138122 - DNA, 200 bp, Glycine max
  Clone ID: PAT_MRT3847_95732C.1
taattctccaatctaatacccacatattcctccaattcctcaaccataccaactctaaactctcctcacaccacaagaatatcttcaaagtccacaatcacatctccatcgccatcgatgacctcacctactataaccatcatctctcccactacatgatatccgaatgcattaactataattacacctactactttccc

SEQ ID NO: 138123 - DNA, 1812 bp, Glycine max
  Clone ID: PAT_MRT3847_95733C.1
tctcgagccgattcggctcgagtgacacttgaagttggtggtgatcagatctacagctcaaggcaacaaggcactcaaaatgacgctcagtcaaagaagcatgattctagtcgttcttctgggtttcctgggacaaaaggaccttctgatgagatgtgggatgtcatggaaccatctgttgagcaaggtcaagtagccaaagaaacggatatcagcaaggaaacagggaaagcagttgttactagaactgggaggtccttatggggtatgattggtgatattgttcaattacgttggggttcacgtgctggttcctccacttcagctggaagatcagctgagagaaactcaccaaacaagtctgacagtgacacatggttttctgggcaggagcatgaggaaaccactaaaactaatgtcttaaaaaaaacaagtgtaccaccacaagtcatgacttctgataagttaaaaccaggtaaacattatacccaaagtgagggagaggtgtctgacaatacaaaactgaaagacagaggaaaaaatgtcgaagttggattgtcatccccaaatacattggaaagtggatcaatgttagtaggcgcttctcatacttctggagaggaaaatgctagttggactgaagataaaaaaaatttgaaagtcaatacttctggcactcaaaacatggaattaccaatttcagtacctgccagagggccttctattgttggagaaattataagcattggtggatctgacatgtctggagctgaatcagtggttccaatcaaggaatctgttgctcctgggcagtctgaattgtccggctcagagagaaaggatggagagttgaagcaaaggaagtttcaacggaacaggcaagtcttaagagaagacgacagaaggggggaagaagcctatcaacgtgaacttgagcagcgaagagtagatgaaatgttcatgaaggaagcacttttggaagccaagaaggctgctgatacatgggaggtacctgttggagctgttcttgtgcagcatgggaaaattattgctcgaggctgcaacttagtagaagagttacgggactccactgcccatgcagagatgatttgtatacgagaagcttcaaaccttcttcgatcatggagactatcagacactacactttatgtaacgcttgagccatgtccaatgtgtgctggtgctatcctgcaggcaagagtagacactgttgtgtggggtgctcccaataagcttcttggagctgatggtagctggattagaattttccctgatggaggagaaaatgtatcagaacaaagagatataccacctgccccagttcatccattccatccaaacatgaaaataagaagaggggtcttagccactgagtgtgcagatgcaatgcagcaattctttcagcttagaaggaaaaagaagaaagaggaaccaccgaatggcccttctagccttcctgttactcaccacccatccaagttactcaacaagatacatgacgtcttccacatcatgttctgtttgtaaaagagaatattcacatattttcccatgttttaaatgagcttctaaataaaataatcaaacatgaatgaatgatcattgtgaaaagtacaatgctcaatttctttaagagtattcaatcagttaagctgtcaaagacaataatttcaaaaattgcctactttaatttcaagtaatgacttcaaacgcttaggatgatgactagattgtaatgaaaaaaaaaaaaaaaaaattcctgcggctgcgaattcttcctggtgccgaatt

SEQ ID NO: 138124 - DNA, 1818 bp, Glycine max
  Clone ID: PAT_MRT3847_95734C.1
ctccgggggggtgactctcttattctcaacgtcaaagccaaaacccctccttcttcttcttcttctctcgcgccgcaataataatactaaaacatgtccaactctgatggagccattaacgccgtccctcccaacgacgccaacaacaacacaatcgttgagtaccagcagcgaaccaccaccaccaccaccgccgccgccgccgccctcgccgtcaagaaaccgccttccaaggaccgccacagcaaggtcgacggccgcgggcgccgcattcgcatgccgatcatctgcgccgcccgcgtcttccagctcacgcgcgagctcggccacaagtccgacggccagaccatcgagtggctcctccgccaggcggaaccctccatcatcgccgctaccggctccggcaccactccggcgagcttctccactgtctccgaccacaagcccctcctccctccccctacccccttcatcctcggcaaacgcattcgccctgacgacgactccgccgccaaagacgacgccgtctcgctcgtcgccccccccacgccgcccgccctctgggccctacctccccgccccgacttcggccaggtctggagcttcgccgccgcgcccgaactcgtgtcggtgtcgccgcagaattcaatgtttcaccatcaccatcaacaccaccagcagcaacagcaacaggccgccatgggagaggcctctgccgcaaggctcgggaattacctccccggccacctcaatttgctcgcctcgttgtccggcggccacgggaattccggccggcgggacgacgagcctcgctgaatgaatcaatttctgaaattatgatggatttgattgtgatcttcttcgtatataaatatatgtattattgtgtgtgggtgggtgagtttgtattttgtctctgtgactttgttgttgtgtgtggactactgtggacaaggagaaggattgaagattcttagtgaaatttttagggttagttttttttttatttttaatttttggtagtatttcgagtggacaagtccatgaattaaggaattcaattggattattagggttttccttgtttggaaaactgattaggttacttgttaggagatgatgatgaatttgtttagaacattgctggaggagagacaacagagagtatgatgatgagatgaataaccagggattgaggcttggaagtgggtttcaggacctcgatccattgatcggtatgcagatgcagatgcaaatgcaaatgcagacgcagatgcaagtgtaatgaaatgaaaaattaatttaatgatgttattgtggaaaatatcacaccagagtccaaggcgaatgaattcaaggttaagcttcttcttgtttcttctgtctcgctttcactgtgggttttgatcaacttgacttactttctttcactttcctaatttgctcattaaaagtgattagtgttcatagtcttagtttgagtgattgtgtgtttgacaatcaagcgtcactcccattttcttggagtaaacttctttccaatgtttattgagaattcatgttattgcgcatcattgaaggattgtggtccttctaattatgcattctaccttgcttagttgctctctccttcactttcggggatgcctaacagcctgcttctgcaatgtaagacctctgtttctagatttttatctgaaattctcagccatttcttagattcgtcagcgtgacaataatgtcttttctagtatgtaactggatttccgtggggtgttagtgaagtgaataaagacccatctgctcatttctctctaa

SEQ ID NO: 138125 - DNA, 121 bp, Glycine max
  Clone ID: PAT_MRT3847_95735C.1
tgtctctatattccatactacaccttaaagaccgcaaatttctcacaaatttatactatctgattacatggcgggggggcaacactgattaaagatagttcctaattatcaatctctatac

SEQ ID NO: 138126 - DNA, 417 bp, Glycine max
  Clone ID: PAT_MRT3847_95736C.1
ttttgacaagaatggaagtgctatatttgagttaaatacatcaaagttgagcacgacacaattttttacaaatgtttgaacacaacatcataggtcatacaaatttattacaaaaacagcagtgtgtgaaggaacaaataacaaaggatcatcaacaatacacaacccttgtaatagactggtaagttcagaatctcttccatacaaaaagtaatcaaagccgtaataatcagccatacatatttattatttttgccactaagggtagtgaagaatcttcaactttcctccacaagcacaagaattagaatcattccatgccccaagttgataactccatcttttttattttctccaacaatatataccgcaagccagaaaacagaaaagaagccaatcccatttatatgtttttgg

SEQ ID NO: 138127 - DNA, 480 bp, Glycine max
  Clone ID: PAT_MRT3847_95737C.1
ggctcgagctttcttctgcttggaaccctaaaactctgattacgtacctacccattatttaattgttccgtctttataattggggttgctggctgaaccaattaatcatttggggttggaggaacaagaggagtgagagattcaatttttttctgcttttaaaattagggtttcttcatttggtaccgattcccttgtttcttgggcttttggaattgattcaaattttgggtctggttggtggttgttaaatcaaatcgacgagaaaattttgatttttttcttcttctggggtggtggaaaatggatttgggggtttctgatgagatattaggcacttttgtgccattagttgtttactggatttattctgggatttacgttgttctggggttgtttgctgagaattatcggttacatttcgaagcaggaagaggatgaaaaaaatttggtgtaaagggtgctgtggttaaagggtgt

SEQ ID NO: 138128 - DNA, 1003 bp, Glycine max
  Clone ID: PAT_MRT3847_95738C.1
ggctcgagctcgagccgctcgttccttcgcaaactctctccgactcgatggcgacgtagacgacgaaaacgacatcgtactggatccacctaccacctcatcgagagaccccgcgcaacagcaacacgaggcacgagaaaatgcattcggatcagaagctgaagaagacgaagaaacgcaagatcgtgctggagtcaaagaggacctcgacgaaatcaaggaaaccctaactcgtcaattttggggaatggcctccttcctcgctccaccgccatcagattctcattctccatccgatccctcttcgttcgtttccgatcaatccaatcatcgcgctgtttctccgaacgaagtaccgcaattggatgacgctgcgatttccaatcactctaattcggtttcggtgggatccgattcggatggggattgtggtctcgcgcaacgcgcggttggaattaccgaagaggtgctggtcttcgcgatgaacattgctatgcatcccgagacgtggttggattttcctattgatgaggaagacgacaccgatgattttgacatgtctggtgcacaacaagagcattgctgcggttgttgaaagattgactcccagattagctgcgcttagaattgaactgtgcccttgtcatatgagtgaaagttacttctggaaagtgtattttggtcttttgcattcaaggcttaataaggaagatgcagggattttgtctacaccccaggtcatggcagcaagagcaatgtgtatgcaggaattgcataaacaaacaaagcctgaatttgaagatgccggaaatggtgtcactttaaatagagacaatgctttataacacaatgtatgatctcccgacttattagagcacactttttctgatgacatgcctagtcagacatatggatatagaacaacctctttgtccatgttgtcagattgtgagactgataagcacatggttgaaagttctggaacacatttcactgataagtc

SEQ ID NO: 138129 - DNA, 960 bp, Glycine max
  Clone ID: PAT_MRT3847_95739C.1
gtccgcgaattccccaaaacatccaatcccaaaccatcatctttctttcttctttttctcactcccacctctcttttttctctcacccccaatcccaaacccaaaccctagctagcttcaccatgcggttccaatcgctctaaccctatctccttttctccaccaacgatcttcgatccgcatcgccgttcattcgaatcgtctcagattctccgctgcttccaccaccaccacaaggaggaggagttcctcgcgattcccgcttgaagcttttccgtcgccgccgacgatcgaagagattcgctccgattcccaacgcgccgtcgtcgaggttttcaccgaaggaacaaatcctgttgttcctcttcttcgattcgattggattgcactgttttgccctaactgttgccgcgacttcttcggatttctggtttgagagggcttttctgcgcttgattcgaattcgtcggattctcatcctcgatcgtttgataacgatcctattgctctgatttcgaaagtctctggaaggaatatcaattttctcaggattcggattgcgctctggtttttgcgaggaagtgaagaagattcggcatcaggttgctcgtgaagaattctggaagtgaaatctcgccgtcgtggtggttcgatttgttcgatcttaaccttcgtaatctgcaagttgagggagaaaaaacatcagaaaaagtaaagagaagagaaagaaaaagagatttgatatattgtactgtttgatttttttttttttagttttaataacaggggccttttttttttatattatttcagaggccctttggttattatcatcatcatcgtcctttgttattattggttctaagattaaaaaaatctttttctatagatagaaagagaaaatataccatggcgggtgtattataaatttaagagtgcaagagattatgattcaattcc

SEQ ID NO: 138130 - DNA, 146 bp, Glycine max
  unsure (1)..(146): unsure at all n locations
  Clone ID: PAT_MRT3847_9573C.1
gcccctccgcccgatgtcnatcaagggaaatcccttggctctcgttggagtagnaagcagatgaaagatagggattggaatcgttttctgtctgaagttaaaggggtaaggatatagtttgagcttattgctgcccggtagggaaa

SEQ ID NO: 138131 - DNA, 303 bp, Glycine max
  Clone ID: PAT_MRT3847_95740C.1
gcacgcgacgtaactgggacatctttacttcgattctttttcattcacaccaccacactaacacccagttggtcttcacgagatttagtcaccacaaaaactttcctcaatgccttcaagaccaaactgaacatttctccaacaacaaacaactgctgcttgcccgcctgttgctgttccttccccatgggaatgtaatccaaatacaagatggtggcctacagcctcttccaaagtcacacactaacgtgcctggactttatcacaactcaaaaaaccgtctcattatacacaccgccgtac

SEQ ID NO: 138132 - DNA, 474 bp, Glycine max
  Clone ID: PAT_MRT3847_95741C.1
gaaaattcacttcatgtcttttccaaaggcatcaacttaagaagtgggtggtggttttttcacttttcatttgtttcaactttcaactttcaaatccctctttgcctctcccagttttctaggaagttgattttcttggaaatattattattttaaccttgtgtatgttgtaagttgtttttcatcttttctggtttcttcttcttcttatcttgtttctcttttccttttttttttaattttatttagatgaactgcacctacaggtcagcttctcactgaagcataaacagggaatattgattcttttcaggttcttgtgagaggaaaagattgtgtttttgtttttggacttttgattgttgtggatgaggggggggggggggggttgatttttactatggagacatgtttatttaggaaggtagattctggggtggttggtttgttctggtgtggataaaagaatggttt

SEQ ID NO: 138133 - DNA, 388 bp, Glycine max
  Clone ID: PAT_MRT3847_95742C.1
gaacggcatgaaggtccagaaaaatctgcagagggaaaagctcttatctcaaggctagttgaagaaaagaataatgcaattcaacaaaataacaagctttgtcaggaattggtgagggtttacaaaatatatacccgataacttttatctccccatctgactgacctgtatttctcttccttttcttaattggagagggaaaatgataattaaatatgatatatgaactccttttactaaaactaaaggaaaacactaaaaattattggaaaataatagtcataaattttatgaaggattggccactagttcataactggagttggtggatgcgttgattttcttttgaaggattttcttatttcccattcttaagatgataaactct

SEQ ID NO: 138134 - DNA, 405 bp, Glycine max
  Clone ID: PAT_MRT3847_95743C.1
ggctcgagtgctcacaactggggttattgcatgtgtgaacaaaacgaagctggttgctggagatgctgcgatgttacttaggggcaaccatggagaactgagattagggatacgctgggcagctcatctgtaaagagctggttcgtaggcaggtccctctgggcaggaattgaatactgcaactctgaagggggtggggaacgcattatctacacgaggtgcatttagtgtgcgctacaatcacaggatgagctctgcacaagttatcatacctgttcacagattcttaaagagccttgactgctcttattcagctggcatgaggttcatgacgcatgttgaaactgaagactcggctagagccaagatgcactggattaattgctggaattagtgatgttgatc

SEQ ID NO: 138135 - DNA, 379 bp, Glycine max
  Clone ID: PAT_MRT3847_95744C.1
gactgcaacacaggtcatttggccaattctcataataacagactgacgcgcaaagaaactacgactcaatgtaatatagcacaacttacacagatgcagacccattcgttagaaacatagataagaacatcctaaatcactcactgcggaatatctagcgatagctatccaaaagtgcagacttgaatacgagagacatttagacgagtctgactaaaatgttaaccctcttaaagcgatgaacttaatttagatttccgatacacgccggatattgatggctgtatacagctccaagtttgactccagggataatgcatgacaaatctgatgaccaatggttgaaattgagttggcaacatttgttagctcataagtg

SEQ ID NO: 138136 - DNA, 693 bp, Glycine max
  unsure (1)..(693): unsure at all n locations
  Clone ID: PAT_MRT3847_95745C.1
cacccatattaagtgaaatatgcttatatagtgttacgagaattttacggaagcattacgaaagcccaggaagccattttttaacaaaacgggggaggtggttgccgcccagctcgcccaggcgagctaggttgcttctaccttaagcaagaaaatgcccagaattctctagaagggcccagatttgataattgctatttgcacccccattttactaaacacacccccttttaccttttttgctgattccttttccgtaacgttacggaactttacggattacataacgacacttattttctttccggaatgttgcgaaaccttacgaattacgcagcaatgacttttttgacctctggaatgttgcagaatctttacggattgcgcaacaatgcttcctttctacttccgacatgccgnggaacctcacaaattatctaacaatgggtgttaagtacttcaaagcgatcaagcgaaggttgcatcccaccaaacaaatggtccccggacgaaattagggtatgacaaagtgatagaacaaacaaaggaggaaacacacatgaaatagaaaacacaaattatagataacaactgatttcaagaaccaaagctgtggtaccaattgatggaatcctgatttgtggatctagttttttagcatcanacaactggagaacctatttgagactcttt

SEQ ID NO: 138137 - DNA, 757 bp, Glycine max
  unsure (1)..(757): unsure at all n locations
  Clone ID: PAT_MRT3847_95746C.1
gcccttattgtcaattggcgtgctgngctcaagatcggcccaaacgaaccatgcgagctggctatccatgaaaatgcctacggtcttgcccgatatgccgtcatatgccaggagaatggtctggtacctattgtagagccagagatcctggtggatggacctcatgacatcaacaagtgtgctgaggtgaccgagcgcgttcttgctgcatgctacaaggctctaaatgatcaccatgttctgcttgagggcactctgttgaagcccaacatggtcacccctggttcagagtctaagaaggtcaccccagaggtgattgctcaatacactgttacagctttgcagcgaactgttcccgctgctgttccggccattgtcttcttgtctggtgggaaagatgaaaacattaagaaggctcaggatgctttatttgccaggtgcaatgcaaactcacatgcaactttgggaacttacaaaggtgatgctacccttgctgagggtgcctccgagtctctccatgtcaaggactacaaatactaactaaaggtgttgacttcttttaatttggagaatttttgcactattggctacaccattctcatgttctttccttcatagaagttagactcggccgatttgctttctgctctcggttataggatgtctacggattaaagaataatcgcatcaagctaaattggcttgctactgtactgttgctttacattttaaattccctcgtttttttctgttcttg

SEQ ID NO: 138138 - DNA, 1531 bp, Glycine max
  Clone ID: PAT_MRT3847_95747C.1
tacggctgcgagaagacgactcaaggggacactccctttttaaaaccgttgtcttctcacttcgtcaaaaccaaccaaacccctccccaattctcaagccaaccatgtcttccttcaagagcaagtaccaagatgaactcattgccaatgctgcttacattggcaccccagggaagggtatccttgctgctgatgagtcaactggtacaattggcaagcgattggccagcattaatgtcgagaatgttgaagcaaataggcgtgctcttcgtgaactcctattcaccacacctggtgcttttgagtgcctcagtggtgtgatcttgtttgaggaaaccctataccaaaagacagcttcaggaaaacccttcgtagagttgatgaaggaaggaggagttctccctggtatcaaggttgacaagggcacagtagagcttgcaggaactaatggggagactactactcaaggtttggatggccttggcgcccgatgccagaagtactatgaagccggtgcccgttttgccaaatggcgtgctgtgctcaagatcggcccaaacgaaccatccgagctggctatccatgaaaatgcctacggtcttgcccgatatgccgtcatatgccaggagaatggtctggtacctattgtagagccagagatcctggtggatggacctcatgacatcaacaagtgtgctgaggtgaccgagcgcgttcttgcagcatgctacaaggctctaaatgatcaccatgttctgcttgagggcactctgttgaagcccaacatggtcacccctggttcagagtctaagaaggtcaccccagaggtgattgctcaatacactgttacagctttgcagcgaactgttcccgctgctgttccggccattgtcttcttgtctggtgggcagagcgaggaggaggcaaccctcaacctcaacgccatgaacaagtcccagggaaagaagccgtggtccctttctttctcttttggaagggcacttcagcaaagcactctcaaggcatggggtgggaaagatgaaaacattaagaaggctcaggatgctttatttgccaggtgcaatgcaaactcacatgcaactttgggaacttacaaaggtgatgctacccttgctgagggtgcctccgagtctctccatgtcaaggactacaaatactaactaaaggtgttgacttcttttaatttggagaatttttgcactattggctacaccattctcatgttctttccttcatagaagttagactcggccgatttgctttctgctctcggttataggatgtctacggattaaagaataatcgcatcaagctaaattggcttgctactgtactgttgctttacattttaatttctcttgtttttttctgaatgacttttactgtattattatggagaagttccattctatgtttcaatgctatttggatgtgaaagagcattttgatatcacacaaaaattgtttttttttttttataggggaaaaaatgcaaattattttgatatta

SEQ ID NO: 138139 - DNA, 142 bp, Glycine max
  unsure (1)..(142): unsure at all n locations
  Clone ID: PAT_MRT3847_95748C.1
agtttaggtgggcgggacccaaantntntgtgntnaaatggttttncttcccatcanaacttacaangtacacttatagaagctaaaaaaacttgtgaaaataggagggacctgtaaaattataagccccccccgagaaatt

SEQ ID NO: 138140 - DNA, 259 bp, Glycine max
  Clone ID: PAT_MRT3847_95749C.1
cccacacatgccttatctgtagctgcatctacacctgcgcaaactttcactaccgatggcgggaatatcgtcatcaaaagataccgacccaagcatgacttacctgactatctcagacacgggtcgtaatgaacatcccatcaagactggtctaaagcatctcactgatttaaattcaaaccatctatccgcctactcttctgcagacacaccaacgcctataagacgtgatcaaacaatcaaagatatatatcaatgt

SEQ ID NO: 138141 - DNA, 379 bp, Glycine max
  unsure (1)..(379): unsure at all n locations
  Clone ID: PAT_MRT3847_9574C.1
gggcacctttttggattccacgggggacactgtaaagaaaaaggaggaagaaacaccattgtatcacttaccgcatggacattgttccaaagacactcttttgtctatcacagaaatctacaccatttataccacacctcgctcgatgtgattatagtgattattacacgatatatactcttatcatgcgctatacgcagtacatatgagctgtgttttttgcccttgtgtgtgaataatatagctgtggaacactctgacttacacactgaggtgagacactatgttgtgctctgatatgtgagctctccactgagactgtgttatatgtaaatgagctctattattttgcgtctnccnaataaaaangacacaaaaa

SEQ ID NO: 138142 - DNA, 741 bp, Glycine max
  Clone ID: PAT_MRT3847_95750C.1
gtgccgcgcgacggatgagagcacttaaagtcgcccccggcgcggcgccgggcagccaaggcggacagaggcagatacagcggctggcggtaacagagtactgtttggcagcacaccatttgtggagagagacgagtaggctggactgaatactcaggtccgaggccgccctcgctgcagctcagttcttggtgaaagcagccctcctggctatgggaggggctgtggtggacgagggtcccaccggcatcaaggcccccgatgggggctggggctgggccgtcctctttggctgttttatcatcacgggtttctcctacgccttccccaaggcggtcagcgtctttttcaaggagcttatgcatgagtttgggattggctacagcgacacggcttggatctcctccatcctgctggctatgctctatggcacaggaccgctctgcagtgtgtgtgtgaaccgctttggctgccggcctgtcatgcttgtgggtggcctctttgcgtccctgggaatggtggctgcgtccttctgcagaagcattatccagatctacctcaccacgggggtcatcactggcttgggtctggctctcaacttccagccttccctcatcatgctcaatcgatacttcaacaagcgtcgccctattgccaatgggttggcagcggcaggcagcccagtgttcctttgtgcactgtcttcactggggcagctgctgcatgatcactatggttggc

SEQ ID NO: 138143 - DNA, 492 bp, Glycine max
  Clone ID: PAT_MRT3847_95751C.1
gcggagagcggaccccagagagccctgagcagccccaccgccgccgccggcctagttaccatcacaccccgggaggagccgcagctgccgcagccggccccagtcaccatcaccgcaaccatgagcagcgaggccgagacccagcagccgcccgccgccccccccgtcgcccccgccctcagcgccgccgacaccaagcccggcactacgggcagcggcgcagggagcggtggcccgggcggcctcacatcggcggcgcctgccggcggggacaagaaggtcatcgcaacgaaggttttgggaacagtaaaatggttcaatgtaaggaacggatatggtttcatcaacaggaatgacaccaaggaagatgtatttgtacaccagactgccataaagaagaataaccccaggaagtaccttcgcagtgtaggagatggagagactgtggagtttgatgttgttgaaggagaaaagggtgcggaggcagcaaat

SEQ ID NO: 138144 - DNA, 429 bp, Glycine max
  Clone ID: PAT_MRT3847_95752C.1
aagagttgcaggagttcacaattttgtcatcttgcgagagttcacaattggcatcctcctcgtcttcctccgatgaggagtcaacaacaaggacaccagctaggtctggaaggttggcaaggtcatctacctactcggctaggatggtgaggaaggccgaggctatagtgtgtcatccaaagagctcccttgttgctgcgatgatccacgccattgcacatagagtgaactacttgtgggttattgaggatgattgtagcttagctggcattgccactttttctaatatgttgaaggtgttcagagaacatttagaaactatgtagattattacgtgatgaggttttggctctggatgcttctggtgagaagcatgaacaccaatgtgtatgagcatggtccttcttttgtaagtattgcaatgtggcc

SEQ ID NO: 138145 - DNA, 179 bp, Glycine max
  Clone ID: PAT_MRT3847_95753C.1
gcaaggagtaagaagtggagtgcgggcgaaggtaacttaccaacgctaaagagttgttgggtttggtacattggccgagaaatgtttacgattgcggacgttaccgccaacttgcaaggaggaaccaccggattcaccccttaagcgctttccaacaattttccttttcttttcggttt

SEQ ID NO: 138146 - DNA, 1242 bp, Glycine max
  Clone ID: PAT_MRT3847_95754C.1
gctctctctgtcttggtaaaaatggaaaggaacttttgtcacattctgtccctggtgacctcaattacactctctcattgaaattacaacttgcagggttggcttcaacctcctcctccaaactctctcttccctctttaattcaccctgattgattccaagcttccaagttcctgatcatccgcacaatgtacctcccctacactccttccctattcgaatgaagaagactctttcctcttccagttaaaactatactgttcaagaatggttcaagtaagacaaacactttctgtggtcctcgtgcccgctatgctctcacaatatccatcatactaccaggctgcttgatgtcaagtctccaagacaaccaccagcttcttcccctcagtgggtaggcctcctgccgtcccctgtttgcactctcggcaacggttcatggtaaaattgcactgctttattgtcgcatggcttgctttcgaaatgcgttagtgggcgcatgtcgactgtacgaaggcatccatctgctaagtataccttaactggattcttccagagatattcataagctacatcttcaagaagtctggggtacaagaattgatgatttcaaaccaagtaagggcaccttgccctgagctgaagtgaataggaaagtggggatcagatgcttggatgtcagcaatagatagacttcctttgattcctgggattcttgagattgtaggtcattggatacactgggttggtttgtatacaagaaccatagttttcaaacccgacagggaagctttggtacggaaagtaaaagaaacatacaatgaaatactcgggagcaactgaaagtgttaggaaatgctgagatgctgttgacacgaaatagtcatatcttgctgcttcctattgaagatgtcatcatgcttcattttgtcgccataagcttctgaccatactttatcccaagtaatgtaatatgttctgaaaaaattgtatctttttatatatcttgatccacttttaagacaatctcatttcctcaattatatgtagtggttgactacaaggataagaaaaagcaattgagttcattgagctgaattcaatgactttgaaagaatatttcatgaacatatttgttatctatctgcatgcaggatgctttcagagaactttgataaaatatttccattttatttgatgttaagtatgcaaagagatttataaattttattcctagggggg

SEQ ID NO: 138147 - DNA, 605 bp, Glycine max
  Clone ID: PAT_MRT3847_95755C.1
ccccttttgcactctcagaactgttcatggaagaccactgcttattgtcgcagtattgctcgaaatgttatggcaatggccacaggagaggcaccagctgaagctgccccgactgaggtgccagagattgtcaagactcttcaagaaacttgggacaaagttgatgataagtatgcagtgagttcactggccctggttggtgtggttgcattgtggggctcagttgggttgatctcattactacatcactttgaaacaggcaattgataggcttcctttgattcctgggattcttgagattgtaggcattggatacactgggtggtttgtatataagaacatagttttcaagccagacagggaagctttggtacggaaagtaaaagaaacatacaacgaaatactggggagcaactgaaagtgttaggaaatgctgagatgctgttgacatgaaagtgtcatatcttgcagcttcctgttgaagatgtcaccatgcttcattttgttgccataagcttctgaccctactttatcccaagtaatggataagttctgaaaaaattgtatctttttatatatattgatccacttttaagacaaactca

SEQ ID NO: 138148 - DNA, 225 bp, Glycine max
  unsure (1)..(225): unsure at all n locations
  Clone ID: PAT_MRT3847_95756C.1
tatttgacacaccaatccctaaccatggatacacagatttaatctacctatattcttaacaccctgctctgaccatctgtgactgctgcatcctatccttgcttcttcaaatgctaaaacaatctactgtgcaccactaactattatcgcnncaagttttggactgcaaattactannattctagctcctgttcttgcatttctccaccnntcttggtgccnngc

SEQ ID NO: 138149 - DNA, 1228 bp, Glycine max
  Clone ID: PAT_MRT3847_95757C.1
caaattgttaactttatttaaattgaacaatatttcttaaaactgcatttagcgtcaagatcattgatgaaaatcaccagtatttgtaaagcagaaacattcatgttaacaaaactagtttttactttggagcttattctttaagcaaattatggagaatggagagaaaagaaagtaggttatttacagaagatatctacatattttattttaatatttaagaatactcaggtacaaacttggtgacagaaaagacctcaggacacgctggcatctcaggagcaatcttcaaaggtttagttttctcaatttctagcaatgcctaagatgcttcctcatcttcaatcttgggagccaaataatactttaagtgtcccatgtcagcaattttatactctacaacaaggggtacatctgcagacatactgagtgttactgtaggagacagtggagtggcttttgtgaaaaagttcaggtacctcagagcaaaagttaggtgaacaggctcattcatctctatggttaccgcctcctcttctttatccacattacttgtttgtgacaacttaatgttcccattgccaagctctccacttgcagaaaactttaccccattctttgcacaggatatcacaacagcatctccaatgtggctaaggtctcggcatatacgtgcaaattcacccgacggcatctttattacacagctgtactcctgttctgggattccaagttgctccacatctaagtccattaacttcatttcatagtctgaaactttctcttgatttggtgcttcgaatactagtgctaaggtgtctgcattatcttcagcccttaatgtaatgatgtcttcattaccagcacattttagaattttggacatgctggtgaggttcacgcccatggctaggttgcggtcgcagcggtatgtgtcgaagccttcggagcgcagagtaagctgtaccaaggagacgtgagacgagtccatgctctgcaggttcacgccgcccgagctgacgtcccagcaggcctcattgatgaggtctttgagagcctccagcaccttcttcaggatggagccctggatcaggcgtgcctcaaacatggtggcggagttgtggcgactagatgagagctactctaagaggaacgaggtctggctgccaaggtcccccgattcacgatgcagaagcggcagcgaaggcctacagcgacaactaccaac

SEQ ID NO: 138150 - DNA, 451 bp, Glycine max
  Clone ID: PAT_MRT3847_95758C.1
atgagacccgctaacacgtacagaattaataggtctcataggtgagttcatgttctctactgcgactcatccggtgctcttaagcgaactgaataggaacccttcaagtagttcatgaacactgcattttgattgaccattctgaccgattcaaacaaccaagattgtagatgggttttgatcacatgaactctaattgctgaacatggattggatgctgcatcaaataagacaagttctctcagcatatttgcttaatatggtgtggcatagcatcttaaacattgcttttagacatgaaaagattaatgacatattcattactcagttgtaagatatgctaatatgaactgaaaatttcatcaatattggcgtatctgttacctaagtccattttttgaaaataatgatttttactgtatgatatacaattaccattttaaaattaatt

SEQ ID NO: 138151 - DNA, 371 bp, Glycine max
  Clone ID: PAT_MRT3847_95759C.1
gcccgcatacctactctggaagatcccctcgagtaattccaatacctatattgtcacgacaataatgatgctaaagtgggcatatatgaatcggaagcatgtgttatcttattatgcctatcctgaaaccaaaggaaatgagatcggaattcctcgcagaattccaattccacattttcaagaaatcatgctgcaaacatgtccatatctcactcgcaattatttgtcatctcattaggcctatcctgaagccaaatgaaatcagatcagaattcctcagcgaattccacttacacattctcaagaaataatgacgcaaaaatgaccatatatgaattggaatcatacgttttcttattatggctatcctg

SEQ ID NO: 138152 - DNA, 274 bp, Glycine max
  Clone ID: PAT_MRT3847_9575C.1
tagcatcatccaaatctggtttcacaggtaaatcacaatccccagttcatggcaaccaaaccaaaagttctggagctaactgttttgtccgcggagggtctccacgtaaggggtaaaccggcgaacaagaacgtgttcacggtggttcgcgcggagtcgttaacgagccacacgacggcgatggcaaacgggaacgagaacgggttccacacgtggaacgagaagttcagggtggagttggggccgcaagcgaggtgcttgacgattgaagtga

SEQ ID NO: 138153 - DNA, 171 bp, Glycine max
  Clone ID: PAT_MRT3847_95760C.1
tcagctccaacctattaaaaccgtgattttaactatatattatcactcagtcgcctcttttattacttcaacctacacacaaacacacttcgatatgttgaaccaactaaaacaccacagcatccataatctttcgcctaaacactccatattcttttcacccaaacatac

SEQ ID NO: 138154 - DNA, 299 bp, Glycine max
  Clone ID: PAT_MRT3847_95761C.1
ttgccggtggaggacgcgtccgtcttgacatacatggaacccctataaaagatatgccaagaggaatgattaagggaactgggcgcaacatctgggtcgctggtgagactgcaaacactaagagaatggagatcaagaattaggaggactttcaaatcttccaggacagacccctattgggaactcagataatgagccccaaagtggtgacccctttgaagccaagaccatgggtaatagacacattaatcgtttactgatggcattggattgggactaccacatcagtacctgcttcc

SEQ ID NO: 138155 - DNA, 224 bp, Glycine max
  Clone ID: PAT_MRT3847_95762C.1
aaaaacactgacattgcatttttcaccgttttccgcactccaccacaacgatggacaagggccgtgtctaccgccgcaccgatgtccttaccaaccacctgctccgacgcacacccacattcttcggccttttccatccacacccttgacttaactactgccacctggatctctccaacaccatctccttctacacgcgtgagatacaaaaactattggattgc

SEQ ID NO: 138156 - DNA, 447 bp, Glycine max
  Clone ID: PAT_MRT3847_95763C.1
aagattttgaaactaaatatattgttttgattctagcttgcaaaaatatttaaagaagttactgttaaatatgcatccttctcttttaagatgccttctacaatattttcgatgcaaagtgtgcactatgatagttgatcacataacaatttggtattacattttagccggagcttgtggctttggtgaatatggaaggaaaatgaattggtatggtggaagagtggctggggtgtctgggctgtggaggaatggagctggctgtggcacatgttatcaggtacctacttttcttttcttattttcttttcaataaccaatcattgtttctaataaaactagtaaaacaagtgctagctagttcgaataaaattgtttctaataaaaaatatttatgatctaaaaaaaaaaaaacaaaacttctctcaactaaacaaaatatttaaa

SEQ ID NO: 138157 - DNA, 563 bp, Glycine max
  Clone ID: PAT_MRT3847_95764C.1
tcctattgttctctccgccaagaacatacctctcatcctccgcctgctccctccgggaacttcctcagcttctgcctacacccgcaagcaccatcttgcccagccaaaggccatctttatttatagaggagagaaagctttctgtagcagggaatcccgccacagagaaatgatgttagatgggatagaaaatctagagtttgaaaattgaatgcaatggttactcgtcactagatccctttgcatgcaccgtggctgcaaagtcctgcattttgaggagaggataataaccagaaaaagcacaaagtcaaatccaaattttccattcatataatgattctattatatgactagttggtagcagtagtaactagtttactagttagtattttcattgtaatcagtataaggtcctttttctcattccattttgatgaagtcttttgctttattttatttttattttttttgcatcctctcccttgcaaatagagataagaggggatgctgtagagttggttctaagtgatgactaaaatttgattgcttcttctggttttgct

SEQ ID NO: 138158 - DNA, 105 bp, Glycine max
  Clone ID: PAT_MRT3847_95765C.1
cataaattcttccaaaataattatgatgtcaaagttattgcataatattaatggcgacattgtacttgtttacagatcatcgttacactgacttcatttcctgtc

SEQ ID NO: 138159 - DNA, 166 bp, Glycine max
  Clone ID: PAT_MRT3847_95766C.1
caaacacctccgacgacctaatctgtttaagcaaacatactacacgacatgtgaatggtaagctcactcattacagcatcaaactctggaagactcgtgttaatacttgacgaacatcccaagcactgatcgactgggctaacaactatcatttgtcaaggactat

SEQ ID NO: 138160 - DNA, 352 bp, Glycine max
  Clone ID: PAT_MRT3847_95767C.1
ttcatttgaacgcccacgcgatcgcccaagcggccggaacaacaaggcgcggaaacagccaatatgggggggagcaacaaagaaacaatcgacgagccctacgaacaagaggagagcaacgacaccagcagaagaacaaacgccagaggaacgaccgtgtgctcacgcagaagctgaacgagaaacgcgaagaaagcaagaaaccctacatggaagccgaaacaagaggcgtcaaggaggaagaagaagtaccgcacacaaaactcggcgctcaaggacaaggtgaagaccaatggagactgaaaccggcaaagattcacgaaccggaaaatccatgagaaaggaaaaccag

SEQ ID NO: 138161 - DNA, 305 bp, Glycine max
  unsure (1)..(305): unsure at all n locations
  Clone ID: PAT_MRT3847_95768C.1
gtccatgatttggttgtattgtttttattgttttttttgggctgttttttccttttcngaagggaatcccaaatttgggccccttaacttggtttataaatacattgggaggcctttactcggggcctaatggtgttaaaacatggattgccccaatggggggggtttcggccctccccttttttaaaataaattttttttttttaaaagatttggggggctcttgggggaaaaagggcaccccccttttcccgttgtttttttaaaacaggggctttttttttgttttttttaaaaaacccccc

SEQ ID NO: 138162 - DNA, 297 bp, Glycine max
  unsure (1)..(297): unsure at all n locations
  Clone ID: PAT_MRT3847_95769C.1
gaanncccgggccgacccacacataacacccactcctccgaccacattcacctnaagcttccatagcaatggcttcccttccancagccaggttttataataacgttggcatctcacaaaaacttataaaccccatcaacttcatttctgccacaagtccacctccatctacttttagacctgcctccttcaagactgtaacatctttcctccaaaaagaaaactacaccaacacctccaaaaaaatctacttctaatattcctgccaaatattaactttaccctaaatttttttcc

SEQ ID NO: 138163 - DNA, 556 bp, Glycine max
  Clone ID: PAT_MRT3847_9576C.1
tttttctttttttttttttttttttttttttttttttttttttttttttttttttttttttttttttttttgggaaaaaaacagcaagggggctactacttcatggggaggatacaaaaaaaacctttaaactacaaaaccaaccaaacaaaagttaatcaaaaaacgggggatcaaacaaacttatcccttgaaaaaaaggacagggttaaggggccaggaaaggggtttgaacaaaacccccccaccccctcaaaaaaaaaactatgctttaaaaggagccctttaaacaagaattaaccccaaacctggctggcccccaccttggtatttttaaacaatattcaggaaccctattttccacctttggtaaagcgggcctttaaggggacaggcctattaaaaacaagtttttttgagggcgagtcctgggcgaccacaaaaaagcctaatttttcaaaagggaaaatggccccaacttttgcattttggggggaaaacaccccatatgcctggggaattatcactttggaatttggggtttaaaacgccaagc

SEQ ID NO: 138164 - DNA, 419 bp, Glycine max
  Clone ID: PAT_MRT3847_95770C.1
ggctcgaggtatttacaaagatcatcgggcgttatgatcttaactgcactctgccgagcatctgtgttcatcttcactagcccaagattgacgctcttaggcctagatgagaacatactacaggcggcaggaaccatctgtgttgggcgaattcctatcttatttgcttatattgagtcattcaatcggcagacattacttagatctcaaagcaggaatgtctggatagcattcttggcagctttagcactaatcattcatgtgctgctttggtggctattgactatacagttcaagtgtgggattcctggggcaatgatgtcaacaatctaggcattctggatgcctaatattggtgcacttaggattaatacgtgcgggtggtgccatgaaacctgggcagggttctcatatggggc

SEQ ID NO: 138165 - DNA, 192 bp, Glycine max
  Clone ID: PAT_MRT3847_95771C.1
ggctcgagtgaagctgtatcctatactctgattgagttcaggctgggagcgagaatctcaagccagtacttgtttcattccatggcatctttaccgatattcaaaaattggttcgccatttgataccgggaagcatttcattatgaaactacataatatccaagcaatggttgaaaatactagactctggtc

SEQ ID NO: 138166 - DNA, 293 bp, Glycine max
  Clone ID: PAT_MRT3847_95772C.1
aaaatggtgaaattttttgttttgtttttcctccccaaagaagggggtgcgggctttcatttaaatccaagttgtccctacaagcaaaattctgtacactgtttacattaaaacagcatgtaatctacttttttaccccgtcctgtaataaaaacttggggtgggattattacccatggaattgacttcaccttcgattaatcaagaaaatttgcttctgacttatctattgattccgccgccacagctgctttggcttttctaataaacattgtggacctgtaggtggtcaa

SEQ ID NO: 138167 - DNA, 1334 bp, Glycine max
  Clone ID: PAT_MRT3847_95773C.1
acttaaactacattcccagttgttgctgccctcatttctaagcccggtgtccgtgtacagcctctacctccgtcgctgcttcacgggatctgggctctcattcgaattgaatcgaagagtgaagaaagatgcttccctcatttctaagcctggtgtcagtgtacagcctctacctccgacgctgcttcacgggcgcggggctctcatcgcagacgcttagagtggacgacgaatccacgctccacttctgggccccgacaaacccaacggcccagaagccttccctggttctgatccacgggtttgggccggagtccatatggcagtggcgcaaacaggtccaattcttagcccctcacttcaacgtgtacgttccggacctaatattcttcggaggatcgagcaccaagtccagcgaaaggagcgaaacgtttcaggcagcgtcggtggggaagcttttggacaagttggaggttgagaagttccacgtggtggggacgagttatgggggcatggtggcttacaatttggccaagatgttgggtgaagacagggtgcaaaaagtggttattgctagctccggtgtgaacatgatcaagagcagcaacgtggcgttggtgcagagggcgcaactggaaaagattgaggatctgatgttgcctcctacgccacaacacttgcgaatattgatgaagttctccatccacaagcctccccaactcttgcctgattttttactccgggacttcttggctaaattatacggagaaaataggaaggaaaaaatggagcttctgaaagggttaaccatcggaagggatgatacttcaagaatttcacctcttcaacaagaggttctcatagtctggggagaagaagaccgaatatttccactgaagttggcccacgaactaaaagagataatcagtaaaaaggcaagattggaattgataaaggaggcatcccatgtgcctcaaatggaaaagccaagagaattcaacaacattctcctaaatttcttacaggagcattcttgagtaattttttaaaagcattgttatatacattaggagcataatctgtctacatgtgaacgagaagtgctacaacaagcgaatacgaaaaccaaaactcgcatgctattgttagagtgacctctaatattttatatatttctgcaattatactattgttttaaattatacttgggaatcccccacaagttaactagtccataaagtagttataagacagatttttttgcgtcattcatggttaattataagattatcatcgtacatgcatgcatatgaaatataaagttataccgagga

SEQ ID NO: 138168 - DNA, 279 bp, Glycine max
  Clone ID: PAT_MRT3847_95774C.1
ttcgcgcgagtacttcataccgaggctaccactcaatcccaaggccaacagagtgaagatgaccaagctatggttgtgactatggatgtggctggcatgtatgctgcagagcaagctgtcttggctatgtatgccaatggacctgctacagggatggagctagactctggagatggtgagggccacacgcgggccgaacatgagaggggtgctgtgcctgagaccaaaggtataattggagccttgctgtgccccgatttaacactagaactctgctga

SEQ ID NO: 138169 - DNA, 719 bp, Glycine max
  unsure (1)..(719): unsure at all n locations
  Clone ID: PAT_MRT3847_95775C.1
ttcggtccggaattccccggtcgacccacgcgtccgggatggcatttacaatctgataaagattatactgataaccattacggagatgtggagggcaagctccaaacagcttcctgttgtgacagaggttcaaggtgagtatggaaaatactttctaaatacgtcttacaacaggcgtggctgcattttctttttttattttaataaagttttgtttggtatctgcctagtcatttcccatgcaagacgtataaatattgtcaacttatcatgcgtgtggatcttatattttaccaataaattaccttcatgttgacatcaaatcttgatctgtatggcagcttgcttatggataatatagaattggttgcattgtggaaaacaactgaactgaatggagttaattaacttctgaaaatcatatctgattaagtgattatctactcccagtgtcatccattgaaacttgaaagttgaaactggtggtattaagggtataaattgatgttaaccttcagtactgctattntttttcatccatagtcagaattatctatcacaataagtcattattattatttgaaaatgaatcatgttgtatagtttggatgtgtcatctgatatataacctgaataagcatgatttcatcaatagacaatgacagggaaccataactcggaagtcagatctgcatctcttgtcttccctgacctggtct

SEQ ID NO: 138170 - DNA, 637 bp, Glycine max
  Clone ID: PAT_MRT3847_95776C.1
ttcttccccaactatatattattatccaagaagctacagcaaactagaaaggctacataggtagcaataagagctgcagaaagaaccagagaagtctcgatcacatatcatgcagcaagaattcgcagtgtcgtgggcttaatgcatgtgaaaaatcttaaaactcgagtttttttctttttcagaagtgaggaaactagaggggttgaaaaaaggtgtctatttgtttctcatgaagcgacaaaaaattaaaaggtattaaaagctaaatcaggtaatgaagaggtcctatttaaacaatgggtcttatattctctccagttttgtagcctgtaacaattctgcacattttgcattgcatttaaggctatgtctttatatttaatgaccgatgcagagaaaagtaattaatgatgatgatcgcattttcttagtatattagtattgaaatccccaatgaccaagtgaacaacaacaacaaccccttgtcctttcaaattcaagggaactgtggtagaagaagtacatgtatttatgctttttgtttcactttcattgacagcttctagctctctctctctctctctgtgcttccgctgctgctacagataagtcagataacaattaatgagttatg

SEQ ID NO: 138171 - DNA, 420 bp, Glycine max
  Clone ID: PAT_MRT3847_95777C.1
ccaacccgtccggatgcctgaaaggaataatatactttcaaaagggattccagggtcggggggaagcaaataattggaactagtttatagcggattgtacttgggttaagtaactggttgggaattttaacttatgttaatcaaaaaattgggggggccatgggggtttaactaattgggatccttgggaagtttttgggttggtttaatggtggagtaaagcttacagttaaccagacgaagacccggatttgggggccgaaaagaaaaagttattactggaaggcaccgtttaaaaggaaccggtttaagtaattcttgggaaattaatttaataaaaggcacctgttggggcttaaataatctttaacttttgccacaatggggggacattaatttaataaaccggattgcttactt

SEQ ID NO: 138172 - DNA, 423 bp, Glycine max
  Clone ID: PAT_MRT3847_95778C.1
ggctttcgtgggaaaaaggcggatggggaaactgactgcccatgaggggacttcccgaagagttaacatactgccgataaatatagggggaggagcacacgcaaagaatgctatgatatgactctgccaagtgctgtttttcaaatgaggagatatgtcgttggagaactcgccgaataagttgataagatgactcctccctacatacaatgtgcagctctctctcttaatggattaggaattacggtttttgacaccatgaatttcgtggcttttgcccacaaccccgttgattttggacagattaatgaaaaagttgtaacgaaatttacacaacaggaatttttaacaaattggtgggctgaggtggttcctgcaacaactttgatggctaatggatgagcatttatgcatgctatggtg

SEQ ID NO: 138173 - DNA, 836 bp, Glycine max
  Clone ID: PAT_MRT3847_95779C.1
gtaagctcggttttcggctcgatttggacggtttttctacggtccgagaggaggattttctcgcaccgaatacttttcatgtgaaatcgaattgggctcttcgttgaatttggtaggttttcattcactctcaaatctcaaacttttacaatacaatttcacgggataataattatttattgtgcaattgtccttctgttttataaatttagattgcgtgtcaaatatgttatatgatcatgccgctttgcagtttctgcgctgttcataaaacccttctccgacaacttgtagctgctgctgctgtttctctttcattttttttttgctaaggactcaaggaatacaacatcctgatatttggaggacagattaaagagaaacatcgtggaggaaacaatggtagcaaggtattggtgtcacatgtgctctcaaatggtcaatcccatcatggatatggaaatcagatgcccgttttgccaaagtggatttgttgaagaaatgggtaacacccccagtagcagcagcattcccaatacatcagaatctgattttgaatctgatcgggctctctccctttgggcgcccatcttgctaggcatgatgggcaatccacgtcatcctagaagactcagacaaatagccaatgataatggtaatcgtgattatgttgatggtgtagcagatcatggtagagaaactgaatatgatcaagagtttgagtccatccttcggaggaggagaaactcagctaccattctacaattgctccaaggtataagaactggactggcatctgaatcatatgagaatactgatggccatgaccatggccg

SEQ ID NO: 138174 - DNA, 175 bp, Glycine max
  unsure (1)..(175): unsure at all n locations
  Clone ID: PAT_MRT3847_9577C.1
cttcggcgagttgacatcgtgcagcaaganactttgttgcagcanngagatcttgaaaagttcttaaaagttcaaaatgatggcggtccatgaaactgtcgaaattatttctgggtcaccaccagacaagccaaaactcattaagggtggaaattacatcaaaaccggacgagtt

SEQ ID NO: 138175 - DNA, 643 bp, Glycine max
  Clone ID: PAT_MRT3847_95780C.1
gaccttattaatattatttttacattagcccagagaaaatgaaaaccgacccgatagtgtagattaagcatggtttgactgatcacatcttcttaatttcttcataaataaaatatctaactaattaatttcgttgcttaaaagataaacaattaactttctcagcacatgacatgcactaatgatggttagacttcagactcgtcttccttgacgcctttaacttttgtaatattttgttgacaacaattttttttagttttttttaatgaaaaatcactttgaaatatttttacttttcagcgtattcgtataatttttcataaaaattagaataattattttatggtgcaaaattagaatcttaaaaaaatatttttagttatatattttaagaaaaattaagtgtagtttctaaaaataactaagattataaattctgtaaaaaaataaaccaagattataattaaccttttaaaataaaaatggctttttataactgtaaccaaacaaaaaaaaaaaacttctacttttcacaaaatcccccaaataataaatcactttttttacattctaaaaactttaaacaaacagacctaagagaagtatctttaacatcttatttttattactaatattttac

SEQ ID NO: 138176 - DNA, 120 bp, Glycine max
  Clone ID: PAT_MRT3847_95781C.1
tggcgaacatagacatcgaagggatcttgccgcagcagcagccttatgataagcgcgttccgatgacaatgatagtgtgtacttagggccccgcttctcattccgactaaataaccgacc

SEQ ID NO: 138177 - DNA, 245 bp, Glycine max
  Clone ID: PAT_MRT3847_95782C.1
tgcaaacttaactctcaagcttagtactccacgaagtttattcattctctaatgagtatcatagtttatacactctttgtctcttctcttgtagtttccatagctgcagacacaacatccaattcacagttccaatccctcagtcctgaagagaccatagtttccccaagaggaatctttgaacttggtttcttcaatcttggaaatccagacaaaagctacctcgcaattcggtacaagagcta

SEQ ID NO: 138178 - DNA, 137 bp, Glycine max
  Clone ID: PAT_MRT3847_95783C.1
ctagagtcatcttgctgtttgtattctggctcagatggatacatagtgtctgatgacggacgaggtaaagggcctcctaatgcttaagaccatggcactgattgactctggcatactcactctggctgatgacttga

SEQ ID NO: 138179 - DNA, 342 bp, Glycine max
  Clone ID: PAT_MRT3847_95784C.1
gataataatttaactttaaagcggacgcttggtttgaccttttaatttctgaccgttacttggaagaaaacaaaaacccatataatgagttacattttaggttgacatacccccagaataaaagagctttaagttgcttaattaaaagctaaccccaaaagacttgggggtaaacattggaaaacccagaaagggctgggtttcatatttggggaaacaattcacaataatcgcgaaaaccataactcgtggcaggccaggcggttaaaagtgttatttcttttaaagcaatgaacaaaatttccctttcggaaaaaaaaaaaaaagcctgacccctggggt

SEQ ID NO: 138180 - DNA, 523 bp, Glycine max
  Clone ID: PAT_MRT3847_95785C.1
gccttacaaaaaaggttaatatatgtataactataaaatatcaaataacagttgtatacatgcaagcatatggcttgaagcctaaagatagaaatttggaatacaaaaacgaacagaaccgacggcattgacactcccttatctgacgtttattaggaaccctattgttgattccatgatcatgattttggactcccttggatccaaacatatatatcatatggcaacataatttcgtttttatcaagactttatattaaacgcagtttcatggggtgcattctaggacactggcaactttattctatttagaaaacccgcgtttcttatgaaaactatttctcttcctattatggttacgaaacgactggccaagctaagaagggtgatgtttcaatgcgaagctttttgctacgtgaccgaagtgaagatgcttgaacataataattctttgtaactcacgcgtatgggctgaggacgctccaaccgatcatcaaaatgacttcctggcatgtgtatacat

SEQ ID NO: 138181 - DNA, 416 bp, Glycine max
  unsure (1)..(416): unsure at all n locations
  Clone ID: PAT_MRT3847_95786C.1
atctgtatcgatgattatattaaaattctactgcatcggtttgcttgcttacataaaactaccctcctttgtaaagtnaaactacattgttgaagggtggttttggcgatgtggtattgaatatgaggcaatgtgctgcttcttacttggacatggacaaggtcagttatgacgctttttttccaagtttgcatcattgcgtgatattcaatgcagattaaatatttaaatttggctctccatcacgacttgtgggatttgaaccactttttttattcactgttcagtcttctcacagggttgccaaattgccatccattggggtttgtncacctgttaatctcctaaccagttcatgtgcctgattactatgnattggactagccgatcgttgatcaatttgatccgatctcata

SEQ ID NO: 138182 - DNA, 222 bp, Glycine max
  Clone ID: PAT_MRT3847_95787C.1
ggcagtcgcgtctgataataaacatacacaatcgcctctctcttctagccctagggcgctcttactgattttctctcttccgattgagagaattgtgaacatgttactgcaagctactgacaaactcattaagcactggaaagttgtcagatgtaataatgttatgataataaggtgcaaagataacggctagactgggactattaaccgtgtcattcgctc

SEQ ID NO: 138183 - DNA, 576 bp, Glycine max
  Clone ID: PAT_MRT3847_95788C.1
gagaaacggccaacaactaccagaatggcggtgtaaccgcgaaactctgacaagccgataatgaaattgaaggaaaggtcttcccagggtctgcacggtaccggtaatgggcacaacaaccccgccattttttgtgcttcgtatttagtgtactgacaatctaagcatgctgcaacaaattgctcgacatcttttcggattcctatccaagtgaagttttcacttaagcgcgccatggtcttagtcacccctatatgagcgtcggttggggaggaatgatattctagcaataatgtggggatgaaggagaacccagagggtaaccaaatgcaaccattctttaagattaggtcctgaatgacagagtgatcaggatatgttgtcggttcggcgagaatagcttgttgtagttgaacgaaagcctggtattggtgcaactattgtttaagtgtctctaaaaatgtcaacgaaggtactgataagaataacagtgagctcgcagcagggtttgaaatccttgataaggcatcgacgaccacgttggatttgctagtccaatattgaatggagtaatcg

SEQ ID NO: 138184 - DNA, 299 bp, Glycine max
  Clone ID: PAT_MRT3847_95789C.1
tttatgtttttgaggtgtcttgtcctttctgttaatagagggagcagaaaaagagcgttattctgaagaagtgaactcgcttgtgactatgaaaaacaaagctttcggacgtgttttcgaattaagccacgtccttcaaaaattaaaacctattttacttgtcagcgttaatagccgggagaggcattctcacggtgttccaacacttgtttccttcaacagaaattctgggaagactcttttttagacattaatttccaacggggggctcaagggcttggatgagacttaagggtcag

SEQ ID NO: 138185 - DNA, 293 bp, Glycine max
  unsure (1)..(293): unsure at all n locations
  Clone ID: PAT_MRT3847_9578C.1
gataataaacatatataaggatagcatactctgagaacgtgccagaaggaaacctataccgtgagatagagagcatctacctactgtgtcagagactaggcaaaacaaccaccaaattgctcaaactagctattgtctcggacgggaacatgcccaccttatacatgaggcgaatttcacttgtaggagtgagggggcttacatttctgtgccatagcctgatatccgcatataaacagagagggggaagtaaggganaaaacttacctgacgaaatatgaacaaataaaaag

SEQ ID NO: 138186 - DNA, 302 bp, Glycine max
  Clone ID: PAT_MRT3847_95790C.1
gaggaattgaaatgctaacaatatattaacagtgagaaggttcgaaacttaatgctcactcgtggaagacctgccggatatattaatcatgctagaggccatactgttacgaggtgattatctatagtactggctcatagtatggcttgacatcaccctccagtcctggctgggggaaacaacataagataggcctaactagaagcacattgtacaccagcagttataacactaatatttgagggaagcttctccatataatacgtatgaattgtcgggaaagattgaccattctacgtttc

SEQ ID NO: 138187 - DNA, 333 bp, Glycine max
  Clone ID: PAT_MRT3847_95791C.1
atatagatgttatccaccaaatattcttctatctggtaactgctgctaatggtaagcgataatttggtccagaccaacaaatttttgcttatctttattagtatcttgggcggacatgaatattgctgtggctggagctgaagcagttgaagtatgtggaggtccacctatccaagtttcaccgggtagattagatacattaacacaagaacttgtggctttgtctggagcccacactattggaagtaaaggttttggaagctcaatttcttttgaaaattcatattataaggttcttttggagaagccctggacgtcttcaggtgctatgtc

SEQ ID NO: 138188 - DNA, 556 bp, Glycine max
  Clone ID: PAT_MRT3847_95792C.1
cccacgcgtccggtaaaaaaaaaaaacaagtgtagaaccgaatcaatggaatcgtactttgttatttccgttagtttcgatttgcttcctcttcttcttcctctgcgcttcacatcctcagacctcaaccatcagcaccaccataccaacaacatcatcgcggcgccatcaccaccgtaccaacaacatcatcgcgcgatccaagcaacactcacaccaacagatctatgcgccacaacaccaccgcgcaacggagaagtcgcgcgcgcgcaggaagcctcaaagattgattcgcgcacacagatggaggtgcaatgatggtgtgacggcggcgcggtggtggctggtccaaggcggcgacgcgtgacgttattcgagaagaaaggggtcgcgcacgcagatctggagtctggagcgaaggacatgggcgacactgatttcttgggctcagggaaggggaagagggagggagaacaaaggggtaagatggtcgtttccctggtttgtagggcccaatagtaacagcctttaaaaaaataacctagtaaagagaagc

SEQ ID NO: 138189 - DNA, 519 bp, Glycine max
  Clone ID: PAT_MRT3847_95793C.1
atatcaccaaccacaatccattgccggactggagctgaaataaagatatataacatgtcattagcaataaagaggctaactaggttcaaactatgaacaccattgagcttacggactttgaacacactaccaaaaatactacacaagctgaaaccattgcataaagcgaaaagaacctctgctagaaaagtcaattgtttcttcactttactggctttattatatacactgaatggctactaaaaatgtgtatggcaactacttgtcttgttccctggctatttctttcttcagaagaaaagtgtaatcttgattaggcaccatgctgtctaaggaaacacaggtctcttgtcctgatattaacatgtgatccacacctttgacaattattcatctaatctttcagtaacaagggaaacgagaacttgtgatttatatgatttaagatcatagatgttgactggtgattcggctatgaaaatatacacttagtcataggaagggttacatataggatat

SEQ ID NO: 138190 - DNA, 454 bp, Glycine max
  Clone ID: PAT_MRT3847_95794C.1
tctcttcctgtctgggaggaggaatctcagtctagcttcactcggccgtggagcgagtgtacaccacgcgccgctccctctccaatcaggtaaaatggcagggaattcaaatagaagagaaggaaaacctgttatggttccaaaaactgaggatttgggttatgagttaccaccttatacttcattctcaggggatgttggggacaatgttgcaagttcttctggaggcaaactacgagcattctttatcggaatgggattcctaccatgccttgtcgataaagtgatagaggagaatggtgaagagaattctgatactttattagaggctctcttgagatattctgctcataaatccaattgcgactcatttgattctttgggtgtttctcacaatacaagcaggggtagaagtgccccaaatttctatcctgatggtcactcaagagaggct

SEQ ID NO: 138191 - DNA, 318 bp, Glycine max
  Clone ID: PAT_MRT3847_95795C.1
gataccagcactgagtctgatcaatgcgcagtgtgtcatcttcttaaactcaaatgaacactgcaaaaaaaaaaagcggacgatctaaaggatccaagctttctacagcatccaagctaacttacacgtgcattatactgtcaacttattttatagcagtacctaaatttaatcaactggccgactgttaacaacgtggcgactcccaaaacaatggccttacacaacataatccttttgccagacatcctaatatcgacaagtggcgtaataaccaacatgcccaaaacgatcgcactttcaaacactaatgcaacc

SEQ ID NO: 138192 - DNA, 361 bp, Glycine max
  Clone ID: PAT_MRT3847_95796C.1
gccgcatgaaaccactaaatcactgcaaactattggacctatcttataaattatccaaaataaaaaatgcgggctgtataaactaccagagggtgaagagaaaaaaaaccagcatcttactcgagaaatcacagcacaacactgcatcaaatccagcacctatcccagcgaaagaccaacctgctctttcataagccaatataaaccctccaaagcataaaacacatacatgctcaccctcatagattaagcaactgagacaataaactacaacatacatgattgactgttataaagctctagctgaaactggaagggaccttgtaaaggctcatgaattccctcataaaaaacgttctct

SEQ ID NO: 138193 - DNA, 127 bp, Glycine max
  Clone ID: PAT_MRT3847_95797C.1
agcaggggttgcaggcgcagttagctccacatttgcagccaatgttctcagggggaacacccatttcagttctttcgtattgaaccttaactgtgtccacttccatgaccaaggtctcggtggtggt

SEQ ID NO: 138194 - DNA, 448 bp, Glycine max
  Clone ID: PAT_MRT3847_95798C.1
acgtcaaaaatccgctatattatagccgagcgatgactttcggatgccctctgttcataatagatccttcatccacctccaataaaaattcagctgaattgagccttctagcaagcacaaagctcacagcagtgccacgttaatcttgctacaagcatgttagctcactgataaagcgctcatgtcagataataaactggcttctcctttcttcctcatggcgctgcaaattctttcgcgtgtgccatacaccagcctttgcgctgtgcccacttcgaacatttttcaaacttacagcgcacgccgccaccgtgtgtccgacacaggtgctttagatgagctttcttgttacatccctccacggcacagtactccccgccaccatgagatttgcacagccctttcgactgagcagcacgaacacaacccttcttcttgcaccgggagc

SEQ ID NO: 138195 - DNA, 425 bp, Glycine max
  Clone ID: PAT_MRT3847_95799C.1
gatcaccaggcttgctcgcacctggggaaccttttaacaaaagcaatcgttacttgatctccaagaatttctcaatttcttcctacttctttgtgtacgatttcttaagggaaagaaaatcactctctgtgctggttacagacttcgtgaatcattttcttttccactcttagtttatttgctgaacactctcctatttgatataggaccttcgtgttcagattataaaccttctttctggtttccttttcttcagttcctcttgcttcacattttctaaggttccatagccttggctggaacaattttctgggtattaaggtggcctccccactctatcctctatcttgggtattacggacctctcctatgggggtacggacctttttctcatcttctcctcccctacctattcctcttcttct

SEQ ID NO: 138196 - DNA, 1091 bp, Glycine max
  unsure (1)..(1091): unsure at all n locations
  Clone ID: PAT_MRT3847_9579C.1
attcattttaccttcttattttccacttataagaagtttgtccaaacagtgcataagtcagggaagcaattcagtctgccactgtgttgattttggctaatattcatttgttttcctaatgtatcttccttataagttatgctaacaaattaattggattcaattatgaggctttcttcacatatataattttctggaaatggctaatgtgagcatgttatcgcattatgcaggcaaaggaggggaatgcagaagttctttagactgggatagccgcttgagaattgcaattggtgcagtcagaggcattgctcacatccacgctcaacatggagggaaactcgttcatggaaacataaaagcctcaaacatcttcctcaactcacaaggatatggatgcatatctgatattggcttggcaacattgatgagtccaatacccatgccagcaatgagagcaactggataccgtgcaccggaagtaacagacacgcgcaaagcaactcatgcatctgatgtgtacagctttggggtgctgctacttgagcttctgactgggaaatcccccataaacagcacagaaggtgagcaggttgtccacttggttagatgggtgaattctgtggttagagaggagtggactgcagaagtgtttgatgtacagctgctgaggtatccaaacatagaggaagaaatggtggggatgctacaaatagggatggcttgtgctgcaagaataccggatcagagaccaaagatgcctgatgtggtgagaatgatagaggagattcgtcgtgtaaatacgccaaatctaccatccaccgagtctagatcagaagcttctacacccacccctcgtgcagttgacataccttctacctctgttcaacaatgagattcttttgttctgctcaatagttgttaagatgtaatcaattcgatcatattcataacaggagaaatgatatcaatctaatggacttatggtccttggaagttagtaaaaacaaattggtgctgagtaattgggtccctttgcaagtgattattgtattgttattcattctttctcaaacatgaaaaatttnata

SEQ ID NO: 138197 - DNA, 244 bp, Glycine max
  unsure (1)..(244): unsure at all n locations
  Clone ID: PAT_MRT3847_957C.1
tcctttccctttgtagttccagctttatttcatctcaagtagttagatgataagttgtccatctttcatccatgtccatcacatcttaatttgctgttgtctgatgtgatgatcacttgctttgttggaggatgtaattgttagctgtttgtctttacttttctgcacgataaaanatacagcagttgtcttccagatcatgatccatcacattttgatgtaattttcaaatatcataatcaca

SEQ ID NO: 138198 - DNA, 502 bp, Glycine max
  Clone ID: PAT_MRT3847_95800C.1
gtgttttttaacttaaataaacattgatttaaagcataagtatactactcatcatttttaaatacaaaaatttacatagtctacatttttgcaacaattttacatgatcataaatagaagtttcaactaattgccattagaatatctaataatggttcttagaatatttacaactgatttgaagctaacatacaagtttgtgacctaaaggacatccttgacatccactggttcaagaactgatttgggcgtagcccctaatcaaaccaattaacaaagaaagattaattgaattaacttattccatataagactaatcatgtcatgctcaactatggactttaattttgattcccccttacagagagacaccaacatatgtaacataaaaaaaaattattattattttttagacaatttaaaaaaaaattattatttattgcttttaatcattgagacaattcttaaggggtctagtacttcaataattcacttatactat

SEQ ID NO: 138199 - DNA, 573 bp, Glycine max
  Clone ID: PAT_MRT3847_95801C.1
tacggctgcgagaagacgacagaaggggaccagacaatgctaatttaatgaaagtacatattttctgaactcagcattgtagggtggactacctttataggtggtccgtgaaccactattaatgaccctagggtgaatgatgttggtagtcagtctagatccgctcaaggccatggcaaacggtggtggtgctcgatccacatccacacaaggcccggacaaacaatggtggtgctcggtctagatccggttaaggccactacaaacgatcaaagtggtgctcatgatgttctctcgcgtttccagatctgatcatagagatcctcatccccgcctttgctgctacaactcttattatttactttaattatttttagtttgtttgtatcgtttaactgaagaattaggaatcttcaattttcttgatctgtgtatatgtattttgggaacttttgatatgtcaagtggattcatggtttgatttgttctttgctgcaaggaaccatgtgtttggtttttcccccaacttctgttttgagctccatgttttcaagctaataatgtattctaatc

SEQ ID NO: 138200 - DNA, 114 bp, Glycine max
  unsure (1)..(114): unsure at all n locations
  Clone ID: PAT_MRT3847_95802C.1
gtggggatggggtgtnagagggaatntagaatggntattgagaggagtcacaacaaattgttntnnctggcanagttgaggacnaaaggttttggacatagatatgcanattag

SEQ ID NO: 138201 - DNA, 409 bp, Glycine max
  unsure (1)..(409): unsure at all n locations
  Clone ID: PAT_MRT3847_95803C.1
attcattttgtgcctgaacaaatttgtttaagtaacttactgtatatatatatcactgttatacaatagaaacgccgacactaatgtctcatttgagattcatattactgttttttttttttttgagaaatgacgtggggatgaattttcttgattaaaacaatgttttggaactgatgtgatcacaaaaagtaaccacgtgatctatacgcttcagtcaaagtgcttcaaatgagcagtgacataagaatacatttgatgatatgtcttatgaatacttgcgtcattagatatataatgtttggttatagatagttgcatgtatggttgctctaacatatgggtgacttanacacatttctatgtaatantaattagtgatttaacaagtgtgtttttctccctcctt

SEQ ID NO: 138202 - DNA, 641 bp, Glycine max
  Clone ID: PAT_MRT3847_95804C.1
ccacgcgtccggcataagcattggacaagatagctaactaaccaagcttgctgttttaacagaaatggccggctttaatgaagcaccaactgtcgtttcattactccggcgttgtcattaacccattcccaggttgtctctgttactcataatatatttatccatgtaaagtactgtatcacaaccacacagaccaaaaaccaaaactttttttgcaacttgcaacccaacatatcacctccatcgttcaatcaaaactatctcaccccttcgagagagaaagatcgaagacgtgcttcaaaagcaagcaagagcattgatcaattcaatgtatgctacagtcaaaattaaacccaccacccatttattaatttccctgcaactcctttttttttatcaatgagtgtcagcttttcaagtatggccctcaagtgaagcggcacgtggtgaagctccacccagggagaatttctccaatcccaagttgtgtttttagaggggtgtgtgtgaaatgtgttaggctaagttgccatgccactgtctaaggacagaatggtggtgcttttggcaccatattttacccatgggatcatttatggtcaaaatccggttgggtttgaataacctacatattggcaagt

SEQ ID NO: 138203 - DNA, 560 bp, Glycine max
  Clone ID: PAT_MRT3847_95805C.1
cgactctagaaacctttgaaagctagatgcaaccaccttaggaattatcactaaattgcaagcttttagttccccccattaggttcttgaaataggggcacggagcaaacacgctacgtgttgtttccttgatattaccatgcatatctttgcaatgtcatgtttatgtgcgtttatgctgtgttattatttgatggcgttaccatgcttgttcgtctagtatatttctgatttgtgctatcaaccgcatgctctcgtgcatatatctatattgtgtcatcactcatgtgttgcatttgtctcgtcattttgtcacgggaagtcggaaggtccgcatcaccttcttaaatgcatacatggggaactgtggtgatgactgcaaatgaaccatgacgcccgaatttttgtaagtgaaaagagatgatctttcgggctcttgtgtctgtaaaatgcatttgtatcatgcataacataagcattcctgtgcattcatcatacttcctccatgatagggtgtcaaagtattgctcaaacacaatttttattctagcaaacatggg

SEQ ID NO: 138204 - DNA, 1010 bp, Glycine max
  Clone ID: PAT_MRT3847_95806C.1
agcgctggaatatgagcgtaatcttggccttcatgatcttgcagctcacatcaataagaagacaaatagtgaggtcttgcttggttttgtggtggatgttgtacctgcagcgtcatttccaattgcctttattttctttgctggagatgttgaagattggaaatttgggaggctgtgttgtgtgtagtatatgaagaagaagaccaagaagaaaagaaaaaaatctgaaggagcagaggctgcgaagcagaagattacgacaactggaaaacagcatccttcgaccacggggaagaaagagaagaaaaaaaatgcaacaaagccgtcaccagtgagaacttttccaaatggattgattatagaggaggtgtttatgggtaaagcccgatggcaaaaaagctgctcctggaaagaaggttagtgttaaatatattgagcaaactgcaaaaagatgggaaaatatttgactcaaatgtgggaagggcaccctttaaatttcgcctgggtgtaggacaagtcatcaaagggtgggaggttgggatcaatgggatgagaattggggacaaacgaaggatcacaattccaccgtctatgggatacgcagacaaacgcgttgggagtataccaccaaattcgtggcttgtatttgatgtcgagttggttgatgttgatcgctgatttctatccctcattgtttcggctgcggaatggtctggtcccttcgggctgagagaacgttaaactcacatttaccatttttggtcccaagtgtggatcttgagaccaaattagagctcaagttttgtaggaaattttggattgaattagggaattcacagtcttacgagcttaaatatgcaacaaatatagtgtttgctttccttatcaatagtgttgatcattaaatgtgggtttcatttggattgtacaatattttctcttctctcatctctcatttttcctgcctcatttctcaaaaaaaaaaaaaaaaaaaaaaaaaaaaaaaaaaa

SEQ ID NO: 138205 - DNA, 444 bp, Glycine max
  Clone ID: PAT_MRT3847_95807C.1
atattctgggccatgaatgaaaagaataaagcttttgagttccgaaacccaataatgctacggctataccatctttacaacataaattaccagcagcttcaattatttctgactagcatcaaacgaaaaattgtaacaagggcggtaagactttaacgttattcagtccttgcagatcagtttattaaaaattgagtaaatcaagtttgatgggagtttctgaccagaatctcaattttcatacaatgaaaacaggggttaatcagttgaatcaagactatttaatgaaacaaagaatgatccacaataatagaagaaagaaatagtaaaattgaaacagaggtacaaaacacattatgggataaaaaaaaaggatacaattagtaaaagtattggaggacaaaagggcaactgacatgattaaaaaaaaaaaaagaggggggg

SEQ ID NO: 138206 - DNA, 348 bp, Glycine max
  Clone ID: PAT_MRT3847_95808C.1
ttccattcctaatccataaccggatcggcgagctccctactcactggccgcccttcttccttttttttttttttactactgatacaatatacatgcgtggcggattattcggagcgtgtttcaacccctccactgccatctacctgggcgacatcatactccttttttctaaccgctttcgaacacatcgccattatcacttatgcttttcttaattattctgctaagttaaagtatggcattggctattataacagggtagatcatgctgtcggtgcaaaagctttggaaagggttgtgagaccaacttttagcttttagattgagtgctctttcactagagtctta

SEQ ID NO: 138207 - DNA, 264 bp, Glycine max
  Clone ID: PAT_MRT3847_95809C.1
cggggtggttgggcgcggtgcggagccggacacaacgtcgtgccgttcaatcccctccgtgttcatcactccaatacacattcttcccttcttgcgtgttgtcacggcaccattaacatcctaagcagtaatcgtcgtcagaatatcactgattccctcagatggctattccctaatcgcaatgccattgatgatagttgcaatgatttctaagctagaattgatccactacgcgtggagggctcgatcggagacgatgctggg

SEQ ID NO: 138208 - DNA, 394 bp, Glycine max
  Clone ID: PAT_MRT3847_9580C.1
gactgcacacgcacgcgtgcgtagaattcggattgaggtagagcgaaggtggacttatcagctcaattatctctaaatactggctgctgccatgcgattacacgagacctgacatatttcagggctgcgcgattggtcggttacgtgatcattatatatataaagctgatttacatgctgattcatgccacccttcaaattctatggggctcgatgtgcattcagataaattcaagaaccttatgggggagccctgggctaaattcctccatcagaatcaccagagtggaggtgactttgatctaagtgctgctagatgacttattgggaaaatagtcatgacacgtgcctgagcaactctagatgggaatggatttactgacgttactggaat

SEQ ID NO: 138209 - DNA, 192 bp, Glycine max
  Clone ID: PAT_MRT3847_95810C.1
cacatgcgactgccttagtctcgcggatgtacacacgcgggcgttgcaccctcacatctaagcacagagaaagaggctgagatggaggcagaggcagaaggtgaagaaggcgcgaagggaggcattcacccggcgctgagaagcataccgccaacagagagcaggggggccgccgcactgacatccatctac

SEQ ID NO: 138210 - DNA, 514 bp, Glycine max
  Clone ID: PAT_MRT3847_95811C.1
tttttggaaaaaaattaaataaaatctcgtttatcgaaaattacaaattacatagagtatatacagcaggaaatggtagaagaatacgaccaagttctagttcatgctaaaggaatccaacaatgatatacatcagatttgaaatttacttagaactattgacacgtacatttggacgtttaattaatactggaaaaatgttaaagccataaagatgggttcagcttttgaattgtaaaagcatagcctgcttgctttgcttccacaatatttctgaacatccaatgtttaggaacactagacttgagttgaagcccattcttttaactcttcagactttgaatgatgaaacaacaaatctccaattctcagaaatctgatttaagggactttagccccctattccaattgcataagttgaataatttttggagttatctgatgtgatatgttccagtgatgatgactatctaaaaagtgccttgggaggcttcctcttctgcatgtcacgtgc

SEQ ID NO: 138211 - DNA, 152 bp, Glycine max
  Clone ID: PAT_MRT3847_95812C.1
cctcgtgccgaattcggcaccaacactgacgtaatccacttgtaaatttgcaattgtcacagggtataatagaaaactcatttaattgatgtgtacaaataatctcgtgacagagaaatgatatacagatttatagttaaaaaaaaaaaaaa

SEQ ID NO: 138212 - DNA, 577 bp, Glycine max
  Clone ID: PAT_MRT3847_95813C.1
caatatgtcggtagcaatcatgtttgaaatacatttataattatatttaaatcataaatcaccaattatgacgttgataactaaattatatcttctcatattagcattttgattattgtgttacataatggttctgcaatccggatttcaattccacgctttctcttaataaatatacccatatggtcatatcaataaactctagttctttttaatttcataaattgataagtcatcggacatccgttatattttacaaaacaactattaattaccaaaaataatcggccactttagttatgatggcccaaaaatttagttatgatgttattataatctatttaattaaaccttatactaaaaaaactctatataattaaatctttcctaaataatataatactaatgtttttttttaattctgttttcaaatgtaaatgtccaacccttttttagaaaataagttttgaaattaaataaactgaaaaagaaaagttgaggcagatgcaatctctcaatctattaagcttaattaaaaaaatatcgtacggattaatcatattttaacataatttta

SEQ ID NO: 138213 - DNA, 324 bp, Glycine max
  Clone ID: PAT_MRT3847_95814C.1
aacagatacgggagaaacacagaagggtcttcagatactagtgcttatggaagcttggaaacaaaatgattcagtttcggtcaatactgcttacctaaattaaagtacacacggactggactgactaagcattactgtttcaaaactgataaacgaatggtgtcctgttatcaactacgtcatagctaggcattacgtaatcccatcgaagaagcttgaaataaaaacactatcgcttgccgaaagctggtggatgtcaatataggcccgcactctctaaagtttccaacatttgctcaccctggctggcgatttagacgatcc

SEQ ID NO: 138214 - DNA, 375 bp, Glycine max
  Clone ID: PAT_MRT3847_95815C.1
ggatatatttgatgaaagctgtgaaaaaggtacttatgccatctgaacgtgtagtgcacactcgatctcatcaactgtcgtccggataaagagagcttatcaacgcaagctaatgactgctacactatctacgagggcctaatattatagctggaacctgatgcaaaataactcgtaactgagtttggtatatgctgctgattcactgaagacggggataaattaggcgtaattactaacactctcataagttaatatatgagactatagtcatatctactatctaggaacgtgcaccattgcgccttcgatactaaattacgcgtggacctggaacatcgaatgatcgaacgcatataacatgcattggatctg

SEQ ID NO: 138215 - DNA, 461 bp, Glycine max
  unsure (1)..(461): unsure at all n locations
  Clone ID: PAT_MRT3847_95816C.1
atgatatcaattctccatcaacaatgaagagatggatttatgttcactatgtaagggctcatacacatgacatcagggccctagctgttgctgtaccgataagtcacgaagatattaagccagaaaagaggattaaaagagctcgacgtgcagaaaatcccattagtttccgttaccataagtgggctcatttgggggttcctatgcttatctcagctggagatgacacaaaactttttgcatacccagcgaaagaattcaccatgttttctcctcatgatatctgtcctgcgcctcagagaacacccattcaactagtgcataattctgtctttaaccaacgcanactgcttttaatccaatcttcgcaaaagatagaggttcatttgctacaactaanaaaggtctgcacctctggaggctttacaaagaacgatgtagtggctgaagtcaagagtaag

SEQ ID NO: 138216 - DNA, 544 bp, Glycine max
  Clone ID: PAT_MRT3847_95817C.1
tttcctgatttttttatggccaaaacacacatatattgctgcaagagagccttctaaccatacctaaattgattgtacaccaataacttaagaataaccttactctctccacaccatcaattaatgagtaggaaacccctattttttttgctccaccattgacaataatgtggaccatctgccagtgtggaagataataccagtccgttcctttaacatggatatcttttataaaaaacatgcttctatgacccactgcctacatgattgaattagatcacaaatcttgctttttgacccattggaaagcccatctttttccataaaaaccttaaatcatattactacctccagcttcaaaagtgtattagctaccgaaacaaagccctggccgaatatgactgacatggtcttaaaataatataacaccctaatgaactttagatgccaataaccatggactgctcagacataaaaaaaagaagctggataaagccaaatcaatgtctgcaaaaatattattttgaagggaacatgatcgatg

SEQ ID NO: 138217 - DNA, 2310 bp, Glycine max
  Clone ID: PAT_MRT3847_95818C.1
tgatttctgtcttggatttggtctcttagtacgtggcattgttacgcgaggttcttgtggcaggtgcttcttctttcgcatatcaaaaggttcgacgaattgttttgttttattccagaacctgaagcttgtttataaaaaaaagacgagggaatgagcacaatggcaaattgcatacaacatgtggcaaagaagccacaagtcatcagaggagagaaagctggagcttaggcttggtccacctggtgaagagtctctcaatgaaagcatcagaaaaagcaacagagaaagaaatgaatcacaattcactcttggttgcttctcaactcaaaatttttttacttctgacaagcaaggtccaggtgggactacgttgccctctgcatggccttccacatcctatcatcaccaacaccaggctaaagctaaagcttcatcatttcttcagctccaatcaagtccacaaaacatgatagtgatgggaaaggatgtgtcacaattctcttgtgtagagaagaaggtattctcaccctcttgtgcaaatccagcggtgtccaaaagaacttcttcaggtccagcagtgggttggcctccaattcgttccttcaggaagaacattgcaagtggaagcacttctaagttgccttctgggtcccaccagcaacatcaaaatgttgttccatacaaggttgctagccaaaaacctactgacaaatctggtaaaggcttgtttgtgaagatcaatatggatggtgtccccattgggagaaaagtggacatcaatgcttatgacagctatgaaaaactttcctctgctgttgatgagctctttaggggcctccttgcagagatgaagttatctcatattggctcttcccaatgctgttctggtcaaagagattcctgtgctggtggaattcaaaacaaggaacaggaagagaaatccaataagggtttattggttggaagtggggaatatactcttgtttatgaggataatgaaggagacaggatgcttgttggagatgtgccgtggcacatgtttgtatcgacggtgaagaggctgagggtgttgaagagttctgatcttcctgcttttacacttggtagtaagcaagactagttacaccacttgacttgacaatgagaaatgaaggatgaagcagcagcttgaggtcttcttccatgctaaaaattgatgactaagagtgtttttatttgacattttggttcctttgaacattgaagattaggcaatgaaatgttcagtctataagtaatgtttgtatgaatgaatgtatcttgttttctttagtgaagttttgaattgtttctgcattttaaaaatagggtaaggaaaactttacggatgtgtgcactcatgattttgccattaacttatgttggcgtgcgttctgatcgacgccatgtttggaaaaatggtgtgagactccaaaatcaagtttggaggtatagaatatgattttaggtaataataataataatatttggttgttcaattctgctggtggggttcacaacaagcaggaggaagagaaagcaattacggggttattggatggaagtggagagtttactcttgtttatgaggataatgaaggagacaggatgcttgttggggatgtgccatggcacatgtttgtatcaacagtgaagaggctacgagtgttgaagagttctgagctttctgcttttacccttggcagtaagcaggacaagataccacttgactcagcaatgaaatgaacagcggtttgaggtttttgttcacctgctgaaactcgaagactcatctaatttgaagttttggttcttttgtctgatgaaaagatcatggaatgaagctagttgcgtacattacaactaagtaatgtgatgaatgtgttttttttttaatgaagatttgaaatgtttatgggttgtataaatagggaagggaaacttcacggatgtgtgtacttatgatttactgttgagtaaccgttaacttgttttggtttgtattttgtttttttttttttttgctaaatgaagatttgaaatgtttttgggttttgtataaataaagaagggaaacttcacggtatgtgagtacttatgatttactgttgagtagtttctcccttgttttggtttgtattttgaaatcccttttataaagatttgcttctagggtcttaataattttcacatcgtcatggcaaagagcgaaattggggaccctgtaaaaatatggctttacttgctggaatatttttctcccaaaatcttgtgattttaaacttttta

SEQ ID NO: 138218 - DNA, 290 bp, Glycine max
  Clone ID: PAT_MRT3847_95819C.1
gaaaagagcaaaaaaaggagaggatttataaaaacttgatggctagtttggacactcaaatgctcttcggaattgaaggggatgggagaggaaattagttcatttctacctcaatcctctccaattccgaacgagatttgaggttcccaaatagcctaaaggaaatgagctgaaggttacgtttgatcctctagccttgctggcaattgaatcatactagtatatccgatgaagaaacaaaagtgcgtggagaagtggaggcacgtctatgaactctacactctgcagtt

SEQ ID NO: 138219 - DNA, 310 bp, Glycine max
  unsure (1)..(310): unsure at all n locations
  Clone ID: PAT_MRT3847_9581C.1
ntcntnnnnngcntannnnannncggnattnngntcnannnnntntngcnatcttcaccacatncancgagnnttngcngtcacattgaatatggntgangcnanacantctnnngctgagttgtntgagtggnctnnganagatnagcncngcttngngnntgntngtngatcgtnttggttatctgnatggnaccattnangnntatactgaatgtntnggnatgaagcttttnanganaanagatattcnagaggagaantatgccnngnctagnngtagnttnnggccngancaatcccatttttt

SEQ ID NO: 138220 - DNA, 551 bp, Glycine max
  unsure (1)..(551): unsure at all n locations
  Clone ID: PAT_MRT3847_95820C.1
cttttgctgctgttatcgcagcagcaagtaacatagcaagtctgcgacatggtcagcagtttcacaaccaggtgataaagatgggtcttgatgatgacccctttgtcacaaattccctagtggatatgtacgccaagtgtggaagcatcgaagagtctcacaaggcattcagttccacaaaccaaagagacattgcttgttggaattccatgatttcaacatatgcccagcatggagacgcagccaaagctcttgaggtgtttgaacgcatgattatggagggagtgaagccaaattatgtcacctttgtaggtttactatcagcatgtagccatgctggacttctagaccttggatttcatcactttgaatcgatgtccaagtttggaattgaaccanggattgatcattatgcatgcatggtttccctcttgggccgtgctggtaaaatatatgaagctaaggaatttgtttagaagatgccaatanaaccagcagcagtagtgtggaggagcttgctcagtgcatgtagagtctcaagtcatgtagaa

SEQ ID NO: 138221 - DNA, 592 bp, Glycine max
  unsure (1)..(592): unsure at all n locations
  Clone ID: PAT_MRT3847_95821C.1
ggctcgagcatcacacccctcgtcacaacttatgaccatcttatgctatttcctctcaatttcatcttggcacactcatttcatcatttttcatttgggtccgataaaatggtgtaaaaattgaacctttattttttaatttgtttgcctctctctctctctctctctctctctctctctctctctagaattttggcttttgagtttctctctctctttgatattgtatcatctgtcagatattaatgggcactgcagattcctgtggtttgcaacttgggttggggctttttcaaccccagctgtccctatttgtagcaaagcagttgttgggatgggaccaaattgacccatcatgaacctctctgtggtttttcaagacaaccatcaatctcatttatgatttgtgtgtgagttctacccttgaaattttcaccaaatattagggttttaacttaaacctgaatttattatctgtgtgtttgtgttttttactctttaggttgtctntntcagattgaatgggaattntcatttattctatttctaatttaaatagggtgaaaataaagtagttccaaatgcattttat

SEQ ID NO: 138222 - DNA, 450 bp, Glycine max
  Clone ID: PAT_MRT3847_95822C.1
ccctaccaacatataaaaacctcttagatcacaattgccaatattaccatactgtacatttctctcagactcgggtctcaaacaagagagtggcggtggacttgtattacaacatgcaaccaatctgctcctaaggtccccactattctatatctcacaaaccttgaccttgtcaataaataattatatttcattgaccatcctggtgccgtacctattaccacagctcagttcaaaaacacaagaaaacgggaaggcagtctttgatgcacccataacacttgtacttaatccacctccgcacaataaaaagaaacctaatgcacataaggcctgttcgatatagcgattcactaggagtgaacattcgactgccctttggaatccctgtattaccctccccttctttatttatatcattcccttgctatagaagaaaatccaggttat

SEQ ID NO: 138223 - DNA, 341 bp, Glycine max
  Clone ID: PAT_MRT3847_95823C.1
agggggcacacgtttgtggaggtagctagacgcagtaacatgacattccaagtgcttgtatttgtttgttgccacagttttggtcccacatgaatgccatggtccatattaccatcagttccttctccaactgaaaactgggtttggtgggcaatacatcaatgacgtggcatgtgccacttggaagcttggcgtgagagacacaaccgtagtcaagtcgcaagctgttcctgcagcttgctgagagtacatagctgactacgttctacgagaccaatagacatcacattccacgacagttaaccatgacgcttatatctatgctatatcctcatactcac

SEQ ID NO: 138224 - DNA, 527 bp, Glycine max
  Clone ID: PAT_MRT3847_95824C.1
ggcttatcagatcactttcgattctgacgacaaatcgcgtgagtaattgaaactcagttctacttcatgtataagatatacacaagcttaattcacctcctagggtgcttcttctttgtttcaaataattgaccattaccaactatgctcgtcccttgaaagacttaagatgtgtcacaaatcaaactgatccaacgattcaagacattaatccagcacatgcaggaagacaatgtctgaatctatgctacttcgtggcattattatctgaacgcactgtaatacttcttgattcatctaaaaaccaaaaacaactctgtgatcagatgaatcctatcaagcgtcactgtaaccatatgaccatgcgcattcccattgagaatatccccgttctctatgacggctgccacagggaaaactactatgaggactcttctgaagatgttgctgcctcaaacctcattctcgacgctgaatcaactggcgacattgagatccctgaattggacgatctatactccgtgctc

SEQ ID NO: 138225 - DNA, 705 bp, Glycine max
  Clone ID: PAT_MRT3847_95825C.1
attctctctcctactgttaacgttttctgttttctttccgtcgacgttctggctgcgtcccaagaatctctgacgccgttgtcggttttctccggccacggctacttccaacggatggcgacgacgaccacggagttcgatctcgattacgagttccccgatctcgattacgaccttcgctatctcagtctcgccggaatcgatgccctcaccgctttccaaaacctattaccggtcagttctctctctctctctctctctcactcactcactcaattcacgttcgattggagccatctttgccacgccatcaaacatgttctatgacctatgacgtgccaaactgaaaatctattaccgctcgcgcctgacgcttccttaaccctaataacaatgagaataaataaactatttgataaaaaataaaataaaagctgataataattttcaattaattaaaaatgaatgaatgtaccctatataaccatttcgattcattgtaatttgtaattgtgaaaatctctccaacatccagtagaagagagatcttacagaaagaaaatgatgagtgtgttaatttttttaactacttattatatgtttcaattgaatttagaaatgttgtggatatgtttcaatgtaaatctaactaataaaaacaaaaataatgatcctaatccttcaaagtatttttttttttttttc

SEQ ID NO: 138226 - DNA, 212 bp, Glycine max
  Clone ID: PAT_MRT3847_95826C.1
actgagacaaacaagaactttattatagatcaaatcatcactgcgccaatggtcaacattctatgtgagcgtaacttgcaggacaggcatgagtcactgacgtgtttttctgtttattaacaatttgttcacaatactcctaattttctccgtgttattcataataatattttagggttcttatacataccttatcataagaaaaagtcctt

SEQ ID NO: 138227 - DNA, 677 bp, Glycine max
  Clone ID: PAT_MRT3847_95827C.1
aagaaactaaagagacaaaaaaggttaagagagaaaaccaattagaagaacaagagttcacttcccttatgaagtcttacaggcatagatcaacaaggagaattcaaccctgtctttatctttgtgggcattcttttcctcaaaccacaacctgctatccatgccactcctagtcctgaacatgaacaccgcataaccagaagaagaagagttgaagaaccaatcatgaacatcccaaagcaaatccacaagcaacccatcaacgaaaatggtctggttccccctaaaattccagtgcaacctcttcacacgaatcacagtcttcttatcaatgcacacgcacaaaaccggtgacttgaacaacaacccttcattctccttctccacactgcatctgatcataacatcgtgccacgtgccagtgtcacagaactgagccttggtggtgtaaagcgtgttcccagaacaatgctctcttcgtgataacagtgagaccttagccaaaggagtgtttttgttgtttttgaaattttgcctcttggaaactgtttcttcagcagcagcagtgtcgccaagaaccaagcctatttcagagtcgatgatgatcagaacgtgaaagcccgaacaggttcgggtcctgattcgtacttggcgtttgagagatcccataagatttc

SEQ ID NO: 138228 - DNA, 415 bp, Glycine max
  unsure (1)..(415): unsure at all n locations
  Clone ID: PAT_MRT3847_95828C.1
ctgcatagaatggtgcctttggagtaagtcattggaaaaagganctanttcaatctcaatcatgggtacacgtagagggtactataccggttatacctaggaagaatcttgtgagcaggaagcccttgaagtcctttgccagggcagtcagtgcactgactgcagcccatagggccatgaatccagccatgtaccacgaaggtctgactctagtcaggatcatgtctgttgttgccagtcagtgatacggaagccaagcgaaagaggattggacgcactactcgggatctgccccaagatatatcccacaaacaggatagaaacacaagtttgatattcggacgaggataagttcaggtcctctttcaaatcgttgagacgcgccaaagcaattgcattgcggtccaagtagttc

SEQ ID NO: 138229 - DNA, 347 bp, Glycine max
  Clone ID: PAT_MRT3847_95829C.1
ctctttttcttttactcgcttgtgtcggatatttgtgtaagtcaatttttgcttttagtgattctatgatcaggaaacggctccaaattaattatcatcttctttaccactgtcaaattaaaacttatgactgattatatttttgaatttaataggtatataatgttaatttaaatgtcacaaaaaaaaaaaataacaaaatctattaatttaactgaataactaaaaaaaaaaaaaaaaggctgactctctagacgatctaagcttacctacttttgcattccacttaataaacttttttatactgtcatctaaattcattatattaatcgactttttacaacttt

SEQ ID NO: 138230 - DNA, 736 bp, Glycine max
  Clone ID: PAT_MRT3847_9582C.1
gcatgcttcttccctcatgaagcgtcccccaagcgaccacgctgtccattctttgccaccctcaatctctgtcctttggcgacctccatccatccatgaacttctccgacaacctccttcggtagacattggagtaacataataagatggaccagcaaaaccaaaataacactccagatggttcaggagaggtgcctttgaagcgtaaacgtggtcgtccacggaaatacccaaagccagattcagaggagagttcctatatcctagttagtcaaaatagaaggcagaatcctgttcgtgctgaacaagctccagtacctcctggatttgaaggggttaatggaaatcaacagcttcaaaggggtcaagagaatcattcaaataatgcaatggtgggccagctagtttccggtgtaattgaggctgcatttgatgcaggatatttgcttagtgttagagttggtgattctaatactactttgagggggctaatcttcaagcctggacgatacgttcctatttcacctgataatgatgttgctccgagtgttccaatgatccaaagaaatgaagtttgcttcccctcaagagctgctcaggttcaaactcctctcccaaaggaaaggaatgaacagcctgtgaatgttcatagagttgaaactcttgcaatgaatggctcacatctggacctcaggtacctggaggagctgtcagctctagtaactagttgcctcta

SEQ ID NO: 138231 - DNA, 526 bp, Glycine max
  unsure (1)..(526): unsure at all n locations
  Clone ID: PAT_MRT3847_95830C.1
cgagtggcttatgtgtcagacttgaaatctgccgagtttcagccgcagcaggttcgagtccccgctgtgttctttgttgtgagctgtgagcttgagtgtgttttgttctatcgctggcctctttggcagtattttcaatccttaaataaaatgttagggttttacgatttctgaatctcaacgacgttttggcgctcagaaatggaagaacaacaatccaaaacgacgcaagagttggcgatggaagggcagaagtacttggaagaaaccatagagaatgctttccagatcctttcttccatgaacgacgagctctgcaaccccgttttgtggtccacctctccctccgcctccttctcccccaacgccgacgccacttncgaaaactccaaccaccacgccgacgccaccaccgccgctgctggcggcggaggcgccctcgaacaggcccgatcccgatacaagaaggcagtcgccgcgcttcgcaccattctcactggcattcctaacttccagaaggcaaatg

SEQ ID NO: 138232 - DNA, 526 bp, Glycine max
  Clone ID: PAT_MRT3847_95831C.1
agggcccagtcttcattactataattaaattaatgaaaaggagatcgacaaagcctttaatgtgacacccactctgaatgcatgaaaaagttcacatgccatgtttgaaatacctacgccattatgtcataaacagaaatgaagggtctaatgacacataaatcatccacaaatgaccaatattgtggaacaggacgtgattccaaagtcctaacattgctgtgcatcctcctacaaaagaggcccgcttggagggaaacccacatgcatccactgtctgtcataagcagctaaatgcgttcatacaatctcatgaagcatacagaccttgagtccatagaacttcttggtggcagtctcaccatccttgtgaattatggcacacaggaccttcaaccctgtcccaagcctttgagatcccctgtgaccagctactaagaggattccatatttagatgactgaacattggcccattgcttaagttctgtaaaggcctctgtcaacaaatctgctcgactgcgacca

SEQ ID NO: 138233 - DNA, 1714 bp, Glycine max
  Clone ID: PAT_MRT3847_95832C.1
gggtagacaaccaaattagaatatgcagtgtcaaccgaatgtttaaccactgaatttactagtcaagagggtaaagtacataaaatcattgagagcacataccttgtttttactctcaacttccttgtcaacttggttgatttccaccccacttttgtcagcggcaatcttcccagcttttggcctcagccccttacacggacttttaataaagttgatacaattggatttggtcttcggcgtatgtttcacttttctctttctattcttcccagcatttgatctgggaactggtgtactgaactcgcagctttccagctccctattatcttgggacaaattggttttgattccatttatgttttctgtaacacagctcttttgctcaattttagaacattcctggattgatgaagagtcatctattgatgtatcagtgccagagcaaaattcctcatcaattctactcactgagtggatttccgtttctttttctttatctgaaatcaattgaatacaagagtcttttttaggacaagtttccactaatacttcagaacctcctaattctgatgaagttacacatttattttcaccttttgcaacatagctagaaacaggttccatggtaattttattcatattttcaaactgacactgctccacagactttggaatcacttcatcattcaacccttcagcatattcccctcttgtaattgctgaaacatgagtggactgatttatttcctttctgctatcttttccaccctgagtttcatgttgcatctcataatccaagactatggtattatgcaagtctgcagaagcataaagctctcttcgaacttcacaaacttcttttagagtatgttcactaatttgtctgtcatcaattagaggttccttgtccctttcacttaaagaatcaatttcttcctcagttgtcttttctaggaaaataagactgctaattttttctgcagtataattattatttggacttccgaaacttccaaccacagatgccagtgtagaatgatttaccaatgaagcaggtgataaagccgcttccacattgttgcttttgcaggtagactgatattcttgatgcccttcaccattcaaagttaagctatcacacttgctatcaatgataactgcttctgtaatttcagaatttctaatcatttcaatatgtctatctgttgtgtttgtaagtgagctagaacattttttgtccagacaatcttggccctccttgccacatatttctgagacactggaattgcaatgcatcttagaatgacggagtgttaaatcattatttctgtctacatctgattcctgcatgttttgcttctcaatctctgctccaacttcttcaatcattaaagtacgatcaggaatggaattggaaggttgtgacttagcatcatttaatctcgtgctagcaggcacttcagcacactggatttcaggatgcattggagacatttcagcagaagcagagacacacaacaatgaacaatcaatcctgaaagatcaaggtcctatcaactgcttcaaaagaaccataagggcaggcaatgaacaaaagctatgataggcatgaccaaccaacatgatgcaagttgctagggagagttttgcctgctttaaaggatggtgctacatctgaattctaggggggagagaaagatgacgactgtgt

SEQ ID NO: 138234 - DNA, 382 bp, Glycine max
  unsure (1)..(382): unsure at all n locations
  Clone ID: PAT_MRT3847_95833C.1
agctattacttcgcatgcacgcgcncggacgtttgctatttaatttcgagtttaaattcgactttttttctaatgacggctttcctgttgatgatgtcaggcatggttagattgctaggcaggaagatcctatcacatcatctgcagttcatgtatccttgcctattggcattgtctattccgtccatctatgggggctatcactgctccaattacagcggaatccgatggctaggggtcagttgtccacccgaaaacccataggctactattggccttctctattgttttggcttttgtgttgttgtgtgccacttaatgagcaccctccttggatacaacatgagcattgggtcctttgctagatgggcatctggtgatc

SEQ ID NO: 138235 - DNA, 333 bp, Glycine max
  unsure (1)..(333): unsure at all n locations
  Clone ID: PAT_MRT3847_95834C.1
ttacgtcactctgctgtccgaacattactttctgttttatcaaangaagtaaaagagacgttcccagtgctagggtcagagcttaattttccaaataatccttatcccaaacaattttctctttgacacaaataaccagaatccatcgaaaccgacttgttgttcactcactcggttacaaacaccagacaacctccacccacgaacactatatcattgtctccccccattacatgatttcaacccttctaagcatgataactgaactcttctattacacagacgatatatcacctgcacaccctttcgggctaattacattcgcgttgcttt

SEQ ID NO: 138236 - DNA, 348 bp, Glycine max
  Clone ID: PAT_MRT3847_95835C.1
aaggcatatttaaaccccttttttgctaaacaaaaaaaaaccccaaagggaagttctttataaccctttttcactacacaaccagaagggtttaggacttaataggcgtactacctttggcactggacatatgccccctcacaaaataaaaaattctcccaccaaaagggatttaaggggcttaagggggaaccccccggatttttggggggggggggggaaaattccaaaaaattttttttttttccaaagaagtttggaaaccctcccacatcatgtaggggaacggcctggaaaatttctttaaaggcccttttttggaaatttcagggttaaggcccccgtgtt

SEQ ID NO: 138237 - DNA, 342 bp, Glycine max
  Clone ID: PAT_MRT3847_95836C.1
aaaaataccgggggtattttaaaaatttaaaaagttttaaaaaaatttttttatttgattgttccaaggacaacaccccccaataataatgaccccacaaactttttttcccccctaacaaacccccgattgtaaaaacacaaaaggggagggattttcccgcataattctccaccaaaaaaaaaccccttacccttttaaaaacacaaagggcccccccagaaaaaattgtggacccctatttttttcataaaaaaaggcttcaaataaacccccttttggcccaacccgcgcgtgaacccagaaattcctcccccccccctccaaaaaaaacaactttcc

SEQ ID NO: 138238 - DNA, 545 bp, Glycine max
  unsure (1)..(545): unsure at all n locations
  Clone ID: PAT_MRT3847_95837C.1
ggcctctatgggcctcaaagaaggcccattttcttctttgctattgggctggcccactacatagtcatgtttgtgaccctctaccagagactttccaacaaatgagacactcacaaaagaactccatcctgtgttctttctgtttgttgcagcacccaagtgttgcttccatggcttgggccaacattcagggttccttcgattatggatctcggattgcctatttcattgccctctttctttatttctcattggctgtccggatcaattttttcagaggattcatattctctcttgcatggtgggcctatacttttccaatgactggtgcagcaattgcaaccgtaagatactcaaatcaggtcacaaatccagttaccaagaccctgtgtgtcatactgagtctcatatccacactcatagtaatagcactgcttgtatcaactatattgcatgcctttgtcttcaaaaacctattccccaatgaccttgccattgccataagttacagaaagagaaggccacanaagaagtggctaggtctt

SEQ ID NO: 138239 - DNA, 856 bp, Glycine max
  Clone ID: PAT_MRT3847_95838C.1
ctctgaaccaacaaattaataaacttatcccagtccaaatacatgtggttgataaagtgttggtaactagagttggattgcactagccattacgcgaccggtggtgctggcaccatagcgttcgtagctcttcattttcacttctcactacaaattgcaaaacggccactattataatcatgtattgcttcgctgcttcatgtgcatcaatttcttcataaccattgtttattttatacaaagaaaaggaagacaaatttcatgcttgcagttgcaccatattccccggcggccccgccaccactgtcgttgctgtttgacataactcctccgccgtcaccttcaatgtatccgacgcctccagcacctccagtcaccccgccgccggaaactttactcgttcaagattcgccgccgccatcttcagtcacaccacttcctctcacggagccgttgttgccgtctccctcgccggaatctctgccaccgccattgccatcgtccactgttacgccatcgcctccaactccgaccgccgaatctcagccaccgccgtttccatttgccacagctcctgcaccgacaacgtttccgccgtttgcagttgcaccgtcgcctccaactccaaccgccacttttccacctgcattgccagaaatgcctccggcgacagcggcgactgtgactgttccttcgccgcctcaacatccaccattcatgacggaacctactttggcaacgccgtggtttcctgcgttgccggcatcggcgccggaagtgaattttccgtcaacagcacgaggtggaagtttgccggtggctgtggatgttcagaagccttcaacattccacgtgt

SEQ ID NO: 138240 - DNA, 156 bp, Glycine max
  Clone ID: PAT_MRT3847_95839C.1
cgcgtcgaagctcgaattcgctcgagcagagctttactctcaggtctaggaaatgctaagagacggtagcagtagtaggtttctattctaatattcaaaaaccccagtgtcagtcactggaatgatgggttactcactcacagtctttgggagtta

SEQ ID NO: 138241 - DNA, 2096 bp, Glycine max
  Clone ID: PAT_MRT3847_9583C.1
caagcgaccacgctgtccattctttgccaccctcaatctctgtcctttggcgacctccatccattcatgaacttgtacgacaacctaattcggctcgaggcgtgagttcgtgtgtgacattgcactctcttacactgcgccacctcgttctctccgtctaaatagctttcacttcctcattcttcttcttcgtgcgtgcgtgtttctgtaaaatcgaatctcaagtctctgaatctgaatctcaacacaaccttcgttgttctcaacactgtgttcgtttttgctgccaaggttacaacactgaaagagacaccggagtaacataaataagatggaccaacaaaaccaaaataacactccagatggttcaggagaggtgcctttgaagcgcaaacgtggtcgtccacggaaatacccaaagccagattcagaggagagttcctatatcctagttagtcaaaataaaaggcagaatcctgttcgtgcggaacaagctccagtacctcctggatttgaaggggttaatggaaatcaacagcttcaaaggggtcaagagaatcattcaaataatgaattggtgggccaggtagtttctggtgtaatcgaggctgtatttgatgctggatatttgcttagtgttagagttggtgattctaatactactttgagggggctaatcttcaagcctggacgatacgttcctatttcacctgataatgatgttgctccgagtgttccaatgatccaaagaaatgaagtttgcttcccctcaagagctgctcaggttcaaactcctctcccaaaggaaaggaatgaacagcctgtgaatgttcatagagttgaaactcttgcaatgaatggctcaccatctgtacctcaggtacctggaggagctgtcagttctagtaacttagttgcctctaccagaaacagcgtgccttctgtgacgggccagaccactcatcaactacctagaggtaatgtggtgcctgttctgccccaacctaataattttacaaatggggtgccagtttctaatcaaccatcacaagccaagacccaagtttctctagggagtggagtggttgctgctaaagaaattcctgtagatggaaaccatgcacttgtctctcacactcaaactagccagaatttattgccaaccagcatgcaaagtgaaggtgttcctccaccacataatcaatcttcatccaatgtggcgaatgaagatcaagctaaatctgtgagaatgcctggcatgccttttgagcaactggttactgaagttgtcaagaggatccaagctccgtcagatgccatggataccaagattgacaacagcaagtcaggtgacattacagtagcgaaggatccaagcggtaggcaggaagacaaagttaatgagatggatcaaccgcccatcttgattaagcctctgcaagctgtacagtctcatcctcaggaaagctcgacgtctgctccaaaacctgcagactgtactgaaactggcagagtgaatgagcttttgcaggttttgcagcataacaaaacggagaatcaggcatcctccatagcagctgagctaggatctggaaacaagttggatgatataaggaatttagaaactggacttgaagatggtggaactgttcaatcagcaaagcctttctgagcattgaatacctgaattataaatttctatcatttgtggctatttattgtgcctgcagatttatctgtcataaagtaggtaaatatctgacatggtgaaatatttagagtttttagttctagtctcaaggatcttaaataattttaaacttgcaagcttgtggagaaaaggtagcttgttatagttgtatttattgtttttacattagagaccataccttcaagtcggatgttaattacattcctagcaatcgaatattgtccaaaactttaatttaatctttcaatccatttaattgggcagttaaaaaaaaaaaaaaaaaaaaaaaaaagggcggccgaaaatagaatccaagcaatcaatccaaattatccccgaaaaaaaaaaaaaaaaacgggggggcccgtttaaagaaaccaaattt

SEQ ID NO: 138242 - DNA, 570 bp, Glycine max
  Clone ID: PAT_MRT3847_95840C.1
agaaatatttcctcaaatatgtcttccttaaccatactcgcttactgtgagtactaagtacatgctatttgaaagcacagattagtcaaagctgtttaagattgattgatggtgtaacttacatattcttcctttgtagttggaccactctttgtgctcgatcttaaatgattttcttaatggtgaaagatattattgaataataaaatgaattgttatagttgctagtggatagcataatctttccttttcatgtgaaacaacaacatttatctagctaagttattttttgtggatgttttattcagaagaaccttcatctttatatgtttgtgtgaagttacaattttttggacttatctctgattctctaaacagttttaaaaaattcaatttgagctactgcatcgggataacttgctaaatactattggggaagaccttcatctttatagcataatgattttctggaagacctttagaatcgaagaccactatagatgttggactactgcaccgggataacttgctaaatactattggggctcaatttgagcaacgagatgtttt

SEQ ID NO: 138243 - DNA, 749 bp, Glycine max
  Clone ID: PAT_MRT3847_95841C.1
ggaaggcagtaccctctcaaaccttcaagatccaaatcccagcagcaaggtgagtgagtgagaaagaaaaagttagcactatatttgtaagtgtgtttttcagtggaacaaagttggaaagtgactagtagtaacgggaaggggaacagaaggaattatttgaagaagcaaagagtattttggaacaagaatatggaccgtatcacccagaaacacttggggtctctagtaatcttgctgccacatatgatgcaattggcaggctggatgatgcaattcaaattctggagtacgttgttaacacgagggaggaaaaactcgggaccgcaaatcctgaggtggatgatgagaagagaaggttgggtgagttgttgaaggaagcaggtagagttcggagcagaaaaaccaggtcactggagaaccttcttgatggcaatgctcacgctgcaaacaatgttgtcatcagggcatagacatcatgtctgtctgtcaatgactcatgaaggaaaatcggtgttttgcaggaactcaaaagtggagcaagttaaaatgtagaagagataaaaatgtccggacagtattaatttattgggtacaattgaatgattgaagagtgtaatttttgggcttaattattgtttatatgatatgatgtaagtaattatggtgtatagatactcccctttgtttgtgtatacaaaattttttctcctggtttcatacaaaaaaaaaaaaaaaaaaaaacacac

SEQ ID NO: 138244 - DNA, 689 bp, Glycine max
  Clone ID: PAT_MRT3847_95842C.1
tccgggcctccgaatctgcttcatcctctgttgactttgataagtcgatgactttcgctggatttataagcattttctttggcgtgaatacatgagcattactattggattgtgcttgtgactcgtgtgaactgctaccatcttcgtagtatatgtttgtgtgaaatattgacccttctcattccttcttcttgagatattttaggggagactgctcaatgtgagagtattactatgaactgcatgggaccggcaggtaccaaattgtagtagtgctctccggatacgctactccatgctctactctggttattgtctttgatgaggatagcaatgatcggcgcccatggtcgtgagcgtatcaaatagactatccaccccccggtgaatgcaggatagacttagatagatgttgttctcctggtatatgtcaacgaacaagaccttcaccctgttatgcctgttgcgaaactcactaaccaggttgaccgtccttctcttcaccaacgccagtgtgatatacacatgacatgtgctacctctgtcgacttactatatgtcccactgtagcgagtctccaacattataaataagaccgcttaggtacaccttgccaaatgccgctatttcttgctgattatagtataatgtgagcgatactatatcgtaacaatccgagtgaaacctgt

SEQ ID NO: 138245 - DNA, 3409 bp, Glycine max
  Clone ID: PAT_MRT3847_95843C.1
agaattcagactgttaacaaacaaaagaaaaagatatttgatacgactgcataaaaattgaaataattataaaggaggagaacgttgcaatcccaaccacatatccacattctcacccacctactcttctcctttctcttcttctgctgctcgatcgatcgatcgatctcgtcactctcttagctaccatggcgactgagaatcctttcaatagcattttgacgacgctcgaaaagcccggtggtgctggcgagtttggaaagtactttagcttgcctgctctcaacgatcgtagaatcgatagacttccttactctgtgaggatacttttggaatctgcaatccggaactgtgatgagtttcaagttaagagtaacgacgttgaaaaaattattgattgggagaatacctctccgaagctggtggagattccattcaagccagctagagtgcttctccaggattttactcgcgtgcctgctattatcgatcttgcttgcatgcgaaatgccatgaacaaacttggtgctgattctaataaaattaatacattggaaccagttgatcttctcattgatcattctgatcaagttgatatggcaatatcagaaaatgctgtacagaaaattatggaactttaattccaaacaaaaaataaaagatttgggttgctcaaatgtggttctaatgcattcaattaatatgcttggcattcctcctggatccgtgatagttcaccaattaaatttaaactacccagatagagttaagttaaagagaaaaggaatagttgatccttgctgcgttgttggaactgatcctcacacaactatgatcgatggccaggttttttgctttataaaccaatacgttgcaatggaaggataagctgcaatgcttggtgaaccaatgttcaagttcttttcttcccgtggtgcctctataatcttcacacaatctaccaaactcaaaaacccatcaccgtcagaatccaattcctcaatcaactgttgcagcgtctttgaatagtaacacaccacctatcgtgccaagccggttcctgagctgagctgggtatatcttaccatccccaccttcatcaaaatactccagagcacgctcaaacgatgtggtctttgacactgaaccaattgagttaggcaaggatgaaactgagagcttcttcaagggatattttttctatgagtgaagaaatatcacatgtaataaagttaattgtggagtatggcgtgtttaaggtcacagagaatgcactcatcgaattgggaactcaatcttgtggatgtagaaccctgtctctcaggtccaaaaaggcctcatgaccgtgtccctttgtgagaaatgaaggtagactggcatgcctgcctcaacaataaagttggattcaagggttttgctgtaccaaaagaatctcagaataaggttgcagagttcacattccaagggacaccagcacatcttaggcacggtgatgttgttatagctgctatcaccagttgtacaaatacttcaaatcctagcgtaatgcttggagctgcattggttgcaaagaaagcatgtgaattgggattgcaggtgaagccatggattaaaacaagccttgccccacgtgcgtcctgttgtaactaagtatttgcagaggagtggcttgcagaagtatttgaatgagctagggtttaatatagttgggtatggatgcaccacatgcattggaaattcaggggatattaatgaagctgttgcatctgcgattaccgaaaatgatatagtagctgcagctgtattgtctggaaataggaactttgagggccgagttcacccattaacaagagctaattatcttgcttctcctcctcttgttgttgcctatgcccttgctggcacagtggacattgactttgacactgaacccattgggatagggaaggatggaacagagatcttcttcaaggatatttggccatccagtgaagaaatagcaaatgttgtacaatcaagtgtgctgcctgatatgtttagggacacatataatgcaatcacccaagggaatcccatgtggaataatttatctgttccaacgggcactctttatgcttgggaccctacatcgacttatattcatgagccaccttattttagagatatgagcatgtctcccccaggctctcatggagtgaaggatgcttactgtttgctcaactttggagacagtatcacaactgaccacatctctccagctggcagcatacataaggacagtcctgcggccagataccttatagaacgtggggttgatagacgggacttcaactcctatggaagtcgccgtggtaatgatgaggtgatggcccgaggaacgtttgccaatattcgcattgtcaacaaatttttgaatggagaagttggacctaaaactattcatattccttctggggagaagttgtcagtctttgacgttgcagagaaatacaagagtgaagggcatgatatgattatcttggctggtgctgagtatgggagtggaagctctcgtgattgggctgcaaaggggccaatgctactgggcgtgaaagctgtcatagcaaaaagttttgaaaggattcaccgaagtaatttggtgggaatgggtatcattcctttgtgttttaagcccggggaggatgctgattctcttggattaactggtcaagaacgttacaccattgatctaccaagcaatgtgaatgaaatacgacccggtcaagatgtcacagtggtgacagacaccgggaaatcatttgtatctacattgagatttgatactgaggttgaactagcttacttcaaccatggaggtatcttacaatatgtcatcagaaacttgatcaatgctaaacattgaatcagatataaaccaagtttgtaggttgaattgatagcacccactggcgctgattcttaactttggtcttaataatctagtatggctgctacaaagaaatccatgctattcagcaattgtattaataaaccaaggaactagatggctgctacgaggaagagttatgactggcgtttgttgaagaaatgtgattttctttttcaaaaattctattggtcattgaggatgaaaagtccttattacttcttttttactggttttgcagttgagtttttaggaaacatttaccttctatttctacctcccgattcttgagaattaagagaatcaggaacatctattgaaattatgagcaatgtgccgtaaatttcttaaggtataaagaaatgaacgaaggttggacatttaccaaaaaaatgaaagggtggaaggaaaatgcgggaagagagaaatatttgaaattttaattaaagagaaaataagaggaaaaaaatgaaatttattttt

SEQ ID NO: 138246 - DNA, 513 bp, Glycine max
  Clone ID: PAT_MRT3847_95844C.1
gattaaaagtaaacatggtagttgtctttcaggctcccccgcactgtgaccattgatacctttcctgtgtctaactcgatgttctctttatacacacgcactttgactgtatgattctttttgggttgtttgggacttaattcgtaccaaaccttagggcatattgtaatgatttgccactgatgagaattagaacttattagtgaggccataaatgtcattgctcactgcctgtggtacaaaggggtggctgaagagagcatgccgtggatccaccatactcatacatataatgatggcacatgttgcttgtaaccaccgggagctatattctggtgcattcctgggaaggcattcaccgtgtcatcctcagcttggaagaactgtgacccttcttctgcaaatgcctgctgccttttgatgctgctgtcagtttcccatccttattacggttggtgtgtttagccagagccggcgatggacgaatcatgttaagtggaggagcatgcttct

SEQ ID NO: 138247 - DNA, 273 bp, Glycine max
  unsure (1)..(273): unsure at all n locations
  Clone ID: PAT_MRT3847_95845C.1
cnntgcccactactgtgcttccctnagtcctagatggttcacncaccaacaananacattgctnccgcgtttatacctacccacttccgaggantgccgangtntgaatgctcgttgctattaccaaccaccccancattctgaatcccgaacaaccataatgggaggtcatnttgcttgaagcagtgtgcaatatntattgcactgggcggttgggttnataacaggagttcctanatgggagggtcccaccatgcccaagcagctaatcct

SEQ ID NO: 138248 - DNA, 1425 bp, Glycine max
  Clone ID: PAT_MRT3847_95846C.1
tagagcaagtgtttaggtttctgtgcacagtagagagtttatccaatcaaataaacccaaaccaagccgtctcttcatttccgatagaagccatggataggcttctatcttcttgttcttcttcccttaacaccaatctcaagcccttttctcttctccctcgatttgactccgtcagattcaaccctttctcatcaacgcgctgttccttcacctcaatttcatccaagcatgaaaccccacctccattatcgtcttctcctccaaaaaccctaccacccctttccccctctccactcattcattttcatgcctccgtgcccccatcccaacccctcactccgaataatttccaaaatccaaaggcaataacagctcgaacgtttgcaatactctcttctcttgttttgctcttaatccaaccagcttttgctccggcagcttttgccacgtttcaaaatgctgccaagactggtggccctgctgctgccgcagttggtggaaaactaatccgcactgagcttctaactagtgcttggactggtttctttgctggctgcttgcacacactgtcagggcctgaccaccttgcagctttggctccattgtcaattggccgaacccgaatggagagtgctgctgttggagccctttggggttgtggccatgatgccggtcaagttatctttggcttaatatttttgctcttaaagatcgactccacattgaaattatccgaacttggggcaccagagtggtgggtcttactctgctaataattggtgttttgggaattaaagaagcttcagaagtacatgccccaattgttgcattagaaagtgatgaatgcaatgtcaacgtgtatgaatcacttgataatccaacagtaggcaaaaagaagataggttttgctacctttgcaacagggatagtccatggcctgcaaccagatgcattgatgatggtgttgcctgcccttgctttgccttcacgtttagctggtgctgcatttctcatcatgttcttaattggaactgtaattgcaatgggaagttatactgtgtttataggctcgtgtagccaggcactgaaggatagagtacctaggataaccgagaaactcacttgggcttcttcccttattgcaatagccctcggattggctatcattattagccagttttttgggtttcatctgtattaagtattaaaacatttttaatcagactttttttggtatttagaaaaagtagagacgttggacagaaatttgggttgtttagaggaagtacaatccaggaaacatgtgaaattgattgttgattatttactttgcacttgaatgtgtgtaggtatatgtaagttccatgattctgcagctgagaacagcgtagctcttttgtctatatttctggaatttatttt

SEQ ID NO: 138249 - DNA, 670 bp, Glycine max
  unsure (1)..(670): unsure at all n locations
  Clone ID: PAT_MRT3847_95847C.1
tgaacttgctgatgaatcacatggacccaagtctttgacatcacgatatagtaacctttgttgggaagccatcaaatatgctgaagaaggggcattgactgtggaaacttatgatactgcaattagtgctcttagagaaagtggaaagaagatttctttcatgaggagaagtgttgctaaagttgccccacccagtcatccagtcagtgggactgcttatgatgacagaaaatcccctacttcagcagcagatacaaaccctctgttgtggccattgcaggatgaaacaacacagaggtttaatcttaatgatgatagtactcctgttcaatcagttgctgatctaaatttaccacaaatgaccccagtgtctctccagcgagatgatggtccacctgaaatggtggtttatccatgtctgaaatcattgacgtgggtaatggagaacaagaactcaacaccagggaatagagtagctgttatcagtcttaagttgcaagactatagcaggattccttcaacagaatcagaggttaggtttaatctctcaaaagttaccttggaaccatttgtttaaccatatggtcaacatcagtgatcagctgtccatacccacctaggaagttgctgtatttgatctcaagcttccagncccgggatgaccttcnng

SEQ ID NO: 138250 - DNA, 217 bp, Glycine max
  Clone ID: PAT_MRT3847_95848C.1
cctgacaacattcacaaaactgaatccgccatagcagctgcaaagacttgataattaattgcaagtctgtctctatgctcaaaccagagttcccactatccatcaagctaggaacgcattggctatcactgcagcagatgataactaacttgtaatttaactaaggacaacaattcaattcttctagcaggtttttagggaaaggaaacttgttgtt

SEQ ID NO: 138251 - DNA, 438 bp, Glycine max
  Clone ID: PAT_MRT3847_95849C.1
tgtttcgccttcgcgtgcgcatgaatgtgccaaatgcgggtcttacaatgtggagatgtcatgtgggctatctagaatcacaagtggctgagccgacttgtgcctacattaaatgtacaagtctcttgcctcatggcatttggagagcaggctgatgacaccattaatctcgtggcttttacggactggctgatgcggtgggcacagatgcaggaacagggtgtacaggaattgccacaggaggagctatttacagcttggtcaactgacgtgcgtgctgcgacatctacgccggctgatgggaggacatatttgtatgctatggtgcatgatcattcacagtgtacatgaccaggagttcatgccattggtgtgatgcaggcagccaggaacaattggagcgcacatgggctcaatgctggaatattagggtctcgg

SEQ ID NO: 138252 - DNA, 496 bp, Glycine max
  Clone ID: PAT_MRT3847_9584C.1
attctctttctctcttcatcatcttcccctctctctcttcctttgccttgtctccgtgtgaaagatcagagctgcgccgtcaccgatttggggggtgggttggtgctgctggtgtattatacatgcttacatctgcatgtgctggttgagttatttgctggtctaacttaaccatactgtctattttgactcctgagattgctagtgagtcatggggcatagacatttatatagctcatctccaatgtttgagggtgaacctgaccagaactggaatcatatgcatatggatcaacaatatgtgaaccttggtaggagtagcacttcagacaatggttcttttatttatccttcggaaaatatgtccatagataacatttcttttccatctcattggaacactgcaccaaagtcaaacggatatgcattcacaagtctcaacattgaagcaccgcctcatcaaacagatgtatcatgcacttctcatgatcatttt

SEQ ID NO: 138253 - DNA, 515 bp, Glycine max
  unsure (1)..(515): unsure at all n locations
  Clone ID: PAT_MRT3847_95850C.1
gttgccnggctaaaatangngtttgggggggttgttgtgcatgataaagatttggcatttggtatattttagacttaaatacaattatagtccccttttacatgttgtgtaatttcagtcccatacttctaattaactgattttagttgacaaaagttggtccaattggtaagaaactcataacaaaagggcgctaattcaattttcattacgaggactttgttagtgaatgatctataaaaatacttccaagcgctcaatgaggcttgaggtctatcctgacccagtgagtcctcgaaacctaactcagctgaactttttcttattgaaaaagaaaaaactgattttattccctaaaattttactggttgttaaaattggattccttcataagtttgagtgtttgacatctaaaatttaacagaatttaatcacaccaatcatctctttagttgacaggttgacacataactaatcaatgacatgaaaaacatttcacatatcataatatttat

SEQ ID NO: 138254 - DNA, 366 bp, Glycine max
  Clone ID: PAT_MRT3847_95851C.1
catacatcggatttaaaacaacttgatttttgtctgttcctcgcagcactcaattggcggatttttttacgcacaaaccatctacacatactctgttgctgcaatatgaaaagaaatagaggcttcagagacatacctcgagagttctatgtacaaataagcgacacaattagcttactcagttttggaacgcttgcgtcttccccatcatgatatcgataaagatgatatgttcgaatcaaaaactatgctgctgcttaagcattcaaccaacttccatccaagacactacacattcttaattcactcacactatacattttattcacccaaagctattacttcccgctttatttttacttgtac

SEQ ID NO: 138255 - DNA, 551 bp, Glycine max
  unsure (1)..(551): unsure at all n locations
  Clone ID: PAT_MRT3847_95852C.1
gtactatagtcaagataagtgtctatacaataataaatttttcagaaattagcaaagatatacttgcttagaataaacgtagataaaactaatcatcattatcaagatacaagaaccataattcggtaatctggaacataagtacaaaagtgtgtttctattgcaagagtgatgatattttctctgccctttatctggaaaaagtgaatagacaattgctatatatatcaaacaaagacaactttgatgtgtctatttggtgagagagctatgtttcctttcatacaacatggcggcagaaatatttttgtaacagtactcaagctgaaatgcttgtgagaactcttcaatcaaggacttatgtgtaatatgaataaaactagcatcatccagatgatgcaaatctgttccatgatcaatacatagcttgccttctctcaccaaccccttaatgcttacttgatgaccgtgaccatgtattccacatgggaccatccatttaaatagacacaaatttgntgtgacattaagtgctaagccatgataggtta

SEQ ID NO: 138256 - DNA, 434 bp, Glycine max
  unsure (1)..(434): unsure at all n locations
  Clone ID: PAT_MRT3847_95853C.1
gctggggaagacagaacaggcagtttaatttgttgttctaatggagcaatcatgggagaattggcctcttgatatgggaatggaggaagacagggatctgagggatgaggaggagttcctgagaaacatcctcagtgaaccttctgagagtgagatggtaaccgttgggtcagccaaaaggcctccgaggacatacattttgtcttttgataactccaccataataccagctactcctgaacccacttccagaaaacgcacacgccaaccacaaaatctcaacttagaaccagttaaaccaaaccccaacacccagcctggaaagaggggtagaagctgttcccagactctggatcacattatggccgaaagaaaaaggagacaggantcaccagaagttcattgtctttcagccatatcctggttgagagngg

SEQ ID NO: 138257 - DNA, 507 bp, Glycine max
  Clone ID: PAT_MRT3847_95854C.1
gacttaatggagatgttgaatccccatccaaagccaagggttatttgtgattaaaacttgtatatgttctccgttcatgtagtctctacaatgttgctctaagttccattcacttccgttgcaatagcaaaaatagattataccgaagccatgagccttgaccattgttacctgcacttgagattaccactcattcaagcggtaactaaaaagtcccaccttaggtggaacaaacaacttgagctccatatatgtggaacgtctaacgatttttgacatctacgtgcagttccgtttccttgcgcagtactatcgcggcccattagttagcggagatttccaccatgcatttaccatatactaaactgatacaatgcttaatggcagctattagctttcactgtttgatcatacacagctttcttattaattggagggatggaaaccacgaacctcaatagttgctatgatctctttacttaattaaatacttcgctagtgcttatg

SEQ ID NO: 138258 - DNA, 128 bp, Glycine max
  Clone ID: PAT_MRT3847_95855C.1
gtaaagtctaaggccactggttctcccctttcgactgttccgggctacgatctatccggtgtagctgttaaagttggcactcaagtgaaggaccttaaagtgcatgatgaaacctatggtgatcgtaa

SEQ ID NO: 138259 - DNA, 325 bp, Glycine max
  Clone ID: PAT_MRT3847_95856C.1
gaaactcactgcactgaattctactgttcgccgctctctgctcaatggccttaaccaaaactgttaccacctctgttcatctgcactgatgccgtattcggcagcttaaacaatgctcctctgctcccgatgcacgaactgatggttcttctactgtaatatgacaatagtttcacctgctaaagccaaactaccgtataatgataaagatgaagagaacgccaacgcctataaaaccataatgaagtccacttattatcgcatttcgaagccaaatgtttttatagatgactgaacagaatcaccttaaaactacttcatacca

SEQ ID NO: 138260 - DNA, 162 bp, Glycine max
  Clone ID: PAT_MRT3847_95857C.1
gacgacggaaagactgtgtatcgggtattcagagacagagatgtgcccaaaacattagactgtgcgagacattgcctagcatctacaatagagtatggctacggaactgacccttctcggctggatataccatcacccgaaccatcatgaccaaactttccc

SEQ ID NO: 138261 - DNA, 300 bp, Glycine max
  unsure (1)..(300): unsure at all n locations
  Clone ID: PAT_MRT3847_95858C.1
cggacaancaaccacattacaccgattccataagaagtttaacacaaaccacttcatttcttaattccaaaaaaaatacatataattaatacttcaaactccattaactataaccaccttctcaattttttttaaccaaaactcatcctaacacactatcttttccttctaactaccaatttcctcataatctccttgttaaaaacaaacatccactatatctaaaccaaccaccaaggccttctaatttctttgactatcaacttcaactttcttaaataatcctttctttatcccaat

SEQ ID NO: 138262 - DNA, 1736 bp, Glycine max
  Clone ID: PAT_MRT3847_95859C.1
ccacgcgtccgcacctctctaaccatccaaccacactgccataccaattaagtatgcgcgtagggccatagtgaaagaaaaagacatgaagcttcatagaaaactctctttaagtttcgtagggccacggttgaaaaaaagaagaagaagatatgaagcttcacagaagcgctataagcttaagcctataagtttgcttgtttgattagaatggagcggctcgagcaacagtcctccatctacaatcatacaaacctttattctaagttctgatggctctgcgatcattctcttacgatgtgttcctcagcttccgaggggaagatactcgttatggtttcactggctatctctacaatgtccttcgggaaaggggaattcacaccttcattgatgacgacgagccccaggaaggggacgaaatcacgacagcacttgaggcggctattgagaagtccaagattttcatcatcgtgctctctgaaaactacgcatcttcctccttttgtttaaactcactcactcacatccttaactttactaaggagaataatgatgtgttggttttgcccgttttttatagagtgaatccttcagatgtccgacaccacagaggtagttttggagaagcactggctaatcatgaaaagaagtcgaactctaataacatggagaagcttgagacgtggaagatggctctgcaccaagtgtctaacatttctggccatcatttccaacatgatgggaacaaatatgaatacaagtttattaaggagatagttgaatcggtgtcaaacaagtttaatcatgatcatttacatgtttcggatgtcctggttgggctagagtcaccagtgctagaagtaaagtcgcttctggatgttggacgtgatgatgtcgtccacatggtagggatccatggactcgccggagtgggtaaaacaacacttgctatcgcggtctataattctattgctggccattttgaagcttcttgctttcttgaaaatgtgaaaagaacttccaacacgataaatgggttagaaaaactccaaagcttccttctttctaaaaccgctggagaaattaagttaacaaattggagagaaggaattcccattataaagcgtaagctcaagcaaaaaaaggttcttcttattctagatgatgttgatgaagataaacagttacaagcacttattggcagccctgattggtttggtcttggtagtagaatcatcataaccactcgagacgaacatttgttagctctacacaatgttaaaataacatataaggtgagagagttgaatgagaaacatgctcttcaattacttactcagaaggcttttgagttggaaaaaggaattgatccaagttatcatgatattttgaatcgagcggtaacttatgcttcaggtcttccatttgttttagaagtaataggttccaacttatttggaaaaagtatagaagaatggaaatctgctctagatggatatgaaagaattcctcataaaaaaatctatgcatacttaaagtaagttatgatgctttgaatgaagatgagaaaagtatttttctagcttgatattgcacccttgcgatttggagcagcccaatacaagcggatctccaattaatgtattactagtcacaatagcagtgaacgatttgatgattgccttaccaataactcctgtttcttttaaaatattaaagtccttcttcaaaaa

SEQ ID NO: 138263 - DNA, 283 bp, Glycine max
  Clone ID: PAT_MRT3847_9585C.1
aaagaccggggggctttataataccaagccccaaacaccagatgtacacgtgcaatcccgaacccacgcagcggaacaaaagcacaacactatccaacgtaacaagaaaaacaggccagggccaatatccaaaaggaaaatgcaagcaccgacccttaaaaacagcgacccacgggatgataggccacaaaccttgatgcaccccgaacataagatgcaggcccaactcagcgaacagacgaaggtcctcgggcacgcgaccccacgattagataggatgagg

SEQ ID NO: 138264 - DNA, 294 bp, Glycine max
  Clone ID: PAT_MRT3847_95860C.1
caaaaattggaatgaacaattgaactgcaagcttcttgctctaaatatgttagattctttatgtattattaaactcatttatacacaatggtcatcatcatcatcatcattatctttggaactctttgctcaaatggattacttggtattcacacacccacatacatattgggaagcagaatatataaaagctatttgaataaggggaaatttggataatttggatttaccaaaagtgaaccttttgtttttgtaatgatatttgagaaattgtattggtttgatggtaattat

SEQ ID NO: 138265 - DNA, 200 bp, Glycine max
  Clone ID: PAT_MRT3847_95861C.1
gattgagtccaacttcacattttagttgagtacgtcatcttttgcggcatcagaggagttgtcacttaacagcattgctgcaatagctcttactctcatcatcttctcttactttctcatcagaggctgcatgtcaaagtcttggacgcacatcattcacgtccagatttggtttctccagatatgcatcctctcttgtt

SEQ ID NO: 138266 - DNA, 496 bp, Glycine max
  Clone ID: PAT_MRT3847_95862C.1
ggacaatcaacactttatttgaaacaaatattttttttaataataacaaacacaacaaaaagaaatacctattctgaaaaaggttgtacaagatgtgtcaaccaaccaaaaaaggggttaagggtcttccccactaactgaaccttttgagggggtacagggatgcaagcatcagcatttcgaacttcctcaacaccgaccttcacttgatcattactcaaaagggacgttggggacaattgtcgacccctcataaattcttacaagggcaaccaagcggggaggatagtcatcaacatacaacccatatttgtctgattcaccggggtctcgattttgcacgagggatctacataacttccctttgtgctgacacgagcagtaaaaggactaacctctgctttaggaggcagtacaactccctaaaattgcatttgcgactgcatctggctgaagggcaacataagttgtcaagtcactttttcagtgatcgact

SEQ ID NO: 138267 - DNA, 260 bp, Glycine max
  Clone ID: PAT_MRT3847_95863C.1
aaaaccatcaatggtcaaaactcaattccccggcattacgtttgatggtgggctcaatctaatgcgtatttattacccctcgtgattccctttgaaggcccggcatagtcaacatttacaggggagcatttaacatcaagctgaaacctttttgcttacccactccaattttacgttacaagctttctacaagtactacgaattcaacttggggaaaatgtgctaatttcaaccaaaggccgaccaagaagggcctttta

SEQ ID NO: 138268 - DNA, 407 bp, Glycine max
  Clone ID: PAT_MRT3847_95864C.1
tatcatcacacatcattaacgcactttcataacacagactattctatagagatagatccttatcttccataactaacaacataaccctcatattcatgatcctgattttgactatcttaataacttgcaattagaacataaaattaacaaattcaaatgttgccaaacatccattgttgctttattccttctatccacaaatgataaaaccatcaaattttgcacagacattataacaacttctacaaattttcatacataaattttgatcctaaattaataaaaaatttctctattgctatttcaagtaattcgcttaactataaatcatcatctttcaacattcattatcttcagattgaccatataattattaaacatctatttctcattttcaccaaacattt

SEQ ID NO: 138269 - DNA, 177 bp, Glycine max
  unsure (1)..(177): unsure at all n locations
  Clone ID: PAT_MRT3847_95865C.1
catatcaaattttacttcaaataaactaaggaaggtttttttcagaccataagagttattccaaatacccggagggcattaactttccttaaaaaaaaaaaattgtggcgaaaattaatcaacgcacaaagttccttacttgatttaacatntggccgagcattaatacctcgagcc

SEQ ID NO: 138270 - DNA, 435 bp, Glycine max
  Clone ID: PAT_MRT3847_95866C.1
aatcgcaggttcggagccaggcgtacgtacggttgggagaagacgacagaagggttatcatctgcccaatttatatatacagttaaatttgtataaaaataactttttgaaaatattttttttctgtattaacttctatactagtttataaaattagtacttttaataaattaataaggtaatttttttaagggttaaatgttttttctccctaataatttttaaaatttatttttaatctctatgaattttttaactttttagtccctaataaatttatgtttgattaacacacttattttatttttggtccctaataacattttgaaaaataaaatagaataaagtgatttagatagtactatagagaccaaaaataaaaaaataaaaattattagagaccaattttattttaaaaaatttaagaaccaaaac

SEQ ID NO: 138271 - DNA, 399 bp, Glycine max
  Clone ID: PAT_MRT3847_95867C.1
gggagaggagtgagtaacctccgtcgactccccccccggatgagaatgtaaagagttttaaccatacttatatacaaccagaaagctgaaaaagctggatcgcacaaaggaaatgcttggaagagagaactccaccaacatcattcagaaacacagctgcttgtagatcgcaacagtagctttaggtggacaatatggacacttgcatgtccgggtgccgccatgcgatagcttcacaagtgatcgcttgccacggacatgcatgcatggatgcagcatatggaggagtccattcacttgcttgatccctactcacagggcaaagaaaatcagactggaactgaaattccgtacccaactcatctggtgcaggcaactgtttaatggcctgccactcct

SEQ ID NO: 138272 - DNA, 1460 bp, Glycine max
  Clone ID: PAT_MRT3847_95868C.1
cttgaacctcttaccgtgcgcatcttctcaatccataacaacttcgccaccgttgcaccgaaaccaatcgccacaaactcgggatctcagattcgacgcgccaaaccatgtcgaaggcgcgtgtctacacagatgtcaatgtccttcgccctaaagagtattgggattacgagtctctcacccttcaatggggtttttacgtggtaggaccagagacagaaggtggtcgagaatcaccttgtgctgccttgtgccgatgatcaagatgattatgaggttgtgcgaaaagtgggcagggggaaatatagtgaagtttttgaaggcataaatgtcaatagcaatgagcgctgtataattaagattctgaaacctgtcaagaaaaagaagattaaaagagagataaaaatacttcagaatatttgcggaggcccaaatattgttaagcttcttgatattgtcagagatcaacattcgaaaactcccagtttgatatttgagccttggattactgccattctcaaggcatcatgcatagggatgtcaagcctcataatgttatgatagatcatgagttacgaaaacttcgcttgatagattggggtcttgctgaattttatcatcctggaaaggaatataatgttcgtgtggcttcaagatactttaaggggcctgaacttctagttgatttgcaagactatgactactcattagatatgtggagccttggctgcatgtttgctggaatgatatttcgcaaagaacctttcttttatggtcatgacaaccatgatcagcttgtcaaaatagctaaggtgcttgggactgatgaattgaatgcatatcttaataagtatcatctggagcttgatcctcaacttgatgcacttgttggaagacacagtcgaaagccctggtctaaatcatcaatgcagataatcagcatcttgtgtctcacgaggcaatggaaattcttgaggtggctcggactgatgaactgaacgcatatctgaataagtatcatctggagcttgatcctcaacttgatgcactggttgggaggcacagtcgcaagccttggtctaaatttatcaatgcagataatcaacatcttgtgtctcctgaggcaattgattttcttgataaactccttcgatacgatcaccaggacaggttaacagcaagagaagcaatggcacatccatatttctctcaagtaagggcagctgaaagtagcagaatgaggacccagtaacttaaaacatttttggatccataaacctgagttcacatatgtgggattgttttataataccctaaaatgtggcatggttgccttctgttaaaattatagtttgttagttttgttgtggaatgtaacaatatcatatcttgttccagctgaataatttgttagcctgttgttgaaaattcaaattttatattaaaaaggttgtgattat

SEQ ID NO: 138273 - DNA, 792 bp, Glycine max
  Clone ID: PAT_MRT3847_95869C.1
catgggcccatgatgagagatatgcgcacaaatcatcacgctattaatactactgctccgctacttgctgcctaggctagtgcgcacccctgtcttcaacctcttaccgtgcgaatctctcaattcatcaaaactaacaacatcatcaccatcgtcgcaccgaaatcaatcgccacaacctcgggatctcagattcgacgcgccaaatcatgtcgaaggcgcgtgtctacaccgatgtcaatgtccttcgccccaaggagtattcggattacgagtctctcacccttcaatggggtgatcaagatgattatgaggttgtgcgaaaagtgggcaggggtaaatatagtgaagtttttgaaggcataagtgtcaatagcaatgagcgctgtataattaagattctgaaacctgtcaagaaaaagaagattaaaagagagataaaaatacttcagaatatttgcggaggcccaaatattgttaagcttcttgatattgtcagagatcaacattcgaaaactcccagtttgatatttgagtatgtcaacagtacagattttaaagttttgtatccaaccttgactgattatgacatacgctattacatatatgagctccttaaggccttggattactgccattctcaaggcatcatgcattagggatgtcaagcctcataatgttatgatagatcatgagttacgaaaacttcgcttgatagattggggtcttgctgaattttatcatcctggaaaggatataatgttcgtgtggcttcaagaactttaagggcct

SEQ ID NO: 138274 - DNA, 375 bp, Glycine max
  Clone ID: PAT_MRT3847_9586C.1
ttttaggatgaaaaaggaagaaaacgggttttaactgttgcggtgataaaattactgggccagtgttgattttttggtgataccagtgcttttctcctaaagcttcaatttttatttttttggtttctgaaaaaatgtggggtaggtggtggtggcgtgctggtggcggttttctgaggcaaagggtatcttcaattggtagtgttagccatggttatggggaaaagcttcatcctttggaccctcctttgttgggtttgaggggcgttgttgaagtgatgtgtggtggaagaaggacacctttatctgttgtgttgaaccaaatcaagaggggtgtatcaacttccacttgggaatggtggtgtcagcaatggc

SEQ ID NO: 138275 - DNA, 2112 bp, Glycine max
  unsure (1)..(2112): unsure at all n locations
  Clone ID: PAT_MRT3847_95871C.1
ccgccatgacgtccgccattttccgctacaccatccgccatatttttatgggggatttttggctttccgccatgaaccgccatccgccattaacaacactggttccaatttttttagtaggaactacaaagagctcctcatatttttggactttgtgatatatcttttagtttttagaaaaactcttgcaattagactaagtggttgaaggcttgggttaatttgattttgtttttggttatatggtgtttcttgtactactgcattcagttcttgtgagatttttgtcgtaccttctgagatcttcaacatcattttgcacgcgtccggcaaaagcgtagatagaagcaagagaagaagatgatgctgacgtggccagcttgcgccgttgaggaagaaaataagtgatcctaaacccggaggaaggagtattattcgtttgacttcacatataaaaaaaataaataagagaatgtaaaaaagtagtatgtgtaagtgtaaatattatcgctatacgcgcattaaatatgcgcaggaagcaccaccagcactacccttctccgcttcttgctagtgtgcaccattgtcgccttgcgtgcgccggttgcgcagccccctatcttgcgcatccccaatcacctcatcgaaactactaacaccttcacaatcgttcaccagcgctacagaacccagatctcgggttccaatcgtcgagccatgtccaaggcacgcgtctacaccgatgtcaatgttcttcgccccaaagagtactgggattacgagtccctcaccgttcaatggggtgatcaagatgattatgaggttgtgcgcaaagtgggaaggggaaagtacagtgaggtttttgaaggcataaatgttaatagcaatgagcgttgtgtaatcaagattctcaagcctgtcaagaaaaagaagattaaaagagagataaaaatacttcagaacctttgtggggggccaaatattgtcaagcttcttgatattgtcagagatcagcactctaaaactcctagcttaatatttgagtatgtcaacagtacagattttaaagttttgtatccaaccttgactgattatgacatacgctattacatatatgagcttcttaaggccttagattactgtcattctcaagggcataatgcatagagatgtcaagcctcataatgttatgatagatcatgaattacggaaacttcgcttgatagattggggtcttgctgaattttatcatcctggaaaggaatacaatgttcgtgtggcttcaagatactttaagggccctgaacttctagttgatttacaagactatgactactcattagacatgtggagtcttggctgcatgtttgctggaatgatatttcgcaaggaaccttttttttatggtcacgacaaccatgatcagcttgtcaaaatagctaaggtgcttgggacagatgaactgaatgcatatctgaataagtatcatctggagcttgatcctcaacttgatgcactggttggaaggcacagtcgcaagccttggtctaaatttatcaatgcagataatcaacatcttgtgtctcctgaggcaattgattttcttgataaactccttcgatacgatcaccaggacaggctaacagcaagagaagcaatggcacatccatatttctctcaagtaagggcagctgaaagtagcagaatgaggacacagtaacttaaatcattggatccataagcctgagtttcatatatgtgggattgttttataatacaccctaaaatgtggcatggttgccttctgttaaaattatagtttgttagttttgttgtggaatgtaactatatcataacttgttccagctgaataatttgttagcctgctgttgaaaattcaaattttatcttaaaaaggttgtgattataacattaccaggcaataccgacacagagtatcatgtatttttatcaagactgtcaccattgattcaagcttacttatattttttagtgaaaagatatttgtgttttatcttgttccagctgaataatttgttagcctgttgttgaaaactcgaattttatannnnnaggttgtnnntannntct

SEQ ID NO: 138276 - DNA, 1500 bp, Glycine max
  Clone ID: PAT_MRT3847_95872C.1
cttgatttaccaaatttctgtgtactagatatgtatagtgttattgatactgataactctaaagtttgaattgatttttgcaaatctctgttcacttctcttcaagcaaaaatccattggcataaatgtcaattataacacgcagaggcatccgttacatgccaagactagatgcagcaaaagtatctgctgctttgctagaaaaaggccaaaatcgtgtcatagatgcttcacttacacttattcgagaaagagcaaagcttaagggagaacttgtgcgtgctttgggaggtgctaaagcaacttcaactcttcttggagttcctttgggacataattcatcgttccttcaagggcctgcatttgcacctcctcgcattagggaggccatttggtgtggtagcaccaactcaacaactgaagaaggcaaggaattacaagatgcacgagtgctaactgatgttggtgatgttcctatccaggaaattcgagattgtggggtagatgatcacagattaatgaatgtaattggtgaatctgtaaagttagtgatggaggaggatccattatgtcccttagttttaggcggtgatcactcaatatcatttccagttatcagagctgtctctgagaagcttggaggaccagttgatgttcttcatcttgatgcgcatcctgataactatgatgcctttgaaggaaacatttattcacatgcttcttcttttgctcgagtcatggagggtgactatgttcgacgtctcttgcaggttggtattagatcaataacagctgaagggcgtgcacaagccaaaaaatttggtgttgagcaatatgaaatgcgaacattttcaagggatcgcccctttctagagaacctgaaactaggggaaggtgttaaaggtgtatatatctcaatagatgtggattgtctcgatcccgcctttgctccaggagtgtctcacatagagccaggaggtctttctttccgtgatgttctcaacatcctgcacaatcttcaaggcgctgttgttgctggagacgtggtcgaatttaacccgcaacgtgataccgttgatggaatgactgccatggtagctgctaagctggtcagagaactggctgcaaagatttctaaatgatgatctcctgcctccccctgatctatacttcaacccacccgttccctaaaatgcacctgaaaggataactttccagaatggcatccaattttcactacatttaatttggagcattcatagacgaacatggtttataattcaaatgtttttttgtaggactgttggttttctgatgagttgcagttgtacttgtttttgcagtttcgaagttctgcaaggacttcgcaatcattccaatagtatcttttgcatgtttaagtttttgatataaagataacaagaatgactacatacccaaaaaaaaaaaaaaaaaaaaaaaaaaaaaaaaagaaaactgagagggcggccactctagagg

SEQ ID NO: 138277 - DNA, 1382 bp, Glycine max
  Clone ID: PAT_MRT3847_95873C.1
cggaattcccgggtcgacccacgcgtccggtgtgcacccttgttgccttgcgtgcgccgggtgcgcagccccctatcgtgcgcatcccccccaatcacctcaccgaaactactaacaccgtcatcacaatcgttcaccagcgccacagaacccagatctcgggttccactcgcccagccatgtccaaggcgcgtgtctacaccgatgtcaacgggcgggggcccaaagagtactgggattacgagtctctcaccgttcaatggggtgatcaagatgattatgaggttgtgcgcaaagtgggaaggggaaagtacagtgaggtttttgaaggcataaatgttaatagcaatgagcgttgtataatcaagattcttaagcctgtcaagaaaaagaagattaaaagagagataaaaatacttcagaacctttgtggtggcccaaatattgtcaagcttcttgatattgtcagagatcagcactctaaaactcctagcttaatatttgagtatgtcaacagtacagattttaaagttttgtatccaaccttgactgattatgacatacgctattacatatatcgtccgcttaaggtaacgtgatccttcaatctctcatggtataccttgactggtgctctgtgtcctctccataatgtatatattggagtatctttgtcttggacaaggcttatatcaattttgcatctggttcatgtgtatagacatttgcttatgcatcatggaaattactttacatttgcacaaatatgtgtcaaggaccctttcttgttacttgaatgctttagttttgaattgcaggccatagattactgccattctcaaggcataatgcatagagatgtcaagcctcataatgttatgatagatcatgaattacggaaactccgcttgatagattggggtcttgctgaattttatcatcctggaaaggaatacaatgttcgtgtggcttcaaggtaatgttctggactctggcatattattgaccatgatcgcaactctttctaaagtaaaatactaaaatcaaaggaagatgtatacaatggatgagcctgagtatattagtatgtagcataaatcaaaatcagttaggcatccttagctcgtttaagcattaatttttcaatacaaatggattattggaattgttgcttcccaagtagtggtatatccactaacatcattctgaaaatgtgggaacttgagaaaacagtgcatcaataatacaaaatctagccctactataattttttttaacagaaatacaggtctagaagtgatttctttcttggtctactctattgctactaaacatagtgactcttagaacttgcacaaagtatattgtaaattacttcaacc

SEQ ID NO: 138278 - DNA, 904 bp, Glycine max
  Clone ID: PAT_MRT3847_95874C.1
ctttagctacagcttcagcatccatataaatggctccctgagtctgagtcaatggtttcactctgtcataggttctgtggtcgcggaacataaactggtgtctgcaaacaatcaggaatgattgctgcgagatggatataatgcttgtgcattgaaagaatctgctgattaggggctctactttgagaattccagagcatcatcagagcttcagaaagcccttcagcaattgcagcatcattaaaaccaccaccattaaagggtatagatgatagccacgagaagaaaacatctgggtctctggtccaaccagaccgttgcacaaggcaactagaataacatccgtgagtattataggtgactagagcaaactccacattggaagcagaaaatttctgtccagttgagtcatttccaccgaaacacctgatcatcttatcgagataatccattagaatggtgttccaatagggtcccatagcagcggtgctttcgactgcaacgatgagctgtttctccgccatgtcgaaaattctaggttttgatttgctgtgtcgcgttgtagggaaagaaaaagtctttggtctcaaatctcaatttatgtgagaaattgaatactctcacatgcagaattggaaaaatagaaggttacattcaattattcaaacggttaccataatatagtgaaacgaataatcaataatcacacactttcccttttcttctttttttttttttttgagaatttaattttttggatgaatacggtcgccagtgcagtgaccagcacgggggagtgtttgactgcccggtgtttgatgaatctgattcgggcactttagtttcgatgtgtcaaacagaactcaaaagtcgtttgtgtttgaagatgtttgtttgttttgtg

SEQ ID NO: 138279 - DNA, 195 bp, Glycine max
  Clone ID: PAT_MRT3847_95875C.1
cgtggctggtttacttacccgaccacaagccctttccagtgggggttttggtcctattttatatctgggtctccaaatatttattatgggagggggggatgaatttattcatggggaaccgataatggtggatatattttggagaccaaactttgtgttacagcatgagccattaaaattcacaccaggtggtgc

SEQ ID NO: 138280 - DNA, 451 bp, Glycine max
  Clone ID: PAT_MRT3847_95876C.1
tccgctccagataatctcgtcctcttgtctttgaaatccttttctaattcaaatattatataaccattgaaatggccgcaccagctgaaattgagcctcctaggaaagcattccgatgggccgctagggattcttccggccctccccccccccctcacctctcctccttggaggggggggccacaccccccccccctcctccccccccacaaacacccccccctcgggggccccgcggggcgccccctcccccccacccccccccctcccccccccccacccccccccccccccccccccccccccccccccccccctctccccccccctcccgtcctccccccccccccccccccccaccccccctctcccctcccccccctccccacccctcctcctcttctactccctcccccccccccccccccccgccccccatcccccctccccc

SEQ ID NO: 138281 - DNA, 439 bp, Glycine max
  Clone ID: PAT_MRT3847_95877C.1
tttttttttttttattttaggctcacaccatacattagggagaggggatcattcataccaatcttattcttcacattgtcacacaaaaagaaccatacctaatatttctaaccatttaacccaataatctgccagatgaagagatttacccctgataccccaccacctatttaaagctcaaaagatgtgcctgcttacacttactaaataaaaataattcactattccgcatgacgccatccaatttattatcactatcacgataaaccacttattctgtatttaattcatcatcatgcactggtcactaaagcctccgcttgatcaagtataaaactcactgcattccacgaaacaatcttatccatgaacacttatatctattcaacacccccggtctaaaaatcaaggttttaaacatgcttccaaacatcatttt

SEQ ID NO: 138282 - DNA, 1030 bp, Glycine max
  Clone ID: PAT_MRT3847_95878C.1
cggctcgagcggctcgagcggctcgagcggctcgagcggctcgagcggctcgagagatgatcagaggcttcttcgtttacgagtttatgacccgtggaagtctagaaaatcatctattcagaagaactgtacctcttccgtggtccaacaggattaagattgcccttggtgcagcaaaaggattggccttcctccataatggtcccgaaccagtcatttatagagattttaaaacatctaacatcttgcttgatacgggcctcaaggagacaaaacacatgtttctaccagggtagttggaacttatggttatgctgctccagaatatgtcatgacaggacacttgacagctaaaagtgatgtttatagctttggagttgtgttacttgagatattaacaggaagaagatcaatggacaagaagcgcccgagtggggaacaaaatcttgttacatgggctaggccatacttagctgacaagcgaaaactgttccaactcgtggatcctcgccttgaactaaattattctctaaaaggagtgcagaagatttcccagttagcttataattgccttactagagaccccaaatcccgtcctaacatggatgaagttatgaaggctctgactccattgcaggattttaatgaccttgcaatcttgtcttatcactctcgcttatctcaacaagggaggcggaagaagaaagatggaactccacagatcacatacacacaatccaagagcatgagggcttctcccttgaataccggcaagcagcatcgatgatgggaagtgatcctcttctctattgctggctcaatcattgattgaaaccaagggccagaacaatgagggaagagtgatgatgatacattgattttatttgggctcttttattagagagctaaccatcattatggaaagaaacttgccatttgcatttgctattgctgtaattgagaattcccctatatgtatatgaaaggcctcacatctcagaaagtcttttgcagtaaacctcaaaagacg

SEQ ID NO: 138283 - DNA, 335 bp, Glycine max
  Clone ID: PAT_MRT3847_95879C.1
gtgtattttagttcgtgccttgtttttcttccacctatgaccccaacctccacaggcgtgccggtgatgtgtagtacggtcatcaaatttagcactgtgaggagcatgcgattcttgctgactgagaggatcagggcactctgatgcacattctcaccaagactgtaggggacaggatctctatacacagatgcttactggtgcggcttttgaagagctgagtaaacaactttattataactcgtcacattctatgagcctagccgaggtgactttaaatctacagtaaactgtgctgaatattctgctactatggtagatatttttttttatat

SEQ ID NO: 138284 - DNA, 410 bp, Glycine max
  Clone ID: PAT_MRT3847_9587C.1
ggggcaagccaattcaatttgcctttaaaaaaattttttccctgacaggttttttggccaaagaatttggtgaatccccacgggggggggggggtttacaaaggggctaaattttttgaaaaagaagggtttgaaaaagcaaatgctttatgccatgccccccccaggggaagccccttttccccaatgaaaaaagaagggccttgacccgggggggggggccccctcttctgggttggggggcccccaaaaacaaaagacccgggggccttttccaagtaaaaagccaaattttcccctcctgggaagaggggggccaattttatgtttacttccccaacaattttgcttgacactcccccggcttgggggtattttcacacaccatttgggggcggagggaatggggg

SEQ ID NO: 138285 - DNA, 450 bp, Glycine max
  Clone ID: PAT_MRT3847_95880C.1
ggagaacgagaagaagaagtgcggttgctgggctgtcctcaaacgcggcgttagagcaaccgagacaagagacttgaatgctagcaatagagaactatgccctccaaatgaagctcgattatcttctgataatcctgatcccccatctcaggagaataaggttccttgccagctccttcaatttacatttcaagaactaaaggctgcaactgggaatttcagacccgatagcattcttggggagggtggctttggttatgttttcaaaggttggattgaggaagatggaacggcaccggcgaaacctgggtcagggattacagtggctgtcaaaagcttgaagccagatggccttcagggccatagagaatgggtggctgaagttgactttcttggacagcttcaccatcctaaccttgtgaaacttattggttactgcattgaagatga

SEQ ID NO: 138286 - DNA, 736 bp, Glycine max
  Clone ID: PAT_MRT3847_95881C.1
gggaacaaaatcttgttacatgggctaggccatacttagctgccaagcgaaaactgttccaactcgtggatcctcgccttgaactaaattattctctaaaaggagtgcagaagatttcccagttagcttataattgccttagtagagaccccaaatcccgtcctaacatggatgaagttatgaaggctctgactccattgcaggattttaatgaccttgcaatcttgtcttatcactctcgcttatctcaacaagggaggcggaagaagaaagatggaactccacagatcacatacacacaatccaagagcatgagggcttctcccttgaatactggcaagcagcatcgatgatgggaagtgatcctcttctttattgctggctcaatcattgattgaaaccaaggttggaaattggaatgcctcctttgttgttgttgttgttgttgttgttgtgtggagatggacatttcaagcttacataatttttgagtgtttaaaatatgtcagggccagaacaatgagggaagagtgatgatacattgattttatttgggctcttttattagagagctaaccatcaatatgaaagaaacttgccatttgcatttgctaatgctgtatttgagaattcccctatatgtatatgaaaggcctcacatctcagaaagtcttttgcagtaaacctcaatcaattgcgtttcagtggcaataaccccccgcaactttagttgcct

SEQ ID NO: 138287 - DNA, 1229 bp, Glycine max
  unsure (1)..(1229): unsure at all n locations
  Clone ID: PAT_MRT3847_95882C.1
ggggagccggggcccacgcgtccgaaaaaaaaatacagagaaagagagtcccaccccccacacaaaaggtggtggaaaaaaagttctttttgtacacactgcgatgatgatgcctgcaatctccaacacaaacacaaacaccatttcttcctcttctctctctctcgtcactctctcttcttcttcttcttcttcttctttctcaaccagccatggttgacttgttgttcttctcactcactagaaggagcccatgaatatgaaagttgttgttgtgagcatggagaacgagaagaagaagtgcggttgctgggctgtcctcaaacgcggcgttagaggtgcgtgcaaaccttcttcagcttccagagactctcctaacactatccctcgtactagtctcgtttatgatgcagcaaccgagacaagatacttgaatgctagcaatagagaactatgccctccaaatgaagctcgattatcttctgataatcctgatcccccatctcaagagaataaggttccttgccagctccttcaatttacatttcaagaactaaaggctgcaactggaaatttcagacctgatagcattcttggggagggtggctttggttatggctccaggctcgagattgaggaagatggaacggcgccatcgaaacccgggtcttggattacagtggctgtcaaaagcttgaagccagatggccttcaaggccatagagaatgggtggctgaagttgactttcttggacagcttcaccatcctaaccttgtgaaacttattggttattgcattgaagatgatcagcggcttcttgtttacgagtttatgacccgtggaagtctagaaaatcatctattcagaagaaccgtacctcttccgtggtccaacaggattaagattgcccttggtgcagcaaaaggattggccttcctccataatggtcccgaaccagtcatttatagagattttaaaacatctaacatcttgcttgatacggagtataatgcgaagctttcagattttggtctagcaaaagcagggcctcaaggagacaaaacacatgtttctaccagngtagttggaacttatggttatgctgctccagaatatgtcatgacaggacacttgacagctaagagtgatgtttatagctttggagttgtgttactcgagatattaacaggaagaagatcaatggacaagaagcgcccgagtggggaac

SEQ ID NO: 138288 - DNA, 256 bp, Glycine max
  Clone ID: PAT_MRT3847_95883C.1
gttgttatgttcactaacaaaatgaatctgatcaagccctttattttgctttgttttctgtatggggtgatcgtcatctctgcggtgggggctggggagccatctaatgatgaggaaaaatgaacaaatggaattcacgaatagtttattggatgctatgacctacatggaagccttttgagcttaatgaaattccaactatatcatgttacctactactattgataatgaaaaggaaatggaaccgtatttttat

SEQ ID NO: 138289 - DNA, 397 bp, Glycine max
  Clone ID: PAT_MRT3847_95884C.1
ataccaagatttagtaatagttgagaaattttttatttttttgcaggcttaaaaagacaaggcttagtgttttgtagaaatttatttactacatattagaggaaaaagggggggaactcttttaaagactcggggaacactagagtggaaaaaaaaaaggggcacagagagaaccataggcataaattctggtatggaagaaggagctcgccaaagttttttttttctaggccaaaagaaaagaacctgaagcttacaggagtgaaagttcccttcccttcagattacaaaggagctgtggagggccctttcgcgggaaacgctagggggagggggggaccaccgcccccaaaaaatggggccccaactgggaaagggaccgtggggaccccccccg

SEQ ID NO: 138290 - DNA, 265 bp, Glycine max
  Clone ID: PAT_MRT3847_95885C.1
ggcgtcgctcgatcaggcacctcccggcgatgtcaaatccagtgactaaatcttcacgaccaagtgtgctcaatgtcacaccgtcgaaaaatgtgccggttgcaatgcaagacccaatttgaaatggtttgtttggaaggcaaatatgcactactcccggttattcttactcttcactaacaacaacatggctgttacttgggaagaaaagacactatacgattactttcttagccccataaaatttattccagagcgcaagatg

SEQ ID NO: 138291 - DNA, 174 bp, Glycine max
  Clone ID: PAT_MRT3847_95886C.1
acagggggggctatattgtaactgaagagctcccttcagggaatttctggtttctgtaatatacctactttcgctttcaaatgattcctcctctctatcttccaggccaaaggatgcatcttggagttacctctatggcaacaacaccaccttgagtgtaacaagccttaatcc

SEQ ID NO: 138292 - DNA, 326 bp, Glycine max
  Clone ID: PAT_MRT3847_95887C.1
aacacacatacgtgattacattaaaggtcttttttaaaccgctgcgctgactccaacatgggggggatgatataacttgttccaatcaaccaatgtcactcccagtactctcggcatcaatttatcgattttcctctccctccttccatctccaacttcttccccagctcctaattctcattcacctcatcggtggttaacacacgtgtgtactggtacgagactcccatagcccacgtgtgaaaggtcctgcttcctatcttcacataccacgacgttctggttgagctacaataccagatcatgctccatgtcatcgtgcagag

SEQ ID NO: 138293 - DNA, 442 bp, Glycine max
  Clone ID: PAT_MRT3847_95888C.1
agaaaaatacagtaagagtaaaaatattcacttcattctccatcaactagaaccttaccattttatgtttgcatgtcggcaatcttttctaacttggaatcttttgactttccaataatggttggaatggatgttattcccattcataactcctaatatgttcttgtcctattttaattttaatctgtataccacgcttaggcaaaatgtttttatgaagtgaagctgaataatctttggtatttctgtggaaaggtcaagtaagctaaagactgaattataatgctattctctcattgtccgcaatgcatatagttgaggttctgatttggaattgttacattcatgcttttatgatgctattacctctcttgcattagtttgtaggtatagatggagtttggtggatttcactaaatttatcctttatagtgttttggct

SEQ ID NO: 138294 - DNA, 237 bp, Glycine max
  Clone ID: PAT_MRT3847_95889C.1
tctcgagccgaatcggctcgagtacggctgcgagaagacgacagaaagggatgttttatccaaaaaaaaaaaaaaaaaaaaaaaaaaaaagggggcccccgataagggacccggtcaccccggaaataattccgggaccggaacctgagggggaacaactttccccaaaagagagccgattaaggcttggggtaaaccagggccaaagggtttccctgtgggaaatttttacccgcc

SEQ ID NO: 138295 - DNA, 2568 bp, Glycine max
  Clone ID: PAT_MRT3847_9588C.1
aaaacgcgtgggtacacataactttttataaaataaatatatataatatagaggtgtctatatatatactatgacttatactatagcctgacgcgtccgcgacaaatgggctcctccttctctcttcatcttcacctctctctctctctctctctctctctctctctctctgtgtgccttttcctttgcctgtgcgtgtgaaagatcgcagcaactccaccaccatcacaacaggaccgtaaccgatttccaaggttgagttatttgctggtctaacttaaccatactgtctattttgactcctgagattgctagtgagtcatggggcatagacatttatatagctcatctccaatatttgagggtgaacctgaccagaactggaatcatatgcatatggatcaacaatatgtgaaccatggtagggagtaccacttcagacaatggttcttttatttatcctttggaaaatatgtccatagatagcatttcttttcaatgctcattggaacactgccccaaggtcaaacggatatgcatccacaagtctcaacattgaagcaccccctcatcaaacagatgtatcaggcacttctcatgatcattttctgccttcatcaagttgctggaatgttttatgcagtgcctgaaaattatgtacaccagccttctaattctaattatgacagacaagcattttcggctgctgatgggggtattattgatcttactatggtacatggacgagggcctcaaaagcgtaagatccctggaattcctccagtctgtgaaagaggcagtacaagcagatatttcaatgctacaaatgcagctgatcgtcctacatcttcagaattgtggccagagaagcccaatatggattctctatatatgccttgggaccatgttaatatgacacccacatttagaggtagaggcctttctataaggggtgagggtcctttaaggaatgtgaggagccgttctgcacttgatttggaatccaacctggctaggacccatttatcaaatactcatccacacaactcatactctactggtctaccaattgaccattctaacatggtcgatctttcaactcaaacttctggcactttgaccagggattggagcccaatgagtatatgtcctcctcatggaagggtgtcatcatcagatgcaaatgcttttaatcacgaggcaagtcatttccttattggaagcagttctagtaatgctcctgtagatgttggaggttttcataatgaatttggaactagtagaaatcctactgctcctcaaagttttcataataatctgactcaaactgcaagaggagttcacagtaactactctcaaagatccactccaacttttagggcttcttctagcttacgtttgggacgtgtggcaccttctgatgatggattgcatatggtgtccgaaagttactcttctagacagccaaggccattgaccaccgttggctggcagaacaataatagaaatggaagatcaagaatacctagtgacagatatcggtcattggatgatgagggtttcatgattgttgatcgcacttcactgtatggacctaggaatatgcttgatcgacatagagacatgaggatggacatagacaacatgagttatgaggaactacttgcacttggagagagaataggccatgtgagcacaggattgtctgaggatttgatttccaagtatttgacagaaacaatatactgttcatctgagcaaagtcaagaagaagaagcttgtgcaatctgcctggaagaatacaagaacatggacgatgtcgggacgctgaaagcttgtggacatgattaccatgtgggttgcattaggaagtggttgtctatgaagaaagtatgtcctatatgcaaagcttctgctttgcctgaggataagaagggcaaataaacaatttattcattatactttagtttaacgtatatcatcattctgtacatatatttggatattccttgaagtggagaaaacagacttccatttggatatgttgttgtaatagctaatgctatactctatctatatgtctatgaattcgttctctttggcttcactcttaatttcgtgaagccttgaaattaaattatcgtacttcaatatttgatttaattcgattgacccttgtttggttatggaagtgaatgaattccttcatttcttcaatgtctgaatcacagatgaaatcttggtgctaagaaatgacttatgagttgtatttattattatatgccaggagatgctcgttatggaagggtgtcatcatcagatgcaaatgcttttaatcacgaggcaagtcatttccttattggaagcagttctagtaatgctcctgtagatgttggaggttttcataatgaatttggaactagtagaaatcctactgctcctcaaagttttcataataatctgactcaaactgcaagaggagttcacagtaactactctcaaagatccactccaacttttagggcttcttctagcttacgtttgggacgtgtggcaccttctgatgat

SEQ ID NO: 138296 - DNA, 393 bp, Glycine max
  unsure (1)..(393): unsure at all n locations
  Clone ID: PAT_MRT3847_95890C.1
baaagtnntganaatagganaaanggnggtaaanggtaaaaganttanngngnaaatttnaggagnntngnaanaattnngnaagnnnnaaantnnggggnttnngaagaaaaaatnntggnaaatnggnaaatacnntggtgaanannaaaannnnaanatnnanaanttaannanaggnnaagntnaagagtnttnantaggnngnnggnnnnangnaangnattnaataatattaaatntngagagagngaaagaaaaagagagaaaaantggggaagngaaagaganngaaagngaaaagnanagtgagggagatggagagttngggganaggnnnagtggattgngangttggatngattgtntgggttagaagaaggaaggttngtt

SEQ ID NO: 138297 - DNA, 327 bp, Glycine max
  Clone ID: PAT_MRT3847_95891C.1
agaaaacaacaaaagggggttgtttaattaaaaaacaaaggaattggcggaattaaaattgagattctccggaaaaatctgacaggaaaaacataacctccagtcaaaacaacacacaaccacaatttcaaaggcaagattcaagacaaggaaggcattcctccggattagcggcgtttgattttcgcccgaaagcagcttgaagatggaaaggacctggccgattacaacatccagaaggaatcaacccttcaactcgtcctcatgcttcgtggtggcatcaatgaaccttccctcatgggtttgactcccaaatacaaccaagac

SEQ ID NO: 138298 - DNA, 745 bp, Glycine max
  Clone ID: PAT_MRT3847_95892C.1
gctcgagctctcaacaaaacccaccgttttctgcgaaaatcaaacccacactcaccactctccaatctcccattctcccctctttctccaactcagcgcaaccgtcacgattgcgcccaaaatctcgatcttcactgcgaggcgtgttttgtgagcacggaatacgaatatggatcaccaagaggatgaaagtaacagcaaacaagacgatgaggaagctgttgctcgccttgaggaaataaaaaaatccattgaggcgaagctggctttacggcaaagcaatttgaatccagaaaggcctgactcaggatttttaaggacattggattctagcattaagcgcaacactgctgttattaagaaactgaagcagattaatgaagaacagcgtgaagctctgatggacgagttgcgaagtgtcaacttaagcaaatttgtcagtgaagccgtggctgctatatgtgatgccaagcttagaagttctgatatacaagctgcagttcagatctgttctttgcttcatcaaaggtacaaggactttgcaccaagcctggttcaagggcttctgaaagtcttctctcctggaaaacctggtgatgaatcagatacagacagaaatttgaaggcaatgaagaagcgcagctctctaaagcttctactggaactcttttttgttggagttattgaaagatggtggcattttttatcaatatcataaaaagatcttaccagtgggggaacagct

SEQ ID NO: 138299 - DNA, 363 bp, Glycine max
  unsure (1)..(363): unsure at all n locations
  Clone ID: PAT_MRT3847_95893C.1
gtttgaaggtcatcgacgacccgtgaagtgtttggctatggctgttgactccaacagtggtggtcctcgtgaggatgatcataatagtagctcttatctggtttacagtgcaggtttagattgtgagattaaagtgtggcaaatacgcgttccttcgctgtcgttgtgatcctttttttgttactacaattttttgctcccttcattggatttgtaaataggatcagaattttttttgttattttgatgtgtaacttggcttctttttttcggtgtagtggtatttttactactaatttgactganaaaataaagaagatttggagatggattcataccaccaagtttggattgggtttttct

SEQ ID NO: 138300 - DNA, 433 bp, Glycine max
  Clone ID: PAT_MRT3847_95894C.1
aaataaatcaacttggagagcccataacatgtcagcatgtactaacgtactactgatatgaaggaggcaaactactagaactgcacagaaggggccagcttaacaggtgaacacacactggatctactgctgatggaacaattacacaccccgggagaacaagagagaactgcacatattgtgggaacaaatacaccattctacaatgtgctttataactcctatgaacccagttgtcaaggataatgacaagaatcctgacaaagactgcaaccaaatgggtccacacagtctaggcctgcttgacataaaacatatcgctcaagtgtgccctctgaactatttcttgggtgtgtactacgatgtaacctacgaacacggagagcccactgtacaactcaaagttaaagagagctgctgaaccagcaaagat

SEQ ID NO: 138301 - DNA, 254 bp, Glycine max
  Clone ID: PAT_MRT3847_95895C.1
ctatctcatcgctcatggatacggctgcttcgcataggcacattgacttctcactgagcagtcctcttagtggtagtactccaagacgcgcgatgcggtacaaccaaaggtctgctgctacgtacgctgctgctggccactgtgatgaggaggatggtgactatcttactcatggcgtctgctatgtatagaccttgtgctcgattgtacatcggagacggcagacatcttagaggctcgagatggtctgaccg

SEQ ID NO: 138302 - DNA, 593 bp, Glycine max
  unsure (1)..(593): unsure at all n locations
  Clone ID: PAT_MRT3847_95896C.1
gcacgagttcggataatacatatattaggtgctaggcaatcgcaaacatgattctaacgctggaactggccagcttctatctcatacactgaaacaaatctacatcagacttagaacacattgctctcctccgagatcatagcaccacttatgagcagggaaatcttctaaaagcctacaaaacatcacgcaacttaccacttgattgtcgataacccactcgtgatggctaggattagcctcctgcaaactgtactcaagcaccgatctacactgcgaactcgagcactccaacctgattccacacaacaccttgctctcttaaggtgaccctaccactaaatatactgtcaacattcaccgcgtttgaccgctatattatcaaactttatctgtgtgaacgctgaaaccaaagcactcctcaatgccaacaaangtggttgtcaccattggtcccacagagaacggtccaaccacagaggtgtccgcctcagattccttgcatgtggttcacgcaaaacaattcccaacagtaacccatgtgcgctaccatttaccactatagcaacgccgatgccatctcctacaatgca

SEQ ID NO: 138303 - DNA, 201 bp, Glycine max
  Clone ID: PAT_MRT3847_95897C.1
tgttttattctataataatcattataattcgcgcgatttttattcagagcattggacattcccactcctaatatactttcttatacaacttcttatactcattaaaactgagactctgtcacttacctttaatcaaaaggctatatatcctcttcaacacctcttctcaactttttctacaacattctcaaacccacctat

SEQ ID NO: 138304 - DNA, 471 bp, Glycine max
  Clone ID: PAT_MRT3847_95898C.1
tctcccacgcgtccgcccacgcgtccgcccacgcgtccgcccacgcgtccgcggacgcgtgggttgatctgaaagttcctatcagactcagacatagattgtaacatccccttttcccacagcggagaaacctctcctctctctctggtcgcatgagatgatactacataagcgtagaatcctacgcaatcgaattcccagctagattgtctctctgtctcaattagaatttgaattggtgatcggatccaacacaacacaacaccatgtccaagtctttgccctactccaccaaagatgttcactacgacaacgccaagtttcgcccccgctctttcttcaaggttgttactcagaacttactcaccagtaacctaaggcgtgattgtggtagctgtagtcaggaaagtttctatttttgtattgactttggtgtggcttatcttatgcatggcacatgccagttcgagt

SEQ ID NO: 138305 - DNA, 230 bp, Glycine max
  Clone ID: PAT_MRT3847_95899C.1
catgatgactgcaggtgggggttttggaggctgaaggcaaaaaggccccaccgtttaatagtttttaggatggaggagcagcaaaggcgggtcattggggagaagcttgtggggcctgcccagggctatgaagatttaattgccagccttcctgctgacaggggccgtaatgctgtttatgatttggggtttctgcctgaggggaatgtcctaaaaggcagaattttttt

SEQ ID NO: 138306 - DNA, 588 bp, Glycine max
  Clone ID: PAT_MRT3847_9589C.1
ttcgcgaccaatctcacgcgtccgtacggctgcgagaagacggcagctcgggatccaaagcttcttcagttattcatctgcttactaaaatttcttccattcttagctttgttcaatcaaagttttttaagatggcccagagaaatgttactgctaattcttcttttgaaaggactagcttgccttccctagatcaaaagttggccatggccaagcgctgctctcatgagggtgtgatggcaggagcaaaagcagctgttgttgctactattgctactgccataccaactctggctagtgtaaggatgcttccttgggcaagagccaatctcaatcactctgctcaagctctcataatttccacagtggcgggagcagcatatttcatagtagctgacaagactgtcttggcaactgctagaaagaactccttcaaccgaccctctaatgcatgaattccaaatggataatttggattttggattcggcttcactacgttgggctatcttagcattgacccaatcatcggacttatcatatatgtaaatgtaattatgtatcgataataaagaagagtttgcattgcg

SEQ ID NO: 138307 - DNA, 370 bp, Glycine max
  Clone ID: PAT_MRT3847_958C.1
tttttgtggttcgccttttttttttttttttataaatatggtttttttaattttgggggttaatttttttttcgtcgtttccaggaaaaaaagctgtttttaaattgggggtgatttttgctgcggccccctatggacacggggggggtgtggggaaaaacctcccattgttaacaggaaaatgtacgggggccccttttgggtgaaaaaactgacaacaagtttttgaggttccttttttctggggggaacaaccccacccacccgttttataaaggaaaaaaaggggggggggggggggccctccatggcccccccacaggggaaggctccaggcgagtgactaaacccagagggggcggccgccggg

SEQ ID NO: 138308 - DNA, 142 bp, Glycine max
  Clone ID: PAT_MRT3847_95900C.1
atccgttgtgaaaaatgtgctcaaggtgtacaacaagcgaatccccacgattcaaggagtatagtcagtggagacaaacttgggaaatgatcaattcataatacaaggcgggattgactcccccaacctagtctgctatttt

SEQ ID NO: 138309 - DNA, 695 bp, Glycine max
  unsure (1)..(695): unsure at all n locations
  Clone ID: PAT_MRT3847_95901C.1
cccacgcgtccgctcccttcctccactatgtctctctatgggcaggattcttcactttctggcgtccattcttcagctcttggccgtgttggtgctcctattgttactacggtaatacaaacaatgcaaatacctctatcctatgcggaagacatcattggtattcaagggactaatattgaatacattcgccgcactagtggagccatattgactgtgcaggagagccgggttcctgatgaaatcgttgtagaaataaaaggcacctcatctgaggttcaaacagctcaacaattgattcaggatgttataagcagtcacaaagaacctgtcactagcagttatggcaggctagatgcagttccaaggtcttcatactctcatttgggcactacatcacgcctccctccatcttcgttgtcctcacaaccatacacaggttatggagcttctggtttaggagactacagtactttcaggctttaaattggttttccctatattcaagggtactccatttagactagtttctttctaattgggtctgattggagagattaacgcttgagtatatcatgaggcctcagagaagcttgctttcatgtatttgatatcatcttgtattgtgggtaattttataggtggcctgtagctgagaaatntatagaaaatgtaatgaaatattagtcatttta

SEQ ID NO: 138310 - DNA, 472 bp, Glycine max
  Clone ID: PAT_MRT3847_95902C.1
ttgaaatttggtttctatttgcaaacacaaagcaagcttatgagtttctctcttccctttttctttatgggatccgatcggcggtgatcggatcatcgatttgacgcttgttggggagaggggcattttcattgccaatgggaatgcccaatcccaacaacaacaacaacaacaacaacaacaataacattcaccccgcaccatgagcaaagccctgggagcaactacagaagaagacgaagaagacgaccaacaacatccacaacaagattgtttctacgactcacacgaccgtttactttcactctcttcttcatgctcttgttccaactccaactccgacaacgaaaacgacacccaagaccaccaaaacgacaccagcctccccaatttcaccaactacgacatatggatctctcaaccctcctccgtctccgaacgccgcacgcgccttttactttccctcggactc

SEQ ID NO: 138311 - DNA, 2215 bp, Glycine max
  Clone ID: PAT_MRT3847_95903C.1
ttaaaaataattaacaaaattaattaatgaaattttaaccttttaaagtatctaacaattaatacaagtttggtattgcaacctgcttcagaggcgcacttaaaaagcaaacatcatcaaaatgactaattaatatttcattacattttctataaaatttctcaactacaggccacctataaaattacccacaatacaagatgatatcaaatacatgaaagcaagcttctctgaggcctcatgatatactcaagcgttaatctctccaatcagacccaattagaaagaaactagtctaaatggagtacccttgaatatagggaaaaccaatttaaagcctgaaagtactgtagtctcctaaaccagaagctccataacctgtgtatggttgtgaggacaacgaaaatggagggaggcgtgatgtagtgcccaaatgagagtatgaagaccttggaactgcatctagcctgccataactgctagtgacaggttctttgtgactgcttataacatcctgaatcaattgttgagctgtttgaacctcagatgaggtgccttttatttctacaacgatttcatcaggaacccggctctcctgcacagtcaatatggctccactagtgcggcgaatgtattcaatattagtcccttgaataccaatgatgtcttccgcataacataggggtatacgcatggtttgtatacctatagtggaattatggggaatgaagggtaccatgactatcacctaccagaagctaattaataatagactgaagcatgagcaaacacagttgttttcagaaaaatatatagcaaaagacacaaatttaatgtggtttggctctcctaagccccacaggaatctttcaacaatcgctcattatctcaacacattacaacttttctggacaaacttgagaaatctctcaattacaagtataacttgacacacatacatattctttttgcaaaaaaacaggcaatcacgcatgcacattattctgcaacaagcagtaaaacttgacaaaatagaggcaatcagttatcagtcccattccccagtaaatttcatgaaaggcaatgaacagaaaacatgtgaagggttaatataactaaccgtagtaacaataggagcaccaacacggccaagagctgaagaatggacgccagaaagtgaagaatcctgcccatagagagacatagtggaggaagggagaaacaagtccaattgactttcacggtcagctaagacagaatcccttttcccacgcgtccgcggacgcgtggaatgtggaatatcggcaaatatgctagtacgtgaagtagtatgcagcaatgacttgtcagaccaggtctctgcttgacgatcttgtgaggtaggggcattgtaagttttctcaaataggggaagaacgctatgatcaaccaaaaatttcctcagatggccaactactgcttccagagctttaaggaccttcaaggcttctccctgaatttccacaatcctctcattcgcagtagcataaaattgcacctcatctcctgacaacactctaactgaagcactggtattctcctgaatagatttgattaaagagccttgctttccaattaaattgatagcctgtgtcgatgccaccaataaacggatggaagaaaatgcaagaccagcagcagattctttattctcagcatcagtttcagataatccagagacacgcttgaatatccttactacagcatccattgccggggaaagagctgcctctggctcttccttcccggacacaagtacaattcgatcaggagtgccgagaggagcgtcgagaacgcgaatgcgggatcgagtttcttcgcacatcttctttatcagttctcccttgcgtccaatgatgcttcccactttccccaccggcacgatgagccggaacacgcagtccccaggccaccccggccacctcttctccggcggagtggaagccgcggcggcggcgtcggattccgtctcggtgggcggttgtgcggcggagacattgtccggcaggagtggttcggcggtgccattctggagtggttcggcggtggccataggagagagagggtggtcaagctgaggtcttcgagagtgtagggaggaaaagaaacacactggcgtctcgctgtgtagcttacctcattagcctagccgatccgagcttcgccgcggcagcga

SEQ ID NO: 138312 - DNA, 1652 bp, Glycine max
  Clone ID: PAT_MRT3847_95904C.1
aatggattggctcggatcgaatcttactcgtttacaaaaaaacattgagggggcaacatacatgccacacaaatataaaaaaaacttgaatcatcattatcttcaccattcatcaattcaaacaacatcatcatcatcatcaccatctccaaaacatttcttcttcatgcttcttaaaagggcttccctcgtgccgaattcggcaccaggaacaattcgcggccgcaggactttttttttttttttttttgggcacaggaaactatagcgattcccattcagagcaaggaaacaacgagtcctatttcacggattatttagataacttaaccatgccttggcatataaaagcatcaatcctaactacccacatattccccaatggttctccagtcaacaagtcaactttacaggttgaagctccctctctcttatcgtagtcaagacaaagactacttttgatgtttagcagtcacataatatagcaatttgaggcaactaattttctctacacttcgtcaagaagcagaaaccttaccacgcagccagggatacatgcttccactagaaacaacaccactacttgtcataaccccacttcctctttctttttctttctttttttctcatttttttcattttttttttacatagaacatataagaaaacttaggattttgatcatagtagatcaaaaggtgcattcagttagaagcccattcgaagtaatggcagcgagcacctctagtcgcagtccaatttccacatccaaagaagaggctcccttgcttgggacccggcttcctcaccatgcccctgctgcttttcaccccacagaagcagaaagggtgatactgaacaacgggggtagtgatatcctttgctttgtaggggcaatgagggaaaacgattggttgttctggtgactgtttccacatcagtggtcgatcagctgtctgccacattatggaattggtaatggaaaatttaaaaccccggtgcatgagaagcgccaacaggcgagcagtatttttggcatcatcaaggccgcaatgtgcacgaccctgccaggccaagccggctatctcaacagcttcctttagattgcacttcacagcaccaaatacctcacggaaaggaatccttaagttgatccagcggttgaagtaaggaggcttccgtatcttcttgaatcggcactcagattcaagcatcacccgacaatcccagttggaccatgtaaccacagcaaagttggaattctttattcccttcttctcaagccatttgtcatgccttagtagagcctcactcaatgtaacacctctgtccacctgaatttgctggatgccggtcagatccttgcagaaatcactcagaagctgattgcaggtgggcctcacatgtgtttgaaaacacgcttccagctggtcagtgatgctactcactataacagatggaaactcaattatttcttgagggtggggatttttatccttgtcacaggtagcctcaaagtctatcaccacaaaatactgaaattcctgatattgctcacgcgggtaaccctgagcaaccatattaattggaacatactgaagtggattctcaacaggataaggatagtaatggctctcaaaagcattcatttg

SEQ ID NO: 138313 - DNA, 1929 bp, Glycine max
  Clone ID: PAT_MRT3847_95905C.1
ggggcacaggaaactatagcgattcccattcagagcaagaaaacaccgagtcctattttcacggattatttaaaagataacttaccatgccttggcatgtaaaagcatcaatcctaactactacccattcctcacatattcccccaatggttctccagtcaacaagtcaactttacaggttgaagctccctctctctttagtcaaagacagactactattgatgtttagcagtcacagaatatagcaatttgaggcaactaatttctctacacttcatcaagaagcagaaaccttaccacgcagccaggaatacatgcttccactagagacaacactacttatcataacccacacttcctcttcctttttctttctttctttctttttttcttatttttttttcattttttttacatagaacttatcataacccaaacttaggattttgatcatagtagatcaaaagttgcattcagttagaagcccattcgaagtaacggcagtgagcacctctagtcgcagtccaatttccacatccaaagaagaggctcccttgcttgggacacggcttcctcaccatgcccctgctgcttttcaccccacaaaagcagaaagggtgatactgaaccacggggatagtgatatcctttgctttatagggggaatgcgggaaaacaattggttgttctggtgactgtttccacatcagtggtcgatcagctgtctgccacattatggaattggtaatggaaaatttaaaaccccggtgcatgagaagtgccaataggtgagcagtatttttggcatcatcaaggccgcaatgtgcacgtccctgccaggccaagccggctatctcaacagcttcctttagattgcacctcacagcaccaaatacctcacggaaaggaatcctcaagttgatccagcggttgaagtaaggaggcttccgtatcttcttgaatcggcactcagattcaagcatcacccgacaatcccagttggaccatgtaaccacagcaaagttggaattctttattcccttcttctcaagccatttgtcatgcctaagtagagcctcactcaatgtaacacctctgtccacctgaatttgctggataccagtcagatccttgcagaaatcagtcagaagctgattgcaggtgggcctcacatatgtttgaagacacgcttccagctggccagtgatgctactcactataacagatggaaactcaattatttcttgagggtgggggtttttatctttgtcacaagtagcctcaaagtctatcaccacaaaatactgaaattcctgatattgctcacgcgggtaaccctgtgcaaccatattaataggaacatactgaagtgggttctcaacaggataaggataataatggctctcaaaagcattcatttggcattgctgcaccttgtgagagttaaaatggcagggcgtccaggtgctgtaattttggtgataagtaggttttgtgtggaattcattggaaggctcaagaaactcacttcctaagtgacagttagggtcagcaacatccccagcagggtgagtaccaggctcatttttaagctctgtaaagccttccatagaattcccattactttgaaaattgcaaggaaatcccttgctctggaggcattttaaagatgcctcacagtttatttgcatattttcagaattttcaagggccatcatgatcgtgaatatagttgagatccacgagcgagtacatcagatcctcctattataaacaaaaatcaccgctgcatcgaaaacgcaaaaaaggatcagaaccgagagcataatcacggagttgtttgttggcagagaaaattaggcgttgggaaaacgggtgagaaaacgcgagaaaaaatagaggcagaagaaaaaataaatcagagagaac

SEQ ID NO: 138314 - DNA, 287 bp, Glycine max
  Clone ID: PAT_MRT3847_95906C.1
ggtacggcagcgcggcgacaacacaacggtagggtaccgctgcgacaacacgacggtacggtagcgctgcgacaacacgacagggcgcggcacagttgattttgctgatcgagataactcaatacaatgtgattagagttcatgtccttcttctcttcgatgctacaggtttcatagcattgcaatgccatgcatacgatctctcccctctccgactcagcactggctacgcttcccctacaccggaggtgcactgctcagattcgtggcgtgctgtcacaccacac

SEQ ID NO: 138315 - DNA, 440 bp, Glycine max
  unsure (1)..(440): unsure at all n locations
  Clone ID: PAT_MRT3847_95907C.1
ctggtacgcctgcagggacgggtgcgcagtgtcccggggcgaccgcacgcggtccgcgagaggcatttcctcttcctgcggcggggtggagtgggcctcttctccaccaccaccacagccaccgcgtgcgccgtgactttacccaaaccctcatcactctccctctcatcgcgtggagtcctcttccctctctcccatgccatcgtgcctccctccacccgcgtcgccggaatccggggcggcgtgaaccgcgccggagactcngcgtactcaccgcggagctcgggggcgtgntcttcntcgtgcagcgagcggccccccacggggagggggccgctcttccccggctgcgactacaaccactggctcatcgtgatggggaatcccgggggggagggggccaacaagcagcanatgagcgagtgcgacatccaaaccct

SEQ ID NO: 138316 - DNA, 401 bp, Glycine max
  Clone ID: PAT_MRT3847_95908C.1
accgaagagggggaaatatttgatttatttgtcatttcaaactttgcaaagggcaaaatggggaatttaagggtgcttaaaaaaaaaaaagggaagaccttcccaaaacccgagatttttagaggaaaacctgaatgactccttttgaaaggacaatcgcatacataattttattggcatatttcatggaccccattaacaactaaaccaaacaaaaacttttggtttggagcacaagttatcaaccctttgctaaggataaaacttaagggttctaattgtagaaaaatatttttattttttgataatcaaaaaatgaaacgttttgccaattaagctgcattaaactgaattccaccaactcaaacccaagtctttggaccatcatccccacttttgcc

SEQ ID NO: 138317 - DNA, 319 bp, Glycine max
  Clone ID: PAT_MRT3847_95909C.1
acaataaacaaattcgttaattataaaattttgcaggatgttttgacccccgatgggggcacgttaacccttaaaaacatcaattggggagctatacaattagacaaacgggacttgtattatgaaattcttaccacattttgtgtgaaactcctgtatgaactatttttaaccaatgaacaaatcctaccttgactgtgacttatttacgtgtggcatccccttttgattgaaggagtggaaccggtccaaaaactttattccaaaggggtaaaagatgcccaaagccttaaatctggatcctatggtgatggttaaa

SEQ ID NO: 138318 - DNA, 698 bp, Glycine max
  Clone ID: PAT_MRT3847_9590C.1
cccacgcgtccgcagaatatgaggttgggcaatctcacctatgaaatcatttgaatgattgtggcaaaggaggccaagactatcttagcaccctttaaggggaaaaaaagaagaggaaacaagaaggtcaattgtacccaatcatcatgacaaagaagtcccaaagacgcccggtgcagtatgagaaagataaatcaggctgcatgtggggttttattaatatgtttgattttcgccatggtcactctacaaggaagatgattgcagataagaggcaaagcagcaagcatgctgttggtgttgtgcattctaagaacaagtttgagatgttgggcaatttggatgaagtttgtcacggcagttctggcaatggagagagtagaagaccaacagtagcaactgctgctaataagcctagtgtgaagaaactcatagaagaagagatgttcattgaccagaatacaatgaaggatacatatagtgcccaaatagaatcaaaggaatccagattaaggcgtgaagtccttttgaagttagataccaaaaggaagaagaaatcttacaggaaaaaccgtgataaggaggacaccaatgatttaaatttggatagtaccttgaaatctaaattcacacataatcagcactcaaggaagcaattgaaagataatcttgatctggataagatgattgaagacttt

SEQ ID NO: 138319 - DNA, 275 bp, Glycine max
  Clone ID: PAT_MRT3847_95910C.1
gaatacccggcccgaccgacgcgtacgcgtggataactcatgccgaactgttgcagttgtcctgacagctcgaaaactcgtggatcaggataatcttctacagagcctgcgcttccataaatccacttcacaatcgctcccacatttatacgattttcgctatatgccactttctcgttaaatttcagattcccgctgtatatactttctacgtagatgacgtatagatcagataaggaaatcgtatgcagttagatcaacttatctaatataca

SEQ ID NO: 138320 - DNA, 940 bp, Glycine max
  unsure (1)..(940): unsure at all n locations
  Clone ID: PAT_MRT3847_95911C.1
cgtaaggctggaaatacggctggagcaggagtctcaaatcccaactttttctctctctctccacttgcctacgcgaaagggctaaagagaaacccacccacacacacacacacagaaatatgtcttccccaagcaagcgccgagagatggacttgatgaaactgatgatgagtgattacaaggtcgagatgattaatgatggaatgcaagaattttatgtgcaattccatggacccaatgacagtccttatcatggtggtgtgtggaaagtaagagttgagttgccggatgcttatccttacaaatctccttccattggatttatcaacaagatctatcacccgaatgttgatgagatgtcaggatcagtttgtctggatgttatcaatcaaacctggagccccatgttcgatcttgttaatgtgtttgaggtgtttctacctcaacttcttctgtatcccaatccatcagaccccttgaatggagaagctgcagctttaatgatgcgtgatcgagccacttatgaacaaagggttaaaggagggacgcttgaacgagctgtttttagtcctcagggtagtggttaaggactacaatgcagtgcacattcgcctacactctcataaacaagtactgtgagaagtatgctaaacctgaagacataggagctgccacagaagagaactccagtgatgaagagctaagtgaagatgaatatattctagtgatgacaggttgctggtaaggcagcccctagccttgcatgcatgttcctgttcttctcttcttcttacttgtgcatgatgttctgtcatgttatttcctcattnatgaaatgtcttggttgtggtaggggaaattctccttcctgggttgggttccctgtaataatgtatcctgatctcctgatgcntctttttttncttattaccttagtaaa

SEQ ID NO: 138321 - DNA, 1407 bp, Glycine max
  Clone ID: PAT_MRT3847_95912C.1
ggtacgcagttgtgctgattgctgtctgaaccaacttctacttcctttcagctgcacaagagtctccaatcccaactctctctctctctctctccacttgccaaaggaaaaggctaaagagaagaaaaggcaaagcaagggaccaaccaaaacacacacagagaaacatgtcttccccaagcaagcgccgagagatggacttgatgaaactgatgatgagtgattacaaggtggagatgattaatgatggaatgcaagaattttatgtgcaatttcatggacccaatgacagtccttatcatggtggtgtgtggaaagtaagagttgagttaccggatgcttatccttacaaatctccttccattggctttatcaacaagatctatcacccaaatgttgatgagatgtcaggatcagtttgtctggatgttatcaatcaaacctggagtcccatgtttgatcttgttaatgtgtttgaggtgtttctacctcaacttctgctgtatcccaatccatcagaccccttgaatggagaagctgcagctttaatgatgcgtgatcgaccaagttatgaacaaagggttaaagagtactgtgaaaagtatgctaaacctgaagacataggggaagccacagaagagaaatccagcgatgaggagatgagtgaagatgaatatgactctagtgatgaacaggttgttggtaaagcagacccctagctttgcatgcatgtcctgttcttaactttgtattttatctgtacatgatgttcttcttctagttctgttaattcatctcaccacatgtgaacttatcatggataaggggggaaattccccttccttctagtttcccagtcgctgtaaataaagtaccattgattttcctgatgcaatcatatttcatgtttagcactttcaagtgattgtgctgtttagccatggtaatttaatcaacaatgctagcatacagtgtataaataacactctttgtattgggtgattcatgtttgttccattaaatgatgtgaatcttactctatttggcatatagcctctctggaaatggcttataatcaccagaaactttaggacttggagtaacgcagacctccattttcttataccagacatcattagcatctgtcgattcacagaattttacactagattcttcttgtctgctacgacatgattcagtgtctagagttttttgccaaatggcaatttcagaattctcagacttcttctcccagcaaaggagcttagcagtctcttcaatctttctttgttcttcttcaagatcccccttaggtctctgccaggctttgtaattaatcttccaattgattggaggacccgaaagcacccaataaccaccaggtcttagaactcgcggacgcgtgga

SEQ ID NO: 138322 - DNA, 260 bp, Glycine max
  Clone ID: PAT_MRT3847_95913C.1
gtagaagtgaggaaaaccatctacgaaagattttagttgtcagtgaaggtgctggtgattctgtagctctactaggtgttattcgcttagtgcaatacttatcacagaatcatttacttggaaaacaaaggctcatgaaatttgttgtagatgctggtactggcacaacagctattggtttaggacttgcagcccgttgcttaggactcccatgggaggtatatgctgtcatgttggctgacaaaattgatgggtacaga

SEQ ID NO: 138323 - DNA, 395 bp, Glycine max
  Clone ID: PAT_MRT3847_95914C.1
tatttttttttattttttcattggtgggtttttttatttttaattttttttttttattttttattattatttatacattaattctttgtaaaggttataataactccatttagtgtagaaaaaaatatcaaattaaatggaagaagatacattactaaaaatttccaacacaactgggtccttaagcattaatatatggaaccaggactcgacacaaagacaaagaagatacatctcgttgcgggtaattcctgaaaaaacaacaaaatccagggcggcctaaactatccctagcggcaattcccaaaaaaaggaatgcacaagaataacaaggacaagacctaatgtcacagacgccataagtaataccagggcaaaaaaaacaacctgcacca

SEQ ID NO: 138324 - DNA, 683 bp, Glycine max
  unsure (1)..(683): unsure at all n locations
  Clone ID: PAT_MRT3847_95915C.1
ggaaccaaattctagctcctttcagctgcacaagagtctccgatcccaactctctctctctctccacttgccaaaggaaaaaggctaaagagaaacccacacacacacacacagaaatatgtcttccccaagcaagcgccgagagatggacttgatgaaactgatgatgagtgattacaaggtcgagatgattaatgatggaatgcaagaattttatgtgcaattccatggacccaatgacagtccttatcatggtggtgtgtggaaagtaagagttgagttgccggatgcttatccttacaaatctccttccattggatttatcaacaagatctatcacccgaatgttgatgagatgtcaggatcagtttgtctggatgttatcaatcaaacctggagccccatgttcgatcttgttaatgtgtttgaggtgtttctacctcaacttctgctgtatcccaatccatcagaccccttgaatgnagaagctgccgctttaatgatgcgtgaccgaccaagttacgaacaaagggtntaagagtactgtgagaagtatgctaaacccgaagacataggggaagccacagaaagagaatccagtgatgaggagatgagtgaagatgaatatgattctagtgatgaacagggtgttggtaaaagcagacccctagctttgcatgcat

SEQ ID NO: 138325 - DNA, 4016 bp, Glycine max
  Clone ID: PAT_MRT3847_95916C.1
tttacgcgtcctgttttgcttcgtgtgcattttgcagcgttattgcataaaacagcttctgtttgtttacttatttatttctccttttcatattgttggctttttatgtcctaatatgacactaatttttagccagaaaatattagcatgagttttttttttttttttctaatttatgctgacagtctctgattctcacttttgtttattggtctgtccatggttccagaaattgaactgagattgaatgttttggttcgggaaaggtgctgttactgtattatggaccttaaatgtttagaatcttttttctctccttgtgatggatgcttgcagaaatatgatatgctatcacattgatatcataatactacatctccaagtcaaatcatataggaaaatagactcgttcagtagaagtatagtattaaaatacataagataaatataaataaaaatagtagaagcagttttcttccattatttttttttttttcaattatctaaaattacttcttttactctctctcagtacatttgacacagaaacaaaaactcacaccaaagagccaaatgccataataaggataaataaaaaaaatgaagtgtccacaaaacaatgaaatacattgggccaatagaaattacaactcaattaagaataataataaaaaaattacttatttcggtgtacaaattaaaacatttaaataaggaatataatataattaattaacaaaggagagagaccgtgttttcttcggaatgtagtaatgtccaagataactaactaagaccaaaaaaatggcaagtggcatgcataaaccttaagcatagctttgtagctttcttcatcaataaattaacaacataggaaaccttagggtaagtgacaatcgtgcaaatactccatcaaacccctcttctgtgccaccagttgcaacattgcaatgaccaattgagccacaatatgaattctgtgaaagatcgtatagagaaatgtactggcagccaaaggccaagccagttcttcaactttgatattgtggcttattgtgttgatgatggaattagtaaccaaatactgcttgacagcaacaagcaccttctcaggaacaagtagggccatcctcatggtcaaccattttagtgtcccatctcattcctccaactattttctttaccttaattagcatcatctacttcgtcgcggaatatgacagcaccttctggtcgcaaaatccggtccatctccagaagtatatcttcggccttgcatttatccttgtacagactaaagacaccatgggcgtgaataaggtcatatgtccttggatatgttgaaaaggcttcacaccaatcatgatagatgccaataagtcctcgctcgtatatcacacccagtgtattcgcctcagctatagtaggcacaacattcatgacccataactttgaagaatgaatagctgctgcaaaactacccaatccagcattcatatccataatgttgcgataccttcccgagtccaacagtctattagttttcttgtaagcttttacgtgttttttccactttttgttatcatcctggtatgtctcagaggaaactccaggaactaagccactagcaattctgggaggaatggcatatagcctgcttggaaatggtttaagattcccgccagtaactttaggagtgggagtaatgcaggcctccattttcttataccagacatcatcggcatctgaggactcgcaaaattccacactagaatcatcttttctcctttgacatgattcagagtctacaaccttttgccaaatggccatttcagccttctctgacctcttctcccagcaaagttgcttagcagtctcttcaatctttctttgctcttcctcaagttcttccttaggtctcagccaggatttgtagttagccttccaattgattggaggacccgaaagcacccaataaccaccaggccttagaactcgatcaacttccatcatataaattccattatttgctccccaaggaatcaaacagcgagaacaatgagccatatcaaaggctctagaaggataaggcaactttatggaccccaaaacaccaacaatagcagggacacccctttcaagagcaaactgtacttgtgcttcatgattgtcccttggtgcaaacgacatggcaataacatttctgctccaaagatatgcaccccaactcgcaaccccacaaccagtgtctagtgctgtcctcactgttccatttgttataggtatcacagatgcaatttgatcaatatatttatcagcaccttgaggaaattgggttccgccaccagggaatttgaacacatttccctcgtattggatccaattctgaatagccttctcaactgtaaggctcttgtagggagcattagcatacggaacataatcacggctcttcggccatggaaatggtgttacataccccttgggtgcagggatcatacactgcaacttctcttcttctggggggcagtgtctctctctatagaccatgttttctctaggaaaggtcatggcacgcttttgatcttgacagggagtgtaatcggtatagcgagcagcacatggctcaaataccttaggctttgaatcagcttcatcaaattcgttaacttctccaccatggtgggaatcaaaacttaaatttggaactatattacattctgtgttagtcttagtaatctccaatgctatgctatctccctttccgaaaccacttctctgccacgcacctaaaatatagaagaaacagcacagaccaactactataaagatctgcacagaacttctagtcctaccatcagctgaacttggttttgccatctagaaccatatgtatgttggttgctgaaaagcaagtagctaaggaaaacaaaaacatcatcacagaaactcacaaaggaaaaacaaacaaacaaacaaaatgtcttctccaagcaagcggcgagaaatggacttgatgaaactgatgatgagtgactacaaggtggagatgattaatgatggaatgcaagagttttatgtgcacttccatggacccaatgagagtccttatcatggaggtgtatggaaagtaagagttgagctgccagatgcttatccttataaatctccttccataggctttatcaataagatctatcacccaaatgttgatgagatgtcaggatcagtttgtcttgatgttatcaatcaaacctggagtcccatgtttgatcttgtcaatgtgtttgaggtgtttctaccacaacttcttctgtatcccaatccatcagaccccttgaacggagaagctgcagctttaatgatgcgtgatcgagccacttatgaacaaagggttaaagagtactgtgagaagtatgctaaacctgaagacataggagctgccacagaagagaactccagtgatgaagagctaagtgaagatgaatatgattctagtgatgaacaggttgctggtaaggcagacccctagccttgcatgcatgttcctgttcttctcattctatcttaacttgtgcatgatgttctagtcatgttaatttacctcattaaatgaaatgtacttggttgtggataggggaaaattctccttcctgttatttagtttaccctgtaaataatgtatcattgatttcctgatgcaatcttatttattcttaatctcctcaagtaaatggattaagtgcttgtttggctcccagatccaatcataagaagcaagagggaacaagcatgaagatctgggattcatgttatgtctatcagcatcaatcatgttcacatgaatgaaaaatagcagcataataataaaagagaaaaggaaaggaaaagcaagaagaaaaaaaataatctatctggaagtgtgttacgcagttatttcatttcccccccgtctgtcgtctaaaaatattggcttttttaatattgctgcgaaactctatactttgagtagtttg

SEQ ID NO: 138326 - DNA, 1029 bp, Glycine max
  Clone ID: PAT_MRT3847_95917C.1
tatcgatcggctgcgagaagacgacagaagggggcacaagcaaagttctcccacaaacctcttctttctcttcctcccaaacatgtttctctttctctctctctctcttaattcctgaaaagcaagtagctaaggaaaacaaaaacatcatcacagaaactcacaaaggaaaaacaaacaaacaaacaaaatgtcttctccaagcaagcggcgagaaatggacttgatgaaactgatgatgagtgactacaaggtggagatgattaatgatggaatgcaagagttttatgtgcacttccatggacccaatgagagtccttatcatggaggtgtatggaaagtaagagttgagctgccagatgcttatccttataaatctccttccataggctttatcaataagatctatcacccaaatgttgatgagatgtcaggatcagtttgtcttgatgttatcaatcaaacctggagtcccatgtttgatcttgtcaatgtgtttgaggtgtttctaccacaacttcttctgtatcccaatccatcagaccccttgaacggagaagctgcagctttaatgatgcgtgatcgagccacttatgaacaaagggttaaagagtactgtgagaagtatgctaaacctgaagacataggagctgccacagaagagaactccagtgatgaagagctaagtgaagatgaatatgattctagtgatgaacaggttgctggtaaggcagacccctagccttgcatgcatgttcctgttcttctcattctatcttaacttgtgcatgatgttctagtcatgttaatttacctcattaaatgaaatgtacttggttgtggataggggaaaattctccttcctgttatttagtttaccctgtaaataatgtatcattgatttcctgatgcaatcttatttattcttaatctcctctagtgaatggattaagtgcttctttggctacacatcaaaatttcttctaccatggatggatacgtttcaatttaatatttattgttgatctt

SEQ ID NO: 138327 - DNA, 407 bp, Glycine max
  Clone ID: PAT_MRT3847_95918C.1
ggagcgggaacattctttaatttaacccggataccacctaccacttttccagcacaaaactttaatcccccaaataaaagctcccgttttttttaagggaaaccattctttaacaaatccaaaaactttaaaagaccccccgtagagacaggcccctctgggtcattaaattctgacaaccagaaacaaaagggggggccacccacatgtaactttgcgtttatatatcccaagaaacgaaaagctcctttcaaagcccatcttttccttggactaggggaacaggtttattcccgtttttttcaataaaatttataaagggttccctgggcccacccccctcgtattgggataacttctcccttgttggccaaaaacacacgggaggaaaacccagggcattaaag

SEQ ID NO: 138328 - DNA, 418 bp, Glycine max
  Clone ID: PAT_MRT3847_95919C.1
aaaaatcaaaagcgttggaattgctttaaacaaaacagaaacattctcccaacgacgatacaaaccggcccaaaatcttgctttgtaagggaaccttcggactttttcttctgcctgacctattgaaacaaaatgaaatcaccaatgaaggattttggcctaaaccatgactggatttaaaaaaataattccttccatggggcgaagacatgagaaatttttattatcattttgccaacttgagcatcgagtctgatctggtggtgttttcctggcaaaattacaaagacatttggctcaccctggtcctttgagcccacaccctttcaagaaatgcccaccagagggtcattcacctttatttggcggaccttaaccacagagagaggttcaattgggtgcaggccaacttttttag

SEQ ID NO: 138329 - DNA, 569 bp, Glycine max
  unsure (1)..(569): unsure at all n locations
  Clone ID: PAT_MRT3847_9591C.1
ccacgccgtccggattgattcatacttaatgtactgacagtgataaaatgcctgtgctgtatgagaactgccgggtgctggaccttgaccaaacgatcaccaatgccccggatcgtataagcatactgctggatgcgcttagaagtggacaccctgataaagattactgctggctgatattgaacaagaggctgtagaatctctngtggtgaacaaacttacaaggatcactggggattgcctcactggaacgcccgtgagtgctgagagcagtcaagagccaggcccctgatgactattgatcatacttgactgagacggcatctgggactcaagagaagaggacatcacttacgtgtatagccacaaagcatgggcaaagagggtacttagctatatgcctcctatgtggaggttaccaatgatactaccacaatagttattcatggacctacccaccatgcaccgaacaggagagttgcgcatattaggaacctaattagagctgctaatcaagagtatgagaaaggataagctgcatgagagaattgataaatggtcttgaggcg

SEQ ID NO: 138330 - DNA, 361 bp, Glycine max
  Clone ID: PAT_MRT3847_95920C.1
gaaaacgatgccaccaggaatcatagaacctttaaaaaaacggacaggcacatgacctgatagggcacggcgtgcatcgattacaaacatgaacgcctaaagccaaacgtgcggtctatgacgagctaagtggcacacacacggatgctgggcccgcgtcgcaaagaaagttacacagagctcccacggcttgaacctgctttagaggcgccggtatgcaatcaacgggtcgttgcaaaacaaccgggagccggggtataccgtgaccgggaaccaaccaatcgagaaacctcactttcctctgtacacccggggaaccctatcgattaggcgcgtaacgctcgccctgggctcatttgac

SEQ ID NO: 138331 - DNA, 269 bp, Glycine max
  Clone ID: PAT_MRT3847_95921C.1
aggctcgtcaaccaacctacctctttctctctctcactcactcttttttattatgtaagcaaaccccatgggcatgaccatcatgggggggggtgggggttaattatctccccatcaagctcctttctaatctttctctgactttataaaccccctccttacgcacatattaaatcaaccagatgggagaggaaggtcccctcgagaggaagtacattcataaggaaggccgacgcaattaataataatactaaaagcaacatcaacaa

SEQ ID NO: 138332 - DNA, 227 bp, Glycine max
  Clone ID: PAT_MRT3847_95922C.1
attctcaactatcctatttttagcaaccatctaagaagttcagggcctgaattatctctcaccttgcatgagaaaagcattcaaagctaagaacccaatttcactgattgcacctcaaacatctgcatgaagtcccaattgagtctcaattccacatccatccatgcatagttaactgtcacgcactgatacatacatctctgattacactgtccccaagaagttcc

SEQ ID NO: 138333 - DNA, 253 bp, Glycine max
  Clone ID: PAT_MRT3847_95923C.1
gttttaggccgtttgaatcggatagaatgtgttgctttttttttttccggaaagatggaatcttctcagggtttacatatttggtaatttaattcaaatttcattaggattttcgaaggtcgccaatatatagctcttagtcatgatatctcgattaattcctctttatagctctttgatttcttcctaatcatgagcacaatatgtgtgtggaatggtttacttgttaaggcttctgtgtgaagattattag

SEQ ID NO: 138334 - DNA, 515 bp, Glycine max
  Clone ID: PAT_MRT3847_95924C.1
aaaaacccaaaggatttttttaaacaaaaaaaatcttttaaaatcttagcccaatacacccatttaagggggtttagccctttttttaaaccattacggggggggggggggggcactatcatccatatcattcatgggggggccatcaacggggggtacgggggggtttgggtcggggttttggataaaaaaaaacggggtttgggttttcccaggggggcataccatgggggggggaggggggccctccaaagggcatccccggccggggggggggcccaactatcccccaaacgaaaaagggctgggccttccaggggcagaaaaccagggggggtataaggggcccccttcacattaagaaattctccggggggaaaacccattgggggggtatggagggcataggccaaagaggggggaattagcttcctcaggtaaaaaatctcgccggggggctcagggggggggggcttatcaggggaaccaaccaaggggtttgggatatgattggg

SEQ ID NO: 138335 - DNA, 1461 bp, Glycine max
  Clone ID: PAT_MRT3847_95925C.1
ttgatcaatggattagctcctgggcccatagccaagttatctaatatttattggtttatgattcagtgaaatatgcagattttatgttataatgaaaatggaatgttaaactgacagagatgtttgtgctgattgaaatttatgccccacttggattattgaaatgttcccataaaatttactgttataaactcttccttactgagaattggatatttgaatgtattctcacccgtgttttgtgtgtattttgttaatcttcttaaggttagagaaatcttagaaataatcccatgcactttgcctaataaaataatctagttgcgctagtaagggcatcatgatgcttatgttttaagtagataaattcatagatttttgtgcccccttaccagcggatcgtcgtgctgagtgcgaacgaaggcattatggggttgacgaatttcgtgctgacagtggcgggtgtaagcgccgtcgttcttctccttaggagtgacgcgaagcaatcttctggttcttaagttgtccgtcgtaaaagccacaccaattcccccatagaaatcagaaaacccaccgaacccttaccagcggatcgccgtgctgagtgtgaagcgaaggcatcatggggctgacgaatttcgtgctgacggtggcgggtgtaagcgccgtcgttcttctccttaggagtgacgtcagacaatctgcctccgtcttccggcgtaacgtcaagcacattcgcaactggctcgaagaagaaaccgccgctacatccaagacaatggaaaagtccactcccaaagaatttgaatcaaaggttcctccgaaagacattcctaaggaggacaaaaaacattaatgtttatacaggtgatgcagatgttactgcagtaattgtgtttctcttattgtttttgaatggatacatgtttttgtgtctttactagaatgaattcttgatcactgtctgttcatattactcttgaatgacccttgtattagtacatatatatttagcaataatatgacggatgacaattttggttacaaagcattccagatttttttttttttttttttgcatattatgcatgatttgactgctgagaactatttggctgtaacttttcttggacttcaaaatgttcactttggattgcaactttttttgccactactgcaaggtgatttatattttaactgaaagctcagattgtttaaggaaaatcttttttctctggcccatatctaaatttatgtcttattttatcctctatttttcttttgctatggtagaatgggggtggggggtgatgacaaagatttgagacaagctctttagtgatttgggtcaacccgcaaatcctctctggccatttttttacattgattataggcttaattgcactttgtgttcctaaagttttaaaatatcgtgaattttgctctcaaaatatttttcct

SEQ ID NO: 138336 - DNA, 210 bp, Glycine max
  Clone ID: PAT_MRT3847_95926C.1
caaaataatggcacctgcaacacatagtctctatctgctcctcctgttctcactctgcatcgtcgctaccgcgagatcgagcgacatatgtaccgactgtgtgtacacggcgtcacgttagaaacggttcggtgttcgaacggggccacgagatcggagatctggattagtcggaacgaatagttgggttactccatctgcactggaaac

SEQ ID NO: 138337 - DNA, 843 bp, Glycine max
  Clone ID: PAT_MRT3847_95927C.1
gggccctgaaccactggcatttcatattatacaatcaacaatgagcacaaaaacttgaataaaccaaccacgaaagagttataaatagtcaattaaaagtaacatcattataactagggaatggggatcttgtattaattgtttacattatgttatagtcctctatatcaaacttgcctaacaactcctccagttcttttaaagcaaccatataatgctcccgtgactgtgcccctacttctaacactggaagagcactgttaaacagacgagtatacaagggcacagggttgtgggaatcaacattatcatagacatggaattgattaaacatttgcttgaaatccctcctccagcggtgcaggatgtaccgagatgggatttcctcaatgccgttgtaattgagaacattcaatgcatgcctgcacaaatatcctttgtagttgaacaaactgcaaatgcaacgaatatccaattctgtagtctcgtataagacttcaaaacttttaactcccttctcattcccctcaacttcaactctttctttcacaacgtatgtgattatagatccattgacacttacctgtcttgtgttgaagcaagagtacatgccctcaacctcagattgaaacttttgaaagatttcttttgtatacacctttgcaagctggacctcaaaattgccccccgttttcaattcaaagcttacgtttctagtctccaaatccgccatggcttctttcaagtgcttcctgtgaagaactaagtcatacttgtcaacaaattccttaaaggatgtgtgtttatgcacatatccatcaaaaaaaaaaaaaaaaagggcgg

SEQ ID NO: 138338 - DNA, 891 bp, Glycine max
  unsure (1)..(891): unsure at all n locations
  Clone ID: PAT_MRT3847_95928C.1
cggactgggcgaatgacaatgcaatgctcgtgtcgttttggtgtcactgagtcagtctgagtaggaagaggaagccatgggcaacacatcctccatgctcacccaatacgacatcgaagaggttcagcaacattgcaaaaacgcttttacgcaacaggagatagtttctctgtaccaacgcttctgtcagctggatcgcaacaactgcggtttcatcccttccgatgaattcctctccattcccgaattcgccgtcaatcctctctctcagagtttgttgaggatgctggatgggttgaacttcaaggaatttgtggccttcttgtccgccttcagtccccgtgccactctccaccacaaaattgaattcattttcaaggtctatgacaccgattgcaatggaaaagttaccttccatgacatgttgagggctttaagggatttgagtggacccttcatgtctgagcaacagagagaggacgttctgacacaggtccttgaggaagctggctatgcaaaggattcttcattagtcttgtctgacttcatgaagattcttggcaattcgggtttgaagatggaagtagaggttccggtggattagagtgaggataatacaattccctttttgagttttcttttttcttttttttgaggataactttccctttcagtttgatgacggaggttcttggttctggtatttagttcttcctcttaatgggtaaaagattatttgttcagtgattaattactgcaaacaaagttatggattatataatgtttaacaaatgctttcaaaactgaatttctctgaagtttttttatgcttgataatttttatttgttatgaactagatttgggagattttaataaaaaaaaaccccccn

SEQ ID NO: 138339 - DNA, 566 bp, Glycine max
  Clone ID: PAT_MRT3847_95929C.1
cacaagctattttaaaactacaatacatacttttatagcaaatcattactcgcgtgacacttctagtattcgtaattcttcttgaaaggaaaatgagctggtctgggggagattggatgtgtggtgtttgcgaacacataaatttcaagaagagggaagcatgccagagttgtggataccccaagtatgggggacctgacccttcaacctacagatacaacaggactgaagctttgccaggggactggttttgcaactgtggagctcacaactatgcgaatcgatcaagctgctacagatgtggctcaatgaaagatgattactcttcaggatatggcaacaactctggaggatatggatctgacactttccccccaggatggaagactggagactggctttgcccaagacatggatgtggagtgcataattatgctagcaggacagaatgctataaatgcaaaatgccaagggattatggtggtgctgactgaaacaagaaatttcacaagacctgcaatatcactgatttctcctttggcgtctttcttttccttacaacattc

SEQ ID NO: 138340 - DNA, 321 bp, Glycine max
  Clone ID: PAT_MRT3847_9592C.1
aggtccgtcgccatcatcgattcccatcggccttagccagtctaaggtttcggttcacgacgctatcgtacacatagcgagacgatggatttacgatcaaggccgagtcatcaggttggtcgaacctttcgtcttagtgcatcacgttatatgtctgacatagacgatcagatgcctactgccatcgatccatttgcagatgcaaatgccgatcactcgggtactgggtcacacgactatgtgcatattcatgtacagctgcgctgtggtaggatgagcctgacaaccgttcacggattgacataagaagtcagctcttat

SEQ ID NO: 138341 - DNA, 722 bp, Glycine max
  unsure (1)..(722): unsure at all n locations
  Clone ID: PAT_MRT3847_95930C.1
ccacgcgtccgcaacactcacatgtagatgctcctagagagagaaagttttttagagagagaaagttttatgttcctttgtgtttgccatctgttgcagtgtggtagcattgttgggtttccaattctatctctggtggggttgaagattccaaagcctttaccacaagattttattctattaattggggtcggcagtgatgaagtttgtcaaccagtaatgtatggctgaagaaatgctttcttcataaattggtttacaatatgccaaagtagctttttgtaatggtgccaacatgtagaccaccaatagaaattttatagtgaaaccacacttgtcagcagggatgttgatcagcaatgaaacagaggatttatgtgatgataactttgaaggatctaacgaagaaagacagattttttcagaggtattttctggtaatggcatttttcagtctaatcagaagtgtcttgttcctgtagctatcagctttgaacatgaatccgctaaaaacacatttaaatcattctgctctagtaatgaaaactcagttgtattgcatccatcatcttctagacttacacaccctgaagaagaggactnntatgtaattcagcattccaaagaggctgctctggngtgtgtgcccagagagttcatttgtgaagaccagatgacgaggatgtgaatgtcanacgtatgaaattttctctgcatgaact

SEQ ID NO: 138342 - DNA, 425 bp, Glycine max
  unsure (1)..(425): unsure at all n locations
  Clone ID: PAT_MRT3847_95931C.1
cctacatgttatggcagcgcacgacccaaggaggagaaagttacaggtcgaagaacggangaccaacccaagacgcgcggcgacactatgcgcccgaaggggganaaacacgaggaccggcagaaggaaaaaaacaaggcgaggcccaacaggaagaaaagggacaggctnagaggcgaaganggaatcaacccatactccatggaatggacaggttgggccaatagactactgagaaagggcaacgatattctgtgttgcgataatgctagtaatgatgggttgattaccaagcaagtgatgagcaagagggcagaaatgataaacagcctttgtggtggtgatgaaaaattgatgcgtgaaaggacacacctgctgttggctagttgttcaaggagggcaactagaaaaaaagatgctcggag

SEQ ID NO: 138343 - DNA, 857 bp, Glycine max
  unsure (1)..(857): unsure at all n locations
  Clone ID: PAT_MRT3847_95932C.1
gctcgagccgaatcggctcgagtacggctgcgagaagacgacagaaggggaatcacatgaggagcaagtcattgccgtgtttgacctcaactcaaaaacagccttgtattgtattgtactcacacacgacacattcatacacggcaacagcaatctcacgctgaacctcaacacaaaaactcagatttgattctctctcgcaatttcattctcccctctacaaatcatttcccactcctttatgctcctctctcaccatttttcggttaagatttttctgatcgctgaaagagatgatgcgaagaactaatgccaatgatgccagagctgataacaacactttggatactataaacgctgctgcttttgccatagcctctgcccagaaccgcgtttctcaaccttctacccagaagaaaagatggggaagctggttgggcaaaattgggtgttttggatataaaaaaacccgaaagcgcattgggcatgctgtcctagttccagaaccaaccaccaatggagctgatcctgctgcagctgctagttcaattcaagcacctagtataacgcttcctttcgtagcacctccctcatctcctgcatctttctttcaatcagaacctccatcaactgcacagtcaccaattgggaaagtatctcacacttgtgtgtctgcctgcatctactctcctggtgcccccccctcgtcctctgccattggaccttatgcccatgaaacccaattagtctcaccacctgttntctcggcatcatccactgctcctttcactccacctncttgatccgtccacatgactacaccttcctcgcccgaggttccatttgctcagctactt

SEQ ID NO: 138344 - DNA, 202 bp, Glycine max
  Clone ID: PAT_MRT3847_95933C.1
ctagaccatgtaaccctttattggcattgctgtagctgctccatacgcagtgcttgacaccttatgccagaagctgaaaacaggtgtcaagctctacatttctgccagtgctcacaggcaaaggtggatgcctaacagaataaagcagtggcttcaacacatgccccttattttgttgtgctcgagaagctttgatagtctt

SEQ ID NO: 138345 - DNA, 392 bp, Glycine max
  Clone ID: PAT_MRT3847_95934C.1
tgcgcatgcgaaaagccgacagatggctactgatacggaaagacgactgactgcttcagtgatcagatgaccacctgatgctactgttgacagagcacgagccagcgttactgctgcattaactggactgaaggctatggctgccttacgaccacggaaggctaccgctgacataacatgacttgctgggctcgttgtatgatcagcaatgcatgcaggtgtggccaccagttggcaagaggtctatagggactatgttttagttggcatacctgcaacatgctcaatctgctaaggaggcacaaaacttaattaagtgggcatggatttacagcttggaatctgagataacgcacgcgttaccgtactgagagcacttgaggtaaatacga

SEQ ID NO: 138346 - DNA, 561 bp, Glycine max
  Clone ID: PAT_MRT3847_95935C.1
tacctttttagataatccccaagctcggagttttggtctgcattgaccacttcgggtgcccggatttgtccaagttaaaatgggatcagggggcatatttcgtcccgtatctcctccgcggtttcccatcgctaatgaacctgctccaagggggccttacatgggtgaagatatccgctccgtatcgcttcagcaaggatgaaaagctccgcgatatggatgttctagctcgagagttcatacgcgaggcgcctacccgagtggtttatgcaacagactggccgcatactagatttcgcaacgttgacattgaaccttttacggaaatgtgtcttcgacgatgtggctcatgggccgtagcgaagagggtgtttcgatacaatacggaggaattaatggattgtcgactcaatatctagccacttccaacctctaacggatcatcgataaaagccaaacccctgttcttctgatccctcgaaccgccacggcagccacaatatcgctcctacttgcaacgccatcaccaacctcagtcgtgcagataaccttcggtcccta

SEQ ID NO: 138347 - DNA, 649 bp, Glycine max
  unsure (1)..(649): unsure at all n locations
  Clone ID: PAT_MRT3847_95936C.1
cagataatcaaacacgatgacaaagaatgtttggatccatcatccaccaagaaagctagagtagtctggtctgtggatcttcatcagaagtttgttaaagcggtgaatcagattggatttgataaagtggggccgaagaaaatactagatctgatgaatgtcccatggctgactagagagaacgttgctagccacttgcagaaatacaggctttatttgagtaggattcagaaagaaaacgatcagagatcttcctcaagtggattgaagcattcagattttcctttaaaagatatgagaagttttggttttcagaactcagtaaacaaccagcaacaaaacgatgttgccattgacagctacaatcattcggatggatcattactacttcagaatgtggaaactaaaagtcacgaagcggatcccaagggaattgtttcacagtccaccatagcgaaaaaaggaaggattttgactggtaacattgctgacacaaatatgagagagagtttaagggttggccttaatcaaacttttgcccctctggagtcagaagaaaaccatgcagtatttgattgttccatgccaacaccatacacttggacttgagntccacacantgcactcanagaagaacacaagtcaattg

SEQ ID NO: 138348 - DNA, 1517 bp, Glycine max
  Clone ID: PAT_MRT3847_95937C.1
tcgttcgtgcgttcctctgattattattcatcgatcagaattgatgatggagtcctccttcgatccaacggtcaacggctcaccacacctatcccttttcaacggccacgattgaatcggcgagatccgtcggtcaacgggctcttctaaagcgcgggttgagagagaaagagagaatagagagagagaaaggggagtgcagacatgtactacaataaccagtttgttatgctgcatgatctccttagagagctatcaatctgtcaaagcaaagagaaaccatttgaacagagggaaagactgattattgacttaaatggagataatcgtcctgaatggtggataggacaggatgagcaaggagtcattggccgtatgtcctcattcttcctcagaatgttgtatagacagaaacagctaagagttgctgcacgcatattgtctatttcaactgatgaaacatttacttcagattggtgtgacatgctacctgatgaagctgaggttctggttttaaatctcaactctagccagtactcattaccagagttcacagaaaagatgagtaaacttagagttctgttagtcacaaattatggtttccatcgttcagaattaaacaagtttgagctacttggttctttatttaacttgaaaagaattagattggaaaaggtttcagtcccttccttgtgcatattgaagaatctgcaaaaattgtcccttcatatgtgtaatacaaggcaggcttttgaaaactgttctatccaaatctcagatgcaatgccaaatcttgtggagatgagcattgactattgtaatgatctggttaaattgcctgatgggatgagtaacatcaccccgttgaagaagcttagtatcactaactgtcacaggctatctacactgccacaagatattgcaaagctcgagaatttggaagttctaaggttatgttcttgctctggtttggtagagatgccagattctgttaaagggctttacaagctaagttgtcttgacatctcagattgtgtaagtctgtccagattaccagacgacattggtgagttgaagaagcttgagaagctctacttgaagggttgctcaaaactgagtgaatttccgtactctgtcgttaattttggaaatttagagcatgaaatatatgtgatctgtgacgaagaaatagctgccttgtgggaaaacttccccaccatgcccaagttgaagatagagatatctacaatggagattaacttgaattggcttccaggagttcattcctgaaacttgtttcctgaaattgatagtgacttagaatcatgttgaaattggacaatgatgttcatgtagatgtaatgaataaagtaggagtttgtattagtgattttgtagatataacacatcaatttggcttgaaagaacactttatgtgtaattttagcatgttcatttatatttgtggccacctaccgcaatatatttcttatttatttgaagaaaaaaaaggagat

SEQ ID NO: 138349 - DNA, 2343 bp, Glycine max
  Clone ID: PAT_MRT3847_95938C.1
tgacatggatggttttaaacttcttgagcatgttgggcttgagatggatcttcctgtcattatgatgtctgtggatggggaaacaagcaaggtgatgaaaggtgttcaacatggagcctgtgattatctccttaagcctataaggatgaaagaactgagaaacatatggcagcatgtctttagaaaaaagatacatgaggcaaaagaatttgaaagttttgagagcattcacttgatgagaaatggatcagagctatcagatgatgggaacctgtttgctgtagaagatgttacctcatcaaagaaaagaaaagatgcagatagcaaacacgatgacaaagaatgtttggatccatcatccaccaagaaagctagagtagtctggtctgtagatcttcatcagaagtttgttaaagcagtgaatcagattggatttgataaagtggggcccaagaaaatactagatctgatgaatgtcccatggctgactagagagaatgttgctagccacttgcaggtgatgctatattttcacaccagtatgttatacttagactatagagaaagaaacatgtatactttctttcattcagatgagcatctagattcttaatattttttattgtatgcatgattacatctcatttatatcaccgtttggtagacttagaatcacaacaaagcttcactttaatacaatagggtgtaagtgtaacctccaaaccataggtcctgtacaaatgtttcgtagaaatattacaacttaacacgttactcagcatgtccatctccatctaatgtaggttttgttactcaaacttgcacaccaagaagatacagatcctctcataaattcaataaagcaaaataataggatagaaaaatggcaaaacttatatacagttccttatgttctgtttgtactatttactaatcaaaattgaagtttcatctcgataatctgcacaattctttaatgcaaacctttatatgatgaaactgcaattctaattagataacaacacaaacatctatagaactgtatctaagttttgtccatagaagaaatgtatgtttctataatgtttcataagtttgaaaccaaggttcttactaagaaatctttaattatgcagaaatacaggctttatttgagtaggattcagaaagaaaacgatcagagatcttcctcaagtggaatgaagcattcagattttccttcaaaagatatgggaagttttggttttcagaactcagtaatcaagcaacaaaatgatgttgcaattgacaactacaatcattcagatggatcattacaacttcagaatgtggaaactaaaagtcatgaagctgatcccaagggaattgtttcacagtccaccatagcaaaaaaaggaaggattttgactggtaacattgctgacacgaacatgagagagagtttaagggttggccttaatcaaacttttccccctctagagtcagaaggaaaccatgcagtgtttgattgttccatgccaacaccatactcttggactgaagttccacacatgcaactcaaagaagaacacaagtcacttgtttatttagaagatagcttcaatcagttgccattacatggtaagcagcagcaacacatccatgtggatcaatcacaatcagttgcttcaattagttccgctccctcaataaccgaggaagaggctgctgcttgtatagaaccaaaacctttgtttgcagattacaacaatgattatgccagttctgtgagttcaacagggaatgcagttgccacctttcctattcaaccaggaagtcttattatgaatggtcaatcttcagaacgcatttccactacaacttctggattgaaaacacaggaatataataatctcagtagcatttctgatcaggaaatttaccaaagaaaccttttgggatgtgaggcagcttctgcatcattggacgaggacttgcatttctattggctagaaggcgaatgctataataatatgaacttcggtctgcagaatataggaatgtctgaatattatgatccaggacttatttcagaagctccaatccacttatatgattcagctgattactcagttatggatcaaggtctattcatagcatgatttgctttgcctttcctgcatcttcaacaaaaatcaaaatttactcatgaaaggacaatttagtgtttcttgtagctaactacagctttattggagaatttcaacctcaagggttggggtattcttttttccaatcatcgaggatttggatatatattgcagtatgtataaaaatgggtgctgacaagtattgagcttactt

SEQ ID NO: 138350 - DNA, 1037 bp, Glycine max
  Clone ID: PAT_MRT3847_95939C.1
gtacttgttcaaagttgggattcaatccaggaaggggaaggggaatatagtgatatcaccttcaattttaaaaaaacaatattcggtactctttttttcacttggattagcttggtttgttcttttttctgtgacgtttctacgtttcttttatggcaagctacatattgaattggtgccattaatttagttacaatcatcattggtccccgtgatgacaaagttaccatcattgtccccaatattagacagcagctccgatgctacatgccttgaacaaaattgattggtatcagtgtaactgatctgagtgtgttttcttcttttcaacaaggaatggtttgaacatcattagtattccaagtgctgctttctgatgtgtcgtgtccttccgctgttgtgtgttttgtactgacattcgacacgctcgattcttccgattggtggtctgcttgttcttctttcaccacgctgatgttgtccatgttttcgggttgttcaggttcctcaacaacagtggaccttccgccaatttcaatttctggagtgtcgatgctcgagccaataccaatcacttctgaatcatcatccggcagtgtttgctgctgtggtatttgatcagtatcgccttggacaaaggcagcagtgggcaatgctgtcttgacttcttcctctggtaactgttcttttgttgcttcttcaatccctttcgctttttcttgatcgaattttccatcatcctcaatccctattttctctttggcctgagatgctggaacctcttcctgtttctcagtatcattggtatttatttctgccgtctccttggtatcattttgtggagtcttcatctctaggttaacggacgcgtgggcggacgcgtgggctgacgcgtgggcggacgcgtgggaacaactgtattggctccgatcgatgcttcctcaagtgttggttgcagggatttatcttcaaaccgaccttcgatttctgattgagttgtctccacatgagttgattggtgcggatccgttgcttcc

SEQ ID NO: 138351 - DNA, 212 bp, Glycine max
  Clone ID: PAT_MRT3847_9593C.1
gaaaactggaataattattttttattctagaaatataagtgtacgtacaacaatgttgtgtacaggaggagattgtttaatcacaaatactgcccccgcgcaagcatttttccatcaaacagcttttaagggctggagttggggagccatgtaggtccaccgccagataaatatatttgctgcggagcaaaaccctattcgaacttggtata

SEQ ID NO: 138352 - DNA, 364 bp, Glycine max
  Clone ID: PAT_MRT3847_95940C.1
ctaacaccaaatcactcagatttattaataacaatggaagatggagcctatataataagaaaagctattacatctattgttcgaaaaaaggcctgaaagcttagcacccttgccaaagctattagtatttatatattagactgtactatgcactaatcctatattattgctataatataacagggttatattacaaaaactggactttggaggttttccattataacctcacatgggcatatagtgtattgcatctttatggcactataatgagattatagctttcgatctcccattcttgttatgaaggaaaaggacacttatgcatgtttatatggaggctaatgcaactgtggttctctca

SEQ ID NO: 138353 - DNA, 289 bp, Glycine max
  Clone ID: PAT_MRT3847_95941C.1
gccacacgtacgcaatcgtgatcttttaataatttctcagatttatccggcggggatgcagatccatctactcgttttggtgactacaatggccatgagacagccccttgtttcggcttctttgaccccacatctgcgctccgacttctatgtatcggagctggctatggtacaccgaatagcggagtgtacagtatgtttcattgacaaaacgagacctgcactggtggtgtagaccattgttgctgtttccatgagtggagtaatgggcatgtacgtcatcatgact

SEQ ID NO: 138354 - DNA, 415 bp, Glycine max
  Clone ID: PAT_MRT3847_95942C.1
gtttgtttgttttgtttctatgtcttgtcatatgttctaagaaggcaatgttgggctactagccccactctgctgacaattggcgtgagccgacatctgtagcttttatgtccacggaggaatcaatgcacctgtttttggtgggtcttgttcgtcttcaactggaaactattacctactttggtagacacaaatattatctctaaagcttgtttacaatgctcctttaatcttattgatacaatatatgcaacaaggtttaattatgcttaagctcgtgcctattggagcaaaaggatccatttgattcttatgtactaggattgcagaaagtgaaagtagtgagtttgttctgagatgcaattttccttcgtttgcaagtcagatcactggggctaaccctacaattcctgga

SEQ ID NO: 138355 - DNA, 304 bp, Glycine max
  Clone ID: PAT_MRT3847_95943C.1
gaggacaacaagaagagattctagtgtgtaatggcaagatggagggaccatgtcgaatggttgtggtcactagtatatgtgttggctcttacgctcagcatgagactgtcttgctgctctgatatccgtgatatatgaagcatctgctagtgcatattcaattgaagagactactagcagcaccgagcctagagcggcactgaatcatccaacgacgaaaccttggtcatgagagaatcccctgcaagagctaactccgagggagctgatcagagcgcacacactgagaactaaagatggctat

SEQ ID NO: 138356 - DNA, 518 bp, Glycine max
  Clone ID: PAT_MRT3847_95944C.1
actagctgactggcgggcggccgccctttttttttttttttaaaactgaagaatctcgatattaatatattacgggagacatagatctatgcaaaataaaaaggcacacatagtagaatccttatggcatcaaagtccttgtggcttcgagagcggtaactataaattctgcagaccatgaatgtaaacaagcacacgagcttaaattgtcagttattaagctcacgatcaacatgagcatcactcataggctttcaaactagaattatcatcagtattgggcatagagaggacgcctgtattcatcaaagtactggtcacgatcgccgaagataattgcatagagagcctagattataccacgagtataacctataattgtgaggagcaagcagatgaagaattcgacgctgttacaaccgtggcgaatgcaaactcccagaggagggatctagaccgcgatcattatctcgcaccattttttacaaggtggctggatcctccacatggggttcttt

SEQ ID NO: 138357 - DNA, 367 bp, Glycine max
  unsure (1)..(367): unsure at all n locations
  Clone ID: PAT_MRT3847_95945C.1
aaaaccggccgacccacacgtccgcccatcattctttaaaacccccaattctaacctctgntcatcgnctaccncgcttgctttttaatcaaaactatgatcaaccctcccaaaccaaaagaaaatcataaagaactttcagaaaatgcaatttgcggaccacctgttaaaaatcaaagtgcttgaaagtttctttttcacaaatatataagttagcttaatctaccaaaatcattttccatgcaattccccaatgtcaaatataatctcataaactttgaaatttcaatttcaccctaataaggatattacttaaagtgcacattttttattttcctttcaaattttctttcaaactatttcacac

SEQ ID NO: 138358 - DNA, 448 bp, Glycine max
  Clone ID: PAT_MRT3847_95946C.1
gaacatcgcacaagacacaaacgaccactgacatagatgggtgagggcgatcctcgctgctaagagagggtgtaatatcgccatcagtacatgctgaggccctctgctacaagggcttgggggtcattggacgagctgccaatgcgtaggataaaacgccactaggctaatgaaccatcagtggtgctgggacgtccaaaacagtccgatagacacatgccaactggtgcagtacctacagttaacccgttgctgctgtagcgggggtgttggcccgataccgaggaccaccgggctgcggatgctggctgccagatcataaggacttgagccgcgagtgcctctgcactcccatccggagcatggtcaggggatactaagaggccatgcctccgctggataaaggatcatgggctgggtggtctattaagatatacaaatttaacat

SEQ ID NO: 138359 - DNA, 569 bp, Glycine max
  Clone ID: PAT_MRT3847_95947C.1
ctatcatctaaaacgctctcaaagagccgaattacctgaaagcttcatggggtttcctgaatttggctgtcaaaaaacccagggtgtgctcttggaatggttgtagtgctatggagtttgtttgtgttgttgcttggattggatagccatttgagtgaggtgtctggattacttcctcttggcttgtttttataatcttggtaaagatggttctgcatagctggatttccagctctcatattcttgttaatttcttgctgctgcttggttgtggcataacctacgggactgacactgatatcttctgcttgaaaagtatcaaagaatcccttgaagacccctataattatttgaagttctcttgggatttcaacaacaaaactgaagggtatatctgcaggtttaatggggttgagtgttggcaccctgacgagaacagggtcttgaatctcaaactgtcgaatatgggactcaagggccagattcctcgccgcattcacaattgctcgagcttaactggactagaccgttcaattaacaaactcttgtgaaccattctgggagacata

SEQ ID NO: 138360 - DNA, 251 bp, Glycine max
  Clone ID: PAT_MRT3847_95948C.1
tgatatatccagcatcatcatcacgtaaggggagaggtgtaggtgatgccttatcaacatgctatgctgctggtgagattatcaagattgcagccatcatgaatggccttatgcttgttggggtggcaatagggttggtcctgcttcgcgtcgatgcgtttgtggaagattctgagtgagagttgcatcaactggtaatcagtttttcatatatgtattgttataaagaagaaaaaaagcgaaaaagttgt

SEQ ID NO: 138361 - DNA, 405 bp, Glycine max
  Clone ID: PAT_MRT3847_95949C.1
tgagctacgtgccgccctttcgtcctttttttttttttttttttttttcttttttttttttcaccacaaattactttagcgtttagcacttttattcagcatcacatgttaaattctcgagaaggaccaaagctcggcataatgcatcggctgaaagtgacacagcattgaaaagcatgcaaaaattgtcaaggcccaatgatggccctaatggtttatttcgaggcctacaaaagactatgaccgctttagtaaacaattagggtttgacaaaggattaattccgtgacccgagattttactctaaacccattctcacatgacacatacttaagactcattatgagttacgtgacttatatacttgaacatgtgttataaagagatcactctgcactatggata

SEQ ID NO: 138362 - DNA, 536 bp, Glycine max
  Clone ID: PAT_MRT3847_9594C.1
attatttttttttaataaattccatgccccccgtaattacctactttcaaaacaacctattggacagctttaacatgaatgaggatcttaataacggacagcgactggcccataaccttgccaagatcacaaaatctaacccttctatgattgcccaccttagcctaggaaaaaaactaccgcattgactccaattacactgcgtgcagcctgggcctcacattaaagaagaccttaaggaaaccctgggtgcaaaattcctcccatattgctgaaaaacattggcactgcccttgcatcatagtcaattgtcacttgggctttcccaacaatacttggccttgctctggatatggccaccggagcttgggaacacttccgaacctgcagacaggggcgtcctagcatttatgattaccccaaacatgccctagtttgatctgctgtccccaatgcataaaacaaaagacggaaaactcccctttgttcccttctaagagaatacgttctgataccatttccttactcacaccctg

SEQ ID NO: 138363 - DNA, 288 bp, Glycine max
  unsure (1)..(288): unsure at all n locations
  Clone ID: PAT_MRT3847_95950C.1
gcnannagaattgctcccaagggtttaatctttttgngctgtgttatgcttcngcagcnctgtcactgantcgttgtcttgcggagggtaatggncttgttatgaacttctncaaggaatcatgccctcaggctgaagacatcatcagagaacaagtcgagcttctctacnagcnccacaagagcnctgtctttctcctggctcagngncatcttcccatgnctgtgctgttcagagttgtgntgcttcantgtngctgggnctccacaagnaagagcttgtctgata

SEQ ID NO: 138364 - DNA, 444 bp, Glycine max
  Clone ID: PAT_MRT3847_95951C.1
atttatctcaaggtggaaacacatcagtaatggctcaattgggttaaatccatacagcctctatgcatatgattctgtttggatgattgctgaggcactcaaattgttttttgatcggaatggtaccattttattctctaacaatacaaatttaagtggtacgagatttcaaggacacagggtgggaatgggacttcaagtggcagagaccattatttgacagtgagatagatatggcggtctcatttatacaagaagttgaggggtacaaaatccagtctcatattggtgatcagtgggtgtgggcggcagatcctagtggccagtattcgattaggagtgcctatagtgtgcttagagaggacatatcagaggaggcccaggatggagagttcaaggaattatggaagcttaaggtcccacctaaagtggctgtgtttgcat

SEQ ID NO: 138365 - DNA, 290 bp, Glycine max
  Clone ID: PAT_MRT3847_95952C.1
gggcacacaaccaattgacctggatgaacaagcaggggggggttatcccggggggggtgttaacgggcactggtgcttccggtttttgagttttttgggggaaaaagacctttgaaccgggctttttccccattaaaagttgaccccttttgggacagtttttgggaagggcatggatcaattcccgaataatggggcattctgggccttttgttagggccaactgccccttgccttggggatgccgcaaacccggcaggagcttggttggaaaaaaaaaaggccccctt

SEQ ID NO: 138366 - DNA, 533 bp, Glycine max
  Clone ID: PAT_MRT3847_95953C.1
cctcgtgccgaattcggcacgaggcccacatcaaattttcttcatttgttgttgttgcattcacccagttagcaaatgagaatcgtttgataaaaagtcggacgactcagattttatcttaaaaaaactttctctgatttaatactgtgtgagagttcgaatttggtgactgcaccaaatccatttcgaatcttgcataagatttcagggagaatttggctataccaatgggaattcttttctgacatagcttaagaatttgggggaaggaagggtttttttctatgccaatataggggaaaacaagtatatttgttaacttgtggtgggaaggaagggttttatgaatgctttaatttatttctttcattctatggtggtgaatgtaaattaccaatgaaagtattatattagacaagaaaaaaaaaaggtgagattgatattgattactgttagaatttggttacagttagagaagcatgactactttatcagaatccatgaatatgatttgtttttccccttctttttta

SEQ ID NO: 138367 - DNA, 333 bp, Glycine max
  Clone ID: PAT_MRT3847_95954C.1
ggacgacccacgcatccgcctcaataaaaacccgtttgttaccaattccatcttacacatgcacctcgctcactttgacactttagaagccacctctccacacaatgcttctaatccaaaccaccaacataaacaaattcatattgaaactgtttactgaaccattgttttcttatttgtttgttactctaccaatctttataacaattcattctctaaaaatatccttcttttttattaatcaaagccaaactcaaaatacaactcttgtaaatcaaccataatataatcttaaaattgattctgctatgtattacgaaaaacaccttattt

SEQ ID NO: 138368 - DNA, 303 bp, Glycine max
  Clone ID: PAT_MRT3847_95955C.1
cggctcgagctcgagccgctcgagccgaacaaagatgtgaaagtttcgctggttttctaccctctagaagctgtccatgccccaaaaatctgctaagtgcaacccctctttttattatggttttcttaacttcaacaccttaactttttgctacctccttggacccaacacataacatcacacaagcgctgatggttaattgtgtggcccgtcctttcttaatattggaacttacaaccaccactctttaccaatccctgaactattttagggttcagaaacccttaaggttttcttgttcct

SEQ ID NO: 138369 - DNA, 790 bp, Glycine max
  Clone ID: PAT_MRT3847_95956C.1
ctcgagccgattcggctcgagtgttagtctttccttgctggtttggcagcatccggtgtattaacctctgctttgaggttggttacaaaagcagcatttgagaattctaaggacggtctccgcaatggttctaattgctacgtctattgtgtgggatttgattggatgcttcattctactcttggtttgctccaacttgaactcctatgtatagtgtacgggatttgagtggaggatacattccattcttcaagtgcttgatggagtcccgagagttgatcactataacgacatctgcacccaaaggttacaaggcatttgataagtgtttatagtttatagcatgttcttttactacttttaagctaatgaattcgttaatttctctgtttggttcgtcataaactcttaatgtaacatttgatatttattatagagaggggctaggaaattcaacatctgataaattgacattttcttgtttgtgttcttctttccaaattgattatgactaacttgtgtacttttatcaatttcgttttgtgtgttgtcaattttgttaggagtaagtctgaaaattggttcttcattctaatatttcgttccatgaacacatttatgtttatgtggtttattgaatattatcagttgttttatctgcaacataaatgatatagcagagtaattccttttggtttaataaggcaatagttcccttgctagtcggtcctctatcattgctattaaatgagattgttatcagagataatacagttaattagttacaagt

SEQ ID NO: 138370 - DNA, 536 bp, Glycine max
  Clone ID: PAT_MRT3847_95957C.1
gtcacttaagtttgcagatcttaaataaattggctgccttgtttaagctctctaatgaaagcctatatggttaagatgctttaggttcataatttttggattcctttatatccactgagaaaaaaagataataatattggtttcataatatcttttgtcaaaatgataacttttatgcttaccattgaagttcattgtactgtattgtattccaaatttctgttccaaattgttgagcttactgactatcttaggtggaagaaaaacaagcctgcttgttctagccatattgttcccctcatcaaattatggctttcaacttgctatagaataattgttcagatgactgcttgttttgaccctattttatctactattgtgtggtttatgtttccctagatacccaagggtgttcaacatggacagcttctagtattaagaggcaaaggttaaatgaaaagttaccattgaagttcattgtactgtattgtattccaaatttctgttccaaattgttgagcttactgactatctta

SEQ ID NO: 138371 - DNA, 188 bp, Glycine max
  Clone ID: PAT_MRT3847_95958C.1
gaagcaggctagagcctctgatatggtgcgcaaggccaccatatgaacgtgtcgaacgtgaatcatcactcagagcattactacctaactgcgagggattatattcaatggtgacagaccggtataaacgtctctattaccatctgtgcaaaatgatgaacccgtctttgcctcataaataattgaag

SEQ ID NO: 138372 - DNA, 274 bp, Glycine max
  unsure (1)..(274): unsure at all n locations
  Clone ID: PAT_MRT3847_95959C.1
agaacattgagaatccctcggatgcattggcagtggatttgaaaaacaaaatacaccttgtggagatagacttaaaatgggttagggaccagaaccccgatgattcaattaaagaaagggatgaaattgtaattcagaatctacaaccttccaaacacttggagaagncngtcaattggacactatggtggtacaaaatttccatcttggctatctgataattcatatcaaatgtggtgtctttaaggttgaccgactgtaaatattgcctgtg

SEQ ID NO: 138373 - DNA, 143 bp, Glycine max
  Clone ID: PAT_MRT3847_9595C.1
ggaattggcagaggaatgagttctttggtgtttactagtagatgctgagtggtgtaattggtgtgatggattattgaggcaaattaatgttaaggaagtaaaatgatggaattcatctttctaatctatttttcttttttgaa

SEQ ID NO: 138374 - DNA, 492 bp, Glycine max
  Clone ID: PAT_MRT3847_95960C.1
gatgtcagcactggaatggtggctggtataccatcccagcatccagaagttctcatggaagcctcctcacacccctttctcctcccctctcttccttagtctctccatcctcagctacctctccctcaccctcctcctcaccctcctccctctcccacccttcccacaccgcctcctgaagcccatcaccgccctccacaacctcctcctcctcctcctctccctcctcatgctcctgggctgctccctcaccctcctcatccacacccctcacctccgctgggccgtctgcttcccaccccacaccaatcccaccgggcccctcttcttctgggcctacatcttctacctctccaaaatcctcgaattcctcgacacgctcttcatcgtcctctcccgctccttccgacgcctctccttcctccacgtctaccaccacgccaccgtcctcctcatgtgctacctctggctccaaacctcccaatccctctt

SEQ ID NO: 138375 - DNA, 635 bp, Glycine max
  Clone ID: PAT_MRT3847_95961C.1
acccaaaaaaaaatctttattagaaaaatgttgaacatttattggagctaaaaaaaattttgcacatatatattcagtatttttatgaattattttcttgggcatttgggggggggaacaacttcccaaatttcataaaaactatgaaagaactttttcaaacatacatttttgaagcattggcagtctcccagtaaggtacccaggcttgtgactgaaagcaaaaaaagcttttgaaatcgatgtttgctacaatcaaaggtcacagctccgaggttaaagtatctgaaagcagactttccactcccaggcccctgcaccagcccccattcaaagctttagctcctcaaagtccaattcttcacaggaataactggctagaaagaccactgaagagctgtaaaacaattcccagcaaaggaattcaacccagcctgttttcctattttattttcaacagtttctaaagctgttactttcctttcagcatgagcacagtaaatgcaatagggccagacacaaagcacacagttaagatgtctagttaagactgagagggatacgctgggggctacatgttcaagttcattttctactgcaacctctttactaacactcttgcgatcatttttttt

SEQ ID NO: 138376 - DNA, 153 bp, Glycine max
  unsure (1)..(153): unsure at all n locations
  Clone ID: PAT_MRT3847_95962C.1
cacaggaggagcttcctgtttccatttcctctcacaaaaatcacttattatgaacacacgaaaagacatggaccggatcaaaggcccatggagcccggaggaggacgaggnctctgcagatagctaggtggagaaacccacgggcccaggaac

SEQ ID NO: 138377 - DNA, 333 bp, Glycine max
  Clone ID: PAT_MRT3847_95963C.1
ggctcgagctcttacacataatacgatctttacaaatacccctcccaagtgtttcaaatgttaaggtccattaccacgtgaattgtaccccattcctcggtaaatgccagccatatgaagtcacaccacaacacccagctccagaatcgaatctgaactaccttgatttattcttataacgatacccgatcggacccactttcccgccctagaaacttcgaaacagcatgcttgtgatgttctgtgcaaagctggtgctagtgtgcttgatgatcctcatagggcaccagactcttattacagaccatcattgaatatagtcatgcttatcga

SEQ ID NO: 138378 - DNA, 1469 bp, Glycine max
  Clone ID: PAT_MRT3847_95964C.1
ggattgcctcctctggatttttgcattttgccaatgtttcggttgggacaccacctttatggtttttggtagcattggatacagggagtgacttgttttggttaccttgtgattgtatcagttgtgtgcaaagtggtttaaagacaagaaccggaaagatacttaaatttaatacctatgatcctgacaagtcatccacaagcaataaagtttcatgcaacaataacaccttttgtagacaaagacaacagtgtccttcagctggcagtacttgtcgatatcaaattgattatctttcaaatgatacttcatctagggggattcgtggtagaggatgtgttgcacttaattacagatgatgatcaaacaaaagatgctgacacaagaattgcttttggttgtggccaagttcaaactggggtgtttctaaatggggcagctccaaatggcctatttggacttggattggataatatatctgttcctagtatcctagccaaagaagggcttatttcaaattccttttcaatgtgctttggacctgatggtgctggaagaatcacgttcggtgatactggcagcccggaccaacgaaaaacaccattcaacgtcaggaaattgcatccaacttataacatcaccataacacaaattattgtggaagatagtgttgctgatcttgagtttcatgcaatttttgactctggtacctcttttacatacataaatgacccagcttatacacgacttggtgagatgtacaattcaaaagtcaaagcaaatcggcactcatctcaatcacctgattctaatatcccctttgagtattgttatgacataagtataaatcagacaattgaagttccctttttgaatctaacaatgaaaggtggagatgattattatgtcatggatcctatagtacaagtttttagtgaggaggaaggagaccttctttgtttgggaatccagaaaagtgacagcgtgaatatcattggacaaaacttcatgattggttacaaaattgtctttgatcgtgacaacatgaatcttggttggaaggaaactaattgttctgatgatgtgctctcaaatacatcaccaattaacacaccatcgccctctcctgctgtttctcctgctatcgctgtgaatcccgtggctacatcgaatccatcgattaacccacctaatcgatcattcaggattaaacctacctttacatttgtggtggtccttttgccacttatagccattttttgagcattcctatgcccattccatcatgtattatttaagtagtttttttttttttcattatagttgattacacgagaagcattattgcttccctttttttccaccagtcataatagcctctgatggccttgtgtatagcgtaccaaacatagatgtaaactagagaaagttcagttcttatataatactccatccagtttctaattttt

SEQ ID NO: 138379 - DNA, 707 bp, Glycine max
  unsure (1)..(707): unsure at all n locations
  Clone ID: PAT_MRT3847_95965C.1
ccacgcgtccgtaacatttcaatatcactgcttctgtttgattatctttctttgaaattgctttctgtaattaacctttggtttttggtatttctcattttcttggtactaattaatctgttgcagttgtggccaagttcaaactggggtgtttctaaatggggcagctccaaatggcctatttggacttggattggataatatatctgttcctagtatcctagccaaagaagggcttatttcaaattccttttcaatgtgctttggacctgatggtgctggaagaatcacgttcggtgatactggcagcccggaccaacgaaaaacaccattcaacgtcaggaaattgcagtgagtggatactatctttcattcttctttcaacaagttgtcactttcactcttaaaagagtacgacagaaacaagaaaaattcttgtgtctaactatagtgcttgtttaatccttgtcagtccaacttataacatcaccataacacanaattgttgtggaagatagtgtntgctgatcnttgagtttcatgcaatttttgactctggtacctcttttacatacataaatgacccagcttatacacgacttggtgagatgggtaagtaatctacaatctacattatagttntttaggattggtaaaggagtttcatgtcatatgagttgtcaaaattttgtttgcagtacatttca

SEQ ID NO: 138380 - DNA, 608 bp, Glycine max
  unsure (1)..(608): unsure at all n locations
  Clone ID: PAT_MRT3847_95966C.1
ggctaaagattaataatgtattgaggcttcaaatgtatacacacagtcaataaaaattctcagtaagatgttgagtattttacccaaaagcaattcttgtgtcagcatcttttgtttgatcatcatctgtaattaagtgcaacacatcctctaccacgaatcccctagatgaagtatcatttgaaagataatcaacttgatatcgacaagtgctgccagctgaaggacactgttgtctttgtctacaaaaggtgctattgttgcatgaaacttcattgcttgtggatgacttatcaagatcataggtattaaatttaagtatctgccagagaaaaattttaataaaggaaaaaagatagagagagagagaggtgatgatgatgatagagtatgaattacatcagttttactcattatgagtcataaagaaactatagaaaggaaaggtgaatccatttaaccatgaataaccatcgagatatccaaatccaacaactatgatgcaaatgaagtttcacataaggtctttacttttaccaatgggaacatantantacaaaaataacgatacatgattacggtagaatatgaatatgtataccttttca

SEQ ID NO: 138381 - DNA, 528 bp, Glycine max
  Clone ID: PAT_MRT3847_95967C.1
ttacggctgcgagaagacgacagaagggggcgttgagatggcttacacgctccctacccttccataattgttggtctctttcagtgcctcagtttggtgttttcaacaagttgattggatgggatttgctttgtcttttggttccttgcctgttttggtttcctcttatgactttgctaccccaaataaagaaattcaatggctggggtctgtcttcactggcatcatcttctgtgttgttggatatggcaaattgagtagtgcagagaaaattgaatggaataaccggggattctcaacatttcatgctctgtttgcatcatttacgtcattttacctcttggtgttatcagatattttcaacaaggattcacatgaagaacttgttattaatagatcatccactttctcaaattcggtactggggatttctataggttattttctagcagatctggcaatgattctttggcatttcccagctttagggggtcttggattacgttttacaccatgggttgtccatgt

SEQ ID NO: 138382 - DNA, 1608 bp, Glycine max
  Clone ID: PAT_MRT3847_95968C.1
attttgaaataaattcacaaataatgtgggtggatcctaattcctttcttatcctatcctattgactcaccaaacaacagattaaaaatgtaaagtaggatatgatagcatatcttatcatatcttggttatcctgaccatcaaggaagcccatggtgttaatacaaaaccattttgatgtctctacctggcatcttaagcttttaggatagttgattctttacatgatatcaaagtctctataaccgagtgattgagtgccctactcattcttccaaataaaagttgaattcaagcacaaggtagttggtgagctaatgcattgcccacacacgcctacccaactagaattgttggaagagtttgatgttgcgttgagatggcttacacgctccctacccttccataattgttggtctctttcagtgcctcagtttggtgttttcaacaagttgattggatgggatttgctttgtcttttggttccttgcctgttttggtttcctcttatgactttgctaccccaaataaagaaattcaatggctggggtctgtcttcactggcatcatcttctgtgttgttgtttatagattgactgctattttgagttctctgttgttcaagggatatggcaaattgagtagtgcagagaaaattgaatggaataaccggggattctcaacatttcatgctctgtttgcatcatttacgtcattttacctcttggtgttatcagatattttcaacaaggattcacatgaagaacttgttattaatagatcatccactttctcaaattcggtactggggatttctataggttattttctagcagatctggcaatgattctttggcatttcccagctttagggggtctggaatacgttttacaccatgggttgtccatgttttcaattatccaatctttgctatgtggtcaaggacagatctacatactaatggttcttttctctgagagcacaactccttttgtaaatctaagatggcacttggatattgctgatcttaagagctccaaactttacgtctggaatggcattgcattgttcttcgggtggttgattgcaaggattttcctatttatgttcttttttatccacatgtggacccattttgacgaggttaaggagatctacccattgggtttttacagcttgcttgtggtgcctccagtgttggcaatgatgaatttgttttggttctggaaaattgccaagggtttggttaaaactatatcaaaagcaaagcatagcatatgagcctaccaaatggccatttaattactttagcacagttgtgattaacatttttcccccatttaacttgcaagattcagtacagttctatgctgtatatttggcattaagcaattgaatatatttttccgtgattacatgtattctgaatcattacagaacaacaagagctaaaaccacaaagttatagaatcagccatcacatagttcaaagattctgtagcatctttcttatcttctaattaaccattatgactactatttgattgaatataactcaaagcttcagtttcaaaaaaaaaaaaaaaaaactcgagactagttctctc

SEQ ID NO: 138383 - DNA, 497 bp, Glycine max
  Clone ID: PAT_MRT3847_95969C.1
gtccgtgctatcattatcagatcaactagacaagttcagcgaatacaaaaacaagataaaggaaacagttggagaaaatagaatggccacaataatatcaaaaagcatatacgtcttgtgcacaggaagtaatgacattgccaatacttactctctatcaccggttaggagagcacattatgacgttccagaatacacggacttaatggcttcacaagccacaaacttcttgcaggaactttatggactaggagctagaagaattggagtaattggtttgcctgttcttgggtgcgtgccctcacaaagaacaattcaaggaggcatattgagatcatgttcagattttgaaaaccaagcagcaatgctcttcaacagcaaactctcatcccaaactgatgccctaaataaaaatttccccgaggctagatttgtgtaccttgatatttacaacccattattgaatatgattcaaaacccttccacatatggtttta

SEQ ID NO: 138384 - DNA, 504 bp, Glycine max
  unsure (1)..(504): unsure at all n locations
  Clone ID: PAT_MRT3847_9596C.1
attcacatcataaggtgtttgaaattcaaaattctcaacacttctctttaaccaatctcttctcagatcaatacaacaatgggttttcgtttacctggcatcagaaaggcatcaaaagcggcggacgcaccaaaaggctatcttgcagtctatgtcggagagaaattgaagcggtttgtgattcccgtatcatacttgaaccaaccttcattccaggacttgttgagtcaagctgaggaagagtttggatatgatcatcccatgggtggcctcacaattccttgcagtgaagatgtcttccaacgtataacttcttgcttgaattgagcagaaatctcagtataggagactgacatagattagaggagacattctgtataataggcgtcttctctaagtgtacagatccccctttctcaagagagaggaaatacanacataatatgtcattctattgattaattgcaatgaagtcagcaactcaagcagcttcgatctctatac

SEQ ID NO: 138385 - DNA, 682 bp, Glycine max
  Clone ID: PAT_MRT3847_95970C.1
cgaagactcggaatcgagttttcttctcttaaggaaaaatggcatcctctcctttgaactcaaaatctggctcccatggtcgctcaaatagcttgccctctagaccacaccctctcattctcaaatgcaatgaacacttggaaagcttaagggcttccaatgaaacctcttcttccttatcaaatcttagacataaggtaggaggattgcaagatctgattgagtgtgttgaaaaattgattcagcttcctctcactcaagatgtctttctccatgagtgtcaagagaattgggtggatgaacttttggatggatccttaaggctcttagatgtgtgtacttcagccaaagaagctttactgcacacaaaagaatgcacacgtgaacttcaatcaatcattagaaggaagaggggtggtgaagtggagttgacagcagaggttaagaaattcttaacatctaggaaggtagtgaaaaaggcaatctccaaagccttggcaaatttgaacagcatttcaaagagttgcaacttctcatctaccgcagacaaagatcaccgaacagtggctttgattagcttattacaagacgtggaagtggttacactttcaacatttcagacactgctgcaatttatctcaggatcaacacgatcaaagtcaaacaactggctttcaatttc

SEQ ID NO: 138386 - DNA, 740 bp, Glycine max
  unsure (1)..(740): unsure at all n locations
  Clone ID: PAT_MRT3847_95971C.1
ccggttaggcattcccgtctcgacccacgcgtccgacggctgcgagaagacgacagaaggggacacacactcacattcccactcaatagtatataatctctgtttcaactttctatcttcctatgatggctagctccaccgtcttgtttacactagtcgccgcattgttcgtaacctccgtcgtggctcagtccccggcgtcctccccagccctgtctccaaagcgcacccccgtgctggccacgccgcagaagtctccttcgccggcgatttctccttccgccgtgtcaccgtcatcctctcctcctgctccgacggtgaacgctccgtctccttcgcctacctccgtcgactctccgccatctcctccgttgtctccctccgattcgccggccggtgttccctccgtcactccctcagcaatctcctctccgccgtctgaagcaccagctccctctcaaaacggcgccgctttgaacagattcactgtcgctggatctgctgctgttgtcgttttcgctgctgctttgcttatgtagagactagagagggtttcgtggagtttttttatttattattatcatcgttccgaatttacgcggatcgtgaattctagtctaaaaaattcaatttttggttgctttttttttttatgctgtgtgaggattcattctttccattattttgnctattgtatttaagatgatgataatgatgatgaatgatactgcatttttatt

SEQ ID NO: 138387 - DNA, 349 bp, Glycine max
  Clone ID: PAT_MRT3847_95972C.1
cgaggttatgctgtactgattgacctgaaggtctagaaatacgatggtaatacatggtttgtggtactgtatttaaaggcaaaccaggccttgaaggatatgggaaaggctgctctggatattatgacctacgatgctgatcaggctggctatggttatgtagaagatcttgacaggaatactattctgatattggcttacagacctatacagatggaaacaattgacgatacaactagggtgtgacttgagcaagaatgcaagttgtcataaactgattatgcaggattggaaagaactatttgaggcgctcgcacggtcgcagagactttcttttagatgtcattgc

SEQ ID NO: 138388 - DNA, 670 bp, Glycine max
  Clone ID: PAT_MRT3847_95973C.1
tggaagaaacccagagttgacttcaactccctgtacatgtacatatcaaagctcgccgatataacaagtgaaggacatggatttccccgacagctatattgtagattcatagcacccgtaagacgtcctcaattataaataaacgggacaccaaacttgcacttataaattaacaccatcccgataaagtatttatatacaaatgctatttcattacatgtaaaagatgtttctatgcaatcttaaattcacctaaatataatgcaaggcgcattactgaaaagaacaatggaagaaaaccaaagttgacttcaactccctcgacatgtacatatcaaagctcgacgaaataacaagtgaaggacatggatttccccggcagctatattgtagattcatagcacccgtaagacgtcctcaattataaataaacatggtaatgacttttgcatatacaaaattttccccacagtttcttgttctgaaatttctttcagccacatatgtgggggtcaaaaaaatattggctagagtcatctgatgatagttctgccaaaagatgaagctccaatttcactctcagtattctgtgatttccgcgaagggaatacattccagaacctaagagtttcatctccagctccagtgacgatagtctgcccgtcaggag

SEQ ID NO: 138389 - DNA, 280 bp, Glycine max
  Clone ID: PAT_MRT3847_95974C.1
ggagaaggggagccttgtgtctaatggagaactttgatggcctgcggggtttatgtcccacccgactgataatgagctggtatggcagttcttgaggcgcaaagtcgtctgctgtcctttgacaatctttatcattcctgaggttgatgtatgtaagtttgatccttgggatatatcaggcgatattgagtccgaataattctcgatttgcaccgaagatgccggatatattatcggaaatcgttctaacatagctccatattattggcagacgattgcg

SEQ ID NO: 138390 - DNA, 115 bp, Glycine max
  Clone ID: PAT_MRT3847_95975C.1
ggttgtgaaagaaaatgggcttccgatcccagagcccaactgtccaatgctgccgatttgctggcctcggccactcgaatactctgaaagagccttcctcctaacaactctgctt

SEQ ID NO: 138391 - DNA, 2106 bp, Glycine max
  Clone ID: PAT_MRT3847_95976C.1
gtaaaataatgttattttagatgctgaaaataaatattcatacatcttcacatatggattactaatttactggttacattggattgcatggtctcagaataaataaatcccatttgattgagtgttgtgtagtctttttgttttacaaacctcgtcaattgattcaaaaatgataattttgaaccaattaaatgacattgacaacacttttatttttaaatggaaaataagattcttttatttgtaagagaagcaaaagtgcaaaactactataaaaaaaattataaattgtccttggtctttcagagttcgtccttgacatcatctgcttctttggttttcttaacgtcccgtgtacaaacccttgcttccttataaattctccctggtctgcaaaagtatcccttctttggtgcacagtgactatcttgtgagcaaatacacattccttccatcgcacacccatccttcaatattgtcaccccttcttgaagtccaagcatttggtcggtccaaaggctagagaacagtccttgtggatcatactcctctttaaccttcaaaaatttatctgcattatgatacttcttgattgctcctaaaaatgctaagtttctgtttttaccccagtggggtaaccccccatatttgaacaatccaatttgttctatctcttcaagtatgtcttggaaaagcctaggagccaatgggtctttactgcgatagtatgtgatgtcaaaatccacagcatcctctgattttccaaggtaagcactagaagccgtaacatagcgcatgagaattccatttgctgtttctaagccacacagtgactttggctccagctcaacaagcttttgcacatcttcgatgaagttctttacagcagacaatggaatgctaaatgctgtttggtgaaagaattcccctttgattctggagtcccatggacatgctgtgatcaatccatcatttagactatccaaacatgtccctgatgcctgcatccggttgctaaatccaacaataggatacccaagaaagatacctttatcatcattgttagacaatccgtaaccaatgcctgacagtgttgcagttatcaactttgcaccaacgcacttcccgttagcatcgcgggttgcttcttgaagctcctctgtagctctgacaacagttagtgcggccgagagtgtggggcgaaatggaaagaaatcatataaaccatttccagatttattaatggagacacgatcatcaattctatacacggccttctgctgacttgggtaccatgttacatcagcaaactcatgctttcttccaaaagtaaccaattcatcacctaaatcagaatcatctttggtcaaatatgtaagagatcgcttgaagagaggctctaatttcagggtaacctgggaaataactccaagaacccccagagaaactcgcgctgcattgagatgttgttgatgagattcgtcaagattgcgaaccttggcatagccctcgagccgttcagcaggagtaagaatgcgtagctcacccacatactcatgaaccgcgcttcctttgccccacaaagtgcttccatgagcacctgtacccatgagtccaccaatggttaaaccccaccaatatggtgtatatggcaaggccaatccagcctctgcacccttgctgattatctctctcagcgacacgccactctgcactgtcatcgtccttgcctccttgtcaatcttcaatatcttgttcagatttttagtgcttattagcaacccgttttcgccatcagggcaaaccagcttcgggatgctgtgggagaagcgcgtggcggctttcacttttcttttgttcttcgaagctgaggccaccgcggatatgagctcctcctctgtgtttgggtacataacctcaccggcgtggcaaatgcttcggtccggaaagacgccataggtgtttgtgatggtgcagtctgtgttctttgaagaacaccgaattggatcctctggaggagttgcaatcactccaccacagatcataaataacaagataagagaggatttcatctttttagtgttaaaagtgtttatctctcgagcc

SEQ ID NO: 138392 - DNA, 385 bp, Glycine max
  Clone ID: PAT_MRT3847_95977C.1
aaaacaacaaacacgtggttaatcttttcttcatggagatcattgttcagtcccacataactgacctcaaatgttacaagttacttgtttacttttgttcgtgtaaacatgatgcaagtttcaaaaaacaaaaaacaaaagagcttctcagaaagaagcatagctatactcattcaaggtgtcactgatagtagtatcagtgtcactgctactttgacttttctcattacattgtatgaatgcttccctggcttggactgacatggaaagatttgtgtttggaattgcacaatgcgctttctgtatgttggtagtggctgaaaagtaaggcaaccgcgcaacggtaacggcggaactggtagcagtagctgctggttcatggctt

SEQ ID NO: 138393 - DNA, 314 bp, Glycine max
  Clone ID: PAT_MRT3847_95978C.1
gttgcataggccagtctttggagtgcccgtagggtattgtaacccgactagccggtctgtggctagttcattttgggcgcttggactccggatgtgcccaaagcacttattggccgaaatgtagatgtagacctagatacaattcgatggccaggagcatcgatggtctgccctcatgctcgcgagggtggtgcctatgttgaataatgtacatctctgaatggactgatcactctatgaccgtgtgctatggctaccacacgattacctactggatacacacccaagagccgatggcacaacgccgacactgg

SEQ ID NO: 138394 - DNA, 241 bp, Glycine max
  Clone ID: PAT_MRT3847_95979C.1
ggacctatatgccgccttgagttcccactatggtggcttaccatgctctctgctgagattctaactaggactacctcccagacctgctacagcggagtgctgctccggaagattgaccaccactatagcgagacctatgatggatctgcatgtctagttactggactattgaaagatgataggactgagcacatggaacatgtagccgatgtatgaggcgcaaaatgagtggcgggccgta

SEQ ID NO: 138395 - DNA, 649 bp, Glycine max
  Clone ID: PAT_MRT3847_9597C.1
tacggctgcgagaagacacagaaaggtacggctgcgagaagacgacagaagggtacggctgcgagaagacgacagaagggaacacaaatccttccacttccaaaagcattcaaaattctcaacacttttcttaagaaattctcttctcaaatcaatacaacaatgggttttcgtttacctggtatcagaaaggcatcaaatgcggtggatgcgccaaaaggctatcttgcagtctatgtcggggagaaaatgaagcggtttgtgattcccgtatcatacatgaaccaaccttcattccaggacttgttgactcaagctgaggaagagtttggatataatcatcccatgggtggcctcacaattccttgcagtgaagaggtcttccaacgtataacatgttgcttgaattgacaataaatctcacactgtaggagactaatctataacatagattagtgaagacatttggtacaataggcgtcttctcaccttgtaaaaatctccgtttcttgagcaggaagggggaaggaccattagaatgacagattcatatttcatggagcatgtctctgtgtgtttaagcaacacgctgtatcattgtagtgactaccaatacatatttttatagagaattggtttctcactcagg

SEQ ID NO: 138396 - DNA, 142 bp, Glycine max
  Clone ID: PAT_MRT3847_95980C.1
gaaggaaagacattcgcacggtctgaaacatgtatcctgaactgaattggtgctgtgttgacgcaccagatgaatgcaggctgcgtacatggcttatgccagacccacccatgtcagatggtcaacagaggacgatggtaag

SEQ ID NO: 138397 - DNA, 352 bp, Glycine max
  Clone ID: PAT_MRT3847_95981C.1
tgctaccgcttacccctgtccttattttgcgaccatgctgacatgatagtagcgaacttctgaataaatggtacatcatactatgacacactctcactctttacaacagaggtttgatgacattttcactgcacacaggaaccaaattttggcccttacgttcatgcttgaagcccatgccaaaggaatcctgcctcatacccaagtggcttcagaggcagaaaaagtccctgaagatagcagacagaacccccaaaaggtggctttggagaacctttgagactcccacaagaagccacagtgctgtcaccattagcaactatcgctgttgaaccaaggcctgtagtatggg

SEQ ID NO: 138398 - DNA, 400 bp, Glycine max
  Clone ID: PAT_MRT3847_95982C.1
aattcggctcgagaaagtgccaagcctctatctcagaatttgtggccacggaaaacacaaaagcaaatatctgacccaatgttgaagtttgttcaagaactccatggagatttggaattggtgtacgttggtcaggtttgcctctcatgggagatcctgtgttggcagcacaagagagttcaagtgttaaaacaatgtgattcacaatggcctcgtagctataatcttgtggcgggtgattttcaactctttcaagtcctcatgcaacggtttttggaggatgaaccatttcaaggcccaaggattcggaattatgtcaagaaccgttgtcttattcgcaacttgctccaagttccagtcattaaagatgataatacaaaggacaagaaaataattaagt

SEQ ID NO: 138399 - DNA, 233 bp, Glycine max
  Clone ID: PAT_MRT3847_95983C.1
gaagatcggtagagggatgaatggaaatttacaactctaagatatagtcctgaagaggaggaacaccttgggcataaaaaaccgatcatcgagcttaacttctgatcaccagatacagaaaccaggctgtcataatgaaaacctattgagtcatctattgtaatcatgatagattgtcactattatacttctgctatcctacaagactctgcaggtttggttaatatctatat

SEQ ID NO: 138400 - DNA, 335 bp, Glycine max
  Clone ID: PAT_MRT3847_95984C.1
aaaaaaaaaaaataactatatcacagggagagcttcattttttaagggggaaaaaccctttaataatattctacaaagaaattcttaattttttgggggggaaacagccccacacgatgctgccttgctttacatttttaatacaaaaaatcaacctaaggaatttgatcgattagcggcaaaacccatgaatggggtttaaaatccaattttttttacaactgggactaacatgaattggggaacccaactagctaataaaaggacgggaggagaatttctagaaatggaaggaaaatcaaaattcccgcggtaccaaaaccagatattggggg

SEQ ID NO: 138401 - DNA, 484 bp, Glycine max
  Clone ID: PAT_MRT3847_95985C.1
tacagtattcttgtgttcgcagcgtttgttttgtcccggagcggtgttttttactcttgtgacgtctactcttgtaagccctctctcaacttcttgtcattcgcgcgatgccgaacccgaagtgcgaagcttgcggcaagactgcctatccccttgaaagtgttactgcccttgagaagaccttccataaaggttgtttcaagtgcaccacttgcaagacgactttgaatttgaagaacttcaagggctacgaaggccagatctattgcatccctcacaccccgaccccgaaggccacagctgtcactgacagcgtgctgatcaaggccgcagttaacgcgcccaagaagaaggctgagggcctcgctattgcgcaccgtggtgcacgtgagctcgcgccggccgccgccgacttcaccgtcaatgacacgaacgtcgaccagtcgaccgagaaccagcccgaccagtcgcacatccagtacga

SEQ ID NO: 138402 - DNA, 367 bp, Glycine max
  Clone ID: PAT_MRT3847_95986C.1
tgttccagcattcaggctttccgctggagtcggagttggcaacgctgtggtgttggagatcgcgatgaccttctgcttgacgttcacagtctaccccactgcagatgaccccaatacgggcaatttgggaattatagctaccgtcgccattggtgtcattgccggcgctaacatatagttgcggggggccttctacggagcagccatgaaccctgctgcgacatttgtgcctgctgtcatgagctggacctggaccaaccactggatctactgagccagtcctattatccgaggaggaatagctggtcttatgtacgatgttgtctttatgagccacacccacgagcatcttacgagcactgactac

SEQ ID NO: 138403 - DNA, 711 bp, Glycine max
  unsure (1)..(711): unsure at all n locations
  Clone ID: PAT_MRT3847_95987C.1
ggaagcagaagcaactaaagaattatatagcttcaatcatctgatcgagggcattgctagtatggcttcaggagtcaaattctcattcttcatagctcttttcattgttttggttgcagttggagctgctcacgaggggcatgatcacatggctccagcagaaccaccttctaatcatgcaagcagcctcaaaaaccatgcagtggttggtggactctttccccttctgcttacacttctcattgccagagagaggctttgaaaactctcagtttgccttaacagttccttgttttgtttgtgcttgttaactttattattgatatatgccatttacacttttgtcttattatattcttcttgtatgttggttggatttttgtattaataagctgtgttctgccggatgttataatacacacgcagtatttttcattgttcacgtgagaatctacttgtgattatgcatgagttttcatgtacttaataatcggaagacatacacaaatgttaaactatttaacggtgcttgtttacaaagtcaaattccacttatagcgacgagcttctcagattanatataattatttttcctcttatttgtatcttgcacacttggcaaaattggggcatgctaaaagccttagatgtttttcattgtggcataagggnggaattgttctttgtaccggtggcagtgtggcaccactt

SEQ ID NO: 138404 - DNA, 254 bp, Glycine max
  Clone ID: PAT_MRT3847_95988C.1
gaaaaacacaaactcatgaaaagaagaaacatggatcagatgaagatcacggcgctctcgatctttttactaggatgtctcttggtcatggctgtccaaggagattcatcagcaagagttcttccagttgaggtagggaatataaacaagcttggagtgtcatctcaaaaggaaccatttatgagaactggagctggtcatcacatgaggaagcaagggcttgggggaaagaaatttagcacaaatgaggtgac

SEQ ID NO: 138405 - DNA, 446 bp, Glycine max
  Clone ID: PAT_MRT3847_95989C.1
gttccattgatccaccaacactgtctctcgggttatctttgtcatctagtcaaagacaaacatcatcaacacattctgctttacatgcactgccatgcttcaacaatcaagatagcatcataagtgttgcttaagaaagataacatatctctgtggcccattatctagagctacattggattcacagagatgtttatctcttatttcctttctcttttggtgggagaaggataaaagatgttaaaggaaaggacgatgaatcagagaaggcaaggtaataagtcatgagaccaatttgatccttctgttccttgtacggaccctggaaaggtcctgtcatgtttttgtttattgtttattggccctttttttgtttgtagttactataactgaaaataaccaagtacttgctgttaatttttatgaatataaatatgggctatacc

SEQ ID NO: 138406 - DNA, 274 bp, Glycine max
  Clone ID: PAT_MRT3847_9598C.1
ttggaaggcgaatgaggggaagccaaggggggggttgcataagaagaccggggtgtgcttcattgataccatatgttgagccagacgtgcaagcccaaagtgctgaagctcactctgactccatccctgtggaggctgatagtcaagagggagttgctcatatcggtgaaccgacatctggtgcctatcgtccactgcctacaaaaactaattcggtggaaactcccacggaatggcaactggatctacctcgtgacaaaatacctaagtgctc

SEQ ID NO: 138407 - DNA, 662 bp, Glycine max
  unsure (1)..(662): unsure at all n locations
  Clone ID: PAT_MRT3847_95990C.1
gaaaatgcattcagtagacctaggaaggttcaataatgagtttcagttttttgtcaggttggagactttggcctgtctaggttgaaggatgcaactttattaactacaaaatctgggagaggcaccgtaatgacagcactcactttttcactttttacatacaaatccgccgcccggaacagctagtaacagtaaactcttcaaaatgttttagttactgaagttttatttctccctcttgctaacaagcatatttgctgtcaaaatgcagcctcaatggatgngcccctgaagtcctaagaaatgaaccttcaaatgagaagtaattccttggagctgtgacttaacagattgcattcaggctggaattttctgaaactttctgaaaaatggaagatattctaaaactgaatttttccagaaaaaatttcaaattgtcattttccataactatttgctatcttgtcctgatggtcttgaggaattgttcaatcagctttaaatgtccttttaagttttataatctttgatgagaaacttctaaatagagctgcatttctaaatgagttttttcaatcattgtcctaccttgtccagtttcaaagtatcacgagtttggaagttattctgtacttacaagtagtgcctatatcatattaaat

SEQ ID NO: 138408 - DNA, 204 bp, Glycine max
  Clone ID: PAT_MRT3847_95991C.1
acggacgacagaaggggggtttggccaaggggcaaaagagaagagatttgttgaagttggtacataaatggaaacggaggtttttggtggtattacgctatcatacgtgttcaatgctagtaccaaaatgatgctcctccaatatccatgcatgggtgaagtgggcaaaagcgaaagaaacatgaggaggaatttactttgatg

SEQ ID NO: 138409 - DNA, 390 bp, Glycine max
  Clone ID: PAT_MRT3847_95992C.1
tttttgcaccttgtcaaactcatgggtaaggaggctaggaactgaaagttaagctacagccacaaccctttttctagcctttttgaagtttatcctaatgtttctagttctaaggcttcatatcacctttcatcttagcaaatgcgccatgcaaacccacttctctattttatttttatttacagcaaagagagaataaaggaattaaaaactgcaaagagaaaaaaaaaatccatagcttcctatattttagattaagggtcatatatttagacatatcatgatacttaactcccaagatttctgataatactttccaagatgttaatagatccatctcatgttagatggttataaagatttaatgcacatgtaatgcattctttaacc

SEQ ID NO: 138410 - DNA, 1285 bp, Glycine max
  Clone ID: PAT_MRT3847_95993C.1
ccggattcccgggtcgacccacgcgtccgctcttcccttcttaactttcacctttaacctcagttttccggtgccttcgcgtcgctctgaatgtcatcggcggcgagaactcccggtggcgaggagggaaagcactaccctgctccactcgcccctcacgagggcgtcgtgaaggactccactctcttctgggacactctaaggcgctttcactttgttatgggtaccaaatttatgattcctgtgattggagggaaggagctggatttgcacgttctttacgtggaagttacgagaagaagtggctacgagaaggtagttgcagagaagaagtggagggaagttggtagtgttttcaagttcgcagctaccaccaccagcgcttcttttgtactcaggaaacactactttagtcttctttatcattatgaacaagttcacttctttaaagctcggggtcctatctacactccatcagcagatgcattttccggcaacagcccttcgtggagacctgaattagctattgtggaatattcgcctaagcctatggataatagtcctgaatctcgtgctgaagatacttcatgcctttcaggaaatggaaccatcgagggaaaatttgactgtggttatttagtgtccgtgaagcttggttcggaggttcttagaggggtgctttaccatcctgagcaattggttcctcaccatcgattccaaacatgagagtgccattgtaccaatcaaccgcaaacctcaccgttctggtcgtaggaagaaaaacaaaagaaggtgggaccccaattatccaaagccgaataggagtggctataacttcttctttgctgaaaagcattacactctcaaaactctctacccaaacagagaaagggagtttaccaaaatgattggccagtcatggaacagtcttagcccagaagaaagaatggtttatcagaacattggcttaagagacaaagaaaggtacaagagagaattgacggagtacaaagagaagatgaagcttaggcagacctcagaagttggacgtccatagaatctcattggtacccgtttgtggaggcgaaagaatggcttagaaaatttttataatctgttgacttttacgtgcatattgttgtggataatggtccactggactgtggtctacagaactattgtttttttcttttcaaaagagaaaactagtgtctattgttagtcagagaccctttcatttcgtttaatcaattaattatcctcccaagtttgttctctgttagaa

SEQ ID NO: 138411 - DNA, 392 bp, Glycine max
  Clone ID: PAT_MRT3847_95994C.1
ggctcgagccctcattcttactacatgcttgaaatctcgaccgcgcacactctgactgtgcgcagcctgacacaaaagatatactatgccgaacactatgtagaagcaacaatgtattgcatggcctcatatgtactgaggaggataccatcgcatgcagtcacaaatagattaatgaactactgatcggaacagactgcttggaacacgtgagttgcagatagatgatgcggggtgcttccataatagcagatctagaacaaggtgcattgtacatgtgaactatggagcgaacacgctcagccagcctagactcggagacgttccgatgatacagaactgcatgcacaaatggggtgtgatccgaggctcacttattttcctatagcagc

SEQ ID NO: 138412 - DNA, 273 bp, Glycine max
  unsure (1)..(273): unsure at all n locations
  Clone ID: PAT_MRT3847_95995C.1
aggaatctgcttgtctagggacgngaaaacgggtcanaactattccgtgtgttgatgacactgaagggattgataataacatgagtgatgatcagaaaaatgacaggagtattctttcaaaaactccacggtttttgaataatttacagaaactagagtcagcatnctttttgacacgatgcaaatcagcctattcctcagggaaacttgcggttcaacattcacctattggtactgatgaaaggacagtgtcaataaagtagcattaaaaga

SEQ ID NO: 138413 - DNA, 222 bp, Glycine max
  Clone ID: PAT_MRT3847_95996C.1
cccaatagaagcatatattatctatctgttggggcatgctgcatccacctggatcagactatttgcatggaaatgtctgataatattcatgtccagatgtctctccttttattatctttccagaggagtcatctatcaagagcacggacaatggcaaacaacctattcttatcttagtttggcgaatgcattcaaatacccacatttgacttgacacgatca

SEQ ID NO: 138414 - DNA, 579 bp, Glycine max
  Clone ID: PAT_MRT3847_95997C.1
ggctcgagttatgacaaacactccatcctgttttttttagtaactgctcaaacgactttccaaacaaggaaaccgagtcctctgcattcttcaaactccaaagcttcacttttccctccacgtttcactgatttctaacccaaaccctttccctgaatcccatttggattaagctgcattatatcctgttttactctgttttttttttcctcttcttctttctcctctgtttcgatgtagtattttttacttgcaatttgtcttctctgttttatgtcaagtccatccttggtttttattgtttctgcttatgaagaaacctcaaagacattaacctgagggcacatgatcgtgagaagagtgaattaaattaacatatctgtaccaatacccatcaagtttgttcattttctaaaaaatgaactacttgtatcctgtgaaagaagagtacttggaatttcaaccaccgtcgtcgtcgccagcttcgacgttaggagtcgatgagccttcaatggagactcctttcctagattcgttaagcacaacaatatctcaagcttcgtaggcaacttaacacct

SEQ ID NO: 138415 - DNA, 754 bp, Glycine max
  Clone ID: PAT_MRT3847_95998C.1
atttgagcttgttggcattcctcctgccccaagaggcatgcctcagattgaaagtcacatttgacatagatgccaatgggattgttactgtctctgccaaagacaagtctactgggaaagaacaacaaatcaccatccgttcatctggaggactctcagaagatgagattgataagatggtcaaagaagcagagttgcacgctcagaaagaccaggaaagaaaggctctcattgacatcagaaacagtgcagatacaagcatctacagcattgagaagagtttaggtgagtacagagataagatccccagtgaagtggccaaagagattgaagatgcagtatcggatttgagaacagcaatggcaggagacaatgctgacgaaattaaggcaaagcttgatgctgcaaacaaagctgtctccaagattggagagcacatttcaggtggttctagtggcggttcctcagccggaggttctcagggtggtgaacaggctcccgaggccgagtatgaggaagtcaagaaatgagacatttaggcttggttttgtagcatttgtttcttattaatcatcacataattggaagaatacaaggttacttattttgtatctaatgttgaaaaccattttttgctggaaggctctttaatttgtagcacttttggagtccaaagtccgaacacggctgtttgaataacttcgaattttttgcataaaatttgttcactacgtttggctctgctaaaaaaaaa

SEQ ID NO: 138416 - DNA, 675 bp, Glycine max
  unsure (1)..(675): unsure at all n locations
  Clone ID: PAT_MRT3847_95999C.1
gttcgttgacgtcacctacccccctccaaagcccgccggataatcttgcccacgagcgtcccactaaagtggtcgcggctgtgcctttctttcgtcctgaaaccgagggccccaaagtataaaccttggtagtgggtaggctccggccgtgtatgaatgggatcctacaaatgcctcgttggagaccccggcgaagttgcttttagaccaaaagcttcttcagtcataagcttatgaacttctaatagttaccaattcccccatcaaccaaacacttcttaaccaccaacccttcttaaaaattctcaaccaccttagtttcgacaaaacctgaagtaaaaacctccccagnaacctaacctcccctccttaccttgaagcctaaagacctctcttttttaaagtaccttaaagagttgtttcttcttttcttcttcgcacggaaaaagttgtcttcttggcaagcgtgtgatttgacccggagtgccttggaatctggacggaatttctttgaagcctttgcttctcgcgggaacaacatgcttcttactcggcaacattgaacttgcttttcagggagatcgatgataacatggaggaagcctaaaaaaggcgaaccttttttaacctaccggacaactgtatgtgaagaatattataacaagcagtcgccgg

SEQ ID NO: 138417 - DNA, 250 bp, Glycine max
  Clone ID: PAT_MRT3847_9599C.1
tgagctgacctcgccgggatttctagaaacttaacaagtttgttgggtgctcctggacagcagtatggccaacttatttgttggataattgaaagcagaactatttgcattgtaatggtacagaattgatttgccgccaagagctgcattgaaagaagttttctatgaggtcaaagcgtggctccatccaatgagagtcttcgagcaagagagaatgctctgatcaagttatgatactgtggcatgatgt

SEQ ID NO: 138418 - DNA, 2301 bp, Glycine max
  Clone ID: PAT_MRT3847_959C.1
ggctcgagggaacacattgagtttgatactaagttgggcagagaaaaggctccttgcataccatcatacttttcataatggcaatattgaatcaatggaaagtgttatttctctcgcagtgttatcagcaaagatattagaagatatctctcatgactacaatcggaagaagaaagatgatgtggactacactagagttggtaattatattagatcatctttgcgtactgttttcattaagaaattggagaaactggacctctgcaagcatccatctagaaaacagaataaagcctttcccattctttctgtccttgcacgagatattattgaactggctatcaacgagaaagcaatatttagtcccaaattgaagagatggcatccacttgctactggtgttgctgttgctaccctccatgtgtgttatggaaatgagttgaagaagtatgttaagggtattaatgagttgacacccgatgctatagaagtgctgatagctgcagacaaattggagaaagatctggtgcagatagcagtggaagattctgttgacagtgaagatggtggaaaatccattataagggagatgcaaccttacgaggctgaagctgtaattgctaccctggttaagtcatggataaatatcagagtagatagattgggggaatgggttgacagaaatgtgcgacaagaggtatggaatcctggggaaaataaagagggttttgctccttctgctgttgaagttctacgaatgatagatgacactctggaggctttctttctgttgcctatacccatgcatgcagatttgctttctggattgatgtctggtctcgacaaatctctgcaacagtacattttgaaagccacatctggctgtggtagccgtagtagcttcatcccaactttgcctgcattgactaggtgttcaacaacatcaaaaatggtgtatttaagaaaaaagaaaagtcacaagtgactcagaggaggaaagcccatgtcggaaccactattggagacaactcaattgatataacccagatgtgtgttcgcatcaatactatgcagcgcattcgcatggaattaggggttttggaaaagaggatagttgccaatctcagcagttctagatccactaatgcggatatagcaaatggggtgagcttgaagttcaagctttccgcatctgctgctgtggaaggcatccatcaactctgcgagtgcatagcatacaaaatcgttttccatgaactctggcatgttatttgggatggcctttatgttggagaagttgcatctgctaggattgagccttttcttcaggagcttgagcaatacttggagattgtatcatctacagtgcatgataaagttagaacacgtgtaattgttaaagtaatgcaggcttcttttgatgggtttctgttggttttgttagccggaggtccatcacgtgctttctctctgcaagattctgttatcatagaggaagatttcaagtttctgactggcttgttctggtccaatggagatggattgccagctgaattgatagaaaagcattctaccactgtcaaaggtgtacttcccttgtttcgtgctgatactgagcacataattcagcagttcagtcaacttactatggaaatgtacggttctacagccaaatcccggcttccattgcctccaacagcagatcaatggagtccaacagaaccgaacacacttttgcgagtcttgtgtaataggaatgatgaggcagctgcaaagttccttaagaagaattacaacttacctaagaagctctaacaattgacaagtaaccactactctgatatgccacgcctttccacccaatataaatttgaagtttgttcgttatgtgttgtgaaaccctggcctagtttttgaggatgtgattcaggtaaaggtggtacggtatgcattatacacttactgatcaactctaggaaatatgatgctttatcatcaataatgctcaaaagtataaattgtacaggagtgattcttttgcctttgctaatttgttggcttgttttcagctcgtgccaaaacacaatcactgacaccatggtaatacagagaagtatttacaattagttattatttgtttttataatttcaaaattaatggtctatttatttgtgctgcattgtaatttccccccacaaactacttcagcttgatcttgatcttgtaaatgaaatgaaattatttatttgtgcgaaaaaaaaaaaaaaaaaaaaaaaaaaaaaagcggccgctctagagga

SEQ ID NO: 138419 - DNA, 267 bp, Glycine max
  Clone ID: PAT_MRT3847_95C.1
tcacaataggccccccagttaaaattaatttacataatgttacaaaaaaaaaaaaaaaaaccgctttcaaaataaagcataacaagcctgatcattataactggaaggcaaagccgtagggaaaatgaaaaagttaaaaaaaagcccttttttgggttgccgtttttttaacccacttttaacgcataagtttccagggagatttttttgtaaacgtgattttgagccatgaaaacgggaactcaaacatgcccaaagttgttgttt

SEQ ID NO: 138420 - DNA, 183 bp, Glycine max
  Clone ID: PAT_MRT3847_96000C.1
agaaaaagaaaaaacaaactaaaataagccaaagcaacagcagctgccacaacgtcctttatggggaacgcgtctcctggaagctcactccggagcggggacagtgcacgcccgattccgcgtcggcaagaaaaatgctaccgccccaaagacagcctttacgggatccggccgtgacaccga

SEQ ID NO: 138421 - DNA, 1173 bp, Glycine max
  Clone ID: PAT_MRT3847_96001C.1
aaggctacaaaactaaacaccttgttgattgcgttgcaaacgctggctagctcgtttcccaaacggtaacgttgctcccgcttccctccgcgtggactgcgttgcccccacccccgccccccaatgcgttgggtgacgaggtttcccagcgtcatgagcactacccgtgtgggtccgaacatgcaacggaaccctatatcatttacaactgccaatcagttcatatagcgcctgcaattttttgaattgcagtaacatggaatctttccttcgtcttcgtgattaaagtggtaatcatacgtaatctcttcaccaggaaatatgtccctctctgccaagaagacaaccttcttttcatgccttacggtgatcacttttgccacgcaatttggcaggcatgagtggttcacaaatcgagcaatcccccctttccttgtggcatcaataatatgctctttgtctatcctgaagaagtagcaggcagtcttgtactgaagtttccttccagattgatattccttctctcttttatcagccacacgcagccccacaatttcaccaatatactcaacaaccatttcaccccgggaaatgaatcgagaagtgtaaagacctagagcatgtatacgggacttgtatacaacaaggtgtttccatccctttgcttgtttgtatcgagcatattcctttcgacaatcatgctcaatatctaaatctgggaattttggaagtccccgtgaacataatttctgcccattaatgtgaatccaagcatttagctgctcctcaggaacaaggcatccaccttggcactgattattctgaaaaccatcccacctacggcccttgtaaccctctgccctggcacaggtgaattccttttcttcttgacttccaatttcatcaagaggatcatatatgggcagacatctaggttcaataatatgaagcgtgcatcttccataaaatccaatcttctcatcatcaatgccttcagtctcactttgcaagaggttcacatctgctcttggacgcgaaacaccagatacatcaaaagcactcatggtgtcaacattcggccctcctgtccattcagtcaggaatctgcgcaccagcttaatccattgctttccggttagatcaaatccggcgtcggtgatactgatatgtacc

SEQ ID NO: 138422 - DNA, 916 bp, Glycine max
  Clone ID: PAT_MRT3847_96002C.1
gacttgctactcaatcttcacttattgacagattcacggcgcacgagccctagctcttatccgtgccgttgaatctcgccgtccggctgctgctgttagtcgacggagctctcctactattcaaaacagaagctatgaaatcgttcaatataaatggaaccactctttctgttgcactctacactgacgtaacaaattcaaaagaactcttggaaagtatgcaagccgggacattggagccagaagttgcattcctcaatgctttacttattccagatattttccctgttctagcagctgcacacaaaacacttgtagccaagtctcgagactctttgaccacacgcactcttcattcagagcttgtttacaactactcagggtctaagcatattactgaatctttgaaaagatgcggcatctctgacagcacaacttgtatccttgctgctcgatttgatgctagtcctgatgagataaaagctatagggaagctcattaacggcaaagagattgacctggaggagctagaagggagagcaaaccaatcccagatacaaaagatttacaagatatcttcctcggaacttggagtatcatcacttgctgatgcaataacttgtcgtatagctgctcgtgatgccctgtgagaagaatgaacgtgatctgcttgagttttcttatctccttgatctattgcagaaaatgtcatgaaatttataagaaagcttcaggctacctttatatatactttagctttcatgtgctgtaatgctgatgtatttttttattatcattcttactgcagtaacatttcttatggaaaataaaaaagtagatggtcatttgatctggtatatgcttactggtcatgaaatgcatgctgtaaaaaaataaatgatacttcttgagttca

SEQ ID NO: 138423 - DNA, 526 bp, Glycine max
  Clone ID: PAT_MRT3847_96003C.1
tcgcccatgcgtccgcttgattcttttggtacaagttatagttcaaaatcattagttacttttaacggacaaaatgtcagaaggagaaaacccagctgttacgcgttttagagattatttacgtattaagactgttcaacctaaccctgactatgagtcttgtacaaattggcttttagaccaagcaaaagaaataggcttgtcctcgcaagtgtttgagtacgttaaaggaaagccaatagtcctattgacctggattggtcgtgacccagaattacccgctatacttttgaattctcatactgatgtagttccagtttttgaggaaaaatgggcgcatgatccatttgaagcttttaaaggcgaaaatggtgatatttttgcaagaggtgcacaagatatgaaatgtgctggagcaagttatcttgaagctattagatgtcttaaagatcaagataaacaaccatgtcgaacgattcacctttcttatgtgcctgatgaggaaattggagttgtgatggaatga

SEQ ID NO: 138424 - DNA, 347 bp, Glycine max
  Clone ID: PAT_MRT3847_96004C.1
attcacttcataatcaaaatttctttttttataatcaacagtgaaacaaaaacaaacacactcctaaccaaccaccacataatcaaccttaaaaaaatggccatacaactattataaacactctctaaaataaaacaaacaaatttcaagaaattactttcaatcaaagaaaatactttacaaaaatcaaaacaacaaaatttataattaggaactgaaattacaaatgctcctataacaactttacacatgtatcaaacccttggttctaaaattctgccctaaaccaacataccttcaaaaacaccctaaaattaaaagcttgctaccacatttgctataaattg

SEQ ID NO: 138425 - DNA, 822 bp, Glycine max
  unsure (1)..(822): unsure at all n locations
  Clone ID: PAT_MRT3847_96005C.1
cttannnttgatttaaagggaatactcaaaatcttacnnnaaagtctaaaatattaatcatagttactaaaaaaaattacaatacgtaaaagctaaacgataaatgaaaaggaaaaaagaatgtgcaagaggatctgcgctagagattacgcggtgaggtggggccatatgtggtagaagaaaagctacaaatcataaatcacgcgagatgaggatccaacgcgagtgcacattcgtaacccacgtgtaccttccatccactgttcaatttctgctacaaaaagtcaaatctcatgctaacaccatggacgccgtgggccccacacttccctccaaaaccagtgtcgtaagcagtgacctccacacgcgcgcaccatagttgctagtgcgacacgtgtcctcttacctatcacccaactccttttctttctttttctaaaaacctgccattgaaataaaaggaaatgtaaaaggaatcagaacacgatacaaaataataaggaaatatacatttcacaactatataatagagaataacggccattttttttttttactttaaccttctgttagcttatttaatattagtatttattaaattctaaaattgtcaccttaactaattaaccgtggaatcatcaattacactaatactagacgatgnnnaataaaagacaaaaaaaagnnagataaatgatcnnagggtaatgtaataaaactttgaaaaagtgaataataaaaaagaannnngcagtggctaaacatgtgtattctnnnaactngtgnctccnggcggcacgtgtgnnnntatcggcnatnnnt

SEQ ID NO: 138426 - DNA, 1516 bp, Glycine max
  Clone ID: PAT_MRT3847_96006C.1
acgcggcccaaccacatctgcgcacacaacacagccatccctgtctcaccccttctcccgcgatctggcccctgcatttctactgcatatcaccttagctcctttgcagcgccagttgtacttacattcaagactcaatatggagctgagtgctataaaagacgcttttgaccgtattactataaagcaaaagttatcttgttccaagactcaagaagcaattgatctgatcaagcaggaaattgagagtgttttagacacgctgcagtcagtgaataacactgaccatgaacttgattataaaactgtcctgaatgagcttaaggccagtttacttaaaattgctccacttagtcaaatggaaggtacacagaaggagctaaatttagcactcaccaagtatgggaagcttcatgagaaacattttaaccctgatatatccaaggcttacagaaatgtcgacattgatatacatacattaaaccaaataattgccaaccatttttatcgccagggcctttttgagataggggatcaattttatgagtgtgggatggagagctagaatccgcagccattatgaaatctccatttctggaaatgtatcaaatacttgaagccatgcagaatctgaacctagagccagccctcaactgggctgccactaatggtgacaacttgctcaaagtggatctgatattgtgttgaaacttaactccatgcaatttgtgaaaatacttcaaaatggaagtagagaggaagctcttcattatgctcgaacacacctttctccttttgctaccagtcacatgactgatattcagaaacttatgggctgtcttctatggacgggaaagcttgatcgatctccttaccatgcattactatcagcatctaactgggataagttggccgaggaacttaaaaggcagttctgcaatcttttgggacagtcgtataatagtccattgagcgtgactgtagcagcaggggtccaggttttgccacctctcctcaaatttatgaatgtcatggcagggaagaagcatgaatggcagtctatgaaccagttaccggtgctggttgagttggaccgtgagttccagttccattctattttcgtttgtcctgtctccaaggaacaagcaactgaggataaccctccgatgttaatgtcctgtggccatgtcctctgcaagcagtctatcttgaagatgtccaagaatagcacaaaaatgtttaagtgcccatattgtccctttgatattgatgcagcacagtgcaagcagctatatttctgatgtttgatggatttgtatgaaactcttgtataaactgaatcatgttttagcaatagttgtaaccacgtttgcaaaggcccattccttgttgtgatttctgtattagtgtatttcataaatttgttgtaaatataaattattttttaatctggatatgactggcaagtccttcattaattaataattatcagaaatcgttggaataagctttgatc

SEQ ID NO: 138427 - DNA, 524 bp, Glycine max
  Clone ID: PAT_MRT3847_96007C.1
gaccacttcccatcttcgcacacaacacagccatccctttctctcccttcttttgctctctgccctaaccagcctcaccagatcttttacctccatttccagtgcatcacaccttagcttcaagccatcacaagttgtagatacagttaatactcaatatggagctgagtactataaaagatgcttttgaccgtgttactaagaagcaaaagttatcttgttccaagactcaagaagcaattgatcagatcagacaggaaattgagagtgttttagacacactgcagtcagcgaataacactgaccatgaacttgattataaaactgtcctgaatgaacttaaggccagttttcttttaattgctccacttagtcaaatggaaggtacacagaaggagctaaatgtagcactcaccaagtatgggaagcttcttgagaaacatttcaaccctgatatatccaaggcttacagaaatatcgacattgatagacatacattaaaccaaataattgctaaccatttt

SEQ ID NO: 138428 - DNA, 414 bp, Glycine max
  Clone ID: PAT_MRT3847_96008C.1
ggcagggtaaaagtaacggagtttttgttgcttggttactctgatattctgcattttctcgtttagttttcttcagcattcaacaaacttcttcaccctctctatcttccaatcctttttttccattccctactattccctatcatctttctttgtgttctcatctttttccttttcccaaggttcgttgtttcttcttcttcttcttcttcttcttcttcttcttgctgttttttccttctaattctcacttctctttcttcaatttttccccttttgggtgatcggggatttttgtgcctggatatgggtttagggttttttctttaatgatcattggtgtgcatgtttcaagtttgatgtattggcagtggaaatcaagggttctttttgtgttattggatgcaaaagttt

SEQ ID NO: 138429 - DNA, 558 bp, Glycine max
  unsure (1)..(558): unsure at all n locations
  Clone ID: PAT_MRT3847_96009C.1
ggctcgaggctaaaagaaatattgtggaacgtgaattctgacgatgcacttcaagggatgtacaaacccatcaaactactctaccatcccaaagaccttttcgttctcatcaggcagccacaaagaatcatagccgtattcccaattcgtttcaaagaaaagtcagatgttatcattgcaacgaatttctttcaggagtttgtggatgtgggaaattcagataaatgagccaaggtaccaccttgcaactggtcagccattcctccaccagagttaagaggagaagcttttgaggatttgagtaccaatggagggtttttcattttcgatatctcttctcgccgtgttgaaggcaataggctagacaaaattgtctggaatgtagaatctattaaattttaatgcatatgttagctaccatgtaaagagcaccaaaggttttattctaagaaggatgaggaagcgtttggaaagttatgtgaggtgtcctgcaccanacaaactcagaagaaaatgaacaaaccatnacatatcaagcatgtaggtacacgaagaaac

SEQ ID NO: 138430 - DNA, 235 bp, Glycine max
  Clone ID: PAT_MRT3847_9600C.1
attatttttactaggagatacggccttcatggggggcagctttcattaaaattacatgacctcatacaaacgaacatatgatccgtcagctagatccatctgcggttagcaacaaatggattgaaaaatgatcaataactaggcgattcaaatgaacaacctgtgtgaaaagtgacccctctaatttaaaacttcatcatcctctttaatgaaaattcaaaactctctattacaa

SEQ ID NO: 138431 - DNA, 728 bp, Glycine max
  Clone ID: PAT_MRT3847_96010C.1
atttggccctcgaggccaagaattcctcatgtatggtaaaggtatatttataggaacttacatgattacgtgattattacaaaacctttactgcatacctgctaattatggttagtttcctcactcaagcacacaaagaccttccttatttcctatttccaacctttccaacaactgtgttgttgagtcttacctacaattccttttgtctgttatcacatcacttcacacatacactctttcttgctttctttccctcttttttatataatactatgatgattatgcaaagaaagaaaagagaaacacacaatgagtaacacaggctgtttctttgagaaaacaagcttgccctggaaaaagaacaccagaagatcatccaggaacaagcttgggaggagctgcaagttcaggcttccttggtggtctgaattgtcccccattgagtttctgaaggatatcgcagataaagtgacaaaagctatatgcttgaggtctgcgagaaaatcttcaaaccgaggttcgtcttccatgggaagatcaaaaccaattggggtatctgttgattattataagacatcacctgttgaagactgcatagagttcatccactccttcttttctatatcaaattctgtaactgcaacaccaggagaagaatttccacatattcatttaagaatattttagtcatataccgtgaaattaaaaaattaagatggctttct

SEQ ID NO: 138432 - DNA, 153 bp, Glycine max
  Clone ID: PAT_MRT3847_96011C.1
cgggtcgactcacgcgtcagcccgcgcctacaacaggagcgaaagagagactcaatggggcactcttcttcgtcacactaatcttcgaaactacacgacagcctatgtggtcgaaaatggcaaatgcccctcttcgcgtacggaaggttggag

SEQ ID NO: 138433 - DNA, 116 bp, Glycine max
  Clone ID: PAT_MRT3847_96012C.1
ggctcgagcgcaaacactgctagcatttgtaaattttgtcatcgaaacgcaagaaatggacggggagctactttgagaccgcgggaataataaaagactagcgaacaacatattta

SEQ ID NO: 138434 - DNA, 760 bp, Glycine max
  Clone ID: PAT_MRT3847_96013C.1
gatcgcaagaagcataaatatgttgaaatgaaagctataaaaggttgggccgggcagattcttcatggcttagtatatcttcacagtcacaagccgcccattattcacagagatttgaaatgtgacaacatctttgtgaatggaaaccaaggtgaagttaagataggggaccttggtttagcaattgtcatgcaacaaccaaccgcccaaagtgttattgggactcctgagtttatggctccagaactatatgaagaggcatacactgaacttgttgacatctattcttttgggatgtgcatattggagatggttactcttgaatatccctatagtgaatgccaaaatcctgctcaaatctttaagaaagttacctcaggcatcaaacctgcttcccttaataaggtgagtgatccccaacttaaggactttattgagaaatgtctggttccagcatctgagagattgtcagcagatgagcttcttaaagacccatttctacaagttgagaatccaaaagatcccatcctttatcctttacaacctcctagcagaacactgagagcatattcattcaagtctggttctctatctatggacatgggattctgactacaaacccgttttctatgagcatttattctgaaagcaaccaggaaaacccacattgtcctatttttggaagtgcgaggacctattagaaccaacagtttaagttgaaagggactaaaaatgatgttaattccacgttcattgaccc

SEQ ID NO: 138435 - DNA, 310 bp, Glycine max
  Clone ID: PAT_MRT3847_96014C.1
tttcttttttttttttttttttttttttttttaaaaccctacaatctaattatctttttagatttatgcaaactgagcttgcctgtgatcatatcaactacagctctacgatcttttttattccaagggatgacatggctacaatccactttattttatacgcaacacatgatttacttacaagcagacatcatctgtgcattactccccgaaaacaaacaataaaattgaatagcaaattcagagctatcacatcttcttgaccatttattcatggtccctgccaggattattcttttaaacaactttt

SEQ ID NO: 138436 - DNA, 158 bp, Glycine max
  Clone ID: PAT_MRT3847_96015C.1
aaaacacaattgagtttttttacccaatgctaataataagccattccttcacctcaatataaacctgtcttaacaaaatcttgtaaaaccaaccagcgggtatatttcttagataccaaaatcataatattcttacactattaatcccaaatctgtta

SEQ ID NO: 138437 - DNA, 109 bp, Glycine max
  Clone ID: PAT_MRT3847_96016C.1
gttgaatcttgtcctgaccatcgacgaggatgcaagcgaagttgatgctgaaatgcccccactgaatgacgactatgctgatgctcagggcaacatgatggaggaggtt

SEQ ID NO: 138438 - DNA, 201 bp, Glycine max
  Clone ID: PAT_MRT3847_96017C.1
tatatataatatgggtgggattcaagttactccactacaaagttgtctaggatactcgcttgtaactaattggatagaaccggtgaaatttgtatatggcttatatgcaaatttgcatctgtaatctccaaagcagaactatgctgtgtagatgacataatttttcttttacatgagcaggaaagcaaccaagggtggcaa

SEQ ID NO: 138439 - DNA, 419 bp, Glycine max
  Clone ID: PAT_MRT3847_96018C.1
cgggaaaaacttccccgattataatttcattcaatcggtgggccccaaagggatagaaagacagacccccaaaccacacgacacctaaaattacggaacttaatcaaaaaccctaatcttggccatccagctttagtttccccgggttccattgacatcgccaccacgagaggggggggaaccaccggcaccggaaccacaatttttggcaccaccaaaacccccccctccatagcctccaccacgaggggtatatccaccttaacgacaaccaccggatccaccgggggtgccgggggactgagcttcgttcacagttatgttacccccggaaagggtttgaccggtcatcccttggatcgcatccttaattgaattctccggggggaagggaacaaatccaaatccccgggaccttc

SEQ ID NO: 138440 - DNA, 575 bp, Glycine max
  Clone ID: PAT_MRT3847_96019C.1
ggggcaaaaaaaaaaaactcttggtaacaggacttggcttttacaaacataatatactatgggggatctaaaccaaccccaacctgggaaaccggccaaaaaaaaagggaatttttgaaacccccccctgaaaaccaagatcaaggaaaacaatcaattaccccaaaatcatggcccccaatcaaaaacccctattattttattacaaaaaaggggataaaaaaaggggaaaaaaaatctttaaaaactgaaaaatcaagggttgggtcaaaaactgggcagttgcgttaacatgggaacaagctcatcactaaaaggcctatttgggggcatatcaaagaggggtgcggcagcaatcctaaccggcattaacatttaattttcctcacctttttcccctaacatggttttatttaaagcttcgggcgccccccccgtttggtggaaggggtttaaccaacatcccaaacttcccccactgggtggttttccaaaaaagggggctgggggatccttaccaggtaacaaaacacctattatcatgccaaaactaaaaagggcacttttggcagggg

SEQ ID NO: 138441 - DNA, 444 bp, Glycine max
  unsure (1)..(444): unsure at all n locations
  Clone ID: PAT_MRT3847_9601C.1
gatacagcagcgaagaaaacacctccgaacaagcgcattttcaaaccggcaggccacaagaccccggcaccgaccgnacctacacaaaaagacaaccaaaagacgccccacacgccgcgaaccaacngagcaaacgcaaggaaaaaaaaaactcaccccgcaaggggcactctcccttcaaagaagcactggaaatgggcgtagaagtataccatcatccaaaggctgctattaaaaagaaatacggtcaggaagctaccaaccgcggtgatgaaggtggctctgctcctaataaccaggaaaaccaagaaggtcctgagcttctgaagactgccattgccaaagctggctacaccggaaaggacgcaatcgggacggatgcagctgctccagaaactgaagataacaaggaccaaacccatgacttgcaatctaaggaagaga

SEQ ID NO: 138442 - DNA, 241 bp, Glycine max
  Clone ID: PAT_MRT3847_96020C.1
ctgcgagaagactacagaagggcaaagcaaagacaaatctttctcacaacctacaaactaggtgtgtttgaacagcagggcttgggttgagccacaaaagcctaagctgaagctgaagaaggttgctgttaaagtcaagaagattgtcacctggggtttgatgtacacgcgagtgggttctttcaggtgctgcagttctagggctgagatttcttgcactctgaccaaatagtaagaactt

SEQ ID NO: 138443 - DNA, 257 bp, Glycine max
  Clone ID: PAT_MRT3847_96021C.1
ctatgcagcttggtagggaacttactgttcaaccgcagaatattccatatgaacattttgtttggtgactttgatcaatagaaaatgcaggccctgcaaatattagttagcactttccaaagaaaaaaaaggagaagtaacaacattgatgaatcggagaaaatgtaagatacattcaacagatgtgtaactcaaactcacctatagtcatttcacccatgttgtgtacttgttttatcttagtcttacgtttcgaa

SEQ ID NO: 138444 - DNA, 2009 bp, Glycine max
  Clone ID: PAT_MRT3847_96022C.1
ggctcgagctagtcctagaatgacaagtagaaatgatgcatggactccttcacaatcaggaataggagaggatattcaaggaatggatgatttgaaccttgatgatccaaatccggctcaggattcctcttcctctacacagaaagttgatgaacgtagtaaggaacaggtggaggattttgatcttccggatttcgaggttgtggataaaggggttgaggttcaagagaaggaagaagatggaggagaggaagctgaggaacctgtccaggaggaatcaacttcaagtgaggttgtcaaggaagtagtgcttgatcatgtgcaccttactagattgtcagagcttgattcaattgctcagcagataaaagctctcgagtctatgatgggagaagatgataagtttacgaatgtagaggaagagacagaaccacagaggctagatgcagatgaagaaactgtgactagggagtttcttcagatgcttgaggatcaagacaacagtgattacttgttcaatcaacctgaaattccacctctaaagcttgaaggacacgaagatgcttcttctgaagatggagattccaaagtgtatcttcctgaccttggaaagggcttgggttgtgtaattcaaacaagggatggaggctacttggcttccatgaaccctttggatattgctgtggctagaaaagatgctccaaagctagctatgcagatgtcaaggccttttgtgttggcatcacaccaatccttgacagggttcgagttgtttcagaaattggctggcattggatttgatgaactcagctccaaggttttgtccttaatgcccatagatgaaatgataggcaaaactgcagaacaggttgcttttgaaggcattgctaatgcaatcatacaaggtaggaacaaggaaggagccagttccagtgctgctagaatagtttcttacttgaaaagcatgggaagtgccatgagttcaggaaggagagagagaataacaacaggactttggaatgttgaagaggagccactcacagcagagaagcttctggcgtttgccatgcagaaggttgagtccatgacagtcgaagcattgaaaattcaagctgacatggctgaggaattagaagccccatttgatatttctgcaaagaaaggagagggtgggaaggatcttttggcttcagttattccacttgaggaatggatcagagaccacagctatgctaaaactgttgcaggttctgatggggaaccagaaaaagtgacactcgtgttggttgtccaattgagagatccattgagacgctatgaagcagttggaggacctgtgatggtgctgattcatgcaacaagtgctgacacaaaagggaaggaggaggagaaaaggttcaaggtaacaagcatgcatgtggggggtttcaagttgacaagtgccataaagaagaatgcatgggacagtgggaagcagagacttactgcaatgcaatggttggttgcatatggtttgggaaaggcagggaacaagaaagggaagcaatcattggcaaagggacaacaagaccagttgtggagcatttcatcgcgaatagttgctgacatgtggctcaaaaccatgagaaatccagatatcaatcttggaaagtagtaattagcacctccattctattattaattaattatgccaaggaagtagtcttgcattcatgtccaagtgaaaggttgttcttgtctacaacacacctaagccaagccactgcagctacctataccatttgggaagatttatgaattcaagaattgtgtaaatgttgtgtcatcattagttgtttctgtaaaagtcaataaaatttctaagtcgtatataagacatatggtatttcaacgataaaaggtaggttttagctctaccaggtttcatgccatcaaaaaaaattccaaaaattttttctgtttttcttttcggcctgtctgtgcatatttgttaatttggtcggacaaaa

SEQ ID NO: 138445 - DNA, 289 bp, Glycine max
  unsure (1)..(289): unsure at all n locations
  Clone ID: PAT_MRT3847_96023C.1
acccacgcctccaatttaatcttctttatccttctttttttctcctataactcaaatattcactataacagaaaaccgacaatttttataaaatcttnccacccccatttatcatcattttcattattacactttcttaaaattctatcaaatattattccaaataacattacttccacaacaaaatcccttttctcctcaaaatcaaccctcttcacaataaaatcccatatctcatccacaatctcaaacccatttcttaatctctcttttcttttcacttcattca

SEQ ID NO: 138446 - DNA, 243 bp, Glycine max
  Clone ID: PAT_MRT3847_96024C.1
tggtgaagcaagagtgccctggacgagccattgttgggttatttggcaaagaactgctgcactgaatgagaggacaaagattgtagtagtacatggtttggtggtgaggtgttagtgctaggctgctagctgttagccatagcatcatttgcagtaatagcattggttttattaataataccaccgaatgtgacatgcagaattaatataatgttcaataagttccattcagtgattttcttt

SEQ ID NO: 138447 - DNA, 328 bp, Glycine max
  unsure (1)..(328): unsure at all n locations
  Clone ID: PAT_MRT3847_96025C.1
gtaagctncgaaattcgctcgaggcagcaaacaaacaaaccccccacccaacgcattcttcaatcttccccttcgcgtcttttgggtggtttggtttaggacatttcacagacaccgcctctcccctccattttccatttccattcttctctccactataaattctccttcactttctttctcgtaatcttcgcctcccttcaactccaccctctctccttcttacctccttgaccatgatgagtttcgccatgtattcattttctgcgttaaaccctatactctcccactcttcatttctctttcccattcaccaggttcccttcat

SEQ ID NO: 138448 - DNA, 556 bp, Glycine max
  unsure (1)..(556): unsure at all n locations
  Clone ID: PAT_MRT3847_96026C.1
ggctcccaagggttcaatctttttggctgcgttctgcttctcagccctgacactgagtctatgacttgctgaggataatggacttgttctaaacttctacaaggaatcatgccctcaggctgaagacatcatcaaagaacaagtctagcttctctacaagcgccacaagaacactgctttctcctggctcataaacatcttccatgactgtgctgttcagagttgtgatgcttcactgttgctggactccacaccaaagagcttgtctgacaaggaaacaaatataagctttgggttgataaatttcaggtacattgagaccatcaaagaagctctggacagggaatgcccatgagttgattcctgtgctgatatcctcattctctctgccatagatggcattgatactctaggaggtccccatatccctcttaaaacangaagaatggatggtagaatgagcagagccgatgtggtagagcagttcctgccagaccacaatgaatccatatctgcagttcttgacaagtttcgtgccatgggaattgacaccccc

SEQ ID NO: 138449 - DNA, 232 bp, Glycine max
  Clone ID: PAT_MRT3847_96027C.1
tgcggcggcttccgcgctcactgactcacagtacttggtcattccgcagtggccacctgtaacacggcactcatgtgctgtcagatggttaactacagcagcaagggatcagggaggagcggttatcttagtaaaacgccaggataaggttacgaatcagtaagtaagacgggtatgcaggtgtttgtccatcagctccggccccctgaagagtagcagcaaactggacact

SEQ ID NO: 138450 - DNA, 1686 bp, Glycine max
  Clone ID: PAT_MRT3847_96028C.1
gctggatcatgatgaaagcatcaacatcaccctttaacctaaagtattaaaatgttggtttattattattactcatagctcaaaacccaattttaccctaccaattaaggtctctcatacagtagtattttatttgcactacgtactggctactttatttatttaagcagaagcaggtgagtgagtgagtgagcaagagtgaagagcgaagagaatggctcccaagggtttaatctttttggctgtgttatgcttctcagcactgtcactgagtcgttgtcttgcggaggataatggacttgttatgaacttctacaaggaatcatgccctcaggctgaagacatcatcaaagaacaagtcaagcttctctacaagcgccacaagaacactgctttctcctggctcagaaacatcttccatgactgtgctgttcagagttgtgatgcttcactgttgctggactccacaagaaggagcttgtctgagaaggaaacagatagaagctttgggttgagaaatttcaggtacattgagaccatcaaagaagctttggaaagggaatgcccaggagttgtttcctgtgctgatatcctcgttctctctgccagagatggcattgtttcgctaggaggtccccatatccctcttaaaacaggaagaagggatggtagaaggagcagagccgatgtggtagagcagttcctcccagaccacaatgaatccatttctgcagttcttgacaagtttggtgccatgggaattgacacccccggcgtagttgcattgcttggagcacacagtgttggtcgaacccattgtgtgaagttgggtgcacccgtttgtacccagagattgatcccagcttttgaacccttgaccacgtccctcacattctgaagaagtgccctgatgccattccagaccctaaggccgtgcagtacgtgagaaacgaccgtggcacccccatgattctagacaacaattactacagaaatatattggacaacaagggcttgttgatagtggatcaccaactagccaatgacaagaggaccaagccttatgtgaagaaaatggccaagagccaggactatttcttcaaggagttttctagagccattactttgctctctgagaacaaccctctcactggcacaaagggtgagatcagaaagcagtgcaatgctgccaacaagcaccatgaggagccttaattgcttcccgcttaatttgggccttgaattttcttccccttctctatgtggaagaaatctgtaagatattatgcaaaaaataattaaggtgtttttctttaaatgggttggttgattggttcaatgaaccgatcaagaccacagcaggttcatggggatgcgaggattaagacgctttgttttttaatcttccgatgtcactcttgtttgttagtttgtttttttattttttatttcaataagtactgtgcaagtaggttagagttgggtagaagggcatgttcatggtgttaattactatgttatgtatgcatgtgagtgctgctatcgatggcaagatgtcaatgtatgcgtgtagtgctgttatcgatgagagtgaaaatgtttatgatatccacactaataaagctagcttgttcttgctacataataaataaatcatggcccacggtcattatacactgttaaaaa

SEQ ID NO: 138451 - DNA, 468 bp, Glycine max
  Clone ID: PAT_MRT3847_96029C.1
tgctgcctcctgcctgaagacgccatatatgggaagcattctcctttgatcggttttcctttcatatttttctgttttgtttaggtgccgctgctgctttactgtttgtgtgcctttgcatagttgtctacttggaagaagaaggttcagtgagatggtgaaggacaaattaaagaaacatgttctcactgctttcactcctaatggggattatgtggctattctgtctgccaatgaggtggccaagatttggaacacaaacactggacatttgttggcagagtggaagccatcagatggagatcatgatattcgttattcttgtattgcatgtagtttcattgggaaaaagcgtagaaaagaacagggaacttgcttattagctcttggcacaatcgatggaagcgttctagctgttgatgtttccactggtgagagaaaattgactaccagccattcggggggatt

SEQ ID NO: 138452 - DNA, 319 bp, Glycine max
  Clone ID: PAT_MRT3847_9602C.1
cttcagccactcttatattctctcttcgcgcaacaaccataagattatcttggtgtcctctcctcctcttcaattcttctccaagcccaaccgcacctctccccccccctaacttaacacccccttcacaccgcttccaactcaagctcaatccgaacagaccaccctatggccccctcaaacgcccacacagaccatgacctcaccgcaagagatgccaccggaaaacaaattaacctcggcgaccaccaacgacaggtccatatcactgccaaagacgcctcacaaagtgcctcgactacattcaaaaaacactgag

SEQ ID NO: 138453 - DNA, 239 bp, Glycine max
  Clone ID: PAT_MRT3847_96030C.1
tgcactcagcatcttaatggttctgtctcttgggtagctgatggaagattctgtcttagtttgacttgcatggacagccagtatgggacgtatatatactagttcgtcagatgatgcacttggaggagatagtagtccatggaggactcttctgcactgggctactaatacagacaagagttcatataatggcgcttgttctaggcgggatacttcttcgaaaggggaaaatagttcaa

SEQ ID NO: 138454 - DNA, 510 bp, Glycine max
  Clone ID: PAT_MRT3847_96031C.1
cggctgcgagaagacgacagaaggggagagtgatcgaaaatggagataagaaaaatgttgggggttgttgtggtgacactaattatgtttaacaatggtgagagtgagagccaacacagtctcgttgccaatggccttggtgccactcctccaatgggatgatagctggggtgaaatgatccgggatgtcgatggaaatttggtagctcataaaacaaaattaatttccttctggcatcaaagctgttgcagattatgttcatgggaagggtcttaagcttggcatttattcagctgcagggtattttacttgtgcaaatgtgatgcctggttcacttggttatggagagcaagatgccaagactttcgcatcatggtatgctttcaaaagcagatatgaatgaagtttatgctgattatgcaagacctggtggttggaatggtatgaatttcactatgctctctttattttgtctagatgatgatgactagtgagagtttttttgtttt

SEQ ID NO: 138455 - DNA, 2322 bp, Glycine max
  unsure (1)..(2322): unsure at all n locations
  Clone ID: PAT_MRT3847_96032C.1
aatagttattttaggaatttgtctttttgaatcagtcagttgtataagctgccttgatttcgtcatcttctgtctttgcatgcttaatgaagagttgtcaaggcccttctcttggggttctgtagtacttaagttagttatgatcttcccttttgctttaagcacatactatctgcatgttactttgtatttttcgtccacccaagcaagctgatgtcccatcttttggaaatttgttttcaaaatattctgaactatactgcttcccacgcgtccgtacggctgcgagaagacgacagaaggggagagtggagtaaaaaaaaagagcagtgtaagaaattagaaagggcgaaaggcgcactttatctgaaagcaaaaaccctacctagggtcaaccgtgacgccacaatcgccttcggcatctttgcaacgggatcaggtgctcctcgtccttcacgatggcgggaactgaagccaaaaaaactgaatccaaaaaacctgccgctaagcaatccggtgcgaagaagaaggaggtgaagaaggaaactggcttaggtctcacgcatcggaaggcggagaacttcggagagtggtattccgaggtggttgttaatgcggaaatgattgagtactatgatatttccggttgctatattctgaggccttggtcaatggcaatatgggagatcatgcaagagtttttcgatccagaaataaagaaaatgaaaatcaagaactgctacttcccattgtttgtgtctcctggagttctgcaaaaggagaaggaccacgttgagggttttgctcctgaggttgcttgggtgacaaagtctggggaatccgaattagaaattcctatagctattcgtcctactagtgaaacagtgatgtatccctactactctaagtggataaggggacatcgtgacttgcctttgaaacttaatcagtggtgcaatgttgtaagatgggagttcagcaaccccactccattcatcaggagtcgcgagtttctttggcaagaagggcacactgcttttgcaacaaaggatgaagcagatgcagaggttcttgagattctggaattatataggcgtatatacgaagagtatttggcagttcctgtcataaagggtaagaaaagtgagcttgagaagtttgctggtggactctacactaccagtgttgaggcatttattccaaacactggtcgtggtatccaaggtgcaacttctcattgtttgggccaaaattttgctaaaatgtttgagataaactttgaaaatgaaaagggagagaaagcaatggtctggcagaattcatgggcctatagtactcgaactattggggtcatggtgatggttcatggtgatgacaagggattggtactacctcctaaagtagcatcagtacaagttattgtgattcctgtgccttacaaagatgccgatactcaaggaatctttgatgcctgttctgcaactgtgaatacattgaatgaagcaggtattcgcgctgagtcagattctagagataattattctcctggatggaagtattccaactgggaaatgaaaggggttcctctaagaattgaaattgggccaaaggatttagcaaataagcaggttcgcgctgttcgacgtgataatggtgcaaagatagacattgctagtgctgatttggttgtggaaataaaaaagttgctcgatactattcaacagaacctgtttgatgttgcaaaacaaaaacgagatgaatgcattcagatcatacacacttgggatgaatttgtgcaagctttgaaccaaagaaaaatgatcttagctccttggtgtgacgaggaggaggttgaggctgatgtcaaagcgaggacaaagggtgagatgggagcagctaagactctttgcagtccctttgatcagccagaactcccagaaggcaccaagtgctttgcatcaggaaagcctgcaacaaagtggacatactggggaagaagttactaggctactggctgttgattgtggtattttctggaattaatttggtatttaatggtaccttgtacgaatttgtggatcacacagatattagttttcttctcttgggaatatttttcaactgatagttttactttgatttttatatggtgcaatatttattttggattaaaagatgagtattacatttgttgccgtccaaaaaaaaaaaaggagcgtattggactctcggtgtgaggtatatgtctgatattcttgcataaaccagtatgttattttaatggtttaagctgcttataaaatnttgatgttcattttgcta

SEQ ID NO: 138456 - DNA, 499 bp, Glycine max
  unsure (1)..(499): unsure at all n locations
  Clone ID: PAT_MRT3847_96033C.1
agcaggtattcgtgctgagtcagattctagagataattattctcctggatggaagtattccaactgggaaatgaaaggggttcctctaagaattgaaattgggccaaaggatttagcaaataagcaggtcatcaactttgccagtgttttatcaattctcatatttgtcattttgcttccacactgttagtttttcagtgaacaccaaataaatctctttgaattttgcataggttcgcactgttcgacgtgataatggtgcaaagatagacattgctagtgctgatttggttgtggaaataaaaaagttgctcgatactattcaacagaacctgtttgatgttgcaaaacaaaaacgagatgaatgcattcagatcatacacacttgggatgaatttgtgcaagctttgaaccaaagaaaaatgatcttagctccttggtgtgacgaggaggangttgaggctgatgtcaaagcgaggacaaagggtgagatgggagc

SEQ ID NO: 138457 - DNA, 685 bp, Glycine max
  Clone ID: PAT_MRT3847_96034C.1
gatggttgagagagagctttatggcagggagattatgaatgttatagcatgtgaaggttctgacaggattgagaggcctgagacctacaaacggtggcaggttaggaatatgaaggctggtttcaagcagctaccactgaatgaggaattaatggccaaatttaggagtaagttaaaggaataccacagagattttgtcttagatgaaaataacaactggatgcttcaaggttggaagggccgcattttgtttgcttcctcttgttgggtgccggcataatgagatgctactgtgactcggttcagaattcatactatactaaaggttctgatattcttggtctggctacctacttactctaccttcagcttttgtgatgaagattgtaccaagctttgcaccaagttccttggtaaaattatagcatcacttttctggtagattaagacttgtgaaggtaatacaatttcgttagtgatattgataagaagggcatattagtcatcagagtaggagggccattatagcatgtttgcccaagtacataaaatcctattattgagttattttctctttaaccaacatgtatcaggcatttcacgtccttctatttaagtttgttaatttcttttacaggatacttgtcttttgagacaaattagttgagaagatgtgattaatttg

SEQ ID NO: 138458 - DNA, 1800 bp, Glycine max
  Clone ID: PAT_MRT3847_96035C.1
ggaaattgtttgtaatgaacgctgtagttcacagagtgaaacagtgaaggctgtagagccaggtggagtgaagggtcttcctaataatcgagcgacttaccaggaaacagtagatttgaggaatcttctgatgatgtgttcacaatctgtgtatgccaatgacatcagggctgccaatgaattgctaaagcagattaggcaacactcttctcccattggggatgcatcacagaggttggctcattactttgccaatggcctcgaggcacgcttggttggggatggtacaagtacccaaggaatgtatacttttctgagctctaagaacaacactttttctgagttactcaaggcataccaggttttcagttcctccagccctttcaagaagtttgcatatttatttgaaaatacaatgattatgaaagcagctgcaagtgcagaaaccgtccatattattgattttggcatcctacacggtttccagtggccaatgctcattaggcttttgtcaaatagggagggtggacctcccaagcttaggatcacagggatagagtttccccaacctggctttcgtcccacagaaaaaattgaggaaacgggtcgccacctggctaactattgtaagcgttacaatgttccctttgagtataatgccatatcatcaaggaactgggaaaccattcagcttgaagccctcaaaattgcaagcaatgagctagttgctgtctactgtcaccagaggtttgagaatttactggatgagtgtactattgaagtgaacagtcctagaaatgcagtcctgcatttgatcaggaagataaatccggatatttttactcactccatcactaacggatcatataatgcccctttctttaccacgcggtttagggaggctctctttcattattctgccatttctgataagaatgacactgtcatatctcgtgaaaacgaaaggaggttgatggttgagagagagctctatggcagggagattatgaatgttatagcatgtgaaggttctgacaggattgagaggcctgagacctacaaacggtggcaggttaggaatatgaaggctggtttcaagcagctaccactgaatgaggaattaatggccaaatttaggagtaagttaaaggaataccacagagattttgtcttagatgaaaataacaactggatgcttcaaggttggaagggccgcattttgtttgcttcctcttgttgggtgccggcataatgagatgctactgtgactcggttcagaattcatactatactaaaggtatgattccaagaatcagtcattggctttaactctatccacttctttttttccctggttctgatattcttggtctggctacctacttactctaccttcagcttttgtgatgaagattgtaccaagctttgcaccaagttccttggtaaaattatagcatcacttttctggtagattaagacttgtgaaggtaatacaatttcgttagtgatattgataagaagggcatattagtcatcagagtaggagggccattatagcatgtttgcccaagtacttgcaatcctattattgagttattttctctttaaccaacatgtatcaggcatttcacgtccttctatttaagtttgttaatttcttttacaggatacttgtcttttgagacaaattagttgagaagatgtgattaatttgaaacagatgatgactatgttccgtttgttttttccggtgatattcttgcttgcagttttgtatttctatatatagcaacttatgtg

SEQ ID NO: 138459 - DNA, 692 bp, Glycine max
  Clone ID: PAT_MRT3847_96036C.1
actgtctcgatatctcacacctcactctccttatctcacctatagcagatacagattagtggatatcacgttcaggctctacattactccatccttcttcatctctgtgatctctgatgaagacgctgcgagtgtaaaagctggcaataatccaggacatgagctagggaacgcacaatgccttattcgtagataagaaaatgatgatactgatagaggcattactccagcccaatgtgaatgcacgagtgttcacgctgatgacccttctcaactcatcaacgccgagaaactctgcgcgtcgcatgctgctgcgactgccaccgccgctgacaagaaggatcctcatcaacatatccatgcgattcacctccctatcgagccgcttcctccgcttcatgatgcgatggatgacagataggaatatgatcaagcaggacttatagatgccaccaccagtcccatgtggattattacgtagttcgagccaatatccgcgactcttcattgaacagaactcattcccaaccggcgtgactacctgtactcatgttactgcacgatgatatgcagctgatcctactgaagaacatcgtatctaccgccatgactcgcttcatctctcgatcaatgtgcttatcctgcaactgatgcatttacacctggcccgccgctcgaactcccacctatta

SEQ ID NO: 138460 - DNA, 771 bp, Glycine max
  Clone ID: PAT_MRT3847_96037C.1
atctccatgtttatcatcttttttccccttaaccctcctctcttttccttcaactgttgcttccaaaggtttgtaaatattattttccaaagatttgggcatttcatcaaccctgggatgaaattttccagcattattctgaactgttgcatttccaactggtcgggactcaccccagattcctctcctatcaacctttctagtatcaatgcccttatcctgaagcctttccttaccatcaggccaggtgtcactacccttagtaaccaatctaacagccccatcattctttctgtgtcctgcagttgtaaacttttgagccaattgattctcagctcctccatcattatccctaatcctcttgtccaactccaggaggaatttagaatccttgttttcctcagccaaatgattattctctctaaccttctctccattgttactggcaaactgtttggtgagtttatcctcaagtaaaatagccttcttatcatttggtttgatttccttttgatgtaatttacctgcattgggaccctgagcttgtcctggaaagtctttctcaattgcagcactggttttgctcttatctttatctctgttcttgtccttgtctttctttttttctctatgtttttcttttttgtccttcttttccttacgctttccatcccttccttctttgtctctcttttccttcttctcttcgtctctcttcccttttttatgctttttttctctgtgcttttcccctgcagcccgggggatcca

SEQ ID NO: 138461 - DNA, 409 bp, Glycine max
  Clone ID: PAT_MRT3847_96038C.1
cctacacccaaactctaaaattttaaattttaaattcaattgccttggttgaccttgatctgatccggggccccgaaaacaccaaatttcaaattggttaaggaaaacaacaggccccgtgaactttccctctttctatgtggtggacaccctcccccacggataggggtgaaaaacaaaaaatgaccctgtccagttccctttgttggggaaggggagcccccccctcgaacgggaaaagaaaaaaaaccttttcataaactaaagatttgggtgaggggtattggggggtcccttttgaaagccaacagacaggtttagtttccccacacctgggggttaaagattttgggttcacaaattttcttaggagggccaacttggggcttaaaaacaacaacaatttaaa

SEQ ID NO: 138462 - DNA, 474 bp, Glycine max
  Clone ID: PAT_MRT3847_96039C.1
gcgtacgccagctacgtattctcgtaatgcggctgcggggcgctagtcaaccttcaagaaatggcacagatgttcttttggatctattatctattggatcagtttctgcatctattgaatcacctgtacaaagaaactcatctacaatagacattgtcccccaaaccaagtaaaccggcaccactttcaccattagatgatctatcatcactttcactttcttcaagatcaacagaaaacgctggagctgctccctcaatggatttgctagatggattttcccccagcccaccaacagaaggcaaaatttgtctagcaagcatttgatttataccttgtctaagtactaattctctactcttctcttgtcttgaatagaaaacaatgaactggtttatccatctataactgcatttgagagtagctccttgaggttggtgttcaatttctcaaaacagccttgaaactcgcaaa

SEQ ID NO: 138463 - DNA, 476 bp, Glycine max
  Clone ID: PAT_MRT3847_9603C.1
aacgcctcgagaggatattgtaggctagcaaggctgaactaatcaccaacatgtcccattcactttcaagtactaatgtgcaggaacaggaaggaatgcagaacccatttgaattcagtgaagacaagatcctggatgatgtttacagaacccatttcgattgttttgagaagtgcgatgtgacatctctgcaaacggttgcttcaaatgttatcaaccactcgatcgatatctcagagaaggtcattagtaagggtgaccaactcagggaacagttcagtgaagaaattaacataagttcccaacaacttactgccaaactgaggcggattgcttacctgatgatatgcactcctcgtggtgaacacttcgggcatcgcacaacaatgttgattctagaacaactgaaacattattcttgggatgcaaaagtattgatagttcaagcagctttttccctagaatatgggaaaatc

SEQ ID NO: 138464 - DNA, 283 bp, Glycine max
  Clone ID: PAT_MRT3847_96040C.1
aaaaaaaaaaaaagaaacaaaatttaaatttaaaaagggcaaagctcaaaaaacccccagcccacaggggggaggaaaaaaaggccctaagcccccccccccttgagggggttgaccaccccccatgggaaaaaagggcccctttttccaaaggggcccattgccgcagtttttaaaaacccggtatttcccccccctttgaaaacaagggggaggggaaacatacccggcccgaaaaaaaaggtctccctcacaaggttaaggaaccccttgggggggatct

SEQ ID NO: 138465 - DNA, 655 bp, Glycine max
  Clone ID: PAT_MRT3847_96041C.1
cggacgcgtgggtggacaacacatatttccggacacgtagagatcattcagttgggtgttatccatcaatcaatcataacagttgttgttgttgttgtggttgttgtggttgttgttgttggggatgggatcgtgcctctcggtgtcgggggcatcggcctccgtagatgcttttgatgaatcatcttccaattccagttccagaactgcctctgattataacatggaaatgcggctccacagagttcctggcagattattcttgaactgttcgtcccaggttgcttccttgttctgtaagcaaggtcgcaaagggatcaaccaggatgccatgcttctctgggataatttctcttcaaacaaggacaccgttttctgtggtgtttttgacggccatggacctcatggccatatggttgcaaagaagctcagggattccttccctctcaagcttattgctcaatggaatttgcttcatcctaacaacaatagcagcagcaacaacaacagcgatacaccttgtgcggttgccccgggtaacattggtacgctcagagactcctttgtgaaggcttgcaaggtgatggacagagagctgaaagtgcagcatcagatagattgctcgtgtagcgggagcacgggtttgacgttgctg

SEQ ID NO: 138466 - DNA, 592 bp, Glycine max
  Clone ID: PAT_MRT3847_96042C.1
gcggcgctcaggcggcgttgggatccgcctctctgatggcatttggcgttgttgttttcttttggtgaggtatatgtttgaaggccacatgggacgaaaatgaagaccattctccggttttgattcccaatttcattttgattctctgaagttgaataatatttttttattattcccattatgtaaacaaattttgttgttgatggtttgatttcacaaaatttgattgattttgttcatggtttatgcactgcatctgttttaccctctctatctgtgtccaatgtcgatggcagtggagatataactgatgcaaagatccataaaggttgacttaccagcccattgcaccgattttgaaatttgccatgggtcaaatggacctaccgaaatccccaaatatataagtttttaatgcaattgtgttatttgtatgtgtagagtgaattggcaagtgatgatttattgttaaaccgcttattgatataccgaaaagctgtgactcatcaccacctcgccatcacccacacctccgctcctcttccctacccccctcccaacgccactctcttctgatatctatcctttcaaa

SEQ ID NO: 138467 - DNA, 788 bp, Glycine max
  unsure (1)..(788): unsure at all n locations
  Clone ID: PAT_MRT3847_96043C.1
ggatcacaaggttttggtgttttaaaggattaaagtgtaaaataatcatatttgtacaagacaggttcaactactaccacaacaaagtaaacaaacaagtctaagaaacaggaaaatcaacttcaatgctctcagttttaagtttgaacccagctttcgatcattattctaggatattaaattatacaggcttctgtactgttaagtatatgctagtcttgcaattgaactctttgatgagaatggattgaatacaacaacaaccatgccttattccactataggggatcagatacatgtatcaattggtgccattgagatctatcagaaaacatatatcaaaatgcagaatggatggaatatattttaataatgatatcaattctagtattgtggtaagagtaagaccatcaagttttgaaagggataagtcatctctggttttcagttttggtttgggcttttcattcttctgctcattcctcaaaagcttaatctaagcaaatttaaaatgtttggctagaaggctagaacacatactattaggaagtgaagtccagtaattctctttttggacttgatgatgatatattgctacttcatcgaaaccatttttctttcttttgatccatgaatatcatttgtgcccctggaagttgctttacaatcctttgtacaacaaaacanactgttgattaaataatggttttaaagtcgtcattatctcttataccttgccaagattagataaataagaatgaggctttttaggggttaaaaagcaatca

SEQ ID NO: 138468 - DNA, 424 bp, Glycine max
  Clone ID: PAT_MRT3847_96044C.1
cggaaaagcagtggtggcttgtccctattcattgaatgaatcgataaggtgtccatatctatcatcaaatcattcaaatgcacctgttgttgtgattgtgaaactaaaacaccgtatcttatcgatcttcaaacacagcaaaacagtggcatcagttattttgaggttgttttgttgggtggcggcggagagtggaagctgctaattaaaggaaggaaagcattgctgtgtgtcagtggaatacaactactacagttacggttagctcgctaaccctttacaatggccacaactcaggaacaaaaagccacgccaaacattctcaataacaccaccaccaccacttcttcttgggctgatcccctccgcaaccgaccctccgtcgccaccgtcatctccgccgttgactccttctccgatcctc

SEQ ID NO: 138469 - DNA, 3855 bp, Glycine max
  Clone ID: PAT_MRT3847_96045C.1
cggctcgagcggctcgagcggctcgagcggctcgagctattctccaaataacacacagcgcaactttcgtcttctatccccaaccctaaccagttagcgaacgatcgattagagtttcgacgcaggatgagttcgaaagagcgaagccagcagccgcattcgagggttcctcgtcgtcaggagtggattcgtagagatgttggtggttgctccaatccaagaaagcccaagaagggatcatcttcgaattcgagggaggagtctaatttgcctcagctgctgcaagagattcaggacaagctcgtcaaaggagctgtcgaatgcatgatttgttatgacatggtgcgcaggtctgcgcctatctggtcttgctccggttgcttctctatctttcacctcacttgtatcaagaagtgggctcgtgcacccatttctgtggatttgtccgttgagaagaaccagggcggcttcaattggcgttgccctggttgccagtctgtgcagctcacttcatccaaggatattaggtatctatgcttctgtggaaagaggccagatccaccctctgatttgtatctcatgccacattcctgtggagaaccatgtggcaagcctcttgagagggaccttcaaggggataaggagcttctttgccctcatctttgtgtcttgcaatgccatcccggcccctgtcctccttgcaaagcatttgcccctccacgtctgtgtccttgtgggaagaaaaatattaccactcgttgctctgaccgccagtctgttcttacctgtggccagcgctgccaaaagcttcttcaatgtggccgtcatcgctgtcagcaaatctgtcatctgggtccttgtcatccttgtcaagttccaatcaatgcctcttgcttttgtgcccaaaagatggaggtaattctttgtggggagatggctgtcaagggtgaaatcagagcagatggtggagtattctcttgtggttccacttgtcaaaagaaacttaattgtggtaatcatatctgtatcgagacttgtcatccaggtagctgtggggactgtgaattattaccatcccgtattaagacatgctgttgtgggaaaactagattggaggagaaacgccacagttgtttagacccaattcctacctgttcacaagtatgtggcaagtaccttccttgcgggattcatcattgtgaagagccatgccatgctggggattgttctccttgtctggttctagtttctcagaagtgtagatgtggctcgacttcccgaactgtggagtgttgcaagacaaaaatggaaaatgagaaatttacttgtgaaaggccttgtgggcagaaaaagaattgtggaaggcatcgatgtagtgaaaggtgttgtccactttctaatccaaataatattctaaatgcagattgggatccacacttctgtcaattgccgtgtggaaagaagttaaggtgtgggcagcatgcatgtgaatccctgtgccacagtggtcattgtccaccttgtcttgaaactatatttactgatttgacatgtgcttgtggtaagacttcaatccctcctccattgccttgtggcacaccgcctccctcatgtcagcttccatgttcagttcctcagccttgttggcatccagcctctcacagctgtcattttggagattgccctccttgttcaatgcccatagcaaaagaatgtattggtggacatgtagttcttaggaacataccttgtggttcgaaggatattaaatgcaataaactctgtgggaagaccagacagtgtggtttacatgcatgtggcagaacatgtcacctccccccttgtgataatctgtcagctgtgccaggtatccgagcctcttgtgggcaaacatgtggtgctcctaggagagactgccggcatacatgtacagctccttgtcacccttcaactccatgtccagatacaagatgcaaattccctgtcacaattacttgttcttgtggccgaataacagaaaatgttccttgtgatgctggtggcagttgtgctaattatgatgctgatactgtacatgaagcttccattattcaaaagttgcctgtgcttcttcaacccgtggctgcaaatggcaaaaaagtccccctcggacaaagaaaactgatgtgtaatgatgactgtgctaagttagagcggaaaagggttcttgcagatgcttttgagattaccgctccaaatctggattcactccattttggtgagaattcggttgcttctgaattgctggctgacatgttgagacgtgattctaaatgggttttatctgttgaagagagatgcaagtttttagtacttggcaagagcagaggaaatgcacatggtccaaaagtccatgttttctgtcctatgttaaaggacaaaagagatgcagtgagggtgattgctgagagatggaagcttgcagtgaatgcagctggtcgggagccaaagcatttcgtagttgttcatgttaccccaaaatcaagagctcctgctcgtgtgctagggtttaagggtactacaactgtaaatgtaccccttcctccggcatttgatcctttggttgatatggatcctcgacttgttgtctcttttatagacttaccaatggatgcagatattagtgcattggtgttgagatttggtggtgagtgtgaacttgtttggttaaatgacaaaaatgcattggccgtttttaatgaccctgcccgtgctgcaactgcaatgaggaggttggatcatggtacggtttatcagggagctgtggtggtggttgttccaaatgtcggggcatcagtagcatcttcagctaccaatgcctggggaggatctgggacaatgaaaggaggagcactggcagcattaaagagtaatccatggaaaaaggatgttattcaagagccaggttggagagaagatgcttggggtgatgaggagtgggctactggttctgctaatgtcaaattgcctattcagaagaaagaagcccgaatatctgcttcagtaaatccttggagtgtcctaaatcaagaatcgtcttcaagttcatctgttgcagccattaaaattgatggttctaggaaacactctgaaagtagtgttatcacaaagttggagcctcgtgatggtggttcaaatctaggagggcagcctgcaggaaactttgatgctttggaagcttctgatgtagtagatgattgggagaaggcttgtgaatagcaaggagtaaacatttttcattttattttgttgagaaggaggcagattttgactagtgaaatgtctaaggctctttttgtccactagatgtatctcttttcatgttttatccccctgattttaatcaatttcgatgttattctaactagttggtgccactgttgagataatatctgacattctaccctagcttttgagactgatagaagaagggatgtgaatgtttaccacaaataggtatgttaaaactcattttataacctttatgcttatattgtactcaaattttggtttgctgtaagctctgccctcaatttgggtacacatctcaattacaaaacagttcaaagttaattttatcacaatcaattctactcaactttaatacacgggcactaaatatttataagtattaaatattattggacttggtttatcaaaacctggaggggatgggatgttgtatatgatattataagttggtggcttggctggcttccatgaaaatagattacttgaaatgtggaatggagcatatgagaaagaccaatagtttgtctcactgcaaaaggatgtcaattttgaatctctggaagc

SEQ ID NO: 138470 - DNA, 471 bp, Glycine max
  Clone ID: PAT_MRT3847_96046C.1
gacaccatgctgtagccgtagatcacccacaacacaccgaccagaccagcgacaccgaagcactgggtgaacagcgagagcatgttttttgcccggaccaggccgccgtagaacagcgccaggcccggcaggcacatgaacagcaccagcaccgccgcggtgatcatccaggcggtgctgccggtattgagggtcggggtgtcggctgcttgagccacgggtgctatcgcaccgagggccagcagcagtaaaagggatttgccaggtagacgattgaccattattgaagctcctgcaaaaagaatggggatgtctggcagcgagcaatgtgagagtggacgggcctcggggcctcttcgaatgatgagcgtgcaaataccgccgtccctgtcagggcccgtcacggctgagcacgctctctgcaggagccagcttgctggcgatgaggccggtgagccttgcatcgtctga

SEQ ID NO: 138471 - DNA, 116 bp, Glycine max
  unsure (1)..(116): unsure at all n locations
  Clone ID: PAT_MRT3847_96047C.1
gcacgcgtccgaacaggagtccgtacagntgtcaagggactaccaaagggggcttccgggtttaagtttcccaaactcgttatgcacctcccttaggaatccacaattcatcttcc

SEQ ID NO: 138472 - DNA, 262 bp, Glycine max
  Clone ID: PAT_MRT3847_96048C.1
gtacaagttgctcaccatcatatttaaatatgcgtattacactttttgttttcatgacgactatatcgatggagaatcactcttatctcaagcacgtcatgcataccttgacgtgctgggactcttcgcagcaaccatccattgatcgattgacatggtctacccgccctgacaacgctcgtcacttcggcttcaatgctaaacatggcaacctaatcaacgtcctcgtgttatgaggggtggccgcaagacatgatttccc

SEQ ID NO: 138473 - DNA, 590 bp, Glycine max
  unsure (1)..(590): unsure at all n locations
  Clone ID: PAT_MRT3847_96049C.1
cccgcgtccgcgcgcttgctgtataacctaaccatgcgagccagcctgcactccaagtgcacgtaaaatcgcacgtttacggtttttggttctccatgacctgtgtcgtgtgagagcgtgttacattcctcgctttgactttcggtctcactaactttgaccgttaatttcagtttttctcgcccacctacaggggaaagttactgttggctgatcttaatatggcgcccagtccaagagtggcatcggcctttatggcaatgtccaatctcgggattgatgaatcaataggtaagccagtgttgaagaaactgcttaaactgtgagattagaactgggcactcattgaagaagagagctactgggctctggctgatgctatatttgacgaggaacaaattatggtgatcgagccagaccttaatattaaaaacaaggactgagtagtgcacgatgcagaagctcatactcatgacgaacctgctcggactttgaagagggagcgtttcagaggaaatgagggtcaatctttgcgccctctgactaacagtggccccagctcagctgcatttncattgacaacgcctaag
